(19) United States
(12) Patent Application Publication
(10) Pub. No.: US 2004/0014955 A1
(43) Pub. Date: Jan. 22, 2004

(54) Identification of essential genes of cryptococcus neoformans and methods of use

(76) Inventors: Carlos Zamudio, La Jolla, CA (US); Alexey M. Eroshkin, San Diego, CA (US)

Correspondence Address: PENNIE AND EDMONDS, 1155 AVENUE OF THE AMERICAS, NEW YORK, NY, 100362711

(21) Appl. No.: 10/320,797

(22) Filed: Dec. 16, 2002

Related U.S. Application Data
(60) Provisional application No. 60/341,261, filed on Dec. 17, 2001.

(51) Int. Cl. C07H 21/02; C07H 21/04

(52) U.S. Cl. 536/23.1

(57) ABSTRACT

The present invention provides C. neoformans genes that are essential and are potential targets for drug screening. The nucleotide sequence of the target genes can be used for various drug discovery purposes, such as expression of the recombinant protein, hybridization assay and construction of nucleic acid arrays. The uses of proteins encoded by the essential genes, and genetically engineered cells comprising modified alleles of essential genes in various screening methods are also encompassed by the invention. The present invention also provides methods and compositions that enable the experimental determination as to whether any gene in the genome of Cryptococcus neoformans is essential, and whether that gene is required for virulence or pathogenicity. The identification of essential genes and those genes critical to the development of virulent infections, provides a basis for the development of screens for new drugs against C. neoformans.

[0001] This application claims priority to the U.S. provisional application serial No. 60/341,261, filed Dec. 17, 2001, which is incorporated herein by reference in its entirety.

### 1. INTRODUCTION

[0002] The present invention is related to the identification of nucleotide sequences of essential genes of Cryptococcus neoformans, and uses thereof in the development of drug screening assays.

### 2. BACKGROUND OF THE INVENTION

[0003] Cryptococcus neoformans is an encapsulated fungal pathogen that is the causative agent of cryptococcosis, a life-threatening meningoencephalitis occurring in immunosuppressed patients, particularly those with HIV infection (e.g., see Harrison (2000) J. Infect. 41:12-17). In addition, particular C. neoformans varieties, despite conventional therapy, are associated with significant mortality in immunocompetent individuals and not infrequently can lead to blindness in survivors (Seaton et al., (1996) Q J Med 89:423-428). C. neoformans usually grows in a yeast form on most rich media and in human tissues, and its genome is normally haploid.

[0004] C. neoformans appears in at least two varieties: C. neoformans var. neoformans with world-wide distribution and responsible for the vast majority of HIV-associated infections; and C. neoformans var. gattii confined to the tropics and subtropics which causes the above-mentioned infection in immunocompetent individuals. C. neoformans varieties have very large capsules, which comprise the capsular polysaccharide glucuronoxylomannan (GXM), that serve as the primary virulence factor for infection. Acapsular mutant strains produced by several laboratories have been found to be avirulent (e.g., see Kozel et al., (1971) Infect. Immun. 3:287-294; Kwon-Chung et al., (1986) Infect. Immun. 51:218-223). C. neoformans is classified into four distinct capsular serotypes, A-D, based on the composition of the capsular polysaccharides of each serotype (e.g., see Cherniak, et al., (1998) Clin Diagn Lab Immunol 5 (2):146-159). C neoformans var. neoformans comprises serotypes A and D whereas C. neoformans var. gattii comprises serotypes B and C.

[0005] Cryptococcal ecology and epidemiology are not fully understood. For instance, human-to-human transmission of C. neoformans has been reported only in exceptional cases suggesting exposure to an environmental source as the predominant means of transmission. In support of this suggestion, environmental isolates from particular niches have been demonstrated to be identical to specific, geographical clinical isolates. Environmental niches proposed as sources of human infection include avian excreta for C. neoformans var. neoformans (Currie et al., (1994) J. Clin. Microbiol. 32:1188-1192; Nosanchuk et al., (2000) Ann Intern Med 132:205-208) and debris from eucalyptus trees for C. neoformans var. gattii (Lazera et al., (1998) Med Mycol. 36:119-122).

[0006] Moreover, cryptococcal pathogenesis is poorly understood, including the mechanism by which C. neoformans disseminates from its primary site of infection in the lung to the central nervous system where it achieves latency and persistence. Cryptococcal lesions in patients dying of cryptococcosis often consist of massive extracellular collections of organisms, grossly resembling soap suds (e.g., see Casadevall and Perfect (1998) In Cryptococcus neoformans, ASM Press). Interestingly, the polysaccharide capsule has anti-phagocytic properties in vitro and numerous studies have established that the capsule inhibits phagocytosis and that phagocytic cells cannot ingest cells in vitro in the absence of opsonins (e.g., see Kozel (1988) Infect. Dis. 10:S436-S439). The combination of the anti-phagocytic property of the capsule in vitro and the vast number of extracellular organisms has been the basis for the assumption that C. neoformans causes disease by florid extracellular growth in tissues of susceptible hosts (Casadevall and Perfect (1998) Cryptococcus neoformans, ASM Press).

[0007] However, strong lines of evidence also suggest that C. neoformans is a facultative, intracellular parasite that proliferates as a free-living saprophyte and also as an intracellular parasite in phagocytic cells (e.g., see Feldmesser et al., (2001) Trends Microbiol. 9:273-278). Evidence in support of this proposition include: C. neoformans is capable of replicating in phagocytic cells in vitro if treated with opsonins (Lee et al., (1995) Lab. Invest. 73:871-879); C. neoformans resides and survives in vitro in an acidic phagolysosome of infected human macrophages (Levitz et al., (1999) Infect. Immun. 67:885-890); long-term-persistence of C. neoformans in a rat model of latent pulmonary infection is associated with residence of cells inside macrophages (Goldman et al., (2000) Infect. Immun. 68:832-838). The precise mechanism of surviving in and establishing a latent infection in phagocytic cells is not known; however, it appears to be different from other intracellular facultative parasites, such as Legionella and Histoplasma spp (e.g., see Feldmesser et al., (2001) Trends Microbiol. 9:273-278).

[0008] In addition to the polysaccharide capsule, several factors have been identified as being important for virulence including melanin production (pigment protects against intracellular free radicals in the macrophage and antimicrobicidal defensin peptides; Kwon-Chung et al., (1982) J. Bacteriol. 150:1414-1421; Doering et al., (1999) Med. Mycol. 37:175-181), phospholipase B (involved in phagosome membrane degradation; Cox et al., (2001) Mol. Microbiol. 39:166-175), cAMP-dependent protein kinase (D Souza et al., (2001) Mol. Cell Biol. 21:3179-3191), calcineurin (Odom et al., (1997) EMBO 16(10):2576-89), ADE2 (Perfect et al., (1993) Infect Immun 61:4446-51); and, urease (Cox et al., (2000) Infect. Immun 68:443-448).

[0009] Therapeutic treatment of C. neoformans consists of the antimycotic agents, amphotericin B and flucytosine, or the azoles, ketoconazole and fluconazole (Norris, et al., (1993) Infections in Med. 35-39). These treatments are often complicated by existing infections and such treatments have some very severe side effects. Intracellular survival within macrophages may likely explain the inability of current anti-fungal therapies to eradicate this pathogen. Clearly intracellular residence presents challenges with respect to prophylatic and therapeutic treatments, drug delivery and the efficacy of therapeutic agents against C. neoformans cells within macrophages.

[0010] A consortium effort to determine the nucleotide sequence of C. neoformans genome is underway. The understanding of the biology and pathogenicity of C. neoformans will undoubtedly be facilitated by the determination of the nucleotide sequence of the C. neoformans genome. This pathogenic yeast has a defined sexual cycle involving mating of haploid MATa and MATα strains, which allows classical genetic analysis. Molecular biology approaches, including transformation and gene disruption by homologous recombination, and animal models for studies of virulence are well developed.

[0011] However, a need for a better understanding of the ecology of C. neoformans and the epidemiology of human infection remains a challenge and solving it will be essential for primary prevention in high-risk individuals. There is also a growing need to develop anti-fungal compounds that are effective therapeutic agents against the free-living, saprophytic cells, intracellular cells and/or both. The present invention provides gene products that are essential for cellular proliferation in C. neoformans and which can serve as novel drug targets for discovery of therapeutic compounds for the eradication of this opportunistic pathogen.

### 3. SUMMARY OF THE INVENTION

[0012] The present invention is directed toward the identification of essential genes of Cryptococcus neoformans, the characterization of the gene products, and the construction of conditional-expression mutants and knock-out mutants of each of those genes. Accordingly, the mutants of the invention provide the experimental determination as to whether the genes are essential, and whether the genes are required for virulence or pathogenicity. The information provided herein forms a basis for the development of high-throughput screens for new drugs against C. neoformans.

[0013] In one embodiment of the present invention, a set of essential genes of C. neoformans which are potential targets for drug screening, is identified. Such genes have been identified by sequence comparisons with Candida albicans genes which have been determined experimentally to be essential for growth, survival, or virulence of C. albicans, and/or with Aspergillus fumigatus genes which are predicted to be essential or which have been showed experimentally to be essential for growth, survival or virulence of A. fumigatus. The polynucleotides of the essential genes or virulence genes of a C. neoformans (i.e., the target genes) provided by the present invention can be used for various drug discovery purposes. Without limitation, the polynucleotides can be used to express recombinant protein for characterization, screening or therapeutic use; as markers for host tissues in which the pathogenic organisms invade or reside (either permanently or at a particular stage of development or disease states); to compare with the DNA sequence of C. neoformans to identify duplicated genes or paralogs having the same or similar biochemical activity and/or function; to compare with DNA sequences of other related or distant pathogenic organisms to identify potential orthologous essential or virulence genes; for selecting and making oligomers for attachment to a nucleic acid array for examination of expression patterns at various stages of development and disease states; to raise anti-protein antibodies using DNA immunization techniques; as an antigen to raise anti-DNA antibodies or elicit another immune response; and as a therapeutic agent (e.g., antisense molecules) for acute and chronic infections. Where the polynucleotide encodes a protein which binds or potentially binds to another protein (such as, for example, in a receptor-ligand interaction), the polynucleotide can also be used in assays to identify polynucleotides encoding the other protein with which binding occurs or to identify inhibitors of the binding interaction.

[0014] In a specific embodiment, the present invention encompasses nucleic acid arrays (or microarrays) which comprise a plurality of defined nucleotide sequences disposed at identifiable positions in an array on a substrate. The defined nucleotide sequences can comprise nucleic acid molecules, preferably oligonucleotides, complementary to, and capable of hybridizing with, the nucleotide sequences of the essential genes of C. neoformans that are identified to be required for the survival, growth and proliferation of C. neoformans, and/or the unique molecular tags employed to mark each mutant C. neoformans strain. Preferably, the nucleic acid array comprises a plurality of nucleic acid molecules, wherein at least one nucleic acid molecule comprises a nucleotide sequence that is hybridizable to a target nucleotide sequence or a complement thereof, said target nucleotide sequence being selected from the group consisting of SEQ ID NO: 1-361, 1001-1361, and 2001-2361.

[0015] In various embodiments, the polypeptides or proteins encoded by the essential genes (i.e. the target gene products) provided by the present invention can also be used in assays to determine biological activity, including its uses as a member in a panel or an array of multiple proteins for high-throughput screening; to raise antibodies or to elicit immune response; as a reagent (including the labeled reagent) in assays designed to quantitatively determine levels of the protein (or its receptor) in biological fluids; as a marker for host tissues in which the pathogenic organisms invade or reside (either permanently or at a particular stage of development or in a disease states); and, of course, to isolate correlative receptors or ligands (also referred to as binding partners) especially in the case of virulence factors. Where the protein binds or potentially binds to another protein (such as, for example, in a receptor-ligand interaction), the protein can be used to identify the other protein with which binding occurs or to identify inhibitors of the binding interaction. Proteins involved in these binding interactions can also be used to screen for peptide or small molecule inhibitors or agonists of the binding interaction, such as but not limited to those involved in invasiveness, and pathogenicity of the pathogenic organism. The structure of target proteins can be studied by techniques like X-ray crystallography to yield data that facilitate the rational design of drugs directed against the target proteins.

[0016] In specific embodiments, the present invention is directed to nucleic acid arrays (or microarrays) which comprise a plurality of defined nucleotide sequences disposed at spatially addressable positions on a solid substrate. The defined nucleotide sequences can comprise oligonucleotides complementary to, and capable of hybridizing with, the nucleotide sequences of the essential genes of the diploid pathogenic organism that are required for the growth and survival of the diploid pathogenic organism, the nucleotide sequences of genes contributing to the pathogenicity or virulence of the organism, and/or the unique molecular tags employed to mark each of the mutant strains. The present invention also encompasses protein arrays (or microarrays) which comprise a plurality of peptides or polypeptides of defined amino acid sequences as disclosed herein disposed at spatially addressable positions on a solid substrate. The peptides and polypeptides on the array are capable of binding other biomolecules, such as other proteins, including but not limited to its cognate ligand, antibodies, or fragments thereof, nucleic acid molecules, carbohydrates, lipids, etc.

[0017] In yet another embodiment of the present invention, conditional-expression mutants of C. neoformans, including both haploid and diploid strains, which are constructed according to the methods disclosed herein, are provided. The present invention provides C. neoformans mutant strains in which an essential gene is modified by the introduction (e.g., by recombination) of a promoter replacement fragment comprising a heterologous promoter, such that the expression of the essential gene is regulated by the heterologous promoter. In one non-limiting example, expression from the heterologous promoter can be regulated by the presence of a transactivator protein comprising a DNA-binding domain and transcription-activation domain. The DNA-binding domain of this transactivator protein recognizes and binds to a sequence in the heterologous promoter and increases transcription of that promoter. The transactivator protein can be produced in the cell by expressing a nucleotide sequence encoding the protein. Accordingly, the present invention encompasses collections of C. neoformans mutant strains wherein each collection comprises a plurality of strains, each strain containing a different conditional-expression mutant gene.

[0018] In the present invention, the gene modified in C. neoformans is an essential gene, which is required for survival, growth, and proliferation of the strain. In a preferred embodiment, these modifications lead to the production of a rapid cidal phenotype in the mutant organisms.

[0019] The conditional-expression mutants of C. neoformans, including both haploid and diploid strains, are useful for the detection of antifungal agents effective against C. neoformans. Conditional-expression mutants can be cultured under differential growth conditions in the presence or absence of a test compound. The mutants can also be used to infect host cells, such as macrophages, in cell-based assay. The growth rates in culture or inside host cells are then compared to indicate whether or not the compound is active against a target gene product encoded by the conditionally-expressed gene. In one aspect of this embodiment, the conditionally-expressed gene is substantially underexpressed to provide cells with enhanced sensitivity to compounds active against the gene product expressed by that gene. Alternatively, the conditionally-expressed gene may be substantially overexpressed to provide C. neoformans cells with increased resistance to compounds active against the gene product expressed by the conditional-expression mutant allele of the target gene.

[0020] In yet another embodiment of the present invention, the C. neoformans strains constructed according to the methods disclosed are used for the screening of therapeutic agents effective for the treatment of non-infectious diseases in a plant or an animal, such as a human. As a consequence of the similarity of a target's amino acid sequence with a plant or animal counterpart, active compounds so identified may have therapeutic applications for the treatment of diseases in the plant or animal, in particular, human diseases, such as cancers and immune disorders.

[0021] The present invention, in other embodiments, further encompasses the use of transcriptional profiling and proteomics techniques to analyze the expression of essential and/or virulence genes of C. neoformans under a variety of conditions, including in the presence of known drugs, or when residing inside a host cell. The information yielded from such studies can be used to uncover the target and mechanism of known drugs, to discover new drugs that act in a similar fashion to known drugs, and to delineate the interactions between gene products that are essential to survival, growth, and proliferation of C. neoformans and that are instrumental to virulence and pathogenicity of C. neoformans.

[0022] Any or all of these drug discovery utilities are capable of being developed into a kit for commercialization as research products. The kits may comprise polynucleotides and/or polypeptides corresponding to a plurality of Cryptococcus neoformans essential genes of the invention, antibodies, and/or other reagents.

### 4. BRIEF DESCRIPTION OF THE DRAWINGS

[0023] FIGS. 1A-1H: A list of the SEQ ID numbers of the genomic and cDNA sequences of the essential genes of Cryptococcus neoformans of the invention, the encoded polypeptides, and the designations of the Candida albicans homologs. Table 1.

### 5. DETAILED DESCRIPTION OF THE INVENTION

### 5.1 Identification of Cryptococcus neoformans Essential Genes

[0024] 5.1.1 DNA Sequence Analysis of the Cryptococcus neoformans Genome

[0025] The present invention provides the nucleotide sequence of essential genes of Cryptococcus neoformans. The essential genes of the invention are identified by comparison of nucleotide sequences of Cryptococcus neoformans genomic DNA and the nucleotide sequences of known essential genes of Candida albicans. Prior to this invention, the essentiality of these C. neoformans genes with respect to the survival, growth, and proliferation of C. neoformans are not known.

[0026] The set of nucleotide sequence data used in the present invention has an estimated six times coverage of the Cryptococcus neoformans genome. The nucleotide sequences were annotated by software programs, such as Gene Wise (The Sanger Institute), which can identify coding regions, introns, and splice junctions. Automated as well as manual analysis and curation of the nucleotide sequences were performed to refine and establish precise characterization of the coding regions and other gene features. The nucleotide sequences of Cryptococcus neoformans essential genes were identified by comparisons made with the translated amino acid sequences of known essential genes of C. albicans. The identified C. neoformans genes display a 30% DNA sequence similarity, and/or a 35% amino acid sequence similarity with the corresponding C. albicans sequences. The nucleotide sequences of more than three hundred C. neoformans essential genes are provided in the attached sequence listing and cross-referenced in Table 1 with the identifiers of their homologs in Candida albicans.

[0027] To facilitate correlation of the nucleotide sequences of each essential gene with its corresponding amino acid sequence and other related sequences, the sequence identifiers have been organized into four blocks, each with one thousand SEQ ID numbers. Each block of SEQ ID numbers, which corresponds to a type of sequence, has 361 sequences with SEQ ID NOs., and 638 SEQ ID NOs. with no sequence which serve as place holders. Accordingly, the SEQ ID NO. for each of the four related sequences of an essential gene are separated by 1000. For example, SEQ ID NO: 1, 1001, 2001, and 3001, are directed to, respectively, the genomic sequences, the nucleotide sequences of coding regions with introns, the nucleotide sequences of the open reading frame, and the amino acid sequence of one essential gene, and in this example, the Cryptococcus neoformans essential gene is one that is homologous to C. albicans gene CaYLR147C.

[0028] To identify and characterize the essential genes of the invention, the inventors assisted by computer algorithms performed searches in computer databases and comparative sequence analysis. The results of such analyses are curated and stored in or displayed on a computer. Such computerized tools for analyzing sequence information are very useful in determining the relatedness of structure of genes and gene products with respect to other genes and gene products in the same species or a different species, and may provide putative functions to novel genes and their products. Biological information such as nucleotide and amino acid sequences are coded and represented as streams of data in a computer.

[0029] As used here, the term “computer” includes but is not limited to personal computers, data terminals, computer workstations, networks, computerized storage and retrieval systems, and graphical displays for presentation of sequence information, and results of analyses. Typically, a computer comprises a data entry means, a display means, a programmable processing unit, and a data storage means. A “computer readable medium” can be used to store information such as sequence data, lists, and databases, and includes but is not limited to computer memory, magnetic storage devices, such as floppy discs and magnetic tapes, optical-magnetic storage devices, and optical storage devices, such as compact discs. Accordingly, the present invention also encompass a computer or a computer readable medium that comprises at least one nucleotide sequence selected from the group consisting of SEQ ID NO: 1001-1361 and 2001-2361, or at least one amino acid sequence selected from the group consisting of SEQ ID NO: 3001-3361. In preferred embodiments, the sequences are curated and stored in a form with links to other annotations and biological information associated with the sequences. It is also an object of the invention to provide one or more computers programmed with instructions to perform sequence homology searching, sequence alignment, and structure prediction and model construction, using the nucleotide sequences of the invention, preferably one or more nucleotide sequences selected from the group consisting of SEQ ID NO: 1001-1361 and 2001-2361, and/or one or more amino acid sequence selected from the group consisting of SEQ ID NO: 3001-3361. Computers that comprise, and that can transmit and distribute the nucleotide and/or amino acid sequences of the invention are also contemplated. Also encompassed by the present invention are the uses of one or more nucleotide sequences selected from the group consisting of SEQ ID NO: 1001-1361 and 2001-2361, and/or one or more amino acid sequence selected from the group consisting of SEQ ID NO: 3001-3361 in computer-assisted methods for identifying homologous sequences in public and private sequence databases, in computer-assisted methods for providing putative functional characteristics of a gene product based on structural homology with other gene products with known function(s), in computer-assisted methods of constructing a model of the gene product.

[0030] In one specific embodiment, the invention encompasses a method assisted by a computer for identifying a putatively essential gene of a fungus, comprising detecting sequence homology between a fungal nucleotide sequence or fungal amino acid sequence with at least one nucleotide sequence selected from the group consisting of SEQ ID NO: 1001-1361 and SEQ ID NO: 2001-2361, or at least one amino acid sequence selected from the group consisting of SEQ ID NO: 3001-3361.

[0031] The features of the nucleotide sequences of the essential genes, the predicted amino acid sequences, nucleic acid arrays, recombinant vectors and expression vectors comprising nucleotide sequences of the C. neoformans essential genes are provided and described hereinbelow in Sections 5.2.1, 5.2.2 and 5.2.3. Genetically engineered yeast cells, prokaryotic cells, and cells of higher eukaryotes comprising nucleotide sequences of the C. neoformans essential genes are provided and described in Section 5.2.3. Antisense nucleic acid molecules corresponding to the C. neoformans essential genes of the invention are provided in Section 5.2.6.

[0032] 5.1.2. Essentiality of C. neoformans Gene Sequences

[0033] In one embodiment of the invention, the inventors analyzed the genomic sequences of C. neoformans and detected a high degree of sequence conservation between C. neoformans sequences and genes in Candida albicans and/or Aspergillus fumigatus. The inventors predicted that these C. neoformans sequences encode functional genes which perform biological functions similar to their homologous counterparts in C. albicans and/or A. fumigatus. Accordingly, the C. neoformans genes identified by the inventors as homologous to essential genes in C. albicans and/or A. fumigatus are predicted to be essential to the survival or growth of C. neoformans.

[0034] The essentiality of each of the C. albicans genes used in the sequence homology analysis has been demonstrated experimentally by creating such conditional-expression mutants. Since C. albicans is an obligate diploid organism which comprises two alleles of each gene, one allele of the gene is disrupted or knocked out and the expression of the other allele is placed under the control of a heterologous promoter. The creation and testing of conditional-expression mutants of the C. albicans essential genes are described in PCT publications nos.WO 01/60975 and WO 02/53728, which are both incorporated herein by reference in their entireties. The essentiality of some of the genes used in the sequence homology analysis has also been confirmed experimentally in the Aspergillus fumigatus system.

[0035] A C. neoformans gene is considered essential when survival, growth, proliferation and/or viability of an C. neoformans strain is substantially coupled to or dependent on the expression of the gene. An essential function for a cell depends in part on the genotype of the cell and in part the cell's environment. Multiple genes are required for some essential function, for example, energy metabolism, etc. biosynthesis of cell structure, replication and repair of genetic material, etc. Thus, the expression of many genes in an organism are essential for its survival and/or growth. A deletion of or mutation in such a gene resulting in a loss or reduction of its expression and/or biological activity can lead to a loss or reduction of viability or growth of the fungus under normal growth conditions. A deletion of or mutation in an essential gene can cause the C. neoformans cells to perish, stop growing, or display a severe growth defect. The reduction or loss of function of a C. neoformans essential gene can result in cell numbers or growth rate that are in the range of 50%, 40%, 30%, 20%, 10%, 5%, or 1% of that of a wild type C. neoformans under similar conditions. Many essential genes in C. neoformans are expected to contribute to the virulence and/or pathogenicity of the organism. Accordingly, when the virulence and/or pathogenicity of an C. neoformans strain to a defined host, or to a defined set of cells from a host, is associated with the conditional expression of the mutant gene, that essential gene may also be referred to as a virulence gene of C. neoformans.

[0036] The essentiality of a gene can be demonstrated by knocking out (insertionally inactivating or deleting) the target gene in C. neoformans and observing the phenotype of the resulting mutant C. neoformans under normal growth conditions and other permissive growth conditions. However, in gene disruption experiments, the observation that a knock-out (e.g. by insertional inactivation or deletion of the target gene) cannot be generated for a gene, cannot, per se, support the conclusion that the gene is an essential gene. Rather, a direct demonstration of expression of the gene in question that is coupled with viability of the cell carrying that gene, is required for the unambiguous confirmation that the gene in question is essential. Accordingly, an essential C. neoformans gene can be placed under the control of a regulatable, heterologous promoter such that a range of expression level of the essential gene in the mutant cell can be obtained. Such levels of expression include negligible or very low expression levels, enabling an evaluation of the phenotype of such a genetically engineered conditional-expression C. neoformans mutant when grown under normal growth conditions and other permissive growth conditions. A loss or reduction of viability or growth of the conditional-expression mutant confirms the essentiality of the C. neoformans gene.

[0037] According to the methods of the invention, a collection of conditional-expression mutants of C. neoformans can be generated in which the dosage of specific genes can be modulated, such that their functions in survival, growth, proliferation and/or pathogenicity can be investigated. The information accrued from such investigations allows the identification and validation of individual gene products as potential drug targets. The present invention further provides methods of use of the genetic mutants either individually or as a collection in drug screening and for investigating the mechanisms of drug action.

[0038] In another embodiment of the invention, each of the essential genes of the invention represents a potential drug target in C. neoformans that is used individually or as part of a collection, in various methods of screening for drugs active against C. neoformans and other related fungi. Depending on the objective of the drug screening program and the target disease, the essential genes of the invention can be classified and divided into subsets based on the structural features, functional properties, and expression profile of the gene products. The gene products encoded by the essential genes within each subset may share similar biological activity, similar intracellular localization, structural homology, and/or sequence homology. Subsets may also be created based on the homology or similarity in sequence to other organisms in a similar or distant taxonomic group, e.g. homology to Saccharomyces cerevisiae, Schizosaccharomyces pombe genes, or to human genes, or a complete lack of sequence similarity or homology to genes of other organisms, such as S. cerevisiae, S. pombe, or human. Subsets may also be created based on the display of cidal terminal phenotype or static terminal phenotype by the respective C. neoformans mutants. Such subsets, referred to as essential gene sets which can be conveniently investigated as a group in a drug screening program, are provided by the present invention. In a particular embodiment, mutants that display a rapid cidal terminal phenotype are preferred. Moreover, since the products encoded by C. neoformans genes of the invention are involved in biochemical pathways essential to the fungus, analysis of these genes and their encoded products facilitates elucidation of such pathways, thereby identifying additional drug targets. Therefore, the present invention provides a systematic and efficient method for drug target identification and validation. The approach is based on genomics information as well as the biological function of individual genes.

[0039] Various methods of use of the C. neoformans nucleotide sequences of the invention in drug target identification and drug screening as described in Section 5.4. Methods of making the gene products of the C. neoformans nucleotide sequences and fragments thereof in prokaryotes, yeasts, and higher eukaryotes, and methods for making antibodies that bind specifically to the gene products and fragments thereof are also encompassed and described in Sections 5.2.3 and 5.2.4.

[0040] In yet another embodiment, C. neoformans essential genes can be genetically engineered to be expressed in complementation studies with specific strains of mutant fungal cells, such as Saccharomyces cerevisiae, C. albicans and A. fumigatus mutant cells, that display a loss or reduction of function of the corresponding homologous essential gene. In this manner, an C. neoformans essential gene can be used in complementation studies in a C. albicans, S. cerevisiae or A. fumigatus mutant cell in order to elucidate and establish the structure and function of the gene product of the homologous C. neoformans essential gene.

[0041] In a further embodiment, C. neoformans essential gene sequences can also be used to facilitate the creation of a mutant strain of C. neoformans, wherein the C. neoformans essential gene is replaced with the homologous C. albicans gene. Such C. neoformans mutants can be especially useful as C. albicans is an obligate diploid which contains two alleles of every essential gene, and thus requires two molecular events to create a knockout mutant in C. albicans. This C. neoformans mutant allows the expression of a C. albicans essential gene in the cellular background of another pathogen which does not display the respective essential gene function, and can be useful in evaluating the action of potential drug candidates against C. albicans. The same approach can also be used to evaluate drug candidates against A. fumigatus.

[0042] Moreover, the present invention provides specifically the use of this information of essentiality to identify orthologs of these essential genes in a non-pathogenic yeast, such as Saccharomyces cerevisiae, and the use of these orthologs in drug screening methods. Although the nucleotide sequence of the orthologs of these essential genes in Saccharomyces cerevisiae may be known, in certain instances, it was not appreciated that these Saccharomyces cerevisiae genes can be useful for discovering drugs against pathogenic fungi, such as C. neoformans.

[0043] Furthermore, because of the sequence conservation between gene products of the essential genes of C. neoformans and C. albicans or A. fumigatus, the structure of the gene product of the C. neoformans essential gene can also be used to aid in the rational design of a drug against the homologous C. albicans or A. fumigatus gene product. Thus, in various embodiments, the C. neoformans essential genes can be used in developing drugs that act against C. albicans or other pathogenic fungi. Fungistatic or fungicidal compounds developed by such methods may have a broad host range.

[0044] In another embodiment, the invention provides a solid phase comprising one ore more of the target gene products that are present on or immobilized onto at least one surface. Preferably, the target gene products are deposited in a spatially addressable format to form an array (including microarray). Such protein arrays can be used for a variety of purposes, including but not limited to screening for compounds, antibodies, ligands, binding partners, nucleic acids, etc. Preferably, the protein array comprises a plurality of proteins, wherein at least one protein comprises an amino acid sequence or a portion of an amino acid sequence selected from the group consisting of SEQ ID NO:3001 through to SEQ ID NO:3361. The portion of amino acid sequence may comprise at least 20, 30, 40, 50, 60, 70, 80, 90, 100, 150, 200, 250, 300, 350, 400, 450 or more contiguous amino acid residues. Accordingly, fusion proteins, fragments, derivatives, and functionally equivalents of the gene products, including similar proteins from other species, can be present on the array. Methods for making and using such protein arrays are well known in the art, see, for example, U.S. Pat. No. 6,475,808; Sundberg et al. “Spatially-addressable immobiliaztion of macromolecules on solid supports” J. Am. Chem. Soc. 117:12050-12057 (1995); and the articles in “High-Thoughput Proteomics: Protein Arrays”, a supplement to Biotechniques, December 2002 edited by C. Borrebaeck, which are incorporated herein by reference in their entirety.

[0045] The biological function of the gene products encoded by the C. neoformans essential genes of the invention can be predicted by the function of their corresponding homologs in yeasts such as C. albicans, and Saccharomyces cerevisiae, and fungi such as A. fumigatus. Accordingly, the C. neoformans genes of the invention may have one or more of the following biological functions:

[0046] Metabolism: amino-acid metabolism, amino-acid biosynthesis, assimilatory reduction of sulfur and biosynthesis of the serine family, regulation of amino-acid metabolism, amino-acid transport, amino-acid degradation (catabolism), other amino-acid metabolism activities, nitrogen and sulphur metabolism, nitrogen and sulphur utilization, regulation of nitrogen and sulphur utilization, nitrogen and sulphur transport, nucleotide metabolism, purine-ribonucleotide metabolism, pyrimidine-ribonucleotide metabolism, deoxyribonucleotide metabolism, metabolism of cyclic and unusual nucleotides, regulation of nucleotide metabolism, polynucleotide degradation, nucleotide transport, other nucleotide-metabolism activities, phosphate metabolism, phosphate utilization, regulation of phosphate utilization, phosphate transport, other phosphate metabolism activities, C-compound and carbohydrate metabolism, C-compound and carbohydrate utilization, regulation of C-compound and carbohydrate utilization, C-compound, carbohydrate transport, other carbohydrate metabolism activities, lipid, fatty-acid and isoprenoid metabolism, lipid, fatty-acid and isoprenoid biosynthesis, phospholipid biosynthesis, glycolipid biosynthesis, breakdown of lipids, fatty acids and isoprenoids, lipid, fatty-acid and isoprenoid utilization, regulation of lipid, fatty-acid and isoprenoid biosynthesis, lipid and fatty-acid transport, lipid and fatty-acid binding, other lipid, fatty-acid and isoprenoid metabolism activities, metabolism of vitamins, cofactors, and prosthetic groups, biosynthesis of vitamins, cofactors, and prosthetic groups, utilization of vitamins, cofactors, and prosthetic groups, regulation of vitamins, cofactors, and prosthetic groups, transport of vitamins, cofactors, and prosthetic groups, other vitamin, cofactor, and prosthetic group activities, secondary metabolism, metabolism of primary metabolic sugars derivatives, biosynthesis of glycosides, biosynthesis of secondary products derived from primary amino acids, biosynthesis of amines.

[0047] Energy: glycolysis and gluconeogenesis, pentose-phosphate pathway, tricarboxylic-acid pathway, electron transport and membrane-associated energy conservation, accessory proteins of electron transport and membrane-associated energy conservation, other electron transport and membrane-associated energy conservation proteins, respiration, fermentation, metabolism of energy reserves (glycogen, trehalose), glyoxylate cycle, oxidation of fatty acids, other energy generation activities.

[0048] Cell Growth, Cell Division and DNA Synthesis: cell growth, budding, cell polarity and filament formation, pheromone response, mating-type determination, sex-specific proteins, sporulation and germination, meiosis, DNA synthesis and replication, recombination and DNA repair, cell cycle control and mitosis, cell cycle check point proteins, cytokinesis, other cell growth, cell division and DNA synthesis activities.

[0049] Transcription: rRNA transcription, rRNA synthesis, rRNA processing, other rRNA-transcription activities, tRNA transcription, tRNA synthesis, tRNA processing, tRNA modification, other tRNA-transcription activities, mRNA transcription, mRNA synthesis, general transcription activities, transcriptional control, chromatin modification, mRNA processing (splicing), mRNA processing (5′-, 3′-end processing, mRNA degradation), 3′-end processing, mRNA degradation, other mRNA-transcription activities, RNA transport, other transcription activities.

[0050] Protein Synthesis: ribosomal proteins, translation, translational control, tRNA-synthetases, other protein-synthesis activities.

[0051] Protein Destination: protein folding and stabilization, protein targeting, sorting and translocation, protein modification, modification with fatty acids (e.g. myristylation, palmitylation, farnesylation), modification by phosphorylation, dephosphorylation, modification by acetylation, other protein modifications, assembly of protein complexes, proteolysis, cytoplasmic and nuclear degradation, lysosomal and vacuolar degradation, other proteolytic degradation, other proteolytic proteins, other protein-destination activities.

[0052] Transport Facilitation: channels/pores, ion channels, ion transporters, metal ion transporters (Cu, Fe, etc.), other cation transporters (Na, K, Ca, NH₄, etc.), anion transporters (Cl, SO₄, PO₄, etc.), C-compound and carbohydrate transporters, other C-compound transporters, amino-acid transporters, peptide-transporters, lipid transporters, purine and pyrimidine transporters, allantoin and allantoate transporters, transport ATPases, ABC transporters, drug transporters, other transport facilitators

[0053] Cellular Transport and Transport Mechanisms: nuclear transport, mitochondrial transport, vesicular transport (Golgi network, etc.), peroxisomal transport, vacuolar transport, extracellular transport (secretion), cellular import, cytoskeleton-dependent transport, transport mechanism, other transport mechanisms, other intracellular-transport activities.

[0054] Cellular Biogenesis: biogenesis of cell wall (cell envelope), biogenesis of plasma membrane, biogenesis of cytoskeleton, biogenesis of endoplasmatic reticulum, biogenesis of Golgi, biogenesis of intracellular transport vesicles, nuclear biogenesis, biogenesis of chromosome structure, mitochondrial biogenesis, peroxisomal biogenesis, endosomal biogenesis, vacuolar and lysosomal biogenesis, other cellular biogenesis activities.

[0055] Cellular Communication/signal Transduction: intracellular communication, unspecified signal transduction, second messenger formation, regulation of G-protein activity, key kinases, other unspecified signal transduction activities, morphogenesis, G-proteins, regulation of G-protein activity, key kinases, other morphogenetic activities, osmosensing, receptor proteins, mediator proteins, key kinases, key phosphatases, other osmosensing activities, nutritional response pathway, receptor proteins, second messenger formation, G-proteins, regulation of G-protein activity, key kinases, key phosphatases, other nutritional-response activities, pheromone response generation, receptor proteins, G-proteins, regulation of G-protein activity, key kinases, key phosphatases, other pheromone response activities, other signal-transduction activities.

[0056] Cell Rescue, Defense, Cell Death and Ageing: stress response, DNA repair, other DNA repair, detoxificaton, detoxification involving cytochrome P450, other detoxification, cell death, ageing, degradation of exogenous polynucleotides, other cell rescue activities.

[0057] Ionic Homeostasis: homeostasis of cations, homeostasis of metal ions, homeostasis of protons, homeostasis of other cations, homeostasis of anions, homeostasis of sulfates, homeostasis of phosphate, homeostasis of chloride, homeostasis of other anions.

[0058] Cellular Organization (proteins are localized to the corresponding organelle): organization of cell wall, organization of plasma membrane, organization of cytoplasm, organization of cytoskeleton, organization of centrosome, organization of endoplasmatic reticulum, organization of Golgi, organization of intracellular transport vesicles, nuclear organization, organization of chromosome structure, mitochondrial organization, peroxisomal organization, endosomal organization, vacuolar and lysosomal organization, inner membrane organization, extracellular/secretion proteins.

[0059] Since methods for studying the above-listed functions are well known in the art, the predicted biological function of each of the gene products can be readily verified by one of ordinary skill in the art using reagents and cells described herein.

### 5.2. Essential Genes of C. neoformans

[0060] 5.2.1 Nucleic Acid Molecules, Vectors, and Host Cells

[0061] Described herein are the nucleic acid molecules of the invention which encompass a collection of essential genes of C. neoformans.

[0062] As used herein, the terms “gene” and “recombinant gene” refer to nucleic acid molecules or polynucleotides comprising a nucleotide sequence encoding a polypeptide or a biologically active ribonucleic acid (RNA). The term can further include nucleic acid molecules comprising upstream, downstream, and/or intron nucleotide sequences. The term “open reading frame (ORF),” means a series of nucleotide triplets coding for amino acids without any termination codons and the triplet sequence is translatable into protein using the codon usage information appropriate for a particular organism.

[0063] As used herein, the term “target gene” refers to an essential gene useful in the invention, especially in the context of drug screening. Since it is expected that some genes will contribute to virulence and be essential to the survival of the organism, the terms “target essential gene” and “target virulence gene” will be used where it is appropriate. The target genes of the invention may be partially characterized, fully characterized, or validated as a drug target, by methods known in the art and/or methods taught hereinbelow. As used herein, the term “target organism” refers to a pathogenic organism, the essential and/or virulence genes of which are useful in the invention.

[0064] The term “nucleotide sequence” refers to a heteropolymer of nucleotides, including but not limited to ribonucleotides and deoxyribonucleotides, or the sequence of these nucleotides. The terms “nucleic acid” and “polynucleotide” are also used interchangeably herein to refer to a heteropolymer of nucleotides, which may be unmodified or modified DNA or RNA. For example, polynucleotides can be single-stranded or double-stranded DNA, DNA that is a mixture of single-stranded and double-stranded regions, hybrid molecules comprising DNA and RNA with a mixture of single-stranded and double-stranded regions. In addition, the polynucleotide can be composed of triple-stranded regions comprising DNA, RNA, or both. A polynucleotide can also contain one or modified bases, or DNA or RNA backbones modified for nuclease resistance or other reasons. Generally, nucleic acid segments provided by this invention can be assembled from fragments of the genome and short oligonucleotides, or from a series of oligonucleotides, or from individual nucleotides, to provide a synthetic nucleic acid.

[0065] The term “recombinant,” when used herein to refer to a polypeptide or protein, means that a polypeptide or protein is derived from recombinant (e. g., microbial or mammalian) expression systems. “Microbial” refers to recombinant polypeptides or proteins made in bacterial or fungal (e.g., yeast) expression systems. As a product, “recombinant microbial” defines a polypeptide or protein essentially unaccompanied by associated native glycosylation. Polypeptides or proteins expressed in most bacterial cultures, e. g., E. coli, will be free of glycosylation modifications; polypeptides or proteins expressed in yeast will be glycosylated.

[0066] The term “expression vehicle or vector” refers to a plasmid or phage or virus, for expressing a polypeptide from a nucleotide sequence. An expression vehicle can comprise a transcriptional unit, also referred to as an expression construct, comprising an assembly of (1) a genetic element or elements having a regulatory role in gene expression, for example, promoters or enhancers, (2) a structural or coding sequence which is transcribed into mRNA and translated into protein, and which is operably linked to the elements of (1); and (3) appropriate transcription initiation and termination sequences. “Operably linked” refers to a link in which the regulatory regions and the DNA sequence to be expressed are joined and positioned in such a way as to permit transcription, and ultimately, translation. In the case of Candida albicans, due to its unusual codon usage, modification of a coding sequence derived from other organisms may be necessary to ensure a polypeptide having the expected amino acid sequence is produced in this organism. Structural units intended for use in yeast or eukaryotic expression systems preferably include a leader sequence enabling extracellular secretion of translated protein by a host cell. Alternatively, where a recombinant protein is expressed without a leader or transport sequence, it may include an N-terminal methionine residue. This residue may or may not be subsequently cleaved from the expressed recombinant protein to provide a final product.

[0067] The term “recombinant host cells” means cultured cells which have stably integrated a recombinant transcriptional unit into chromosomal DNA or carry stably the recombinant transcriptional unit extrachromosomally. Recombinant host cells as defined herein will express heterologous polypeptides or proteins, and RNA encoded by the DNA segment or synthetic gene in the recombinant transcriptional unit. This term also means host cells which have stably integrated a recombinant genetic element or elements having a regulatory role in gene expression, for example, promoters or enhancers. Recombinant expression systems as defined herein will express RNA, polypeptides or proteins endogenous to the cell upon induction of the regulatory elements linked to the endogenous DNA segment or gene to be expressed. The cells can be prokaryotic or eukaryotic.

[0068] The term “polypeptide” refers to the molecule formed by joining amino acids to each other by peptide bonds, and may contain amino acids other than the twenty commonly used gene-encoded amino acids. The term “active polypeptide” refers to those forms of the polypeptide which retain the biologic and/or immunologic activities of any naturally occurring polypeptide. The term “naturally occurring polypeptide” refers to polypeptides produced by cells that have not been genetically engineered and specifically contemplates various polypeptides arising from post-translational modifications of the polypeptide including, but not limited to, proteolytic processing, acetylation, carboxylation, glycosylation, phosphorylation, lipidation and acylation.

[0069] The term “isolated” as used herein refers to a nucleic acid or polypeptide separated from at least one macromolecular component (e.g., nucleic acid or polypeptide) present with the nucleic acid or polypeptide in its natural source. In one embodiment, the polynucleotide or polypeptide is purified such that it constitutes at least 95% by weight, more preferably at least 99.8% by weight, of the indicated biological macromolecules present (but water, buffers, and other small molecules, especially molecules having a molecular weight of less than 1000 daltons, can be present).

[0070] In one embodiment, the present invention provides the identities of more than three hundred essential genes. FIG. 1 lists the sequence identifiers of the genomic nucleotide sequences and coding region of these genes that are essential in C. neoformans and that share a high degree of sequence conservation with the known essential genes of C. albicans and/or A. fumigatus. The genomic sequences including sequences upstream and downstream of the coding regions, the reading frames, the positions of exons and introns of these genes are not previously known. The fact that these genes are essential to the growth and/or survival of C. neoformans was not known until the inventors' discovery. Thus, the uses of these gene sequences and their gene products are encompassed by the present invention. Accordingly, SEQ ID NO: 2001-2361, each identifies a nucleotide sequence of the opening reading frame (ORF) of an identified essential gene. The genomic sequences of the essential genes including sequences upstream and downstream of the coding regions are set forth in SEQ ID NOs: 1-361. The genomic sequences of the essential genes including intron sequences are set forth in SEQ ID NO: 1001-1361. The predicted amino acid sequence of the identified essential genes are set forth in SEQ ID NO: 3001-3361, which are obtained by conceptual translation of the nucleotide sequences of SEQ ID NO: 2001-2361 once the reading frame is determined. In a preferred embodiment, a nucleotide sequence that encodes a product of an essential gene of the invention lacks intron sequences. However, also encompassed are gene products, such as splice variants, that are encoded by the genomic sequences of SEQ ID NO: 1-361 and 1001-1361, and their nucleotide sequences and amino acid sequences.

[0071] The DNA sequences were generated by sequencing reactions and may contain minor errors which may exist as misidentified nucleotides, insertions, and/or deletions. However, such minor errors, if present, in the sequence database should not disturb the identification of the ORF as an essential gene of the invention. Since sequences of the ORFs are provided herein and can be used to uniquely identify the corresponding gene in the C. neoformans genome, one can readily obtain a clone of the gene corresponding to the ORFs by any of several art-known methods, repeat the sequencing and correct the minor error(s). The disclosure of the ORFs or a portion thereof essentially provides the complete gene by uniquely identifying the coding sequence in question, and providing sufficient guidance to obtain the complete cDNA or genomic sequence.

[0072] Moreover, minor sequence errors and variation in splicing do not affect the construction of conditional-expression C. neoformans mutant strains and the uses of those strains, since these methods do not require absolute sequence identity between the chromosomal DNA sequences and the sequences of the gene in the primers or recombinant DNA. In some instances, the correct reading frame of the C. neoformans gene can be identified by comparing its overall amino acid sequence with known Saccharomyces cerevisiae, Candida albicans and/or Aspergillus fumigatus sequences. Accordingly, the present invention encompasses C. neoformans genes which correspond to the ORFs identified in the invention, polypeptides encoded by C. neoformans genes which correspond to the ORFs identified in the invention, and the various uses of the polynucleotides and polypeptides of the genes which correspond to the ORFs of the invention. As used herein in referring to the relationship between a specified nucleotide sequence and a gene, the term “corresponds” or “corresponding” indicates that the specified sequence effectively identifies the gene. In general, correspondence is substantial sequence identity barring minor errors in sequencing, allelic variations and/or variations in splicing. Correspondence can be a transcriptional relationship between the gene sequence and the mRNA or a portion thereof which is transcribed from that gene. This correspondence is present also between portions of an mRNA which is not translated into polypeptide and DNA sequence of the gene.

[0073] The essential genes listed in Table 1 can be obtained using cloning methods well known to those of skill in the art, and include but are not limited to the use of appropriate probes to detect the genes within an appropriate cDNA or gDNA (genomic DNA) library (See, for example, Sambrook et al., 1989, Molecular Cloning: A Laboratory Manual, Cold Spring Harbor Laboratories, which is incorporated herein by reference in its entirety). Probes for the sequences identified herein can be synthesized based on the DNA sequences disclosed herein in SEQ ID NO:1-361, 1001-1361 and 2001-2361. As used herein, “target gene” (e.g. essential and/or virulence gene) refers to (a) a gene containing at least one of the DNA sequences and/or fragments thereof that are set forth in SEQ ID NO: 2001-2361; (b) any DNA sequence or fragment thereof that encodes the amino acid sequence that are set forth in SEQ ID NO: 3001-3361, as well as the gene product encoded by genomic SEQ ID NO: 1-361 and 1001-1361, as expressed by C. neoformans; (c) any DNA sequence that hybridizes to the complement of the nucleotide sequences set forth in SEQ ID NO: 1-361, 1001-1361 and 2001-2361 under stringent conditions, e.g., hybridization to filter-bound DNA in 6×sodium chloride/sodium citrate (SSC) at about 45° C. followed by one or more washes in 0.2×SSC/0.1% SDS at about 50-65° C., or under highly stringent conditions, e.g., hybridization to filter-bound nucleic acid in 6×SSC at about 45° C. followed by one or more washes in 0.1×SSC/0.2% SDS at about 68° C., or under other hybridization conditions which are apparent to those of skill in the art (see, for example, Ausubel, F. M. et al., eds., 1989, Current Protocols in Molecular Biology, Vol. I, Green Publishing Associates, Inc. and John Wiley & Sons, Inc., New York, at pp. 6.3.1-6.3.6 and 2.10.3). Preferably, the polynucleotides that hybridize to the complements of the DNA sequences disclosed herein encode gene products, e.g., gene products that are functionally equivalent to a gene product encoded by a target gene. As described above, target gene sequences include not only degenerate nucleotide sequences that encode the amino acid sequences of SEQ ID NO: 3001-3361, as well as the gene product encoded by genomic SEQ ID NO: 1-361 and 1001-1361, as expressed in C. neoformans, but also degenerate nucleotide sequences that when translated in organisms other than C. neoformans, would yield a polypeptide comprising one of the amino acid sequences of SEQ ID NO: SEQ ID NO: 3001-3361, as well as the gene product encoded by genomic SEQ ID NO: 1-361 and 1001-1361, as expressed by C. neoformans, or a fragment thereof. One of skill in the art would know how to select the appropriate codons or modify the nucleotide sequences of SEQ ID NO: 2001-2361, when using the target gene sequences in C. neoformans or in other organisms. Moreover, the term “target gene” encompasses genes that are naturally occurring in Saccharomyces cerevisiae, Candida albicans, or Aspergillus fumigatus, or variants thereof, that share extensive nucleotide sequence homology with C. neoformans genes having one of the DNA sequences that are set forth in SEQ ID NO: 2001-2361, i.e., the orthologs in S. cerevisiae, C. albicans or A. fumigatus. It is contemplated that methods for drug screening that can be applied to C. neoformans genes can also be applied to orthologs of the same genes in the non-pathogenic S. cerevisiae and in the pathogenic C. albicans. Thus, the screening methods of the invention are applicable to target genes that, depending on the objective of the screen, may or may not include genes of S. cerevisiae, C. albicans, or A. fumigatus origin.

[0074] In another embodiment, the invention also encompasses the following polynucleotides, host cells expressing such polynucleotides and the expression products of such nucleotides: (a) polynucleotides that encode portions of target gene product that corresponds to its functional domains, and the polypeptide products encoded by such nucleotide sequences, and in which, in the case of receptor-type gene products, such domains include, but are not limited to signal sequences, extracellular domains (ECD), transmembrane domains (TM) and cytoplasmic domains (CD); (b) polynucleotides that encode mutants of a target gene product, in which all or part of one of its domains is deleted or altered, and which, in the case of receptor-type gene products, such mutants include, but are not limited to, mature proteins in which the signal sequence is cleaved, soluble receptors in which all or a portion of the TM is deleted, and nonfunctional receptors in which all or a portion of CD is deleted; and (d) polynucleotides that encode fusion proteins containing a target gene product or one of its domains fused to another polypeptide.

[0075] The invention also includes polynucleotides, preferably DNA molecules, that hybridize to, and are therefore the complements of, the DNA sequences of the target gene sequences. Such hybridization conditions can be highly stringent or less highly stringent, as described above and known in the art. The nucleic acid molecules of the invention that hybridize to the above described DNA sequences include oligodeoxynucleotides (“oligos”) which hybridize to the target gene under highly stringent or stringent conditions. In general, for oligos between 14 and 70 nucleotides in length the melting temperature (Tm) is calculated using the formula:

Tm(° C.)=81.5+16.6(log [monovalent cations (molar)]+0.41 (% G+C)−(500/N)

[0076] where N is the length of the probe. If the hybridization is carried out in a solution containing formamide, the melting temperature may be calculated using the equation:

Tm(° C.)=81.5+16.6 (log [monovalent cations (molar)])+0.41(% G+C)−(0.61) (% formamide)−(500/N).

[0077] where N is the length of the probe. In general, hybridization is carried out at about 20-25 degrees below Tm (for DNA-DNA hybrids) or about 10-15 degrees below Tm (for RNA-DNA hybrids). Other exemplary highly stringent conditions may refer, e.g., to washing in 6×SSC/0.05% sodium pyrophosphate at 37° C. (for 14-base oligos), 48° C. (for 17-base oligos), 55° C. (for 20-base oligos), and 60° C. (for 23-base oligos).

[0078] These nucleic acid molecules can encode or act as target gene antisense molecules, useful, for example, in target gene regulation and/or as antisense primers in amplification reactions of target gene nucleotide sequences. Further, such sequences can be used as part of ribozyme and/or triple helix sequences, also useful for target gene regulation. Still further, such molecules can be used as components of diagnostic methods whereby the presence of the pathogen can be detected. The uses of these nucleic acid molecules are discussed in detail below.

[0079] Fragments of the target genes of the invention can be at least 10 nucleotides in length. In alternative embodiments, the fragments can be about 20, 30, 40, 50, 60, 70, 80, 90, 100, 200, 300, 400, 500, 1000, 1500, 2000, 2500, 3000, 3500, 4000, 4500, 5000 or more contiguous nucleotides in length. Alternatively, the fragments can comprise nucleotide sequences that encode at least 10, 20, 30, 40, 50, 100, 150, 200, 250, 300, 350, 400, 450 or more contiguous amino acid residues of the target gene products. Fragments of the target genes of the invention can also refer to exons or introns of the above described nucleic acid molecules, as well as portions of the coding regions of such nucleic acid molecules that encode functional domains such as signal sequences, extracellular domains (ECD), transmembrane domains (TM) and cytoplasmic domains (CD).

[0080] In another embodiment, the present invention encompasses nucleic acid molecules comprising nucleotide sequences of introns of the essential genes of the invention. The nucleotide sequences of one or more introns of each essential gene, where present, are provided by the segment(s) of nucleotide sequences that are present in the genomic sequences (SEQ ID NO: 1001-1361) and that are absent in the corresponding open reading frame sequences (SEQ ID NO: 2001-2361). Nucleic acid molecules comprising these intron sequences or fragments thereof, although not separately provided in the sequence listing, are encompassed, and are useful for a variety of purposes, for example, as oligonucleotide primers for isolating individual exons by polymerase chain reaction or as a diagnostic tool for identifying and/or detecting a strain of C. neoformans.

[0081] In another embodiment, the present invention is directed toward the regulatory regions that are found upstream and downstream of the coding sequences disclosed herein, which are readily determined and isolated from the genomic sequences provided herein. Included within such regulatory regions are, inter alia, promoter sequences, upstream activator sequences, as well as binding sites for regulatory proteins that modulate the expression of the genes identified herein.

[0082] In addition to the above enumerated uses, the nucleotide sequences of essential genes of C. neoformans have the following specific utilities:

[0083] The nucleotide sequences of the invention can be used as genetic markers and/or sequence markers to aid the development of a genetic or sequence map of the C. neoformans genome. The nucleotide sequences and corresponding gene products of the invention can also be used to detect the presence of C. neoformans. Hybridization and antibody-based methods well known in the art can be used to determine the presence and concentration of the nucleotide sequences and corresponding gene products of the invention.

[0084] The nucleotide sequences can also be used to make the corresponding gene products which can be used individually or in combination as an immunogen or a subunit vaccine to elicit a protective immune response in animals or subjects at high risk of developing a clinical condition, such as those that are under continual exposure of high levels of C. neoformans organisms or spores.

[0085] In yet another embodiment, the invention also encompasses (a) DNA vectors that contain a nucleotide sequence comprising any of the foregoing coding sequences of the target gene and/or their complements (including antisense); (b) DNA expression vectors that contain a nucleotide sequence comprising any of the foregoing coding sequences operably linked with a regulatory element that directs the expression of the coding sequences; and (c) genetically engineered host cells that contain any of the foregoing coding sequences of the target gene operably linked with a regulatory element that directs the expression of the coding sequences in the host cell. Vectors, expression constructs, expression vectors, and genetically engineered host cells containing the coding sequences of homologous target genes of other species (excluding S. cerevisiae, C. albicans, or A. fumigatus) are also contemplated. Also contemplated are genetically engineered host cells containing mutant alleles in homologous target genes of the other species. As used herein, regulatory elements include but are not limited to inducible and non-inducible promoters, enhancers, operators and other elements known to those skilled in the art that drive and regulate expression. Such regulatory elements include but are not limited to the lac system, the trp system, the tet system and other antibiotic-based repression systems (e.g. PIP), the TAC system, the TRC system, the major operator and promoter regions of phage A, the control regions of fd coat protein, and the fungal promoters for 3-phosphoglycerate kinase, acid phosphatase, the yeast mating pheromone responsive promoters (e.g. STE2 and STE3), and promoters isolated from genes involved in carbohydrate metabolism (e.g. GAL promoters including GAL7), phosphate-responsive promoters (e.g. PHO5), or amino acid metabolism (e.g. MET genes). The invention includes fragments of any of the DNA vector sequences disclosed herein.

[0086] A variety of techniques can be utilized to further characterize the identified essential genes and virulence genes. First, the nucleotide sequence of the identified genes can be used to reveal homologies to one or more known sequence motifs which can yield information regarding the biological function of the identified gene product. Computer programs well known in the art can be employed to identify such relationships. Second, the sequences of the identified genes can be used, utilizing standard techniques such as in situ hybridization, to place the genes onto chromosome maps and genetic maps which can be correlated with similar maps constructed for another organism, e.g., Saccharomyces cerevisiae, Candida albicans, or Aspergillus fumigatus. The information obtained through such characterizations can suggest relevant methods for using the polynucleotides and polypeptides for discovery of drugs against C. neoformans and other pathogens.

[0087] Methods for performing the uses listed above are well known to those skilled in the art. References disclosing such methods include without limitation “Molecular Cloning: A Laboratory Manual,” 2d ed., Cold Spring Harbor Laboratory Press, Sambrook, J., E. F. Fritsch and T. Maniatis eds., 1989, and “Methods in Enzymology: Guide to Molecular Cloning Techniques,” Academic Press, Berger, S. L. and A. R. Kimmel eds., 1987. Basic molecular biology techniques, such as transformation, and gene disruption via homologous recombination can be applied to C. neoformans. Selectable markers are available for genetic manipulation in C. neoformans which include genes conferring antibiotic resistance to nourseothricin acetyltransferase (nat1 gene) of Streptomyces noursei (McDade and Cox (2001) Med. Mycol. 39:151-154); and hygromycin B (CalBioChem, San Diego; plasmid pHYG7-KB1 (Hua et al., (2000) Clin. Diagn Lab Immunol. 7:125-128, which contains the hygromycin gene under the control of C. neoformans H99 actin gene promoter).

[0088] 5.2.2 Identification of Homologs of C. neoformans Essential Genes

[0089] The invention also provides biological and computational methods, and reagents that allow the isolation and identification of genes that are homologous to the identified essential genes of C. neoformans. The identities and uses of such homologous genes are also encompassed by the present invention.

[0090] The methods for drug target identification and validation disclosed herein can be directly applied to other haploid pathogenic fungi. Deuteromycetous fungi, i.e. those lacking a sexual cycle and classical genetics represent the majority of human fungal pathogens. In those instances in which a pathogenic fungus is diploid and lacks a haploid life cycle, one allele is knocked out and the second allele is conditionally expressed as disclosed herein.

[0091] In the same way medically relevant fungal pathogens are suitable for a rational drug target discovery using the present invention, so too may plant fungal pathogens and animal pathogens be examined to identify novel drug targets for agricultural and veterinary purposes. The quality and yield of many agricultural crops including fruits, nuts, vegetables, rice, soybeans, oats, barley and wheat are significantly reduced by plant fungal pathogens. Examples include the wheat fungal pathogens causing leaf blotch (Septoria tritici, glume blotch (Septoria nodorum), various wheat rusts (Puccinia recondita, Puccinia graminis); powdery mildew (various species), and stem/stock rot (Fusarium spp.). Other particularly destructive examples of plant pathogens include, Phytophthora infestans, the causative agent of the Irish potato famine, the Dutch elm disease causing ascomycetous fungus, Ophiostoma ulmi, the corn smut causing pathogen, Ustilago maydis, the rice-blast-causing pathogen Magnapurtla grisea, Peronospora parasitica (Century et al., Proc Natl Acad Sci U S A 1995 Jul. 3;92(14):6597-601); Cladosporium fulvum (leaf mould pathogen of tomato); Fusarium graminearum, Fusarium culmorum, and Fusarium avenaceum, (wheat, Abramson et al., J Food Prot 2001 August;64(8):1220-5); Alternaria brassicicola (broccoli; Mora et al., Appl Microbiol Biotechnol 2001 April;55(3):306-10); Alternaria tagetica (Gamboa-Angulo et al., J Agric Food Chem 2001 March;49(3):1228-32); the cereal pathogen Bipolaris sorokiniana (Apoga et al., FEMS Microbiol Lett 2001 Apr. 13;197(2):145-50); the rice seedling blast fungus Pyricularia grisea (Lee et al., Mol Plant Microbe Interact 2001 April;14(4):527-35); the anther smut fungus Microbotryum violaceum (Bucheli et al.,: Mol Ecol 2001 February;10(2):285-94); Verticillium longisporum comb. Nov (wilt of oilseed rape, Karapapa et al., Curr Microbiol 2001 March;42(3):217-24); Aspergillus flavus infection of cotton bolls (Shieh et al., Appl Environ Microbiol 1997 September;63(9):3548-52; the eyespot pathogen Tapesia yallundae (Wood et al., FEMS Microbiol Lett 2001 Mar. 15;196(2):183-7); Phytophthora cactorum strain P381 (strawberry leaf necrosis, Orsomando et al., J Biol Chem 2001 Jun. 15;276(24):21578-84); Sclerotinia sclerotiorum, an ubiquitous necrotrophic fungus (sunflowers, Poussereau et al., Microbiology 2001 March;147(Pt 3):717-26); pepper plant/cranberry, anthracnose fungus Colletotrichum gloeosporioides (Kim et al., Mol Plant Microbe Interact 2001 January;14(1):80-5); Nectria haematococca (pea plants, Han et al., Plant J 2001 February;25(3):305-14); Cochliobolus heterostrophus (Monke et al., Mol Gen Genet 1993 October;241(1-2):73-80), Glomerella cingulata (Rodriquez et al., Gene 1987;54(1):73-81) obligate pathogen Bremia lactucae (lettuce downy mildew; Judelson et al., Mol Plant Microbe Interact 1990 July-August;3(4):225-32) Rhynchosporium secalis (Rohe et al., Curr Genet 1996 May;29(6):587-90), Gibberella pulicaris (Fusarium sambucinum), Leptosphaeria maculans (Farman et al., Mol Gen Genet 1992 January;231(2):243-7), Cryphonectria parasitica and Mycosphaerella fijiensis and Mycosphaerella musicola, the causal agents of black and yellow Sigatoka, respectively, and Mycosphaerella eumusae, which causes Septoria leaf spot of banana (banana & plantain, Balint-Kurti et al., FEMS Microbiol Lett 2001 Feb. 5;195(1):9-15). The emerging appearance of fungicidal-resistant plant pathogens and increasing reliance on monoculture practices, clearly indicate a growing need for novel and improved fungicidal compounds. Accordingly, the present invention encompasses identification and validation of drug targets in pathogens and parasites of plants and livestock. Table 2 lists exemplary groups of haploid and diploid fungi of medical, agricultural, or commercial value.

TABLE 2
Exemplary Haploid and Diploid Fungi

| | | |
|---|---|---|
| | Plant Pathogens: | |
| Animal pathogens: | Significance | General Commercial |

Ascomycota

| | | |
|---|---|---|
| Aspergillus fumigatus | Alternaria solanii | Aspergillus niger |
| Alternaria spp | Gaeumannomyces graminis | Schizosaccharomyces pombe |
| Blastomyces dermatidis | Cercospora zeae-maydis | Pichia pastoris |
| Candida spp including | Botrytis cinerea | Hansenula polymorpha |
| Candida dublinensis | Claviceps purpurea | Ashbya gossipii |
| Candida glabrata | Corticum rolfsii | Aspergillus nidulans |
| Candida krusei | Endothia parasitica | Trichoderma reesei |
| Candida lustaniae | Sclerotinia sclerotiorum | Aureobasidium pullulans |
| Candida parapsilopsis | Erysiphe gramini | Yarrowia lipolytica |
| Candida tropicalis | Erysiphe triticii | Candida utilis |
| Coccidioides immitis | Fusarium spp. | Kluveromyces lactis |
| Exophalia dermatiditis | Magnaporthe grisea | |
| Fusarium oxysporum | Plasmopara viticola | |
| Histoplasma capsulatum | Penicillium digitatum | |
| Pneumocystis carinii | Ophiostoma ulmi | |
| | Rhizoctonia species including oryzae | |
| | Septoria species including | |
| | Septoria avenae | |
| | Septoria nodorum | |
| | Septoria passerinii | |
| | Septoria triticii | |
| | Venturia inequalis | |
| | Verticillium dahliae | |
| | Verticillium albo-atrum | |

Basidiomycota

| | | |
|---|---|---|
| Trichosporon beigelii | Puccinia spp including | Agaricus campestris |
| | Puccinia coronata | Phanerochaete chrysosporium |
| | Puccinia graminis | Gloeophyllum traheum |
| | Puccinia recondita | Trametes versicolor |
| | Puccinia striiformis | |
| | Tilletia spp including | |
| | Tilletia caries | |
| | Tilletia controversa | |
| | Tilletia indica | |
| | Tilletia tritici | |
| | Tilletiafoetida | |
| | Ustilago maydis | |
| | Ustilago hordeii | |

Zygomycota

Absidia corymbifera
Mucor rouxii
Rhizomucor pusillus
Rhizopus arrhizus

[0092] Thus, in addition to the nucleotide sequences of C. neoformans, described above, homologs or orthologs of these target gene sequences, as can be present in other serotypes and species, can be identified and isolated by molecular biological techniques well known in the art, and without undue experimentation, used in the methods of the invention. Homologous target genes in different serotypes (A, B, C, D, AD) and related strains such as but not limited to Cryptococcus neoformans neoformans, Cryptococcus neoformans grubii and Cryptococcus neoformans gattii are included. Homologous target genes in related species, such as but not limited to, Cryptococcus albidus, Cryptococcus laurentii, Cryptococcus terreus, Cryptococcus uniguttulatus, Cryptococcus luteolus and Cryptococcus gastricus, are included. Moreover, the invention encompasses homologous target genes in Aspergillus flavus, Aspergillus niger, Coccidiodes immitis, Histoplasma capsulatum, Phytophthora infestans, Puccinia seconditii, Pneumocystis carinii, or any species falling within the genera of any of the above species. Other yeasts in the genera of Candida, Saccharomyces, Schizosaccharomyces, Sporobolomyces, Torulopsis, Trichosporon, Tricophyton, Dermatophytes, Microsproum, Wickerhamia, Ashbya, Blastomyces, Candida, Citeromyces, Crebrothecium, Cryptococcus, Debaryomyces, Endomycopsis, Geotrichum, Hansenula, Kloeckera, Kluveromyces, Lipomyces, Pichia, Rhodosporidium, Rhodotorula, and Yarrowia are also contemplated. Also included are homologs of these target gene sequences which can be identified in and isolated from animal fungal pathogens such as Aspergillus niger, Aspergillus flavis, Candida tropicalis, Candida parapsilopsis, Candida krusei, Cryptococcus neoformans, Coccidioides immitis, Exophalia dermatiditis, Fusarium oxysporum, Histoplasma capsulatum, Phneumocystis carinii, Trichosporon beigelii, Rhizopus arrhizus, Mucor rouxii, Rhizomucor pusillus, or Absidia corymbigera, or the plant fungal pathogens, such as Alternaria solanii, Botrytis cinerea, Erysiphe graminis, Magnaporthe grisea, Puccinia recodita, Sclerotinia sclerotiorum, Septoria triticii, Tilletia controversa, Ustilago maydis, Venturia inequalis, Verticullium dahliae or any species falling within the genera of any of the above species.

[0093] Accordingly, the present invention provides nucleotide sequences that are hybridizable to the polynucleotides of the target genes, and that are of a species other than Saccharomyces cerevisiae, Candida albicans, and Aspergillus fumigatus. Preferably, the species is a fungus, and most preferably a pathogenic species in humans, animals or plants. In one embodiment, the present invention encompasses an isolated nucleic acid comprising a nucleotide sequence that is at least 50% identical to a nucleotide sequence selected from the group consisting of SEQ ID NO.: 1-361, 1001-1361 and 2001-2361. In another embodiment, the present invention encompasses an isolated nucleic acid comprising a nucleotide sequence that hybridizes under medium stringency conditions to a second nucleic acid that consists of a nucleotide sequence selected from the group consisting of SEQ ID NO: 1-361, 1001-1361 and 2001-2361. Where the source of nucleic acid deposited on a gene expression array and the source of the nucleic acid probe being hybridized to the array are from two different species of organisms, the results allow rapid identification of homologous genes in the two species.

[0094] In yet another embodiment, the present invention includes an isolated nucleic acid comprising a nucleotide sequence that encodes a polypeptide the amino acid sequence of which is at least 50% identical to an amino acid sequence selected from the group consisting of SEQ ID No.: 3001-3361, as well as the gene product encoded by genomic SEQ ID NO: 1-361 and 1001-1361, as expressed by C. neoformans, wherein the polypeptide is that of a species other than Saccharomyces cerevisiae, Candida albicans, and A. fumigatus. Although the nucleotide sequences and amino acid sequences of homologs or orthologs of such genes in Saccharomyces cerevisiae is mostly published, as well as those homologs or orthologs of such genes in Candida albicans which is available as database version 6 assembled by the Candida albicans Sequencing Project and is accessible by internet at the web sites of Stanford University and University of Minnesota (See http://www-sequence.stanford.edu:8080/ and http://alces.med.umn.edu/Candida.html), uses of many of such homologs or orthologs in S. cerevisae or in C. albicans in drug screening are not known and are thus specifically provided by the invention. To use such nucleotide and/or amino acid sequences of Candida albicans or Saccharomyces cerevisiae, public databases, such as Stanford Genomic Resources (www-genome.stanford.edu), Munich Information Centre for Protein Sequences (www.mips.biochem.mpg.de), or Proteome (www.proteome.com) may be used to identify and retrieve the sequences. In cases where the ortholog or homolog of a C. neoformans gene in C. albicans or Saccharomyces cerevisiae is known, the name of the Saccharomyces cerevisiae and/or Candida albicans gene is indicated in Table I. Orthologs of S. cerevisiae or C. albicans can also be identified by hybridization assays using nucleic acid probes consisting of any one of the nucleotide sequences of SEQ ID NO: 1-361, 1001-1361, or 2001-2361.

[0095] The nucleotide sequences of the invention still further include nucleotide sequences that have at least 40%, 45%, 55%, 60%, 65%, 70%, 75%, 80%, 85%, 90%, 95%, 98% or more nucleotide sequence identity to the nucleotide sequences set forth in SEQ ID NO: 1-361, 1001-1361, and 2001-2361. The nucleotide sequences of the invention also include nucleotide sequences that encode polypeptides having at least 25%, 30%, 40%, 50%, 55%, 60%, 65%, 70%, 75%, 80%, 85%, 90%, 95%, 98% or higher amino acid sequence identity or similarity to the amino acid sequences set forth in SEQ ID NO: 3001-3361, as well as the gene product encoded by genomic SEQ ID NO: 1-361 and 1001-1361, as expressed by C. neoformans. Such nucleotide sequences may exclude S. cerevisiae, A. fumigatus and/or C. albicans sequences that are known.

[0096] To determine the percent identity of two amino acid sequences or of two nucleotide sequences, the sequences are aligned for optimal comparison purposes (e.g., gaps can be introduced in the sequence of a first amino acid or nucleotide sequence for optimal alignment with a second amino acid or nucleotide sequence). The amino acid residues or nucleotides at corresponding amino acid positions or nucleotide positions are then compared. When a position in the first sequence is occupied by the same amino acid residue or nucleotide as the corresponding position in the second sequence, then the molecules are identical at that position. The percent identity between the two sequences is a function of the number of identical positions shared by the sequences (i.e., % identity=number of identical overlapping positions/total number of positions×100%). In one embodiment, the two sequences are the same length.

[0097] The determination of percent identity between two sequences can also be accomplished using a mathematical algorithm. A preferred, non-limiting example of a mathematical algorithm utilized for the comparison of two sequences is the algorithm of Karlin and Altschul (1990) Proc. Natl. Acad. Sci. U.S.A. 87:2264-2268, modified as in Karlin and Altschul (1993) Proc. Natl. Acad. Sci. U.S.A. 90:5873-5877. Such an algorithm is incorporated into the NBLAST and XBLAST programs of Altschul et al., 1990, J. Mol. Biol. 215:403-0. BLAST nucleotide searches can be performed with the NBLAST nucleotide program parameters set, e.g., for score=100, wordlength=12 to obtain nucleotide sequences homologous to a nucleic acid molecules of the present invention. BLAST protein searches can be performed with the XBLAST program parameters set, e.g., to score-50, wordlength=3 to obtain amino acid sequences homologous to a protein molecule of the present invention. To obtain gapped alignments for comparison purposes, Gapped BLAST can be utilized as described in Altschul et al., 1997, Nucleic Acids Res. 25:3389-3402. Alternatively, PSI-BLAST can be used to perform an iterated search which detects distant relationships between molecules (Id.). When utilizing BLAST, Gapped BLAST, and PSI-Blast programs, the default parameters of the respective programs (e.g., of XBLAST and NBLAST) can be used (see, e.g., http://www.ncbi.nlm.nih.gov). Another preferred, non-limiting example of a mathematical algorithm utilized for the comparison of sequences is the algorithm of Myers and Miller, (1988) CABIOS 4:11-17. Such an algorithm is incorporated in the ALIGN program (version 2.0) which is part of the GCG sequence alignment software package. When utilizing the ALIGN program for comparing amino acid sequences, a PAM120 weight residue table, a gap length penalty of 12, and a gap penalty of 4 can be used.

[0098] To isolate homologous target genes, the C. neoformans target gene sequence described above can be labeled and used to screen a cDNA library constructed from mRNA obtained from the organism of interest. Hybridization conditions should be of a lower stringency when the cDNA library was derived from an organism different from the type of organism from which the labeled sequence was derived. cDNA screening can also identify clones derived from alternatively spliced transcripts in the same or different species. Alternatively, the labeled fragment can be used to screen a genomic library derived from the organism of interest, again, using appropriately stringent conditions. Low stringency conditions will be well known to those of skill in the art, and will vary predictably depending on the specific organisms from which the library and the labeled sequences are derived. For guidance regarding such conditions see, for example, Sambrook et al., 1989, Molecular Cloning, A Laboratory Manual, Cold Spring Harbor Press, N.Y.; and Ausubel et al., 1989, Current Protocols in Molecular Biology, (Green Publishing Associates and Wiley Interscience, N.Y.).

[0099] Further, a homologous target gene sequence can be isolated by performing a polymerase chain reaction (PCR) using two degenerate oligonucleotide primer pools designed on the basis of amino acid sequences within the target gene of interest. The template for the reaction can be cDNA obtained by reverse transcription of mRNA prepared from the organism of interest. The PCR product can be subcloned and sequenced to ensure that the amplified sequences represent the sequences of a homologous target gene sequence.

[0100] The PCR fragment can then be used to isolate a full length cDNA clone by a variety of methods well known to those of ordinary skill in the art. Alternatively, the labeled fragment can be used to screen a genomic library.

[0101] PCR technology can also be utilized to isolate full length cDNA sequences. For example, RNA can be isolated, following standard procedures, from an organism of interest. A reverse transcription reaction can be performed on the RNA using an oligonucleotide primer specific for the most 5′ end of the amplified fragment for the priming of first strand synthesis. The resulting RNA/DNA hybrid can then be “tailed” with guanines using a standard terminal transferase reaction, the hybrid can be digested with RNAase H, and second strand synthesis can then be primed with a poly-C primer. Thus, cDNA sequences upstream of the amplified fragment can easily be isolated. For a review of cloning strategies which can be used, see e.g., Sambrook et al., 1989, Molecular Cloning, A Laboratory Manual, Cold Springs Harbor Press, N.Y.; and Ausubel et al., 1989, Current Protocols in Molecular Biology, (Green Publishing Associates and Wiley Interscience, N.Y.).

[0102] Additionally, an expression library can be constructed utilizing DNA isolated from or cDNA synthesized from the organism of interest. In this manner, gene products made by the homologous target gene can be expressed and screened using standard antibody screening techniques in conjunction with antibodies raised against the Candida albicans gene product, as described, below. (For screening techniques, see, for example, Harlow, E. and Lane, eds., 1988, “Antibodies: A Laboratory Manual,” Cold Spring Harbor Press, Cold Spring Harbor). Library clones detected via their reaction with such labeled antibodies can be purified and subjected to sequence analysis by well known methods.

[0103] Alternatively, homologous target genes or polypeptides may be identified by searching a database to identify sequences having a desired level of homology to a target gene or polypeptide involved in proliferation, virulence or pathogenicity. A variety of such databases are available to those skilled in the art, including GenBank and GenSeq. In various embodiments, the databases are screened to identify nucleic acids with at least 97%, at least 95%, at least 90%, at least 85%, at least 80%, at least 70%, at least 60%, at least 50%, or at least 40% identity to a target nucleotide sequence, or a portion thereof. In other embodiments, the databases are screened to identify polypeptides having at least 99%, at least 95%, at least 90%, at least 85%, at least 80%, at least 70%, at least 60%, at least 50%, at least 40% or at least 25% identity or similarity to a polypeptide involved in proliferation, virulence or pathogenicity or a portion thereof.

[0104] Alternatively, functionally homologous target sequences or polypeptides may be identified by creating mutations that have phenotypes by removing or altering the function of a gene. This can be done for one or all genes in a given fungal species including, for example: Saccharomyces cerevisiae, Candida albicans, and A. fumigatus. Having mutants in the genes of one fungal species offers a method to identify functionally similar genes or related genes (orthologs) in another species, or functionally similar genes in the same species (paralogs), by use of a functional complementation test.

[0105] A library of genes or cDNA copies of messenger RNA of genes can be made from a given species, e.g. C. neoformans, and the library cloned into a vector permitting expression (for example, with the C. neoformans, Aspergillus nidulans promoters or Saccharomyces cerevisiae promoters) of the genes in a second species, e.g. Saccharomyces cerevisiae, Aspergillus fumigatus, or Candida albicans. Such a library is referred to as a “heterologous library.” Transformation of the C. neoformans heterologous library into a defined mutant of S. cerevisiae, C. albicans, or A. fumigatus that is functionally deficient with respect to the identified gene, and screening or selecting for a gene in the heterologous library that restores phenotypic function in whole or in part of the mutational defect is said to be “heterologous functional complementation” and in this example, permits identification of gene in C. neoformans that are functionally related to the mutated gene in S. cerevisiae, C. albicans, or A. fumigatus. Inherent in this functional-complementation method, is the ability to restore gene function without the requirement for sequence similarity of nucleic acids or polypeptides; that is, this method permits interspecific identification of genes with conserved biological function, even where sequence similarity comparisons fail to reveal or suggest such conservation.

[0106] In those instances in which the gene to be tested is an essential gene, a number of possibilities exist regarding performing heterologous functional complementation tests. The mutation in the essential gene can be a conditional allele, including but not limited to, a temperature-sensitive allele, an allele conditionally expressed from a regulatable promoter, or an allele that has been rendered the mRNA transcript or the encoded gene product conditionally unstable. Alternatively, the strain carrying a mutation in an essential gene can be propagated using a copy of the native gene (a wild type copy of the gene mutated from the same species) on a vector comprising a marker that can be selected against, permitting selection for those strains carrying few or no copies of the vector and the included wild type allele. A strain constructed in this manner is transformed with the heterologous library, and those clones in which a heterologous gene can functionally complement the essential gene mutation, are selected on medium non-permissive for maintenance of the plasmid carrying the wild type gene.

[0107] A heterologous functional complementation test is not restricted to the exchange of genetic information between C. neoformans, Aspergillus fumigatus, Candida albicans and Saccharomyces cerevisiae; functional complementation tests can be performed, as described above, using any pair of fungal species. For example, the CRE1 gene of the fungus Sclerotininia sclerotiorum can functionally complement the creAD30 mutant of the CREA gene of Aspergillus nidulans (see Vautard et al. 1999, “The glucose repressor gene CRE 1 from Sclerotininia sclerotiorum is functionally related to CREA from Aspergillus niger but not to the Mig proteins from Saccharomyces cerevisiae,” FEBS Lett. 453: 54-58).

[0108] In many of the fungal plant pathogens where homologous target genes are identified, standard genetic manipulation methods that are known to those of skill in the art, e.g., transformation and homologous recombination, are applicable. Non-limiting examples of recombinant gene expression systems include the following: F. oxysporum panC promoter induced by steroidal glycoalkaloid alpha-tomatine (Perez-Espinosa et al.,: Mol Genet Genomics 2001 July;265(5):922-9); Ustilago maydis hsp70-like gene promoter in a high-copy number autonomously replicating expression vector (Keon et al., Antisense Nucleic Acid Drug Dev 1999 February;9(1):101-4); Cochliobolus heterostrophus transient and stable gene expression systems using P1 or GPD1 (glyceraldehyde 3 phosphate dehydrogenase) promoter of C. heterostrophus or GUS or hygromycin B phosphotransferase gene (hph) of E. coli (Monke et al., Mol Gen Genet 1993 October;241(1-2):73-80); Rhynchosporium secalis (barley leaf scald fungus) transformed to hygromycin-B and phleomycin resistance using the hph gene from E. coli and the ble gene from Streptoalloteichus hindustanus under the control of Aspergillus nidulans promoter and terminator sequences, plasmid DNA introduced into fungal protoplasts by PEG/CaCl₂ treatment (Rohe et al., Curr Genet 1996 May;29(6):587-90). Pathogens of banana and plantain (Musa spp.) Mycosphaerella fijiensis and Mycosphaerella musicola, and Mycosphaerella eumusae can be transformed as taught in Balint-Kurti et al., FEMS Microbiol Lett 2001 Feb. 5;195(1):9-15. Gibberella pulicaris (Fusarium sambucinum) a trichothecene-producing plant pathogen can be transformed with three different vectors: cosHyg1, pUCH1, and pDH25, all of which carry hph (encoding hygromycin B phosphotransferase) as the selectable marker (Salch et al., Curr Genet 1993;23(4):343-50). Leptosphaeria maculans, a fungal pathogen of Brassica spp.can be transformed with the vector pAN8-1, encoding phleomycin resistance; protoplasts can be retransformed using the partially homologous vector, pAN7-1 which encodes hygromycin B resistance. Farman et al., Mol Gen Genet 1992 January;231(2):243-7. Cryphonectria parasitica; targeted disruption of enpg-1 of this chestnut blight fungus was accomplished by homologous recombination with a cloned copy of the hph gene of Escherichia coli inserted into exon 1, see Gao et al., Appl Environ Microbiol 1996 June;62(6):1984-90.

[0109] Another example, Glomerella cingulata f. sp. phaseoli (Gcp) was transformed using either of two selectable markers: the amdS+gene of Aspergillus nidulans, which encodes acetamidase and permits growth on acetamide as the sole nitrogen source and the hygBR gene of Escherichia coli which permits growth in the presence of the antibiotic Hy. The amdS+ gene functioned in Gcp under control of A. nidulans regulatory signals and hygBR was expressed after fusion to a promoter from Cochliobolus heterostrophus, another filamentous ascomycete. Protoplasts to be transformed were generated with the digestive enzyme complex Novozym 234 and then were exposed to plasmid DNA in the presence of 10 mM CaCl₂ and polyethylene glycol. Transformation occurred by integration of single or multiple copies of either the amdS+ or hygBR plasmid into the fungal genome. (Rodriquez et al., Gene 1987;54(1):73-81); integration vectors for homologous recombination; deletion studies demonstrated that 505 bp (the minimum length of homologous promoter DNA analysed which was still capable of promoter function) was sufficient to target integration events. Homologous integration of the vector resulted in duplication of the gdpA promoter region. (Rikkerink et al., Curr Genet 1994 March;25(3):202-8).

[0110] 5.2.3 Products Encoded by C. neoformans Essential Genes

[0111] The target gene products used and encompassed in the methods and compositions of the present invention include those gene products (e.g., RNA or proteins) that are encoded by the target essential gene sequences as described above, such as, the target gene sequences set forth in SEQ ID NO: 2001-2361. When expressed in an organism which does not use the universal genetic code, protein products of the target genes having the amino acid sequences of SEQ ID NO: 3001-3361, as well as the gene product encoded by genomic SEQ ID NO: 1-361 and 1001-1361, as expressed by C. neoformans, may be encoded by nucleotide sequences that conform to the known codon usage in the organism. One of skill in the art would know the modifications that are necessary to accommodate for a difference in codon usage, e.g., that of Candida albicans.

[0112] In addition, however, the methods and compositions of the invention also use and encompass proteins and polypeptides that represent functionally equivalent gene products. Such functionally equivalent gene products include, but are not limited to, natural variants of the polypeptides having an amino acid sequence set forth in SEQ ID NO: 3001-3361, as well as the gene product encoded by genomic SEQ ID NO: 1-361 and 1001-1361, as expressed by C. neoformans.

[0113] Such equivalent target gene products can contain, e.g., deletions, additions or substitutions of amino acid residues within the amino acid sequences encoded by the target gene sequences described above, but which result in a silent change, thus producing a functionally equivalent target gene product. Amino acid substitutions can be made on the basis of similarity in polarity, charge, solubility, hydrophobicity, hydrophilicity and/or the amphipathic nature of the residues involved. For example, nonpolar (i.e., hydrophobic) amino acid residues can include alanine (Ala or A), leucine (Leu or L), isoleucine (Ile or I), valine (Val or V), proline (Pro or P), phenylalanine (Phe or F), tryptophan (Trp or W) and methionine (Met or M); polar neutral amino acid residues can include glycine (Gly or G), serine (Ser or S), threonine (Thr or T), cysteine (Cys or C), tyrosine (Tyr or Y), asparagine (Asn or N) and glutamine (Gln or Q); positively charged (i.e., basic) amino acid residues can include arginine (Arg or R), lysine (Lys or K) and histidine (His or H); and negatively charged (i.e., acidic) amino acid residues can include aspartic acid (Asp or D) and glutamic acid (Glu or E).

[0114] “Functionally equivalent,” as the term is utilized herein, refers to a polypeptide capable of exhibiting a substantially similar in vivo activity as the C. neoformans target gene product encoded by one or more of the target gene sequences described in Table 2. Alternatively, when utilized as part of assays described hereinbelow, the term “functionally equivalent” can refer to peptides or polypeptides that are capable of interacting with other cellular or extracellular molecules in a manner substantially similar to the way in which the corresponding portion of the target gene product would interact with such other molecules. Preferably, the functionally equivalent target gene products of the invention are also the same size or about the same size as a target gene product encoded by one or more of the target gene sequences.

[0115] Peptides and polypeptides corresponding to one or more domains of the target gene products (e.g., signal sequence, TM, ECD, CD, or ligand-binding domains), truncated or deleted target gene products (e.g., polypeptides in which one or more domains of a target gene product are deleted) and fusion target gene proteins (e.g., proteins in which a full length or truncated or deleted target gene product, or a peptide or polypeptide corresponding to one or more domains of a target gene product is fused to an unrelated protein) are also within the scope of the present invention. Such peptides and polypeptides (also referred to as chimeric protein or polypeptides) can be readily designed by those skilled in the art on the basis of the target gene nucleotide and amino acid sequences. Exemplary fusion proteins can include, but are not limited to, epitope tag-fusion proteins which facilitate isolation of the target gene product by affinity chromatography using reagents that binds the epitope. Other exemplary fusion proteins include fusions to any amino acid sequence that allows, e.g., the fusion protein to be anchored to a cell membrane, thereby allowing target gene polypeptides to be exhibited on a cell surface; or fusions to an enzyme (e.g., β-galactosidase encoded by the LAC4 gene of Kluyveronmyces lactis (Leuker et al., 1994, Mol. Gen. Genet., 245:212-217)), to a fluorescent protein (e.g., from Renilla reniformis (Srikantha et al., 1996, J. Bacteriol. 178:121-129), or to a luminescent protein which can provide a marker function. Accordingly, the invention provides a fusion protein comprising a fragment of a first polypeptide fused to a second polypeptide, said fragment of the first polypeptide consisting of at least 6 consecutive residues of an amino acid sequence selected from one of SEQ ID NO: 3001-3361.

[0116] Other modifications of the target gene product coding sequences described above can be made to generate polypeptides that are better suited, e.g., for expression, for scale up, etc. in a chosen host cell. For example, cysteine residues can be deleted or substituted with another amino acid in order to eliminate disulfide bridges.

[0117] The target gene products of the invention preferably comprise at least as many contiguous amino acid residues as are necessary to represent an epitope fragment (that is, for the gene products to be recognized by an antibody directed to the target gene product). For example, such protein fragments or peptides can comprise at least about 8 contiguous amino acid residues from a full length differentially expressed or pathway gene product. In alternative embodiments, the protein fragments and peptides of the invention can comprise about 6, 10, 20, 30, 40, 50, 60, 70, 80, 90, 100, 150, 200, 250, 300, 350, 400, 450 or more contiguous amino acid residues of a target gene product.

[0118] The target gene products used and encompassed in the methods and compositions of the present invention also encompass amino acid sequences encoded by one or more of the above-described target gene sequences of the invention wherein domains often encoded by one or more exons of those sequences, or fragments thereof, have been deleted. The target gene products of the invention can still further comprise post translational modifications, including, but not limited to, glycosylations, acetylations and myristylations.

[0119] The target gene products of the invention can be readily produced, e.g., by synthetic techniques or by methods of recombinant DNA technology using techniques that are well known in the art. Thus, methods for preparing the target gene products of the invention are discussed herein. First, the polypeptides and peptides of the invention can be synthesized or prepared by techniques well known in the art. See, for example, Creighton, 1983, Proteins: Structures and Molecular Principles, W. H. Freeman and Co., N.Y., which is incorporated herein by reference in its entirety. Peptides can, for example, be synthesized on a solid support or in solution.

[0120] Alternatively, recombinant DNA methods which are well known to those skilled in the art can be used to construct expression vectors containing target gene protein coding sequences such as those set forth in SEQ ID NO: 2001-2361, and appropriate transcriptional/translational control signals. These methods include, for example, in vitro recombinant DNA techniques, synthetic techniques and in vivo recombination/genetic recombination. See, for example, the techniques described in Sambrook et al., 1989, Molecular Cloning: A Laboratory Manual, Cold Spring Harbor Press, Cold Spring Harbor, N. Y., Pla et al., Yeast 12:1677-1702 (1996), which are incorporated by reference herein in their entireties, and Ausubel, 1989, supra. Alternatively, RNA capable of encoding target gene protein sequences can be chemically synthesized using, for example, synthesizers. See, for example, the techniques described in Oligonucleotide Synthesis, 1984, Gait, M. J. ed., IRL Press, Oxford, which is incorporated by reference herein in its entirety.

[0121] A variety of host-expression vector systems can be utilized to express the target gene coding sequences of the invention. Such host-expression systems represent vehicles by which the coding sequences of interest can be produced and subsequently purified, but also represent cells which can, when transformed or transfected with the appropriate nucleotide coding sequences, exhibit the target gene protein of the invention in situ. These include but are not limited to microorganisms such as bacteria (e.g., E. coli, B. subtilis) transformed with recombinant bacteriophage DNA, plasmid DNA or cosmid DNA expression vectors containing target gene protein coding sequences; yeast (e.g., Saccharomyces, Schizosaccarhomyces, Neurospora, Aspergillus, Candida, Pichia) transformed with recombinant yeast expression vectors containing the target gene protein coding sequences; insect cell systems infected with recombinant virus expression vectors (e.g., baculovirus) containing the target gene protein coding sequences; plant cell systems infected with recombinant virus expression vectors (e.g., cauliflower mosaic virus, CaMV; tobacco mosaic virus, TMV) or transformed with recombinant plasmid expression vectors (e.g., Ti plasmid) containing target gene protein coding sequences; or mammalian cell systems (e.g. COS, CHO, BHK, 293, 3T3) harboring recombinant expression constructs containing promoters derived from the genome of mammalian cells (e.g., metallothionein promoter) or from mammalian viruses (e.g., the adenovirus late promoter; the vaccinia virus 7.5K promoter). If necessary, the nucleotide sequences of coding regions may be modified according to the codon usage of the host such that the translated product has the correct amino acid sequence.

[0122] In bacterial systems, a number of expression vectors can be advantageously selected depending upon the use intended for the target gene protein being expressed. For example, when a large quantity of such a protein is to be produced, for the generation of antibodies or to screen peptide libraries, for example, vectors which direct the expression of high levels of fusion protein products that are readily purified can be desirable. Such vectors include, but are not limited, to the E. coli expression vector pUR278 (Ruther et al., 1983, EMBO J. 2:1791), in which the target gene protein coding sequence can be ligated individually into the vector in frame with the lacZ coding region so that a fusion protein is produced; pIN vectors (Inouye & Inouye, 1985, Nucleic Acids Res. 13:3101-3109; Van Heeke & Schuster, 1989, J. Biol. Chem. 264:5503-5509); and the like. pGEX vectors can also be used to express foreign polypeptides as fusion proteins with glutathione S-transferase (GST). In general, such fusion proteins are soluble and can easily be purified from lysed cells by adsorption to glutathione-agarose beads followed by elution in the presence of free glutathione. The pGEX vectors are designed to include thrombin or factor Xa protease cleavage sites so that the cloned target gene protein can be released from the GST moiety.

[0123] When a target gene is to be expressed in mammalian host cells, a number of viral-based expression systems can be utilized. In cases where an adenovirus is used as an expression vector, the target gene coding sequence of interest can be ligated to an adenovirus transcription/translation control complex, e.g., the late promoter and tripartite leader sequence. This chimeric gene can then be inserted in the adenovirus genome by in vitro or in vivo recombination. Insertion in a non-essential region of the viral genome (e.g., region E1 or E3) will result in a recombinant virus that is viable and capable of expressing target gene protein in infected hosts, (e.g., See Logan & Shenk, 1984, Proc. Natl. Acad. Sci. USA 81:3655-3659). Specific initiation signals can also be required for efficient translation of inserted target gene coding sequences. These signals include the ATG initiation codon and adjacent sequences. In cases where an entire target gene, including its own initiation codon and adjacent sequences, is inserted into the appropriate expression vector, no additional translational control signals can be needed. However, in cases where only a portion of the target gene coding sequence is inserted, exogenous translational control signals, including, perhaps, the ATG initiation codon, must be provided. Furthermore, the initiation codon must be in phase with the reading frame of the desired coding sequence to ensure translation of the entire insert. These exogenous translational control signals and initiation codons can be of a variety of origins, both natural and synthetic. The efficiency of expression can be enhanced by the inclusion of appropriate transcription enhancer elements, transcription terminators, etc. (see Bittner et al., 1987, Methods in Enzymol. 153:516-544).

[0124] In addition, a host cell strain can be chosen which modulates the expression of the inserted sequences, or modifies and processes the gene product in the specific fashion desired. Such modifications (e.g., glycosylation) and processing (e.g., cleavage) of protein products can be important for the function of the protein. Different host cells have characteristic and specific mechanisms for the post-translational processing and modification of proteins. Appropriate cell lines or host systems can be chosen to ensure the correct modification and processing of the foreign protein expressed. To this end, eukaryotic host cells which possess the cellular machinery for proper processing of the primary transcript, glycosylation, and phosphorylation of the gene product can be used.

[0125] For long-term, high-yield production of recombinant proteins, stable expression is preferred. For example, cell lines which stably express the target gene protein can be engineered. Host cells can be transformed with DNA controlled by appropriate expression control elements (e.g., promoter, enhancer, sequences, transcription terminators, polyadenylation sites, etc.), and a selectable marker. Following the introduction of the foreign DNA, engineered cells can be allowed to grow for 1-2 days in an enriched media, and then are switched to a selective media. The selectable marker in the recombinant plasmid confers resistance to the selection and allows cells to stably integrate the plasmid into their chromosomes and grow to form foci which in turn can be cloned and expanded into cell lines. This method can advantageously be used to engineer cell lines which express the target gene protein. Such engineered cell lines can be particularly useful in screening and evaluation of compounds that affect the endogenous activity of the target gene protein.

[0126] A number of selection systems can be used, including but not limited to the herpes simplex virus thymidine kinase (Wigler et al., 1977, Cell 11:223), hypoxanthine-guanine phosphoribosyltransferase (Szybalska & Szybalski, 1962, Proc. Natl. Acad. Sci. USA 48:2026), and adenine phosphoribosyltransferase (Lowy et al., 1980, Cell 22:817) genes can be employed in tk⁻, hgprt⁻ or aprt⁻ cells, respectively. Also, antimetabolite resistance can be used as the basis of selection for dhfr, which confers resistance to methotrexate (Wigler et al., 1980, Proc. Natl. Acad. Sci. USA 77:3567; O'Hare et al., 1981, Proc. Natl. Acad. Sci. USA 78:1527); gpt, which confers resistance to mycophenolic acid (Mulligan & Berg, 1981, Proc. Natl. Acad. Sci. USA 78:2072); neo, which confers resistance to the aminoglycoside G-418 (Colberre-Garapin et al., 1981, J. Mol. Biol. 150:1); and hygro, which confers resistance to hygromycin (Santerre et al., 1984, Gene 30:147) genes.

[0127] Alternatively, any fusion protein may be readily purified by utilizing an antibody specific for the fusion protein being expressed. For example, a system described by Janknecht et al. allows for the ready purification of non-denatured fusion proteins expressed in human cells lines (Janknecht et al., 1991, Proc. Natl. Acad. Sci. USA 88: 8972-8976). In this system, the gene of interest is subcloned into a vaccinia recombination plasmid such that the gene's open reading frame is translationally fused to an amino-terminal tag consisting of six histidine residues. Extracts from cells infected with recombinant vaccinia virus are loaded onto Ni²⁺ nitriloacetic acid-agarose columns and histidine-tagged proteins are selectively eluted with imidazole-containing buffers. Fusions at the carboxy terminal of the target gene product are also contemplated.

[0128] When used as a component in assay systems such as those described herein, the target gene protein can be labeled, either directly or indirectly, to facilitate detection of a complex formed between the target gene protein and a test substance. Any of a variety of suitable labeling systems can be used including but not limited to radioisotopes such as ¹²⁵I; enzyme labeling systems that generate a detectable colorimetric signal or light when exposed to substrate; and fluorescent labels.

[0129] Indirect labeling involves the use of a protein, such as a labeled antibody, which specifically binds to either a target gene product. Such antibodies include but are not limited to polyclonal antibodies, monoclonal antibodies (mAbs), human, humanized or chimeric antibodies, single chain antibodies, Fab fragments, F(ab′)₂ fragments, fragments produced by a Fab expression library, anti-idiotypic (anti-Id) antibodies, and epitope-binding fragments of any of the above.

[0130] Following expression of the target gene protein encoded by the identified target nucleotide sequence, the protein is purified. Protein purification techniques are well known in the art. Proteins encoded and expressed from identified exogenous nucleotide sequences can be partially purified using precipitation techniques, such as precipitation with polyethylene glycol. Alternatively, epitope tagging of the protein can be used to allow simple one step purification of the protein. In addition, chromatographic methods such as ion-exchange chromatography, gel filtration, use of hydroxyapaptite columns, immobilized reactive dyes, chromatofocusing, and use of high-performance liquid chromatography, may also be used to purify the protein. Electrophoretic methods such as one-dimensional gel electrophoresis, high-resolution two-dimensional polyacrylamide electrophoresis, isoelectric focusing, and others are contemplated as purification methods. Also, affinity chromatographic methods, comprising solid phase bound- antibody, ligand presenting columns and other affinity chromatographic matrices are contemplated as purification methods in the present invention.

[0131] In addition, the purified target gene products, fragments thereof, or derivatives thereof may be administered to an individual in a pharmaceutically acceptable carrier to induce an immune response against the protein or polypeptide. Preferably, the immune response is a protective immune response which protects the individual. Methods for determining appropriate dosages of the protein (including use of adjuvants) and pharmaceutically acceptable carriers are familiar to those skilled in the art.

[0132] 5.2.4 Isolation and Use of Antibodies Recognizing Products Encoded by C. neoformans Essential Genes

[0133] Described herein are methods for the production of antibodies capable of specifically recognizing epitopes of one or more of the target gene products described above. Such antibodies can include, but are not limited to, polyclonal antibodies, monoclonal antibodies (mAbs), human, humanized or chimeric antibodies, single chain antibodies, Fab fragments, F(ab′)₂ fragments, fragments produced by a Fab expression library, anti-idiotypic (anti-Id) antibodies, and epitope-binding fragments of any of the above.

[0134] For the production of antibodies to a target gene or gene product, various host animals can be immunized by injection with a target gene protein, or a portion thereof. Such host animals can include but are not limited to rabbits, mice, and rats, to name but a few. Various adjuvants can be used to increase the immunological response, depending on the host species, including but not limited to Freund's (complete and incomplete), mineral gels such as aluminum hydroxide, surface active substances such as lysolecithin, pluronic polyols, polyanions, peptides, oil emulsions, keyhole limpet hemocyanin, dinitrophenol, and potentially useful human adjuvants such as BCG (bacille Calmette-Guerin) and Corynebacterium parvum. Accordingly, the invention provides a method of eliciting an immune response in an animal, comprising introducing into the animal an immunogenic composition comprising an isolated polypeptide, the amino acid sequence of which comprises at least 6 consecutive residues of one of SEQ ID NOs: 3001-3361, as well as the gene products, such as splice variants, that are encoded by genomic sequences, SEQ ID NOs: 1-361 and 1001-1361, as expressed by C. neoformans.

[0135] Polyclonal antibodies are heterogeneous populations of antibody molecules derived from the sera of animals immunized with an antigen, such as target gene product, or an antigenic functional derivative thereof. For the production of polyclonal antibodies, host animals such as those described above, can be immunized by injection with differentially expressed or pathway gene product supplemented with adjuvants as also described above. The antibody titer in the immunized animal can be monitored over time by standard techniques, such as with an enzyme linked immunosorbent assay (ELISA) using immobilized polypeptide. If desired, the antibody molecules can be isolated from the animal (e.g., from the blood) and further purified by well-known techniques, such as protein A chromatography to obtain the IgG fraction.

[0136] Monoclonal antibodies, which are homogeneous populations of antibodies to a particular antigen, can be obtained by any technique which provides for the production of antibody molecules by continuous cell lines in culture. These include, but are not limited to the hybridoma technique of Kohler and Milstein, (1975, Nature 256:495-497; and U.S. Pat. No. 4,376,110), the human B-cell hybridoma technique (Kosbor et al., 1983, Immunology Today 4:72; Cole et al., 1983, Proc. Natl. Acad. Sci. USA 80:2026-2030), and the EBV-hybridoma technique (Cole et al., 1985, Monoclonal Antibodies And Cancer Therapy, Alan R. Liss, Inc., pp. 77-96). Such antibodies can be of any immunoglobulin class including IgG, IgM, IgE, IgA, IgD and any subclass thereof. The hybridoma producing the mAb of this invention can be cultivated in vitro or in vivo. Production of high titers of mAbs in vivo makes this the presently preferred method of production.

[0137] Alternative to preparing monoclonal antibody-secreting hybridomas, a monoclonal antibody directed against a polypeptide of the invention can be identified and isolated by screening a recombinant combinatorial immunoglobulin library (e.g., an antibody phage display library) with the polypeptide of interest. Kits for generating and screening phage display libraries are commercially available (e.g., the Pharmacia Recombinant Phage Antibody System, Catalog No. 27-9400-01; and the Stratagene SurfZAP J Phage Display Kit, Catalog No. 240612). Additionally, examples of methods and reagents particularly amenable for use in generating and screening antibody display library can be found in, for example, U.S. Pat. No. 5,223,409; PCT Publication No. WO 92/18619; PCT Publication No. WO 91/17271; PCT Publication No. WO 92/20791; PCT Publication No. WO 92/15679; PCT Publication No. WO 93/01288; PCT Publication No. WO 92/01047; PCT Publication No. WO 92/09690; PCT Publication No. WO 90/02809; Fuchs et al. (1991) Bio/Technology 9:1370-1372; Hay et al. (1992) Hum. Antibod. Hybridomas 3:81-85; Huse et al. (1989) Science 246:1275-1281; Griffiths et al. (1993) EMBO J. 12:725-734.

[0138] Additionally, recombinant antibodies, such as chimeric and humanized monoclonal antibodies, comprising both human and non-human portions, which can be made using standard recombinant DNA techniques, are within the scope of the invention. A chimeric antibody is a molecule in which different portions are derived from different animal species, such as those having a variable region derived from a murine mAb and a human immunoglobulin constant region. (See, e.g., Cabilly et al., U.S. Pat. No. 4,816,567; and Boss et al., U.S. Pat. No. 4,816,397, which are incorporated herein by reference in their entirety.) Humanized antibodies are antibody molecules from non-human species having one or more complementarily determining regions (CDRs) from the non-human species and a framework region from a human immunoglobulin molecule. (See, e.g., Queen, U.S. Pat. No. 5,585,089, which is incorporated herein by reference in its entirety.) Such chimeric and humanized monoclonal antibodies can be produced by recombinant DNA techniques known in the art, for example using methods described in PCT Publication No. WO 87/02671; European Patent Application 184,187; European Patent Application 171,496; European Patent Application 173,494; PCT Publication No. WO 86/01533; U.S. Pat. No. 4,816,567; European Patent Application 125,023; Better et al. (1988) Science 240:1041-1043; Liu et al. (1987) Proc. Natl. Acad. Sci. USA 84:3439-3443; Liu et al. (1987) J. Immunol. 139:3521-3526; Sun et al. (1987) Proc. Natl. Acad. Sci. USA 84:214-218; Nishimura et al. (1987) Canc. Res. 47:999-1005; Wood et al. (1985) Nature 314:446-449; and Shaw et al. (1988) J. Natl. Cancer Inst. 80:1553-1559); Morrison (1985) Science 229:1202-1207; Oi et al. (1986) Bio/Techniques 4:214; U.S. Pat. No. 5,225,539; Jones et al. (1986) Nature 321:552-525; Verhoeyan et al. (1988) Science 239:1534; and Beidler et al. (1988) J. Immunol. 141:4053-4060.

[0139] Completely human antibodies are particularly desirable for therapeutic treatment of human patients. Such antibodies can be produced using transgenic mice which are incapable of expressing endogenous immunoglobulin heavy and light chains genes, but which can express human heavy and light chain genes. The transgenic mice are immunized in the normal fashion with a selected antigen, e.g., all or a portion of a polypeptide of the invention. Monoclonal antibodies directed against the antigen can be obtained using conventional hybridoma technology. The human immunoglobulin transgenes harbored by the transgenic mice rearrange during B cell differentiation, and subsequently undergo class switching and somatic mutation. Thus, using such a technique, it is possible to produce therapeutically useful IgG, IgA and IgE antibodies. For an overview of this technology for producing human antibodies, see Lonberg and Huszar (1995, Int. Rev. Immunol. 13:65-93). For a detailed discussion of this technology for producing human antibodies and human monoclonal antibodies and protocols for producing such antibodies, see, e.g., U.S. Pat. No. 5,625,126; U.S. Pat. No. 5,633,425; U.S. Pat. No. 5,569,825; U.S. Pat. No. 5,661,016; and U.S. Pat. No. 5,545,806.

[0140] Completely human antibodies which recognize a selected epitope can be generated using a technique referred to as “guided selection.” In this approach a selected non-human monoclonal antibody, e.g., a mouse antibody, is used to guide the selection of a completely human antibody recognizing the same epitope. (Jespers et al. (1994) Bio/technology 12:899-903).

[0141] Antibody fragments which recognize specific epitopes can be generated by known techniques. For example, such fragments include but are not limited to: the F(ab′)₂ fragments which can be produced by pepsin digestion of the antibody molecule and the Fab fragments which can be generated by reducing the disulfide bridges of the F(ab′)₂ fragments. Alternatively, Fab expression libraries can be constructed (Huse et al., 1989, Science 246:1275-1281) to allow rapid and easy identification of monoclonal Fab fragments with the desired specificity.

[0142] Antibodies of the present invention may also be described or specified in terms of their binding affinity to a target gene product. Preferred binding affinities include those with a dissociation constant or Kd less than 5×10⁻⁶M, 10⁻⁶M, 5×10⁻⁷M, 10⁻⁷M, 5×10⁻⁸M, 10⁻⁸M, 5×10⁻⁹M, 10⁻⁹M, 5×10⁻¹⁰M, 10⁻¹⁰M, 5×10⁻¹¹M, 10⁻¹¹M, 5×10⁻¹²M,10⁻¹²M, 5×10⁻¹³M, 10⁻¹³M, 5×10⁻¹⁴M, 10⁻¹⁴M, 5×10⁻¹⁵M, or 10⁻¹⁵M.

[0143] Antibodies directed against a target gene product or fragment thereof can be used to detect the a target gene product in order to evaluate the abundance and pattern of expression of the polypeptide under various environmental conditions, in different morphological forms (mycelium, yeast, spores) and stages of an organism's life cycle. Antibodies directed against a target gene product or fragment thereof can be used diagnostically to monitor levels of a target gene product in the tissue of an infected host as part of a clinical testing procedure, e.g., to, for example, determine the efficacy of a given treatment regimen. Detection can be facilitated by coupling the antibody to a detectable substance. Examples of detectable substances include various enzymes, prosthetic groups, fluorescent materials, luminescent materials, bioluminescent materials, and radioactive materials. Examples of suitable enzymes include horseradish peroxidase, alkaline phosphatase, beta-galactosidase, or acetylcholinesterase; examples of suitable prosthetic group complexes include streptavidin/biotin and avidin/biotin; examples of suitable fluorescent materials include umbelliferone, fluorescein, fluorescein isothiocyanate, rhodamine, dichlorotriazinylamine fluorescein, dansyl chloride or phycoerythrin; an example of a luminescent material includes luminol; examples of bioluminescent materials include luciferase, luciferin, and acquorin, and examples of suitable radioactive material include ¹²⁵I, ¹³¹I, ³⁵S or ³H.

[0144] Further, antibodies directed against a target gene product or fragment thereof can be used therapeutically to treat an infectious disease by preventing infection, and/or inhibiting growth of the pathogen. Antibodies can also be used to modify a biological activity of a target gene product. Antibodies to gene products related to virulence or pathogenicity can also be used to prevent infection and alleviate one or more symptoms associated with infection by the organism. To facilitate or enhance its therapeutic effect, an antibody (or fragment thereof) may be conjugated to a therapeutic moiety such as a toxin or fungicidal agent. Techniques for conjugating a therapeutic moiety to antibodies are well known, see, e.g., Thorpe et al., “The Preparation And Cytotoxic Properties Of Antibody-Toxin Conjugates,” Immunol. Rev., 62:119-58 (1982).

[0145] An antibody with or without a therapeutic moiety conjugated to it can be used as a therapeutic that is administered alone or in combination with chemotherapeutic agents.

[0146] 5.2.5 Modulation of Essential C. neoformans Gene Expression Using Ribozymes

[0147] Ribozymes are enzymatic RNA molecules capable of catalyzing the specific cleavage of RNA (For a review see, for example Rossi, J., 1994, Current Biology 4:469-471). The mechanism of ribozyme action involves sequence specific hybridization of the ribozyme molecule to complementary target RNA, followed by a endonucleolytic cleavage. The composition of ribozyme molecules must include one or more sequences complementary to the target gene mRNA, and must include the well known catalytic sequence responsible for mRNA cleavage. For this sequence, see U.S. Pat. No. 5,093,246, which is incorporated by reference herein in its entirety. As such, within the scope of the invention are engineered hammerhead motif ribozyme molecules that specifically and efficiently catalyze endonucleolytic cleavage of RNA sequences encoding target gene proteins.

[0148] Ribozyme molecules designed to catalytically cleave specific target gene mRNA transcripts can also be used to prevent translation of target gene mRNA and expression of target genes. While ribozymes that cleave mRNA at site specific recognition sequences can be used to destroy target gene mRNAs, the use of hammerhead ribozymes is preferred. Hammerhead ribozymes cleave mRNAs at locations dictated by flanking regions that form complementary base pairs with the target gene mRNA. The sole requirement is that the target mRNA have the following sequence of two bases: 5′-UG-3′. The construction and production of hammerhead ribozymes is well known in the art and is described more fully in Haseloff and Gerlach, 1988, Nature, 334:585-591. Preferably the ribozyme is engineered so that the cleavage recognition site is located near the 5′ end of the target gene mRNA; i.e., to increase efficiency and minimize the intracellular accumulation of non-functional mRNA transcripts.

[0149] The ribozymes of the present invention also include RNA endoribonucleases (hereinafter “Cech-type ribozymes”) such as the one which occurs naturally in Tetrahymena thermophila (known as the IVS, or L-19 IVS RNA) and which has been extensively described by Thomas Cech and collaborators (Zaug, et al., 1984, Science, 224:574-578; Zaug and Cech, 1986, Science, 231:470-475; Zaug, et al., 1986, Nature, 324:429-433; published International patent application No. WO 88/04300 by University Patents Inc.; Been and Cech, 1986, Cell, 47:207-216). The Cech-type ribozymes have an eight base pair active site which hybridizes to a target RNA sequence whereafter cleavage of the target RNA takes place. The invention encompasses those Cech-type ribozymes which target eight base-pair active site sequences that are present in a target gene.

[0150] As in the antisense approach, the ribozymes can be composed of modified oligonucleotides (e.g. for improved stability, targeting, etc.) and should be delivered to cells which express the target gene in vivo. Because ribozymes unlike antisense molecules, are catalytic, a lower intracellular concentration is required for efficiency. Multiple ribozyme molecules directed against different target genes can also be used in combinations, sequentially or simultaneously.

[0151] Anti-sense RNA and DNA, ribozyme, and triple helix molecules of the invention can be prepared by any method known in the art for the synthesis of DNA and RNA molecules. These include techniques for chemically synthesizing oligodeoxyribonucleotides and oligoribonucleotides well known in the art such as for example solid phase phosphoramidite chemical synthesis. Alternatively, RNA molecules can be generated by in vitro and in vivo transcription of DNA sequences encoding the antisense RNA molecule. Such DNA sequences can be incorporated into a wide variety of vectors which incorporate suitable RNA polymerase promoters such as the T7 or SP6 polymerase promoters. Alternatively, antisense cDNA constructs that synthesize antisense RNA constitutively or inducibly, depending on the promoter used, can be introduced stably into cell lines. These nucleic acid constructs can be administered selectively to the desired cell population via a delivery complex.

[0152] Various well-known modifications to the DNA molecules can be introduced as a means of increasing intracellular stability and half-life. Possible modifications include, but are not limited to, the addition of flanking sequences of ribo- or deoxy- nucleotides to the 5′ and/or 3′ ends of the molecule or the use of phosphorothioate or 2′ O-methyl rather than phosphodiesterase linkages within the oligodeoxyribonucleotide backbone.

[0153] 5.2.6 Modulation of Essential C. neoformans Gene Expression Using Antisense Molecules

[0154] The use of antisense molecules as inhibitors of gene expression may be a specific, genetically based therapeutic approach (for a review, see Stein, in Ch. 69, Section 5 “Cancer: Principle and Practice of Oncology”, 4th ed., ed. by DeVita et al., J. B. Lippincott, Philadelphia 1993). The present invention provides the therapeutic or prophylactic use of nucleic acids of at least six nucleotides that are antisense to a target essential or virulence gene or a portion thereof in the target organism. An “antisense” target nucleic acid as used herein refers to a nucleic acid capable of hybridizing to a portion of a target gene RNA (preferably mRNA) by virtue of some sequence complementarity. The invention further provides pharmaceutical compositions comprising an effective amount of the antisense nucleic acids of the invention in a pharmaceutically acceptable carrier, as described infra.

[0155] In another embodiment, the invention is directed to methods for inhibiting the expression of a target gene in an organism of interest, such as C. neoformans, either in vitro, ex vivo, in vivo, or inside a cell or an organelle of a cell, comprising providing the cell with an effective amount of a composition comprising an antisense nucleic acid of the invention. Multiple antisense polynucleotides hybridizable to different target genes may be used in combinations, sequentially or simultaneously.

[0156] In another embodiment, the present invention is directed toward methods for modulating expression of an essential gene which has been identified by the methods described supra, in which an antisense RNA molecule, which inhibits translation of mRNA transcribed from an essential gene, is expressed from a regulatable promoter. In one aspect of this embodiment, the antisense RNA molecule is expressed in a conditional-expression C. neoformans mutant strain. In other aspects of this embodiment, the antisense RNA molecule is expressed in a wild-type strain of Cryptococcus or Aspergillus fumigatus, another haploid or diploid pathogenic organism, including animal fugal pathogens such as Aspergillus niger, Aspergillus flavis, Candida albicans, Candida tropicalis, Candida parapsilopsis, Candida krusei, Cryptococcus neoformans, Coccidioides immilis, Exophalia dermatiditis, Fusarium oxysporum, Histoplasma capsulatum, Phneumocystis carinii, Trichosporon beigelii, Rhizopus arrhizus, Mucor rouxii, Rhizomucor pusillus, or Absidia corymbigera, or the plant fungal pathogens, such as Botrytis cinerea, Erysiphe graminis, Magnaporthe grisea, Puccinia recodita, Septoria triticii, Tilletia controversa, Ustilago maydiss, or any species falling within the genera of any of the above species.

[0157] The nucleic acid molecule comprising an antisense nucleotide sequence of the invention may be complementary to a coding and/or noncoding region of a target gene mRNA. The antisense molecules will bind to the complementary target gene mRNA transcripts and reduce or prevent translation. Absolute complementarity, although preferred, is not required. A sequence “complementary” to a portion of an RNA, as referred to herein, means a sequence having sufficient complementarity to be able to hybridize with the RNA, forming a stable duplex; in the case of double-stranded antisense nucleic acids, a single strand of the duplex DNA may thus be tested, or triplex formation may be assayed. The ability to hybridize will depend on both the degree of complementarity and the length of the antisense nucleic acid. One skilled in the art can ascertain a tolerable degree of mismatch by use of standard procedures to determine the melting point of the hybridized complex.

[0158] Nucleic acid molecules that are complementary to the 5′ end of the message, e.g., the 5′ untranslated sequence up to and including the AUG initiation codon, should work most efficiently at inhibiting translation. However, sequences complementary to the 3′ untranslated sequences of mRNAs have recently been shown to be effective at inhibiting translation of mRNAs as well. See generally, Wagner, R., 1994, Nature 372:333-335.

[0159] Nucleic acid molecules comprising nucleotide sequences complementary to the 5′ untranslated region of the mRNA can include the complement of the AUG start codon. Antisense nucleic acid molecules complementary to mRNA coding regions are less efficient inhibitors of translation but could be used in accordance with the invention. Whether designed to hybridize to the 5′-, 3′- or coding region of target gene mRNA, antisense nucleic acids should be at least six nucleotides in length, and are preferably oligonucleotides ranging from 6 to about 50 nucleotides in length. In specific aspects, the oligonucleotide is at least 10 nucleotides, at least 17 nucleotides, at least 25 nucleotides, at least 50 nucleotides, or at least 200 nucleotides.

[0160] Regardless of the choice of target gene sequence, it is preferred that in vitro studies are first performed to quantitate the ability of the antisense molecule to inhibit gene expression. It is preferred that these studies utilize controls that distinguish between antisense gene inhibition and nonspecific biological effects of oligonucleotides. It is also preferred that these studies compare levels of the target RNA or protein with that of an internal control RNA or protein. Additionally, it is envisioned that results obtained using the antisense oligonucleotide are compared with those obtained using a control oligonucleotide. It is preferred that the control oligonucleotide is of approximately the same length as the test oligonucleotide and that the nucleotide sequence of the oligonucleotide differs from the antisense sequence no more than is necessary to prevent specific hybridization to the target sequence.

[0161] The antisense molecule can be DNA or RNA or chimeric mixtures or derivatives or modified versions thereof, single-stranded or double-stranded. The antisense molecule can be modified at the base moiety, sugar moiety, or phosphate backbone, for example, to improve stability of the molecule, hybridization, etc. The antisense molecule may include other appended groups such as peptides (e.g., for targeting cell receptors in vivo), hybridization-triggered cleavage agents. (See, e.g., Krol et al., 1988, BioTechniques 6:958-976) or intercalating agents. (See, e.g., Zon, 1988, Pharm. Res. 5:539-549). To this end, the antisense molecule may be conjugated to another molecule, e.g., a peptide, hybridization triggered cross-linking agent, transport agent, hybridization-triggered cleavage agent, etc.

[0162] The antisense molecule may comprise at least one modified base moiety which is selected from the group including but not limited to 5-fluorouracil, 5-bromouracil, 5-chlorouracil, 5-iodouracil, hypoxanthine, xanthine, 4-acetylcytosine, 5-(carboxyhydroxylmethyl) uracil, 5-carboxymethylaminomethyl-2-thiouridine, 5-carboxymethylaminomethyluracil, dihydrouracil, beta-D-galactosylqueosine, inosine, N6-isopentenyladenine, 1-methylguanine, 1-methylinosine, 2,2-dimethylguanine, 2-methyladenine, 2-methylguanine, 3-methylcytosine, 5-methylcytosine, N6-adenine, 7-methylguanine, 5-methylaminomethyluracil, 5-methoxyaminomethyl-2-thiouracil, beta-D-mannosylqueosine, 5N-methoxycarboxymethyluracil, 5-methoxyuracil, 2-methylthio-N6-isopentenyladenine, uracil-5-oxyacetic acid (v), wybutoxosine, pseudouracil, queosine, 2-thiocytosine, 5-methyl-2-thiouracil, 2-thiouracil, 4-thiouracil, 5-methyluracil, uracil-5-oxyacetic acid methylester, uracil-5-oxyacetic acid (v), 5-methyl-2-thiouracil, 3-(3-amino-3-N-2-carboxypropyl) uracil, (acp3)w, and 2,6-diaminopurine.

[0163] The antisense molecule may also comprise at least one modified sugar moiety selected from the group including but not limited to arabinose, 2-fluoroarabinose, xylulose, and hexose.

[0164] In yet another embodiment, the antisense molecule comprises at least one modified phosphate backbone selected from the group consisting of a phosphorothioate, a phosphorodithioate, a phosphoramidothioate, a phosphoramidate, a phosphordiamidate, a methylphosphonate, an alkyl phosphotriester, and a formacetal or analog thereof.

[0165] In yet another embodiment, the antisense molecule is an α-anomeric oligonucleotide. An α-anomeric oligonucleotide forms specific double-stranded hybrids with complementary RNA in which, contrary to the usual β-units, the strands run parallel to each other (Gautier et al., 1987, Nucl. Acids Res. 15:6625-6641). The oligonucleotide is a 2′-O-methylribonucleotide (Inoue et al., 1987, Nucl. Acids Res. 15:6131-6148), or a chimeric RNA-DNA analogue (Inoue et al., 1987, FEBS Lett. 215:327-330).

[0166] Antisense molecules of the invention may be synthesized by standard methods known in the art, e.g. by use of an automated DNA synthesizer (such as are commercially available from Biosearch, Applied Biosystems, etc.). As examples, phosphorothioate oligonucleotides may be synthesized by the method of Stein et al. (1988, Nucl. Acids Res. 16:3209), methylphosphonate oligonucleotides can be prepared by use of controlled pore glass polymer supports (Sarin et al., 1988, Proc. Natl. Acad. Sci. U.S.A. 85:7448-7451), etc.

[0167] While antisense nucleotides complementary to the coding region of a target gene could be used, those complementary to the transcribed untranslated region are also preferred.

[0168] Pharmaceutical compositions of the invention comprising an effective amount of an antisense nucleic acid in a pharmaceutically acceptable carrier, can be administered to a subject infected with the pathogen of interest.

[0169] The amount of antisense nucleic acid which will be effective in the treatment of a particular disease caused by the pathogen will depend on the site of the infection or condition, and can be determined by standard techniques. Where possible, it is desirable to determine the antisense cytotoxicity of the pathogen to be treated in vitro, and then in useful animal model systems prior to testing and use in humans.

[0170] A number of methods have been developed for delivering antisense DNA or RNA to cells; e.g., antisense molecules can be injected directly into the tissue site in which the pathogens are residing, or modified antisense molecules, designed to target the desired cells (e.g., antisense molecule linked to peptides or antibodies that specifically bind receptors or antigens expressed on the pathogen's cell surface) can be administered systemically. Antisense molecules can be delivered to the desired cell population via a delivery complex. In a specific embodiment, pharmaceutical compositions comprising antisense nucleic acids of the target genes are administered via biopolymers (e.g., poly-β-1→4-N-acetylglucosamine polysaccharide), liposomes, microparticles, or microcapsules. In various embodiments of the invention, it may be useful to use such compositions to achieve sustained release of the antisense nucleic acids. In a specific embodiment, it may be desirable to utilize liposomes targeted via antibodies to specific identifiable pathogen antigens (Leonetti et al., 1990, Proc. Natl. Acad. Sci. U.S.A. 87:2448-2451; Renneisen et al., 1990, J. Biol. Chem. 265:16337-16342).

[0171] 5.2.7 Construction of C. neoformans Strains Carrying Mutant Essential Genes

[0172] In one embodiment of the present invention, each of the essential genes of the invention is placed under the control of the heterologous promoter, the activity of which is regulatable. Where the gene is essential, elimination of expression of that gene will be lethal or severely crippling for growth. Therefore, in the present invention, a heterologous promoter is used to provide a range of levels of expression of a target. Depending on the conditions, the gene may be under-expressed, over-expressed, or expressed at a level comparable to that observed when the target gene is linked to its native promoter. A heterologous promoter is a promoter from a different gene from the same pathogenic organism, or it can be a promoter from a different species.

[0173] Suitable promoters for use in C. neoformans include, but are not limited to, the actin promoter (Nelson et al., (2001) Genetics 157(3):935-947); constitutive; the gpd promoter (Varma and Kwon-Chung (1999) Gene 232:155-163); and the GAL7 gene promoter; modestly regulated by carbon source in a serotype A strain of C. neoformans (Del Poeta et al., (1999) Genetics 152:167-178). Expression of C. neoformans GAL7 mRNA was first observed within 2.5 min of induction and fully induced by 30 min. The gene was completely repressed in the presence of glucose. The GAL7 promoter was isolated and used to construct a promoter cassette. Two genes were tested in this cassette for galactose regulation by creating GAL7 promoter fusions with their coding regions. MF alpha, which encodes a pheromone, was found to produce filaments only in transformants that were induced by galactose. The level of enzyme activity was at least 500-fold greater for cells grown in galactose than for cells grown in glucose (Wickes and Edman (1995) Mol. Microbiol. 16:1099-109). These promoters are useful for the in vitro expression of recombinant proteins in C. neoformans or for expression of selectable markers and reporters, analysis of essentiality of a given gene product in vitro. However, for in vivo validation experiments, promoters that direct a broad range of expression levels are preferred; and promoters that have a very low basal level of expression in the repressed state are most desired. Generally, use of promoters that are involved in carbon source utilization is less preferred for experiments in animal models due to (i) metabolism of the inducer/repressor by the cells, and (ii) difficulty in sustaining sufficiently high level of inducer/repressor in the blood of the animal.

[0174] The process of replacing the cognate promoter with a heterologous promoter can be repeated for a desired subset of genes such that a collection of conditional-expression mutant C. neoformans strains is generated wherein each strain comprises a different, conditionally-expressed gene. By repeating this process for every gene, a substantially complete set of C. neoformans mutant haploid strains representing the entire genome of the pathogenic fungus can be obtained. Thus, the present invention provides a method of assembling a collection of mutant C. neoformans cells, each of which comprises a different gene under the control of a heterologous promoter. A preferred embodiment for the construction of conditional-expression mutants of C. neoformans strains, uses the following, non-limiting method.

[0175] In one embodiment of the present invention, essential genes of C. neoformans are conditionally expressed by replacing the native promoter with a conditional-expression promoter, such as the tetracycline-regulatable promoter system that is developed initially for Saccharomyces cerevisiae but which can be modified for use in C. neoformans (See Gari et al., 1997, Yeast 13:837-848; and Nagahashi et al., 1997, Mol. Gen. Genet. 255:372-375).

[0176] In this embodiment, conditional expression is achieved by first constructing a transactivation fusion protein comprising the E. coli TetR tetracycline repressor domain or DNA binding domain (amino acids 1-207) fused to the transcription activation domain of Saccharomyces cerevisiae GAL4 (amino acids 785-881) or HAP4 (amino acids 424-554). The nucleotide sequences encoding the transactivation fusion proteins of E. coli TetR (amino acids 1-207) plus Saccharomyces cerevisiae GAL4 (amino acids 785-881), and of E. coli TetR (amino acids 1-207) plus Saccharomyces cerevisiae HAP4 (amino acids 424-554), is encompassed by the present invention. Other promoters that can be used include the actin promoter (Nelson et al., (2001) Genetics 157(3):935-947); the gpd promoter (Varma and Kwon-Chung (1999) Gene 232:155-163); and the GAL7 gene promoter; of C. neoformans (Del Poeta et al., (1999) Genetics 152:167-178). Accordingly, the invention provides C. neoformans cells that comprise a nucleotide sequence encoding a transactivation fusion protein expressible in the cells, wherein the transactivation fusion protein comprises a DNA binding domain and a transcription activation domain.

[0177] Expression of the transactivation fusion protein in C. neoformans is achieved by providing, in one non-limiting example, an Aspergillus niger glucoamylase promoter, PGLA A. However, it will be appreciated that any regulatory regions, promoters and terminators, that are functional in C. neoformans can be used to express the fusion protein. Thus, a nucleic acid molecule comprising a promoter functional in C. neoformans, the coding region of a transactivation fusion protein, and a terminator functional in C. neoformans, are encompassed by the present invention. Such a nucleic acid molecule can be a plasmid, a cosmid, a transposon, or a mobile genetic element. In a preferred embodiment, the TetR-Gal4 or TetR-Hap4 transactivators are stably integrated into a C. neoformans strain, by using a suitable auxotrophic marker (e.g., ade2) for selection of the desired integrant.

[0178] PCR amplification of a dominant selectable marker so as to include about 65 bp of flanking sequence identical to the sequence 5′ and 3′ of the C. neoformans gene to be disrupted, allows construction of a gene disruption cassette for any given C. neoformans gene. In this embodiment, the promoter replacement fragment comprises a nucleotide sequence encoding a heterologous promoter that comprises at least one copy of a nucleotide sequence recognized by the DNA binding domain of the transactivation fusion protein, whereby binding of the transactivation fusion protein to the heterologous promoter increases transcription from that promoter. The heterologous tetracycline promoters initially developed for Saccharomyces cerevisiae gene expression contains a variable number of copies of the tetracycline operator sequence, i.e., 2, 4, or 7 copies. The tetracycline promoter is subcloned adjacent to, e.g., a ADE2 or a URA5 selectable marker, in the orientation favoring tetracycline promoter-dependent regulation when placed immediately upstream the open reading frame of the target gene. PCR amplification of the URA5-Tet or ADE2-Tet promoter cassette incorporates approximately 65 bp of flanking sequence homologous to the regulatory region to be replaced, that is, the region from around nucleotide positions -200 and -1 (relative to the start codon) of the target gene, thereby producing a conditional-expression promoter replacement fragment for transformation. When transformed into a C. neoformans homologous recombination between the promoter replacement fragment and the upstream regulatory region of the target gene generates a strain in which the wild type regulatory region is replaced by the conditionally regulated tetracycline promoter. Transformants are selected as uracil prototrophs (URA5-TET) or adenine prototrophs (ADE2-TET) and verified by Southern blot and PCR analysis.

[0179] An example of targeted gene disruption in C. neoformans using the phosphoribosylaminoimidazole carboxylase (ADE2) gene which is required for purine biosynthesis, as a selectable marker is provided in Davidson et al., 2000, Fungal Genet. Biol. 29:38-48, and Sudarshan et al., 1999, Fungal Genet. Biol. 27:36-48; which are incorporated herein by reference in its entirety. For serotype A strain H99, ade2 mutations in strains M001 and M049 can serve as recipients for target gene disruptions using the ADE2 gene. Adenine prototrophic transformants are selected on minimal medium containing 1 M sorbitol and lacking exogenous adenine. The C. neoformans URA5 gene encodes orotidine monophosphate pyrophosphorylase (OMPPase) which complements the pyrE mutation in E. coli and which can transform C. neoformans ura5 mutants to uracil prototrophy. It has been shown that all the C. neoformans uracil auxotrophs obtained with 5-FOA selection were ura5 mutants. Methods of use of this selective marker for transformation is described in Edman et al., 1990, Mol. Cell Biol. 10:4538-4544, which is incorporated by reference herein in its entirety.

[0180] In this particular embodiment, the promoter is induced in the absence of tetracycline, and repressed by the presence of tetracycline. Analogs of tetracycline, including but not limited to chlortetracycline, demeclocycline, doxycycline, meclocycline, methocycline, minocycline hydrochloride, anhydrotetracycline, and oxytetracycline, can also be used to repress the expression of the conditional-expression mutant of the C. neoformans target gene.

[0181] The present invention also encompasses the use of alternative variants of the tetracycline promoter system, based upon a mutated tetracycline repressor (tetR) molecule, designated tetR′, which is activated (i.e. binds to its cognate operator sequence) by binding of the antibiotic effector molecule to promote expression, and is repressed (i.e. does not bind to the operator sequence) in the absence of the antibiotic effectors, when the tetR′ is used instead of, or in addition to, the wild-type tetR. For example, analysis of the essentiality of a C. neoformans gene could be performed using tetR′ instead of tetR in cases where repression is desired under conditions which lack the presence of tetracycline, such as shut off of a gene participating in drug transport (e.g. C. neoformans homologs of the CaCDR1, CaPDR5, or CaMDR1 genes of Candida albicans). Also, the present methods could be adapted to incorporate both the tetR and tetR′ molecules in a dual activator/repressor system where tetR is fused to an activator domain and tetR′ is fused to a general repressor (e.g. the C. neoformans homologs of the Candida albicans genes CaSsr6 and CaTup1) to enhance or further repress expression in the presence of the antibiotic effector molecules (Belli et al., 1998, Nucl Acid Res 26:942-947 which is incorporated herein by reference). These methods of providing conditional expression are also contemplated. By repeating this process whereby the wild type promoter for an C. neoformans gene is replaced with a conditionally-expressed heterologous promoter, for a preferred subset of genes of C. neoformans, or its entire genome, a collection or a complete set of conditional-expression mutant strains of C. neoformans is obtained.

[0182] In another embodiment of the invention, the method is also applied to other haploid pathogenic fungi by modifying the target gene via recombination of the allele with a promoter replacement fragment comprising a nucleotide sequence encoding a heterologous promoter, such that the expression of the gene is conditionally regulated by the heterologous promoter. A preferred subset of genes comprises genes that share substantial nucleotide sequence homology with target genes of other organisms, e.g., Aspergillus funigatus, Candida albicans and Saccharomyces cerevisiae. For example, this method of the invention may be applied to other haploid fungal pathogens including, but not limited to, animal fugal pathogens such as Aspergillus niger, Aspergillus flavis, Candida glabrata, Coccidioides immitis, Exophalia dermatiditis, Fusarium oxysporum, Histoplasma capsulatum, Phneumocystis carinii, Trichosporon beigelii, Rhizopus arrhizus, Mucor rouxii, Rhizomucor pusillus, or Absidia corymbigera, or the plant fungal pathogens, such as Botrytis cinerea, Erysiphe graminis, Magnaporthe grisea, Puccinia recodita, Septoria triticii, Tilletia controversa, Ustilago maydis, or any species falling within the genera of any of the above species.

[0183] The means to achieve conditional expression are not restricted to the tetracycline promoter system and can be performed using other conditional promoters. Such conditional promoter may, for example, be regulated by a repressor which repress transcription from the promoter under particular condition or by a transactivator which increases transcription from the promoter, such as, when in the presence of an inducer. Alternative promoters that could functionally replace the tetracycline promoter include but are not limited to other antibiotic-based regulatable promoter systems (e.g., pristinamycin-induced promoter or PIP) as well as the C. neoformans homologs of Candida albicans conditionally-regulated promoters such as MET25, MAL2, PHO5, GAL1, 10, STE2, or STE3.

[0184] In other embodiments of the invention, conditional expression is achieved by means other than the reliance of conditional promoters. For example, conditional expression could be achieved by the replacement of the wild type allele with temperature sensitive alleles derived in vitro, and their phenotype would then be analyzed at the nonpermissive temperature. In a related approach, insertion of a ubiquitination signal into the a gene to destabilize the encoded gene product during activation conditions can be adopted to examine phenotypic effects resulting from gene inactivation. Collectively, these examples demonstrate the manner in which C. neoformans genes can be disrupted and conditionally regulated using the methods disclosed herein.

[0185] In an alternative embodiment of the present invention, a constitutive promoter regulated by an excisable transactivator can be used. The promoter is placed upstream to a target gene to repress expression to the basal level characteristic of the promoter. For example, in a fungal cell, a heterologous promoter containing lexA operator elements may be used in combination with a fusion protein composed of the lexA DNA binding domain and any transcriptional activator domain (e.g. GAL4, HAP4, VP16) to provide constitutive expression of a target gene. Counterselection mediated by 5-FOA can be used to select those cells which have excised the gene encoding the fusion protein. This procedure enables an examination of the phenotype associated with repression of the target gene to the basal level of expression provided by the lexA heterologous promoter in the absence of a functional transcription activator. The conditional-expression C. neoformans mutant strains generated by this approach can be used for drug target validation as described in detail in the sections below. In this system, the low basal level expression associated with the heterologous promoter is critical. Thus, it is preferable that the basal level of expression of the promoter is low to make this alternative shut-off system more useful for target validation.

[0186] Alternatively, conditional expression of a target gene can be achieved without the use of a transactivator containing a DNA binding, transcriptional activator domain. A cassette could be assembled to contain a heterologous constitutive promoter downstream of, for example, the URA5 selectable marker, which is flanked with a direct repeat containing homologous sequences to the 5′ portion of the target gene. Additional homologous sequences upstream of the target, when added to this cassette would facilitate homologous recombination and replacement of the native promoter with the above-described heterologous promoter cassette immediately upstream of the start codon of the target gene or open reading frame. Conditional expression is achieved by selecting uracil prototrophic strains, by using the appropriate media, which have integrated the heterologous constitutive promoter and URA5 marker and examining the growth of the resulting strain versus a wild type strain grown under identical conditions. Subsequent selection of 5-FOA resistant strains provides isolates which have lost the URA5 marker and heterologous, constitutive promoter, allowing a comparison between the growth of the resulting strain lacking a promoter for expression of the target gene and the growth of a wild type strain cultured under identical conditions.

[0187] 5.2.8 Construction of Mutant Diploid Strains

[0188] Environmental and clinical isolates of C. neoformans are predominantly haploid. Stable diploid strains can be isolated by genetic crosses of congenic genetically marked strains. These diploid strains are self-fertile and grow as yeast cells as 37° C. but spontaneously filament and spoulate when cultured at 24° C. These diploid strains are heterozygous at the MAT locus (MATα/MATa) and can be transformed and sporulated with meiotic segregation of an integrated marker. For a detailed description of the characterization and techniques for handling such diploid strains, see Sia et al., 2000, Fungal Genet. Biol., 29:153-163; and Lengeler et al., 2001, Infection Immunity, 69:115-122, which are both incorporated herein by reference in its entirety.

[0189] According to the invention, diploid forms of mutant Cryptococcus neoformans are also encompassed. In these diploid forms, only one allele of a gene is eliminated, while the second allele is placed under the control of the heterologous promoter, the activity of which is regulatable as described in the previous section. Where the gene is essential, elimination of both alleles will be lethal or severely crippling for growth. Therefore, in the present invention, a heterologous promoter is used to provide a range of levels of expression of the second allele. Depending on the conditions, the second allele can be non-expressing, underexpressing, overexpressing, or expressing at a normal level relative to that when the allele is linked to its native promoter.

[0190] Precise replacement of a target gene is facilitated by using a gene disruption cassette comprising a selectable marker, preferably a dominant selectable marker, that is expressible in the strain of interest. The availability of two distinct dominant selectable markers allows the gene replacement process to be engineered at both alleles of the target gene, without the required counterselection step inherent in existing methods.

[0191] In particular, the present invention encompasses a method for constructing a strain of diploid pathogenic fungal cells, in which both alleles of a gene are modified, the method comprising the steps of (a) modifying a first allele of a gene in diploid pathogenic fungal cells by recombination using a gene disruption cassette comprising a nucleotide sequence encoding a selectable marker that is expressible in the cells, thereby providing heterozygous pathogenic fungal cells in which the first allele of the gene is inactivated; and (b) modifying the second allele of the gene in the heterozygous diploid pathogenic fungal cells by recombination with a promoter replacement fragment comprising a heterologous promoter, such that the expression of the second allele of the gene is regulated by the heterologous promoter.

[0192] The process can be repeated for a desired subset of the genes such that a collection of C. neoformans diploid strains is generated wherein each strain comprises a modified allelic pair of a different gene. By repeating this process for every gene in a pathogenic fungus, a complete set of C. neoformans diploid strains representing the entire genome of the pathogenic fungus can be obtained. Thus, the present invention provides a method of assembling a collection of diploid pathogenic fungal cells, each of which comprises the modified alleles of a different gene. The method comprises repeating the steps of modifying pairs of alleles a plurality of times, wherein a different pair of gene alleles is modified with each repetition, thereby providing the collection of diploid pathogenic fungal cells each comprising the modified alleles of a different gene.

[0193] Various embodiments for the construction of such C. neoformans diploid strains, uses the following two-step method. Several art-known methods are available to create a heterozygote mutant. Auxotrophic markers, such as but not limited to the Cryptococcus neoformans equivalents of CaURA3, CaHIS3, CaLEU2, or CaTRP1, could be used for gene disruption if desired. However, the preferred method of heterozygote construction in diploid fungi employs a genetically modified dominant selectable marker. C. neoformans is sensitive to the nucleoside-like antibiotic streptothricin and the presence of the drug resistance gene of Streptomyces noursei gene within C. neoformans allows acetylation of the drug rendering it nontoxic and permitting the strain to grow in the presence of streptothricin.

[0194] PCR amplification of either dominant selectable marker so as to include about 65 bp of flanking sequence identical to the sequence 5′ and 3′ of the C. neoformans gene to be disrupted, allows construction of a gene disruption cassette for any given C. neoformans gene. By employing the method of Baudin et al. (1993, Nucleic Acids Research 21:3329-30), a gene disruption event can be obtained following transformation of a C. neoformans strain with the PCR-amplified gene disruption cassette and selection for drug resistant transformants that have precisely replaced the wild type gene with the dominant selectable marker. Such mutant strains can be selected for growth in the presence of a drug, such as but not limited to streptothricin. The resulting gene disruptions are generally heterozygous in the diploid C. neoformans, with one copy of the allelic pair on one homologous chromosome disrupted, and the other allele on the other homologous chromosome remaining as a wild type allele as found in the initial parental strain. The disrupted allele is non-functional, and expression from this allele of the gene is nil. By repeating this process for all the genes in the genome of an organism, a set of gene disruptions can be obtained for every gene in the organism. The method can also be applied to a desired subset of genes.

[0195] The conditional expression system used in this embodiment of the invention comprises a regulatable promoter and a means for regulating promoter activity. Conditional expression of the remaining wild type allele in a heterozygote constructed as set forth in Section 5.2.7 is achieved by replacing its promoter with a tetracycline-regulatable promoter system that is developed initially for S. cerevisiae. See Gari et al., 1997, Yeast 13:837-848; and Nagahashi et al., 1997, Mol. Gen. Genet. 255:372-375. Targeted gene disruption in C. neoformans using the phosphoribosylaminoimidazole carboxylase (ADE2) gene as a selectable marker can be used as described above. Strains of C. neoformans that are deficient in ADE2 are used in these methods (e.g., JEC 170, JSC50 and JEC156).

[0196] In a preferred embodiment of this method, performing the gene disruption first enables heterozygous strains to be constructed and separately collected as a heterozygote strain collection during the process of drug target validation. Such a C. neoformas heterozygote strain collection enables drug screening approaches based on haploinsufficiency for validated targets within the collection. As used herein, the term “haploinsufficiency” refers to the phenomenon whereby heterozygous strains for a given gene express approximately half the normal diploid level of a particular gene product. Consequently, these strains provide constructions having a diminished level of the encoded gene product, and they may be used directly in screens for antifungal compounds. Here differential sensitivity of a diploid parent, as compared with its heterozygous derivative, will indicate that a drug is active against the encoded gene product.

[0197] It is clear to those skilled in the art that the order of allele modification followed in this embodiment of the invention is not critical, and that it is feasible to perform these steps in a different order such that the conditional-expressing allele is constructed first and the disruption of the remaining wild type gene allele be performed subsequently. However, where the promoter replacement step is carried out first, care should be taken to delete sequences homologous to those employed in the gene disruption step.

### 5.3 Identification and Validation of Essential Genes

[0198] 5.3.1 Target Genes

[0199] Target discovery has traditionally been a costly, time-consuming process, in which newly-identified genes and gene products have been individually analyzed as potentially-suitable drug targets. DNA sequence analysis of entire genomes has markedly accelerated the gene discovery process. Consequently, new methods and tools are required to analyze this information, first to identify all of the genes of the organism, and then, to discern which genes encode products that will be suitable targets for the discovery of effective, non-toxic drugs. Gene discovery through sequence analysis alone does not validate either known or novel genes as drug targets. Elucidation of the function of a gene from the underlying and a determination of whether or not that gene is essential still present substantial obstacles to the identification of appropriate drug targets.

[0200] As noted above, Cryptococcus neoformans is a major fungal pathogen of immunocompromised humans. An absence of identified specific, sensitive, and unique drug targets in this organism has hampered the development of effective, non-toxic compounds for clinical use. The recent extensive DNA sequence analysis of the Cryptococcus neoformans genome is rejuvenating efforts to identify new antifungal drug targets. Nevertheless, two primary obstacles to the exploitation of this information for the development of useful drug targets remain: the paucity of suitable markers for genetic manipulations in Cryptococcus neoformans and the inherent difficulty in establishing whether a specific gene encodes an essential product.

[0201] 5.3.2 Validation of Genes Encoding Drug Targets

[0202] Target gene validation refers to the process by which a gene product is identified as suitable for use in screening methods or assays in order to find modulators of the function or structure of that gene product. Criteria used for validation of a gene product as a target for drug screening, however, may be varied depending on the desired mode of action that the compounds sought will have, as well as the host to be protected.

[0203] In one aspect of the present invention, conditional-expression C. neoformans mutant strains having modified essential genes can be used directly for drug screening. In another aspect, the initial set of essential genes is further characterized using, for example, nucleotide sequence comparisons, to identify a subset of essential genes which include only those genes specific to fungi—that is, a subset of genes encoding essential genes products which do not have homologs in a host of the pathogen, such as humans. Modulators, and preferably inhibitors, of such a subset of genes in a fungal pathogen of humans would be predicted to be much less likely to have toxic side effects when used to treat humans.

[0204] Similarly, other subsets of the larger essential gene set could be defined to include only those conditional-expression C. neoformans mutant strains carrying modified genes that do not have a homologous sequence in one or more host (e.g., mammalian) species to allow the detection of compounds expected to be used in veterinary applications. In addition, using other homology criteria, a subset of conditional-expression C. neoformans mutant strains is identified and used for the detection of anti-fungal compounds active against agricultural pathogens, inhibiting targets that do not have homologs in the crop to be protected.

[0205] Current C. neoformans gene disruption strategies identify nonessential genes and permit the inference that other genes are essential, based on a failure to generate a null mutant. The null phenotype of a drug target predicts the absolute efficaciousness of the “perfect” drug acting on this target, such as a cidal (cell death) versus static (inhibitory growth) null terminal phenotype for a particular drug target.

[0206] For example, in Candida albicans, gene disruption of CaERG11, the drug target of fluconazole, is presumed to be essential based on the failure to construct a homozygous CaERG11 deletion strain using the URA blaster method. However, direct evaluation of its null phenotype being cidal or static could not be performed in the pathogen, and only after the discovery of fluconazole was it possible to biochemically determine both the drug, and presumably the drug target to be static rather than as cidal. Despite the success fluconazole enjoys in the marketplace, its fungistatic mode of action contributes to its primary limitation, i.e., drug resistance after prolonged treatment. Therefore, for the first time, the ability to identify and evaluate cidal null phenotypes for validated drug targets within the pathogen as provided by the invention, now enables directed strategies to identifying antifungal drugs that specifically display a fungicidal mode of action.

[0207] Using a single conditional-expression C. neoformans mutant strain or a desired collection of conditional-expression C. neoformans mutant strains comprising essential genes, one or more target genes can be directly evaluated as displaying either a cidal or static null phenotype. This is determined by first incubating conditional-expression C. neoformans mutant strains under repressing conditions for the conditional expression of the modified gene for varying lengths of time in liquid culture, and measuring the percentage of viable cells following plating a defined number of cells onto growth conditions which relieve repression. The percentage of viable cells that remain after return to non-repressing conditions reflects either a cidal (low percent survival) or static (high percent survival) phenotype. Alternatively, vital dyes such as methylene blue or propidium iodide could be used to quantify percent viability of cells for a particular strain under repressing versus inducing conditions. As known fungicidal drug targets are included in the conditional-expression C. neoformans mutant strains strain collection, direct comparisons can be made between this standard fungicidal drug target and novel targets comprising the drug target set. In this way each member of the target set can be immediately ranked and prioritized against an industry standard cidal drug target to select appropriate drug targets and screening assays for the identification of the most rapid-acting cidal compounds. Accordingly, in preferred embodiments, mutations of the essential genes of the invention confer to the cells a rapid cidal phenotype.

### 5.4 Screening Assays

[0208] The following assays are designed to identify compounds that bind to target gene products, bind to other cellular proteins that interact with the target gene product, and to compounds that interfere with the interaction of the target gene product with other cellular proteins. Compounds identified via such methods can include compounds which modulate the activity of a polypeptide encoded by a target gene of the invention (that is, increase or decrease its activity, relative to activity observed in the absence of the compound). Alternatively, compounds identified via such methods can include compounds which modulate the expression of the polynucleotide (that is, increase or decrease expression relative to expression levels observed in the absence of the compound), or increase or decrease the stability of the expressed product encoded by that polynucleotide. Compounds, such as compounds identified via the methods of the invention, can be tested using standard assays well known to those of skill in the art for their ability to modulate activity/expression.

[0209] Accordingly, the present invention provides a method for identifying an antimycotic compound comprising screening a plurality of compounds to identify a compound that modulates the activity or level of a gene product, said gene product being encoded by a nucleotide sequence selected from the group consisting of SEQ ID NOs: 2001-2361, as well as the gene product encoded by genomic SEQ ID NOs: 1-361 and 1001-1361, as expressed by C. neoformans, or a nucleotide sequence that is naturally occurring in Saccharomyces cerevisiae Candida albicans, Aspergillus fumigatus and that is the ortholog of a gene having a nucleotide sequence selected from the group consisting of SEQ ID NOs: 2001-2361.

[0210] 5.4.1 In Vitro Screening Assays

[0211] In vitro screening assays are designed to identify compounds capable of binding the target gene products of the invention. Compounds identified in this manner are useful, for example, in modulating the activity of wild type and/or mutant target gene products, are useful in elucidating the biological function of target gene products, are utilized in screens for identifying other compounds that disrupt normal target gene product interactions, or are useful themselves for the disruption of such interactions.

[0212] The principle of the assays used to identify compounds that bind to the target gene product involves preparing a reaction mixture comprising the target gene product and the test compound under conditions and for a time sufficient to allow the two components to interact and bind, thus forming a complex which is removed and/or detected within the reaction mixture. These assays are conducted in a variety of ways. For example, any method that detects an altered physical property (e.g., size, mobility, etc.) of a target gene product of the invention complexed to a test compound from an unbound target gene product of the invention can be used in the methods of the invention, including, but not limited to, electrophoresis, size exclusion chromatography, and mass spectrometry. Other methods to detect binding between polypeptide molecules of the invention and test compounds directly can also be used, including, but not limited to, affinity chromatography, scintillation proximity assay, nuclear magnetic resonance spectroscopy, and fluorescence resonance energy transfer.

[0213] In a first embodiment, electrophoresis is used to identify test compounds capable of binding a polypeptide of the invention. In general, a polypeptide molecule of the invention bound to a test compound is larger than an unbound polypeptide molecule of the invention. Electrophoretic separation based on size allows for determination of such a change in size. Any method of electrophoretic separation, including but not limited to, denaturing and non-denaturing polyacrylamide gel electrophoresis, urea gel electrophoresis, gel filtration, pulsed field gel electrophoresis, two dimensional gel electrophoresis, continuous flow electrophoresis, zone electrophoresis, agarose gel electrophoresis, and capillary electrophoresis can be used. In a preferred embodiment, an automated electrophoretic system comprising a capillary cartridge having a plurality of capillary tubes is used for high-throughput screening of test compounds capable of binding a target gene product of the invention. Such an apparatus for performing automated capillary gel electrophoresis is disclosed in U.S. Pat. Nos. 5,885,430; 5,916,428; 6,027,627; and 6,063,251. In another preferred embodiment, an automated electrophoretic system can comprise a chip-based microfluidic system for high-speed electrophoretic analysis See, for example, U.S. Pat. No. 5,699,157.

[0214] In a second embodiment, size exclusion chromatography is used to identify test compounds capable of binding polypeptide molecules of the invention. Size-exclusion chromatography separates molecules based on their size and uses gel-based media comprised of beads with specific size distributions. When applied to a column, this media settles into a tightly packed matrix and forms a complex array of pores. Separation is accomplished by the inclusion or exclusion of molecules by these pores based on molecular size. Small molecules are included into the pores and, consequently, their migration through the matrix is retarded due to the added distance they must travel before elution. Large molecules are excluded from the pores and migrate with the void volume when applied to the matrix. In the present invention, a target gene product of the invention bound to a test compound will be larger, and thus elute faster from the size exclusion column, than an unbound polypeptide molecule.

[0215] In a third embodiment, mass spectrometry is used to identify test compounds capable of binding polypeptides of the invention. An automated method for analyzing mass spectrometer data which can analyze complex mixtures containing many thousands of components and can correct for background noise, multiply charged peaks and atomic isotope peaks is described in U.S. Pat. No. 6,147,344.

[0216] In another embodiment, affinity chromatography is used to identify test compounds capable of binding target gene products of the invention. To accomplish this, a target gene product of the invention is labeled with an affinity tag (e.g., GST, HA, myc, streptavidin, biotin) such that the polypeptide molecule of the invention can attach to a solid support through interaction with the affinity tag and solid support medium. The tagged polypeptide of the invention is contacted with a test compound either while free in solution or while bound to a solid support. The solid support an comprise, but is not limited to, cross-linked agarose beads that are coupled with a ligand for the affinity tag. Alternatively, the solid support may be a glass, silicon, metal, or carbon, plastic (polystyrene, polypropylene) surface with or without a self-assembled monolayer either with a covalently attached ligand for the affinity tag, or with inherent affinity for the tag on the polypeptide molecule of the invention.

[0217] Once the complex between the target gene product of the invention and test compound has reached equilibrium and has been captured, one skilled in the art will appreciate that the retention of bound compounds and removal of unbound compounds is facilitated by washing the solid support with large excesses of binding reaction buffer. Furthermore, retention of high affinity compounds and removal of low affinity compounds can be accomplished by a number of means that increase the stringency of washing; these means include, but are not limited to, increasing the number and duration of washes, raising the salt concentration of the wash buffer, addition of detergent or surfactant to the wash buffer, and addition of non-specific competitor to the wash buffer.

[0218] Following the removal of unbound compounds, bound compounds with high affinity for the immobilized polypeptide molecule of the invention can be eluted and analyzed. The elution of test compounds can be accomplished by any means that break the non-covalent interactions between the polypeptide of the invention and test compound. Means for elution include, but are not limited to, changing the pH, changing the salt concentration, the application of organic solvents, and the application of molecules that compete with the bound ligand. Preferably, the means employed for elution will release the compound from the target gene product of invention, but will not effect the interaction between the affinity tag and the solid support, thereby achieving selective elution of test compound.

[0219] In a preferred embodiment, affinity chromatography is used for high through put screening. In this embodiment, the test compound is detectably labeled (e.g., with fluorescent dyes, radioactive isotopes, etc.) and applied to polypeptide molecules of the invention in a spatially addressed fashion (e.g., attached to separate wells of a microplate). Binding between the test compound and the polypeptide molecule of the invention can be determined by the presence of the detectable label on the test compound to quickly identify which wells contain test compounds capable of binding.

[0220] In practice, microtiter plates are conveniently utilized as the solid phase. The anchored component is immobilized by non-covalent or covalent attachments. Non-covalent attachment can be accomplished by simply coating the solid surface with a solution of the protein and drying the coated surface. Alternatively, an immobilized antibody, preferably a monoclonal antibody, specific for the protein to be immobilized is used to anchor the protein to the solid surface. The surfaces are prepared in advance and stored. In order to conduct the assay, the nonimmobilized component is added to the coated surface containing the anchored component. After the reaction is complete, unreacted components are removed (e. g., by washing) under conditions such that any complexes formed will remain immobilized on the solid surface. The detection of complexes anchored on the solid surface is accomplished in a number of ways. Where the previously nonimmobilized component is pre-labeled, the detection of label immobilized on the surface indicates that complexes were formed. Where the previously nonimmobilized component is not pre-labeled, an indirect label is used to detect complexes anchored on the surface; e.g., using a labeled antibody specific for the previously nonimmobilized component (the antibody, in turn, is directly labeled or indirectly labeled with a labeled anti-Ig antibody).

[0221] Alternatively, a reaction is conducted in a liquid phase, the reaction products are separated from unreacted components, and complexes are detected; e.g., using an immobilized antibody specific for the target gene product or for the test compound, to anchor complexes formed in solution, and a second labeled antibody, specific for the other component of the complex to allow detection of anchored complexes.

[0222] In yet another embodiment, a scintillation proximity assay (“SPA”) can be used to identify test compounds capable of binding to a target gene product of the invention. In this embodiment either the target gene product of the invention or the test compound must labeled (e.g., with a radioisotope, etc.). The unlabeled entity is attached to a surface impregnated with a scintillant. The labeled entity is then incubated with the attached unlabeled entity under conditions that allow binding. The amount of binding between a target gene product of the invention and test compound is quantitated with a scintillation counter (Cook, 1996, Drug Discov. Today 1:287-294; Mei et al., 1997, Bioorg. Med. Chem. 5:1173-1184; Mei et al., 1998, Biochemistry 37:14204-14212). High throughput SPA screening uses microplates with scintillant either directly incorporated into the plastic (Nakayama et al., 1998, J. Biomol. Screening 3:43-48) or coating the plastic. In a preferred embodiment, such microtiter plates are used in methods of the invention comprising (a) labeling of the target gene product of the invention with a radioactive label; (b) contacting the labeled target gene product with a test compound, wherein the test compound is attached to a microtiter well coated with scintillant; and (c) identifying and quantifying the amount of polypeptide of the invention bound to the test compound with SPA.

[0223] In yet another embodiment, nuclear magnetic resonance spectroscopy (“NMR”) is used to identify test compounds capable of binding target gene product of the invention. NMR is used to identify target gene product of the invention that are bound by a test compound by qualitatively determining changes in chemical shift, specifically from distances measured using relaxation effects. NMR-based approaches have been used in the identification of small molecule binders of protein drug targets (Xavier et al., 2000, Trends Biotechnol. 18:349-356). Also applicable is a strategy for lead generation by NMR using a library of small molecules which has been described in Fejzo et al. (1999, Chem. Biol. 6:755-769).

[0224] In yet another embodiment, fluorescence resonance energy transfer (“FRET”) can be used to identify test compounds capable of binding to a target gene product of the invention. In this embodiment, both the target gene product of the invention and the test compound are labeled with a different fluorescent molecule (i.e., flourophore). A characteristic change in fluorescence occurs when two fluorophores with overlapping emission and excitation wavelength bands are held together in close proximity, such as by a binding event. One of the fluorophores used as a label will have overlapping excitation and emission spectra with the other fluorophore used as a label such that one fluorophore (the donor) transfers its emission energy to excite the other fluorophore (the acceptor). The acceptor preferably emits light of a different wavelength upon relaxing to the ground state, or relaxes non-radioactively to quench fluorescence. FRET is very sensitive to the distance between the two fluorophores, and allows measurement of molecular distances less than 10 nm (e.g., U.S. Pat. No. 6,337,183 and Matsumoto et al., 2000, Bioorg. Med. Chem. Lett. 10:1857-1861).

[0225] 5.4.1.1 Assays For Compounds That Affect Target Gene Product Interactions

[0226] The target gene products of the invention interact, in vivo, with one or more cellular or extracellular macromolecules, such as proteins. Such macromolecules include, but are not limited to, nucleic acid molecules and proteins identified via methods such as those described above. For purposes of this discussion, such cellular and extracellular macromolecules are referred to herein as “binding partners.” Compounds that disrupt such interactions can be useful in regulating the activity of the target gene protein, especially mutant target gene proteins. Such compounds include, but are not limited to molecules such as antibodies, peptides, and the like, as described.

[0227] Any method suitable for detecting or measuring protein-macromolecule interactions can be employed for identifying novel target gene product-cellular or extracellular protein interactions as well as compounds that interfere with such interactions. Many of the techniques described in the previous section can be used for this purpose.

[0228] The basic principle of the assay systems used to identify compounds that interfere with the interaction between the target gene product and its cellular or extracellular binding partner or partners involves preparing a reaction mixture containing the target gene product and the binding partner under conditions and for a time sufficient to allow the two to interact and bind, thus forming a complex. In order to test a compound for inhibitory activity, the reaction mixture is prepared in the presence and absence of the test compound. The test compound is initially included in the reaction mixture, or added at a time subsequent to the addition of target gene product and its cellular or extracellular binding partner. Control reaction mixtures are incubated without the test compound. The formation of complexes between the target gene protein and the cellular or extracellular binding partner is then detected. The formation of a complex in the control reaction, but not in the reaction mixture containing the test compound, indicates that the compound interferes with the interaction of the target gene protein and the interactive binding partner. Additionally, complex formation within reaction mixtures containing the test compound and normal target gene protein can also be compared to complex formation within reaction mixtures containing the test compound and a mutant target gene protein. This comparison can be important in those cases wherein it is desirable to identify compounds that disrupt intermolecular interactions involving mutant but not normal target gene proteins.

[0229] The assay for compounds that interfere with the interaction of the target gene products and binding partners is conducted in either a heterogeneous or a homogeneous format. Heterogeneous assays involve anchoring either the target gene product or the binding partner onto a solid phase and detecting complexes anchored on the solid phase at the end of the reaction. In homogeneous assays, the entire reaction is carried out in a liquid phase. In either approach, the order of addition of reactants is varied to obtain different information about the compounds being tested. For example, test compounds that interfere with the interaction between the target gene products and the binding partners, e.g., by competition, are identified by conducting the reaction in the presence of the test substance; i.e., by adding the test substance to the reaction mixture prior to or simultaneously with the target gene protein and an interacting cellular or extracellular binding partner. Alternatively, test compounds that disrupt preformed complexes, e.g. compounds with higher binding constants that displace one of the components from the complex, are tested by adding the test compound to the reaction mixture after complexes have been formed. The various formats are described briefly below.

[0230] In a heterogeneous assay system, either the target gene protein or the interactive cellular or extracellular binding partner, is anchored onto a solid surface, while the non-anchored species is labeled, either directly or indirectly. In practice, microtiter plates are conveniently utilized. The anchored species is immobilized either by non-covalent or covalent attachment. Non-covalent attachment is accomplished simply by coating the solid surface with a solution of the target gene product or binding partner and drying the coated surface. Alternatively, an immobilized antibody specific for the species to be anchored is used to anchor the species to the solid surface. The surfaces can be prepared in advance and stored.

[0231] In order to conduct the assay, the partner of the immobilized species is exposed to the coated surface with or without the test compound. After the reaction is complete, unreacted components are removed (e.g., by washing) and any complexes formed will remain immobilized on the solid surface. The detection of complexes anchored on the solid surface is accomplished in a number of ways. Where the non-immobilized species is pre-labeled, the detection of label immobilized on the surface indicates that complexes were formed. Where the non-immobilized species is not pre-labeled, an indirect label can be used to detect complexes anchored on the surface; e.g., using a labeled antibody specific for the initially non-immobilized species (the antibody, in turn, is directly labeled or indirectly labeled with a labeled anti-Ig antibody). Depending upon the order of addition of reaction components, test compounds which inhibit complex formation or which disrupt preformed complexes are detected.

[0232] Alternatively, the reaction is conducted in a liquid phase in the presence or absence of the test compound, the reaction products separated from unreacted components, and complexes detected; e.g., using an immobilized antibody specific for one of the binding components to anchor any complexes formed in solution, and a second, labeled antibody specific for the other partner to detect anchored complexes. Again, depending upon the order of addition of reactants to the liquid phase, test compounds which inhibit complex or which disrupt preformed complexes are identified.

[0233] In an alternate embodiment of the invention, a homogeneous assay can be used. In this approach, a preformed complex of the target gene protein and the interacting cellular or extracellular binding partner is prepared in which either the target gene product or its binding partner is labeled, but the signal generated by the label is quenched due to complex formation (see, e.g., U.S. Pat. No. 4,109,496 by Rubenstein which utilizes this approach for immunoassays). The addition of a test substance that competes with and displaces one of the species from the preformed complex results in the generation of a signal above background. In this way, test substances which disrupt target gene protein/cellular or extracellular binding partner interaction are identified.

[0234] In a particular embodiment, the target gene product is prepared for immobilization using recombinant DNA techniques described above. For example, the target gene coding region is fused to a glutathione-S-transferase (GST) gene using a fusion vector, such as pGEX-5X-1, in such a manner that its binding activity is maintained in the resulting fusion protein. The interactive cellular or extracellular binding partner is purified and used to raise a monoclonal antibody, using methods routinely practiced in the art and as described above. This antibody is labeled with the radioactive isotope ¹²⁵I, for example, by methods routinely practiced in the art. In a heterogeneous assay, e.g., the GST-target gene fusion protein is anchored to glutathione-agarose beads. The interactive cellular or extracellular binding partner is then added in the presence or absence of the test compound in a manner that allows interaction and binding to occur. At the end of the reaction period, unbound material can be washed away, and the labeled monoclonal antibody is added to the system and allowed to bind to the complexed components. The interaction between the target gene protein and the interactive cellular or extracellular binding partner is detected by measuring the amount of radioactivity that remains associated with the glutathione-agarose beads. A successful inhibition of the interaction by the test compound results in a decrease in measured radioactivity.

[0235] Alternatively, the GST-target gene fusion protein and the interactive cellular or extracellular binding partner are mixed together in liquid in the absence of the solid glutathione-agarose beads. The test compound is added either during or after the species are allowed to interact. This mixture is added to the glutathione-agarose beads and unbound material is washed away. Again the extent of inhibition of the target gene product/binding partner interaction is detected by adding the labeled antibody and measuring the radioactivity associated with the beads.

[0236] In another embodiment of the invention, these same techniques are employed using peptide fragments that correspond to the binding domains of the target gene product and/or the interactive cellular or extracellular binding partner (in cases where the binding partner is a protein), in place of one or both of the full length proteins. Any number of methods routinely practiced in the art are used to identify and isolate the binding sites. These methods include, but are not limited to, mutagenesis of the gene encoding one of the proteins and screening for disruption of binding in a co-immunoprecipitation assay. Compensating mutations in the gene encoding the second species in the complex are then selected. Sequence analysis of the genes encoding the respective proteins reveals the mutations that correspond to the region of the protein involved in interactive binding. Alternatively, one protein is anchored to a solid surface using methods described above, and allowed to interact with and bind to its labeled binding partner, which has been treated with a proteolytic enzyme, such as trypsin. After washing, a short, labeled peptide comprising the binding domain remains associated with the solid material, and can be isolated and identified by amino acid sequencing. Also, once the gene coding for the cellular or extracellular binding partner is obtained, short gene segments are engineered to express peptide fragments of the protein, which are tested for binding activity and purified or synthesized.

[0237] For example, and not by way of limitation, a target gene product is anchored to a solid material as described, above, by making a GST-target gene fusion protein and allowing it to bind to glutathione agarose beads. The interactive cellular or extracellular binding partner is labeled with a radioactive isotope, such as ³⁵S, and cleaved with a proteolytic enzyme such as trypsin. Cleavage products are added to the anchored GST-target gene fusion protein and allowed to bind. After washing away unbound peptides, labeled bound material, representing the cellular or extracellular binding partner binding domain, is eluted, purified, and analyzed for amino acid sequence by well known methods. Peptides so identified are produced synthetically or fused to appropriate facilitative proteins using well known recombinant DNA technology.

[0238] 5.4.1.2 Screening a Combinatorial Chemical library

[0239] In one embodiment of the present invention, the proteins encoded by the fungal genes identified using the methods of the present invention are isolated and expressed. These recombinant proteins are then used as targets in assays to screen libraries of compounds for potential drug candidates. The generation of chemical libraries is well known in the art. For example, combinatorial chemistry is used to generate a library of compounds to be screened in the assays described herein. A combinatorial chemical library is a collection of diverse chemical compounds generated by either chemical synthesis or biological synthesis by combining a number of chemical “building block” reagents. For example, a linear combinatorial chemical library such as a polypeptide library is formed by combining amino acids in every possible combination to yield peptides of a given length. Millions of chemical compounds theoretically can be synthesized through such combinatorial mixings of chemical building blocks. For example, one commentator observed that the systematic, combinatorial mixing of 100 interchangeable chemical building blocks results in the theoretical synthesis of 100 million tetrameric compounds or 10 billion pentameric compounds. (Gallop et al., “Applications of Combinatorial Technologies to Drug Discovery, Background and Peptide Combinatorial Libraries,” Journal of Medicinal Chemistry, Vol. 37, No. 9, 1233-1250 (1994). Other chemical libraries known to those in the art may also be used, including natural product libraries.

[0240] Once generated, combinatorial libraries are screened for compounds that possess desirable biological properties. For example, compounds which may be useful as drugs or to develop drugs would likely have the ability to bind to the target protein identified, expressed and purified as discussed above. Further, if the identified target protein is an enzyme, candidate compounds would likely interfere with the enzymatic properties of the target protein. For example, the enzymatic function of a target protein may be to serve as a protease, nuclease, phosphatase, dehydrogenase, transporter protein, transcriptional enzyme, replication component, and any other type of enzyme known or unknown. Thus, the present invention contemplates using the protein products described above to screen combinatorial chemical libraries.

[0241] In some embodiments of the present invention, the biochemical activity of the protein, as well as the chemical structure of a substrate on which the protein acts is known. In other embodiments of the present invention, the biochemical activity of the target protein is unknown and the target protein has no known substrates.

[0242] In some embodiments of the present invention, libraries of compounds are screened to identify compounds that function as inhibitors of the target gene product. First, a library of small molecules is generated using methods of combinatorial library formation well known in the art. U.S. Pat. Nos. 5,463,564 and 5,574,656, to Agrafiotis, et al., entitled “System and Method of Automatically Generating Chemical Compounds with Desired Properties,” the disclosures of which are incorporated herein by reference in their entireties, are two such teachings. Then the library compounds are screened to identify those compounds that possess desired structural and functional properties. U.S. Pat. No. 5,684,711, the disclosure of which is incorporated herein by reference in its entirety, also discusses a method for screening libraries.

[0243] To illustrate the screening process, the target gene product, an enzyme, and chemical compounds of the library are combined and permitted to interact with one another. A labeled substrate is added to the incubation. The label on the substrate is such that a detectable signal is emitted from metabolized substrate molecules. The emission of this signal permits one to measure the effect of the combinatorial library compounds on the enzymatic activity of target enzymes by comparing it to the signal emitted in the absence of combinatorial library compounds. The characteristics of each library compound are encoded so that compounds demonstrating activity against the enzyme can be analyzed and features common to the various compounds identified can be isolated and combined into future iterations of libraries.

[0244] Once a library of compounds is screened, subsequent libraries are generated using those chemical building blocks that possess the features shown in the first round of screen to have activity against the target enzyme. Using this method, subsequent iterations of candidate compounds will possess more and more of those structural and functional features required to inhibit the function of the target enzyme, until a group of enzyme inhibitors with high specificity for the enzyme can be found. These compounds can then be further tested for their safety and efficacy as antibiotics for use in mammals.

[0245] It will be readily appreciated that this particular screening methodology is exemplary only. Other methods are well known to those skilled in the art. For example, a wide variety of screening techniques are known for a large number of naturally-occurring targets when the biochemical function of the target protein is known. For example, some techniques involve the generation and use of small peptides to probe and analyze target proteins both biochemically and genetically in order to identify and develop drug leads. Such techniques include the methods described in PCT publications No. WO9935494, WO9819162, WO9954728, the disclosures of which are incorporated herein by reference in their entireties.

[0246] Similar methods may be used to identify compounds which inhibit the activity of proteins from organisms other than C. neoformans which are homologous to the C. neoformans target proteins described herein. For example, the proteins may be from animal fugal pathogens such as Aspergillus niger, Aspergillus flavis, Candida tropicalis, Candida parapsilopsis, Candida krusei, Coccidioides immitis, Exophalia dermatiditis, Fusarium oxysporum, Histoplasma capsulatum, Phneumocystis carinii, Trichosporon beigelii, Rhizopus arrhizus, Mucor rouxii, Rhizomucor pusillus, or Absidia corymbigera, or the plant fungal pathogens, such as Botrytis cinerea, Erysiphe graminis, Magnaporthe grisea, Puccinia recodita, Septoria triticii, Tilletia controversa, Ustilago maydis, or any species falling within the genera of any of the above species. In some embodiments, the proteins are from an organism other than Saccharomyces cerevisiae Candida albicans, or Aspergillus fumigatus.

[0247] 5.4.1.3 In vitro Enzyme Assays

[0248] C. neoformans strains are used to develop in vitro assays for biochemical activities shown to be essential to cell viability, e.g., by homology to known essential genes of Candida albicans and/or Aspergillus fumigatus. A number of such essential genes identified by sequence analysis of the C. neoformans genome display statistically significant similarity to biochemically characterized gene products from other organisms.

[0249] Therefore, a number of well characterized standard in vitro biochemical assays (e.g., DNA binding, RNA processing, GTP binding and hydrolysis, and phosphorylation) are readily adapted for these validated drug targets. Alternatively, novel assays are developed using biochemical information pertaining to validated drug targets within the C. neoformans sequenced gene collection. Any assays known in the art for enzymes with similar biochemical activities (e.g., mechanism of action, class of substrate) are adapted for screening for inhibitors of the enzymes encoded by these essential C. neoformans genes.

[0250] The present invention also provides cell extracts useful in establishing in vitro assays for suitable biochemical targets. For example, in an embodiment of the present invention, conditional-expression C. neoformans mutant strains are grown either under constitutive expression conditions or transcription repression conditions to either overproduce or deplete a particular gene product. Cellular extracts resulting from strains incubated under these two conditions are compared with extracts prepared from identically-grown wild type strains. These extracts are then used for the rapid evaluation of targets using existing in vitro assays or new assays directed toward novel gene products, without having to purify the gene product. Such a whole cell extract approach to in vitro assay development is typically necessary for targets involved in cell wall biosynthetic pathways (e.g., (1,3)-β-glucan synthesis or chitin synthesis) which involve multiple gene products that transit the secretory pathway before receiving essential post-translational modifications required for their functional activity. Conditional-expression C. neoformans mutant strains for conditional expression of target genes involved in these, or other cell wall pathways (e.g., (1,6)-β-glucan synthesis) enable in vitro assays to be performed directly in C. neoformans.

[0251] 5.4.2 Cell-based Screening Assays

[0252] Current cell-based assays used to identify or to characterize compounds for drug discovery and development frequently depend on detecting the ability of a test compound to modulate the activity of a target molecule located within a cell or located on the surface of a cell. Most often such target molecules are proteins such as enzymes, receptors and the like. However, target molecules also include other molecules such as DNAs, lipids, carbohydrates and RNAs including messenger RNAs, ribosomal RNAs, tRNAs and the like. A number of highly sensitive cell-based assay methods are available to those of skill in the art to detect binding and interaction of test compounds with specific target molecules. However, these methods are generally not highly effective when the test compound binds to or otherwise interacts with its target molecule with moderate or low affinity. In addition, the target molecule may not be readily accessible to a test compound in solution, such as when the target molecule is located inside the cell or within a cellular compartment such as the periplasm of a bacterial cell. Thus, current cell-based assay methods are limited in that they are not effective in identifying or characterizing compounds that interact with their targets with moderate to low affinity or compounds that interact with targets that are not readily accessible.

[0253] The cell-based assay methods of the present invention have substantial advantages over current cell-based assays. These advantages derive from the use of sensitized cells in which the level or activity of at least one gene product required for fungal survival, growth, proliferation, virulence, or pathogenicity (the target molecule) has been specifically reduced to the point where the presence or absence of its function becomes a rate-determining step for fungal survival, growth, proliferation, virulence, or pathogenicity. Such sensitized cells become much more sensitive to compounds that are active against the affected target molecule. For example, sensitized cells are obtained by growing a conditional-expression C. neoformans mutant strain in the presence of a concentration of inducer or repressor which provides a level of a gene product required for fungal growth, survival, proliferation, virulence, or pathogenicity such that the presence or absence of its function becomes a rate-determining step for fungal growth, survival, proliferation, virulence, or pathogenicity. Thus, cell-based assays of the present invention are capable of detecting compounds exhibiting low or moderate potency against the target molecule of interest because such compounds are substantially more potent on sensitized cells than on non-sensitized cells. The effect may be such that a test compound may be two to several times more potent, at least 10 times more potent, at least 20 times more potent, at least 50 times more potent, at least 100 times more potent, at least 1000 times more potent, or even more than 1000 times more potent when tested on the sensitized cells as compared to the non-sensitized cells.

[0254] Due in part to the increased appearance of antibiotic resistance in pathogenic microorganisms and to the significant side-effects associated with some currently used antibiotics, novel antibiotics acting at new targets are highly sought after in the art. Yet, another limitation in the current art related to cell-based assays is the problem of repeatedly identifying hits against the same kinds of target molecules in the same limited set of biological pathways. This may occur when compounds acting at such new targets are discarded, ignored or fail to be detected because compounds acting at the Aold@ targets are encountered more frequently and are more potent than compounds acting at the new targets. As a result, the majority of antibiotics in use currently interact with a relatively small number of target molecules within an even more limited set of biological pathways.

[0255] The use of sensitized cells of the current invention provides a solution to the above problems in two ways. First, desired compounds acting at a target of interest, whether a new target or a previously known but poorly exploited target, can now be detected above the “noise” of compounds acting at the “old” targets due to the specific and substantial increase in potency of such desired compounds when tested on the sensitized cells of the current invention. Second, the methods used to sensitize cells to compounds acting at a target of interest may also sensitize these cells to compounds acting at other target molecules within the same biological pathway. For example, expression of a gene encoding a ribosomal protein at a level such that the function of the ribosomal protein becomes rate limiting for fungal growth, survival, proliferation, virulence, or pathogenicity is expected to sensitize the cell to compounds acting at that ribosomal protein to compounds acting at any of the ribosomal components (proteins or rRNA) or even to compounds acting at any target which is part of the protein synthesis pathway. Thus an important advantage of the present invention is the ability to reveal new targets and pathways that were previously not readily accessible to drug discovery methods.

[0256] Sensitized cells of the present invention are prepared by reducing the activity or level of a target molecule. The target molecule may be a gene product, such as an RNA or polypeptide produced from the nucleic acids required for fungal growth, survival, proliferation, virulence, or pathogenicity described herein. In addition, the target may be an RNA or polypeptide in the same biological pathway as the nucleic acids required for fungal growth, survival, proliferation, virulence, or pathogenicity as described herein. Such biological pathways include, but are not limited to, enzymatic, biochemical and metabolic pathways as well as pathways involved in the production of cellular structures such as the cell membrane.

[0257] Current methods employed in the arts of medicinal and combinatorial chemistries are able to make use of structure-activity relationship information derived from testing compounds in various biological assays including direct binding assays and cell-based assays. Occasionally compounds are directly identified in such assays that are sufficiently potent to be developed as drugs. More often, initial hit compounds exhibit moderate or low potency. Once a hit compound is identified with low or moderate potency, directed libraries of compounds are synthesized and tested in order to identify more potent leads. Generally these directed libraries are combinatorial chemical libraries consisting of compounds with structures related to the hit compound but containing systematic variations including additions, subtractions and substitutions of various structural features. When tested for activity against the target molecule, structural features are identified that either alone or in combination with other features enhance or reduce activity. This information is used to design subsequent directed libraries containing compounds with enhanced activity against the target molecule. After one or several iterations of this process, compounds with substantially increased activity against the target molecule are identified and may be further developed as drugs. This process is facilitated by use of the sensitized cells of the present invention since compounds acting at the selected targets exhibit increased potency in such cell-based assays, thus; more compounds can now be characterized providing more useful information than would be obtained otherwise.

[0258] Thus, it is now possible using cell-based assays of the present invention to identify or characterize compounds that previously would not have been readily identified or characterized including compounds that act at targets that previously were not readily exploited using cell-based assays. The process of evolving potent drug leads from initial hit compounds is also substantially improved by the cell-based assays of the present invention because, for the same number of test compounds, more structure-function relationship information is likely to be revealed.

[0259] The method of sensitizing a cell entails selecting a suitable gene. A suitable gene is one whose expression is required for the growth, survival, proliferation, virulence, or pathogenicity of the cell to be sensitized. The next step is to obtain a cell in which the level or activity of the target can be reduced to a level where it is rate limiting for growth, survival, proliferation, virulence or pathogenicity. For example, the cell may be a conditional-expression C. neoformans mutant strain in which the selected gene is under the control of a regulatable promoter. The amount of RNA transcribed from the selected gene is limited by varying the concentration of an inducer or repressor which acts on the regulatable promoter, thereby varying the activity of the promoter driving transcription of the RNA. Thus, cells are sensitized by exposing them to an inducer or repressor concentration that results in an RNA level such that the function of the selected gene product becomes rate limiting for fungal growth, survival, proliferation, virulence, or pathogenicity.

[0260] In one embodiment of the cell-based assays, conditional-expression C. neoformans mutant strains, in which the sequences required for fungal survival, growth, proliferation, virulence, or pathogenicity of C. neoformans described herein are under the control of a regulatable promoter, are grown in the presence of a concentration of inducer or repressor which causes the function of the gene products encoded by these sequences to be rate limiting for fungal growth, survival, proliferation, virulence, or pathogenicity. To achieve that goal, a growth inhibition dose curve of inducer or repressor is calculated by plotting various doses of inducer or repressor against the corresponding growth inhibition caused by the limited levels of the gene product required for fungal proliferation. From this dose-response curve, conditions providing various growth rates, from 1 to 100% as compared to inducer or repressor-free growth, can be determined. For example, if the regulatable promoter is repressed by tetracycline, the conditional-expression C. neoformans mutant strain may be grown in the presence of varying levels of tetracyline. Similarly, inducible promoters may be used. In this case, the conditional-expression C. neoformans mutant strains are grown in the presence of varying concentrations of inducer. For example, the highest concentration of the inducer or repressor that does not reduce the growth rate significantly can be estimated from the dose-response curve. Cellular proliferation can be monitored by growth medium turbidity via OD measurements. In another example, the concentration of inducer or repressor that reduces growth by 25% can be predicted from the dose-response curve. In still another example, a concentration of inducer or repressor that reduces growth by 50% can be calculated from the dose-response curve. Additional parameters such as colony forming units (cfu) are also used to measure cellular growth, survival and/or viability.

[0261] In specific embodiments of the present invention, a diploid mutant strain of C. neoformans may similarly be used as the basis for detection of an antifungal or therapeutic agent.

[0262] In various embodiments, the conditional-expression C. neoformans mutant strain is grown under a first set of conditions where the heterologous promoter is expressed at a relatively low level (i.e. partially repressed) and the extent of growth determined. This experiment is repeated in the presence of a test compound and a second measurement of growth obtained. The extent of growth in the presence and in the absence of the test compound are then compared to provide a first indicator value. Two further experiments are performed, using non-repressing growth conditions where the target gene is expressed at substantially higher levels than in the first set of conditions. The extent of growth is determined in the presence and absence of the test compound under the second set of conditions to obtain a second indicator value. The first and second indicator values are then compared. If the indicator values are essentially the same, the data suggest that the test compound does not inhibit the test target. However, if the two indicator values are substantially different, the data indicates that the level of expression of the target gene product may determine the degree of inhibition by the test compound and, therefore, it is likely that the gene product is the target of that test compound. Whole-cell assays comprising collections or subsets of multiple sensitized strains may also be screened, for example, in a series of 96-well, 384-well, or even 1586-well microtiter plates, with each well containing individual strains sensitized to identify compounds displaying a preferential activity against each affected target comprising a target set or subset selected from, but not limited to the group consisting of fungal-specific, pathogen-specific, desired biochemical-function, human-homolog, cellular localization, and signal transduction cascade target sets.

[0263] Cells to be assayed are exposed to the above-determined concentrations of inducer or repressor. The presence of the inducer or repressor at this sub-lethal concentration reduces the amount of the proliferation-required gene product to the lowest amount in the cell that will support growth. Cells grown in the presence of this concentration of inducer or repressor are therefore specifically more sensitive to inhibitors of the proliferation-required protein or RNA of interest as well as to inhibitors of proteins or RNAs in the same biological pathway as the proliferation-required protein or RNA of interest but not specifically more sensitive to inhibitors of unrelated proteins or RNAs.

[0264] Cells pretreated with sub-inhibitory concentrations of inducer or repressor, which therefore contain a reduced amount of proliferation-required target gene product, are used to screen for compounds that reduce cell growth. The sub-lethal concentration of inducer or repressor may be any concentration consistent with the intended use of the assay to identify candidate compounds to which the cells are more sensitive than are control cells in which this gene product is not rate-limiting. For example, the sub-lethal concentration of the inducer or repressor may be such that growth inhibition is at least about 5%, at least about 8%, at least about 10%, at least about 20%, at least about 30%, at least about 40%, at least about 50%, at least about 60% at least about 75%, at least 80%, at least 90%, at least 95% or more than 95%. Cells which are pre-sensitized using the preceding method are more sensitive to inhibitors of the target protein because these cells contain less target protein to inhibit than wild-type cells.

[0265] It will be appreciated that similar methods may be used to identify compounds which inhibit virulence or pathogenicity. In such methods, the virulence or pathogenicity of cells exposed to the candidate compound which express rate limiting levels of a gene product involved in virulence or pathogenicity is compared to the virulence or pathogenicity of cells exposed to the candidate compound in which the levels of the gene product are not rate limiting. Virulence or pathogenicity may be measured using the techniques described herein.

[0266] In another embodiment of the cell-based assays of the present invention, the level or activity of a gene product required for fungal growth, survival, proliferation, virulence, or pathogenicity is reduced using a mutation, such as a temperature sensitive mutation, in the sequence required for fungal growth, survival, proliferation, virulence, or pathogenicity and an inducer or repressor level which, in conjunction with the temperature sensitive mutation, provides levels of the gene product required for fungal growth, survival, proliferation, virulence, or pathogenicity which are rate limiting for proliferation. Growing the cells at an intermediate temperature between the permissive and restrictive temperatures of the temperature sensitive mutant where the mutation is in a gene required for fungal growth, survival, proliferation, virulence, or pathogenicity produces cells with reduced activity of the gene product required for growth, survival, proliferation, virulence, or pathogenicity. The concentration of inducer or repressor is chosen so as to further reduces the activity of the gene product required for fungal growth, survival, proliferation, virulence, or pathogenicity. Drugs that may not have been found using either the temperature sensitive mutation or the inducer or repressor alone may be identified by determining whether cells in which expression of the nucleic acid encoding the proliferation-required gene product has been reduced and which are grown at a temperature between the permissive temperature and the restrictive temperature are substantially more sensitive to a test compound than cells in which expression of the gene product required for fungal growth, survival, proliferation, virulence, or pathogenicity has not been reduced and which are grown at a permissive temperature. Also drugs found previously from either the use of the inducer or repressor alone or the temperature sensitive mutation alone may have a different sensitivity profile when used in cells combining the two approaches, and that sensitivity profile may indicate a more specific action of the drug in inhibiting one or more activities of the gene product.

[0267] Temperature sensitive mutations may be located at different sites within a gene and may lie within different domains of the protein. For example, the dnaB gene of Escherichia coli encodes the replication fork DNA helicase. DnaB has several domains, including domains for oligomerization, ATP hydrolysis, DNA binding, interaction with primase, interaction with DnaC, and interaction with DnaA. Temperature sensitive mutations in different domains of DnaB confer different phenotypes at the restrictive temperature, which include either an abrupt stop or a slow stop in DNA replication either with or without DNA breakdown (Wechsler, J. A. and Gross, J. D. 1971 Escherichia coli mutants temperature-sensitive for DNA synthesis. Mol. Gen. Genetics 113:273-284) and termination of growth or cell death. Thus, temperature sensitive mutations in different domains of the protein may be used in conjunction with conditional-expression C. neoformans mutant strains in which expression of the protein is under the control of a regulatable promoter.

[0268] It will be appreciated that the above method may be performed with any mutation which reduces but does not eliminate the activity or level of the gene product which is required for fungal growth, survival, proliferation, virulence, or pathogenicity.

[0269] When screening for antimicrobial agents against a gene product required for fungal growth, survival, proliferation, virulence, or pathogenicity, growth inhibition, virulence or pathogenicity of cells containing a limiting amount of that gene product can be assayed. Growth inhibition can be measured by directly comparing the amount of growth, measured by the optical density of the culture relative to uninoculated growth medium, between an experimental sample and a control sample. Alternative methods for assaying cell proliferation include measuring green fluorescent protein (GFP) reporter construct emissions, various enzymatic activity assays, and other methods well known in the art. Virulence and pathogenicity may be measured using the techniques described herein.

[0270] It will be appreciated that the above method may be performed in solid phase, liquid phase, a combination of the two preceding media, or in vivo. For example, cells grown on nutrient agar containing the inducer or repressor which acts on the regulatable promoter used to express the proliferation required gene product may be exposed to compounds spotted onto the agar surface. A compound's effect may be judged from the diameter of the resulting killing zone, the area around the compound application point in which cells do not grow. Multiple compounds may be transferred to agar plates and simultaneously tested using automated and semi-automated equipment including but not restricted to multi-channel pipettes (for example the Beckman Multimek) and multi-channel spotters (for example the Genomic Solutions Flexys). In this way multiple plates and thousands to millions of compounds may be tested per day.

[0271] The compounds are also tested entirely in liquid phase using microtiter plates as described below. Liquid phase screening may be performed in microtiter plates containing 96, 384, 1536 or more wells per microtiter plate to screen multiple plates and thousands to millions of compounds per day. Automated and semi-automated equipment are used for addition of reagents (for example cells and compounds) and for determination of cell density.

[0272] The compounds are also tested in vivo using the methods described herein.

[0273] It will be appreciated that each of the above cell-based assays may be used to identify compounds which inhibit the activity of gene products from organisms other than C. neoformans which are homologous to the C. neoformans gene products described herein. For example, the target gene products may be from animal fugal pathogens such as Aspergillus niger, Aspergillus flavis, Candida tropicalis, Candida albicans, Candida parapsilopsis, Candida krusei, Coccidioides immitis, Exophalia dermatiditis, Fusarium oxysporum, Histoplasma capsulatum, Phneumocystis carinii, Trichosporon beigelii, Rhizopus arrhizus, Mucor rouxii, Rhizomucor pusillus, or Absidia corymbigera, or the plant fungal pathogens, such as Botrytis cinerea, Erysiphe graminis, Magnaporthe grisea, Puccinia recodita, Septoria triticii, Tilletia controversa, Ustilago maydis, or any species falling within the genera of any of the above species. In some embodiments, the gene products are from an organism other than Saccharomyces cerevisiae, Candida albicans, and/or Asperigillus fumigatus.

[0274] 5.4.2.1 Cell-Based Assays Using Conditional-expression C. neoformans Mutant Strains

[0275] Conditional-expression C. neoformans mutant strains in which a gene required for fungal survival, growth, proliferation, virulence, or pathogenicity is placed under the control of a regulatable promoter are constructed using the methods described herein. For the purposes of the present example, the regulatable promoter may be the tetracycline regulated promoter described herein, but it will be appreciated that any regulatable promoter may be used, e.g., GAL7 promoter.

[0276] In one embodiment of the present invention, an individual conditional-expression C. neoformans mutant strain is used as the basis for detection of a therapeutic agent active against a haploid or diploid pathogenic fungal cell. In this embodiment, the test organism is a conditional-expression C. neoformans mutant strain having a gene that has been modified, by recombination, to place the gene under the controlled expression of a heterologous promoter. This test conditional-expression C. neoformans mutant strain is then grown under a first set of conditions where the heterologous promoter is expressed at a relatively low level (“repressing”) and the extent of growth determined. This measurement may be carried out using any appropriate standard known to those skilled in the art including optical density, wet weight of pelleted cells, total cell count, viable count, DNA content, and the like. This experiment is repeated in the presence of a test compound and a second measurement of growth obtained. The extent of growth in the presence and in the absence of the test compound, which can conveniently be expressed in terms of indicator values, are then compared. A dissimilarity in the extent of growth or indicator values provides an indication that the test compound may interact with the target essential gene product.

[0277] To gain more information, two further experiments are performed, using a second set of “non-repressing” growth conditions where the essential gene, under the control of the heterologous promoter, is expressed at a level substantially higher than in the first set of conditions described above. The extent of growth or indicator values is determined in the presence and absence of the test compound under this second set of conditions. The extent of growth or indicator values in the presence and in the absence of the test compound are then compared. A dissimilarity in the extent of growth or indicator values provides an indication that the test compound may interact with the target essential gene product.

[0278] Furthermore, the extent of growth in the first and in the second set of growth conditions can also be compared. If the extent of growth is essentially the same, the data suggest that the test compound does not inhibit the gene product encoded by the modified gene carried by the conditional-expression C. neoformans mutant strain tested. However, if the extent of growth are substantially different, the data indicate that the level of expression of the subject gene product may determine the degree of inhibition by the test compound and, therefore, it is likely that the subject gene product is the target of that test compound.

[0279] Although each conditional-expression C. neoformans mutant strain can be tested individually, it will be more efficient to screen entire sets or subsets of a conditional-expression C. neoformans mutant strain collection at one time. Therefore in one aspect of this invention, arrays may be established, for example in a series of 96-well microtiter plates, with each well containing a single conditional-expression C. neoformans mutant strain. In one representative, but not limiting approach, four microtiter plates are used, comprising two pairs where the growth medium in one pair supports greater expression of the heterologous promoter controlling the remaining active allele in each strain, than the medium in the other pair of plates. One member of each pair is supplemented with a compound to be tested and measurements of growth of each conditional-expression C. neoformans mutant strain is determined using standard procedures to provide indicator values for each isolate tested. The collection of conditional-expression C. neoformans mutant strains used in such a method for screening for therapeutic agents may comprise a subset of conditional-expression C. neoformans mutant strains selected from, but not limited to the group consisting of fungal-specific, pathogen-specific, desired biochemical-function, human-homolog, cellular localization, and signal transduction cascade target sets.

[0280] The conditional-expression C. neoformans mutant strains are grown in medium comprising a range of tetracycline concentrations to obtain the growth inhibitory dose-response curve for each strain. First, seed cultures of the conditional-expression C. neoformans mutant strains are grown in the appropriate medium. Subsequently, aliquots of the seed cultures are diluted into medium containing varying concentrations of tetracycline. For example, the conditional-expression C. neoformans mutant strains may be grown in duplicate cultures containing two-fold serial dilutions of tetracycline. Additionally, control cells are grown in duplicate without tetracycline. The control cultures are started from equal amounts of cells derived from the same initial seed culture of a conditional-expression C. neoformans mutant strain of interest. The cells are grown for an appropriate period of time and the extent of growth is determined using any appropriate technique. For example, the extent of growth may be determined by measuring the optical density of the cultures. When the control culture reaches mid-log phase the percent growth (relative to the control culture) for each of the tetracycline containing cultures is plotted against the log concentrations of tetracycline to produce a growth inhibitory dose response curve for tetracycline. The concentration of tetracycline that inhibits cell growth to 50% (IC₅₀) as compared to the 0 mM tetracyline control (0% growth inhibition) is then calculated from the curve. Alternative methods of measuring growth are also contemplated. Examples of these methods include measurements of proteins, the expression of which is engineered into the cells being tested and can readily be measured. Examples of such proteins include green fluorescent protein (GFP) and various enzymes.

[0281] Cells are pretreated with the selected concentration of tetracycline and then used to test the sensitivity of cell populations to candidate compounds. For example, the cells may be pretreated with a concentration of tetracycline which inhibits growth by at least about 5%, at least about 8%, at least about 10%, at least about 20%, at least about 30%, at least about 40%, at least about 50%, at least about 60% at least about 75%, at least 80%, at least 90%, at least 95% or more than 95%. The cells are then contacted with the candidate compound and growth of the cells in tetracycline containing medium is compared to growth of the control cells in medium which lacks tetracycline to determine whether the candidate compound inhibits growth of the sensitized cells (i.e. the cells grown in the presence of tetracycline). For example, the growth of the cells in tetracycline containing medium may be compared to the growth of the cells in medium lacking tetracycline to determine whether the candidate compound inhibits the growth of the sensitized cells (i.e. the cells grown in the presence of tetracyline) to a greater extent than the candidate compound inhibits the growth of cells grown in the absence of tetracycline. For example, if a significant difference in growth is observed between the sensitized cells (i.e. the cells grown in the presence of tetracycline) and the non-sensitized cells (i.e. the cells grown in the absence of tetracycline), the candidate compound may be used to inhibit the proliferation of the organism or may be further optimized to identify compounds which have an even greater ability to inhibit the growth, survival, or proliferation of the organism.

[0282] In another embodiment, the screening of the candidate compounds can be performed with conditional-expression C. neoformans mutant cells which reside inside a host cell in the presence or absence of an inducer/repressor, such as tetracycline. In addition to existing as a free-living saprophyte, C. neoformans is also a facultative intracellular pathogen (Feldmesser et al., 2001, Trends in Microbiol;. 9:273) which survive in macrophages during chronic pulmonay infections and replicates in phagocytes in vitro (Lee et al., 1995, Lab. Invest. 73:871-879). The pattern of gene expression of the intracellular form of C. neoformans is expected to differ from the free-living form, and thus presents additional and potentially unique targets for drug screening. Accordingly, the C. neoformans mutant cells can be used to infect an animal, and after a period of time, animal cells of cell types that are known to be infected by C. neoformans are obtained and exposed to the inducer/repressor and candidate compounds as described above. The rate of mutant cells in yeast form budding inside a cell and the number of yeast cells per phagosome can be used to determine the effect of the candidate compound on the mutant cells. Alternatively, an in vitro assays can be performed with host cells, such as murine macrophage cell lines, primary peritoneal and alveolar macropahages, wherein the mutant yeast cells infect the host cells in tissue culture in the presence or absence of an inducer/repressor. The number of mutant cells inside macrophages can be determined by lysing the macrophages and plating the cell supernatant and lysates in the appropriate plate medium for counting. See, for example, methods described in Fries et al., 2001, J. Clin. Invest. 108:1639-1648; and Goldman et al., 1998, Proc. Natl. Acad. Sci. 95:14967-14972; which are incorporated herein by reference in their entireties. Compounds identified in such assays are expected to be able to reach the fungal cells even though they are protected by secreted polysaccharides inside host cells, and may be particularly effective against chronic, recurrent or latent forms of C. neoformans infection.

[0283] Similar to the above methods, the virulence or pathogenicity of cells exposed to a candidate compound which express a rate limiting amount of a gene product required for virulence or pathogenicity may be compared to the virulence or pathogenicity of cells exposed to the candidate compound in which the level of expression of the gene product required for virulence or pathogenicity is not rate limiting. In such methods, test animals are challenged with the conditional-expression C. neoformans mutant strain and fed a diet containing the desired amount of tetracycline and the candidate compound. Thus, the conditional-expression C. neoformans mutant strain infecting the test animals expresses a rate limiting amount of a gene product required for virulence or pathogenicity (i.e. the conditional-expression C. neoformans mutant cells in the test animals are sensitized). Control animals are challenged with the conditional-expression C. neoformans mutant strain and are fed a diet containing the candidate compound but lacking tetracycline. The virulence or pathogenicity of the conditional-expression C. neoformans mutant strain in the test animals is compared to that in the control animals. For example, the virulence or pathogenicity of the conditional-expression C. neoformans mutant strain in the test animals may be compared to that in the control animals to determine whether the candidate compound inhibits the virulence or pathogenicity of the sensitized conditional-expression C. neoformans mutant cells (i.e. the cells in the animals whose diet included tetracyline) to a greater extent than the candidate compound inhibits the growth of the conditional-expression C. neoformans mutant cells in animals whose diet lacked tetracycline. For example, if a significant difference in growth is observed between the sensitized conditional-expression C. neoformans mutant cells (i.e. the cells in animals whose diet included tetracycline) and the non-sensitized cells (i.e. the conditional-expression C. neoformans mutant cells animals whose diet did not include tetracycline), the candidate compound may be used to inhibit the virulence or pathogenicity of the organism or may be further optimized to identify compounds which have an even greater ability to inhibit the virulence or pathogenicity of the organism. Virulence or pathogenicity may be measured using the techniques described therein.

[0284] It will be appreciated that the above cell-based assays may be used to identify compounds which inhibit the activity of gene products from organisms other than C. neoformans which are homologous to the C. neoformans gene products described herein. For example, the gene products may be from animal fugal pathogens such as Asperigillus fumigatus, Aspergillus niger, Aspergillus flavis, Candida tropicalis, Candida parapsilopsis, Candida krusei, Coccidioides immitis, Exophalia dermatiditis, Fusarium oxysporum, Histoplasma capsulatum, Phneumocystis carinii, Trichosporon beigelii, Rhizopus arrhizus, Mucor rouxii, Rhizomucor pusillus, or Absidia corymbigera, or the plant fungal pathogens, such as Botrytis cinerea, Erysiphe graminis, Magnaporthe grisea, Puccinia recodita, Septoria triticii, Tilletia controversa, Ustilago maydis, or any species falling within the genera of any of the above species. In some embodiments, the gene products are from an organism other than Saccharomyces cerevisae, Candida albicans, and/or Aspergillus fumigatus.

[0285] The cell-based assay described above may also be used to identify the biological pathway in which a nucleic acid required for fungal proliferation, virulence or pathogenicity or the gene product of such a nucleic acid lies. In such methods, cells expressing a rate limiting level of a target nucleic acid required for fungal proliferation, virulence or pathogenicity and control cells in which expression of the target nucleic acid is not rate limiting are contacted with a panel of antibiotics known to act in various pathways. If the antibiotic acts in the pathway in which the target nucleic acid or its gene product lies, cells in which expression of target nucleic acid is rate limiting will be more sensitive to the antibiotic than cells in which expression of the target nucleic acid is not rate limiting.

[0286] As a control, the results of the assay may be confirmed by contacting a panel of cells in which the levels of many different genes required for proliferation, virulence or pathogenicity, including the target gene, is rate limiting. If the antibiotic is acting specifically, heightened sensitivity to the antibiotic will be observed only in the cells in which the target gene is rate limiting (or cells in which genes in the same pathway as the target gene is rate limiting) but will not be observed generally in which a gene product required for proliferation, virulence or pathogenicity is rate limiting.

[0287] It will be appreciated that the above method for identifying the biological pathway in which a nucleic acid required for proliferation, virulence or pathogenicity lies may be applied to nucleic acids from organisms other than C. neoformans which are homologous to the C. neoformans nucleic acids described herein. For example, the nucleic acids may be from animal fugal pathogens such as Aspergillus fumigatus, Aspergillus niger, Aspergillus flavis, Candida tropicalis, Candida albicans, Candida parapsilopsis, Candida krusei, Coccidioides immitis, Exophalia dermatiditis, Fusarium oxysporum, Histoplasma capsulatum, Phneumocystis carinii, Trichosporon beigelii, Rhizopus arrhizus, Mucor rouxii, Rhizomucor pusillus, or Absidia corymbigera, or the plant fungal pathogens, such as Botrytis cinerea, Erysiphe graminis, Magnaporthe grisea, Puccinia recodita, Septoria triticii, Tilletia controversa, Ustilago maydis, or any species falling within the genera of any of the above species. In some embodiments, the nucleic acids are from an organism other than Saccharomyces cerevisae, Candida albicans and/or Aspergillus fumigatus.

[0288] Similarly, the above method may be used to determine the pathway on which a test compound, such as a test antibiotic acts. A panel of cells, each of which expresses a rate limiting amount of a gene product required for fungal survival, growth, proliferation, virulence or pathogenicity where the gene product lies in a known pathway, is contacted with a compound for which it is desired to determine the pathway on which it acts. The sensitivity of the panel of cells to the test compound is determined in cells in which expression of the nucleic acid encoding the gene product required for proliferation, virulence or pathogenicity is at a rate limiting level and in control cells in which expression of the gene product required for proliferation, virulence or pathogenicity is not at a rate limiting level. If the test compound acts on the pathway in which a particular gene product required for proliferation, virulence, or pathogenicity lies, cells in which expression of that particular gene product is at a rate limiting level will be more sensitive to the compound than the cells in which gene products in other pathways are at a rate limiting level. In addition, control cells in which expression of the particular gene required for fungal proliferation, virulence or pathogenicity is not rate limiting will not exhibit heightened sensitivity to the compound. In this way, the pathway on which the test compound acts may be determined.

[0289] It will be appreciated that the above method for determining the pathway on which a test compound acts may be applied to organisms other than C. neoformans by using panels of cells in which the activity or level of gene products which are homologous to the C. neoformans gene products described herein is rate limiting. For example, the gene products may be from animal fugal pathogens such as Aspergillus fumigatus, Aspergillus niger, Aspergillus flavis, Candida tropicalis, Candida parapsilopsis, Candida krusei, Coccidioides immitis, Exophalia dermatiditis, Fusarium oxysporum, Histoplasma capsulatum, Pneumocystis carinii, Trichosporon beigelii, Rhizopus arrhizus, Mucor rouxii, Rhizomucor pusillus, or Absidia corymbigera, or the plant fungal pathogens, such as Botrytis cinerea, Erysiphe graminis, Magnaporthe grisea, Puccinia recodita, Septoria triticii, Tilletia controversa, Ustilago maydis, or any species falling within the genera of any of the above species. In some embodiments, the gene products are from an organism other than Saccharomyces cerevisiae, Candida albicans and/or Aspergillus fumigatus.

[0290] One skilled in the art will appreciate that further optimization of the assay conditions, such as the concentration of inducer or repressor used to produce rate limiting levels of a gene product required for fungal proliferation, virulence or pathogenicity and/or the growth conditions used for the assay (for example incubation temperature and medium components) may further increase the selectivity and/or magnitude of the antibiotic sensitization exhibited.

[0291] It will be appreciated that the above methods for identifying the pathway in which a gene required for growth, survival, proliferation, virulence or pathogenicity lies or the pathway on which an antibiotic acts may be performed using organisms other than C. neoformans in which gene products homologous to the C. neoformans gene products described herein are rate limiting. For example, the gene products may be from animal fugal pathogens such as Aspergillus fumigatus, Aspergillus niger, Aspergillus flavis, Candida albicans, Candida tropicalis, Candida parapsilopsis, Candida krusei, Cryptococcus neoformans, Coccidioides immitis, Exophalia dermatiditis, Fusarium oxysporum, Histoplasma capsulatum, Pneumocystis carinii, Trichosporon beigelii, Rhizopus arrhizus, Mucor rouxii, Rhizomucor pusillus, or Absidia corymbigera, or the plant fungal pathogens, such as Botrytis cinerea, Erysiphe graminis, Magnaporthe grisea, Puccinia recodita, Septoria triticii, Tilletia controversa, Ustilago maydis, or any species falling within the genera of any of the above species. In some embodiments, the gene products are from an organism other than Saccharomyces cerevisae, Candida albicans, and/or Aspergillus fumigatus.

[0292] Furthermore, as discussed above, panels of conditional-expression C. neoformans mutant strains may be used to characterize the point of intervention of any compound affecting an essential biological pathway including antibiotics with no known mechanism of action.

[0293] Another embodiment of the present invention is a method for determining the pathway against which a test antibiotic compound is active, in which the activity of proteins or nucleic acids involved in pathways required for fungal growth, survival, proliferation, virulence or pathogenicity is reduced by contacting cells with a sub-lethal concentration of a known antibiotic which acts against the protein or nucleic acid. The method is similar to those described above for determining which pathway a test antibiotic acts against, except that rather than reducing the activity or level of a gene product required for fungal proliferation, virulence or pathogenicity by expressing the gene product at a rate limiting amount in a conditional-expression C. neoformans mutant strain, the activity or level of the gene product is reduced using a sub-lethal level of a known antibiotic which acts against the gene product.

[0294] Growth inhibition resulting from the presence of sub-lethal concentration of the known antibiotic may be at least about 5%, at least about 8%, at least about 10%, at least about 20%, at least about 30%, at least about 40%, at least about 50%, at least about 60%, or at least about 75%, at least 80%, at least 90%, at least 95% or more than 95%.

[0295] Alternatively, the sub-lethal concentration of the known antibiotic may be determined by measuring the activity of the target proliferation-required gene product rather than by measuring growth inhibition.

[0296] Cells are contacted with a combination of each member of a panel of known antibiotics at a sub-lethal level and varying concentrations of the test antibiotic. As a control, the cells are contacted with varying concentrations of the test antibiotic alone. The IC₅₀ of the test antibiotic in the presence and absence of the known antibiotic is determined. If the IC₅₀s in the presence and absence of the known drug are substantially similar, then the test drug and the known drug act on different pathways. If the IC₅₀s are substantially different, then the test drug and the known drug act on the same pathway.

[0297] Similar methods may be performed using known antibiotics which act on a gene product homologous to the C. neoformans sequences described herein. The homolgous gene product may be from animal fugal pathogens such as Aspergillus niger, Aspergillus flavis, Candida tropicalis, Candida parapsilopsis, Candida krusei, Coccidioides immitis, Exophalia dermatiditis, Fusarium oxysporum, Histoplasma capsulatum, Pneumocystis carinii, Trichosporon beigeli, Rhizopus arrhizus, Mucor rouxii, Rhizomucor pusillus, or Absidia corymbigera, or the plant fungal pathogens, such as Botrytis cinerea, Erysiphe graminis, Magnaporthe grisea, Puccinia recodita, Septoria triticii, Tilletia controversa, Ustilago maydis, or any species falling within the genera of any of the above species. In some embodiments, the gene products are from an organism other than Saccharomyces cerevisae, Candida albicans and/or Aspergillus fumigatus.

[0298] Another embodiment of the present invention is a method for identifying a candidate compound for use as an antibiotic in which the activity of target proteins or nucleic acids involved in pathways required for fungal proliferation, virulence or pathogenicity is reduced by contacting cells with a sub-lethal concentration of a known antibiotic which acts against the target protein or nucleic acid. The method is similar to those described above for identifying candidate compounds for use as antibiotics except that rather than reducing the activity or level of a gene product required for proliferation, virulence or pathogenicity using conditional-expression C. neoformans mutant strains which express a rate limiting level of the gene product, the activity or level of the gene product is reduced using a sub-lethal level of a known antibiotic which acts against the proliferation-required gene product.

[0299] The growth inhibition from the sub-lethal concentration of the known antibiotic may be at least about 5%, at least about 8%, at least about 10%, at least about 20%, at least about 30%, at least about 40%, at least about 50%, at least about 60%, or at least about 75%, or more.

[0300] Alternatively, the sub-lethal concentration of the known antibiotic may be determined by measuring the activity of the target proliferation-required gene product rather than by measuring growth inhibition.

[0301] In order to characterize test compounds of interest, cells are contacted with a panel of known antibiotics at a sub-lethal level and one or more concentrations of the test compound. As a control, the cells are contacted with the same concentrations of the test compound alone. The IC₅₀ of the test compound in the presence and absence of the known antibiotic is determined. If the IC₅₀ of the test compound is substantially different in the presence and absence of the known drug then the test compound is a good candidate for use as an antibiotic. As discussed above, once a candidate compound is identified using the above methods its structure may be optimized using standard techniques such as combinatorial chemistry.

[0302] Similar methods may be performed using known antibiotics which act on a gene product homologous to the C. neoformans sequences described herein. The homolgous gene product may be from animal fugal pathogens such as Aspergillus niger, Aspergillus flavis, Candida albicans, Candida tropicalis, Candida parapsilopsis, Candida krusei, Coccidioides immitis, Exophalia dermatiditis, Fusarium oxysporum, Histoplasma capsulatum, Pneumocystis carinii, Trichosporon beigelii, Rhizopus arrhizus, Mucor rouxii, Rhizomucor pusillus, or Absidia corymbigera or the plant fungal pathogens, such as Botrytis cinerea, Erysiphe graminis, Magnaporthe grisea, Puccinia recodita, Septoria triticii, Tilletia controversa, Ustilago maydis, or any species falling within the genera of any of the above species. In some embodiments, the gene products are from an organism other than Saccharomyces cerevisae, Candida albicans, and/or Aspergillus fumigatus.

[0303] In another embodiment of the present invention, all potential drug targets of a pathogen could be screened simultaneously against a library of compounds using, for example a 96 well microtiter plate format, where growth, measured by optical density or pellet size after centrifugation, may be determined for each well. A genomic approach to drug screening eliminates reliance upon potentially arbitrary and artificial criteria used in evaluating which target to screen and instead allows all potential targets to be screened. This approach not only offers the possibility of identifying specific compounds which inhibit a preferred process (e.g. cell wall biosynthetic gene products) but also the possibility of identifying all fungicidal compounds within that library and linking them to their cognate cellular targets.

[0304] In still another embodiment of the present invention, conditional-expression C. neoformans mutant strains could be screened to identify synthetic lethal mutations, and thereby uncover a potentially novel class of drug targets of significant therapeutic value. For example two separate genes may encode homologous proteins that participate in a common and essential cellular function, where the essential nature of this function will only become apparent upon inactivation of both family members. Accordingly, examination of the null phenotype of each gene separately would not reveal the essential nature of the combined gene products, and consequently, this potential drug target would not be identified. Provided the gene products are highly homologous to one another, compounds found to inhibit one family member are likely to inhibit the other and are therefore predicted to approximate the synthetic growth inhibition demonstrated genetically. In other cases however, synthetic lethality may uncover seemingly unrelated (and often nonessential) processes, which when combined produce a synergistic growth impairment (cell death). For example, although disruption of the S. cerevisiae gene RVS161 does not present any discernable vegetative growth phenotype in yeast carrying this single mutation, at least 9 other genes are known to display a synthetic lethal effect when combined with inactivation of RVS161. These genes participate in processes ranging from cytoskeletal assembly and endocytosis, to signal transduction and lipid metabolism and identifies multiple avenues to pursuing a combination drug target strategy. A directed approach to uncovering synthetic lethal interactions with essential and nonessential drug targets is now performed where a conditional-expression C. neoformans mutant strain is identified as displaying an enhanced sensitivity to the tested compound, not because it expresses a reduced level of activity for the drug target, but because its mutation is synthetically lethal in combination with inhibition of a second drug target. Discerning whether the compound specifically inhibits the drug target in the sensitized conditional-expression C. neoformans mutant strain may be achieved by screening the entire conditional-expression C. neoformans mutant strain set for additional mutant strains displaying equal or greater sensitivity to the compound, followed by genetic characterization of a double mutant strain demonstrating synthetic lethality between the two mutations.

[0305] 5.4.2.2 Screening for Non-antifungal Therapeutic Agents With

[0306] Conditional-expression C. neoformans Mutant Strains

[0307] The biochemical similarity existing between pathogenic fungi and the mammalian hosts they infect limits the range of clinically useful antimycotic compounds. However, this similarity can be exploited using a conditional-expression C. neoformans mutant strain collection to facilitate the discovery of therapeutics that are not used as antimycotics, but are useful for treatment a wide-range of diseases, such as cancer, inflammation, etc.

[0308] In this embodiment of the invention, fungal genes that are homologous to disease-causing genes in an animal or plant, are selected and conditional-expression C. neoformans mutant strains of this set of genes are used for identification of compounds that display potent and specific bioactivity towards the products of these genes, and therefore have potential medicinal value for the treatment of diseases. Essential and non-essential genes and the corresponding conditional-expression C. neoformans mutant strains carrying modified genes are useful in this embodiment of the invention. It has been predicted that many of the genes found within the C. neoformans genome share human functional homologs. It has also been predicted that as many as 1% of human genes are involved in human diseases and therefore may serve as potential drug targets. Accordingly, many genes within the conditional-expression C. neoformans mutant strain collection are homologs to disease-causing human genes and compounds that specifically inactivate individual members of this gene set may in fact have alternative therapeutic value. The invention provides a pluralities of conditional-expression C. neoformans mutant strains in which the modified alleles are fungal genes that share sequence, structural and/or functional similarities to genes that are associated with one or more diseases of the animal or plant.

[0309] For example, much of the signal transduction machinery that promotes cell cycle progression and is often perturbed in a variety of cancers is conserved in fungi. Many of these genes encode for cyclins, cyclin-dependent kinases (CDK), CDK inhibitors, phosphatases, and transcription factors that are both structurally and functionally related. As a result, compounds found to display specificity towards any of these functional classes of proteins could be evaluated by secondary screens to test for potential anticancer activity. However, cytotoxic compounds identified in this way need not act on cancer causing targets to display therapeutic potential. For example the taxol family of anti-cancer compounds, which hold promise as therapeutics for breast and ovarian cancers, bind tubulin and promote microtubule assembly, thereby disrupting normal microtubule dynamics. Yeast tubulin displays similar sensitivity to taxol, suggesting that additional compounds affecting other fundamental cellular processes shared between yeast and man could similarly be identified and assessed for antitumor activity.

[0310] The phenomenon of pathogenesis extends far beyond the taxonomic borders of microbes and ultimately reflects the underlying physiology. In many ways, the phenomenon of cancer is analogous to the process of pathogenesis by an opportunistic pathogen such as C. neoformans. Both are non-infectious diseases caused by either the body's own cells, or microbes from its natural fauna. These cells grow in a manner unchecked by the immune system and in both cases disease manifests itself by colonization of vital organs and eventual tissue damage resulting in death. Effective drug-based treatment is also elusive for both diseases primarily because the causative agent in both cases is highly related to the host.

[0311] In fact, a number of successful therapeutic drugs affecting processes unrelated to cancer have also been discovered through anti-fungal drug screening programs. One clinically-important class of compounds includes the immunosuppressant molecules rapamycin, cyclosporin A, and FK506, which inhibit conserved signal transduction components. Cyclosporin A and FK506, form distinct drug-prolyl isomerase complexes (CyPA- Cyclosporin A and FKBP12-FK506 respectively) which bind and inactivate the regulatory subunit of the calcium and calmodulin-dependent phosphatase, calcineurin. Rapamycin also complexes with FKBP12, but this drug-protein complex also binds to the TOR family of phosphatidylinositol kinases to inhibit translation and cell cycle progression. In each case, both the mechanism of drug action, and the drug targets themselves are highly conserved from yeast to humans.

[0312] The identification of C. neoformans drug targets, and grouping the targets into essential-gene, fungal-specific, and pathogen-specific target sets provide the basis for the development of whole-cell screens for compounds that interact with and inhibit individual members of any of these targets. Therefore, similar analyses can be used to identify other sets of conditional-expression C. neoformans mutant strains having modified allelic pairs of genes encoding drug targets with other specific common functions or attributes. For example, conditional-expression C. neoformans mutant strain subsets can be established which comprise gene targets that are highly homologous to human genes, or gene targets that display a common biochemical function, enzymatic activity, or that are involved in carbon compound catabolism, bosynthesis, transport of molecules (transporter activity), cellular localization, signal transduction cascades, cell cycle control, cell adhesion, transcription, translation, DNA replication, etc.

[0313] 5.4.2.3 Target Gene Dosage-Based Whole Cell Assays

[0314] Experiments involving modulating the expression levels of the encoding gene to reveal phenotypes from which gene function may be inferred can be carried out in a pathogenic fungus, such as C. neoformans, using the strains and methods of the present invention. The principle of drug-target-level variation in drug screening involves modulating the expression level of a drug target to identify specific drug resistance or drug sensitivity phenotypes, thereby linking a drug target to a particular compound. Often, these phenotypes are indicative of the target gene encoding the bona fide drug target of this compound. In examples where this is not the case, the candidate target gene may nonetheless provide important insight into the true target gene that is functioning either in a pathway or process related to that inhibited by the compound (e.g. producing synthetic phenotype), or instead functioning as a drug resistance mechanism associated with the identified compound.

[0315] The expression level of a given gene product is also elevated by cloning the gene into a plasmid vector that is maintained at multiple copies in the cell. Overexpression of the encoding gene is also achieved by fusing the corresponding open reading frame of the gene product to a more powerful promoter carried on a multicopy plasmid. Using these strategies, a number of overexpression screens have been successfully employed in Saccharomyces cerevisiae to discover novel compounds that interact with characterized drug targets as well as to identify the protein targets bound by existing therapeutic compounds.

[0316] In one embodiment, the conditional-expression C. neoformans mutant strain collection of the invention are not only useful in target validation under repressing conditions, but are also useful as a collection of strains overexpressing these same validated drug targets under nonrepressing conditions for whole cell assay development and drug screening.

[0317] Variation in the level of expression of a target gene product in a conditional-expression C. neoformans mutant strain is also used to explore resistance to antimycotic compounds. Resistance to existing antifungal therapeutic agents reflects both the limited number of antifungal drugs available and the alarming dependence and reliance clinicians have in prescribing them.

[0318] For example, dependence on azole-based compounds such as fluconazole for the treatment of fungal infections, has dramatically undermined the clinical therapeutic value for this compound. The conditional-expression C. neoformans mutant strain collection is used to combat fluconazole resistance by identifying gene products that interact with the cellular target of fluconazole. Such products are used to identify drug targets which, when inactivated in concert with fluconazole, provide a synergistic effect and thereby overcome resistance to fluconazole seen when this compound is used alone. This is accomplished, for example, by using the conditional-expression C. neoformans mutant strain collection to overexpress genes that enhance drug resistance. Such genes include novel or known plasma membrane exporters including ATP-binding cassette (ABC) transporters and multidrug resistance (MDR) efflux pumps, pleiotropic drug resistance (PDR) transcription factors, and protein kinases and phosphatases. Alternatively, genes specifically displaying a differential drug sensitivity are identified by screening conditional-expression C. neoformans mutant strains expressing reduced levels of individual members of the target set. Identifying such genes provides important clues to drug resistance mechanisms that could be targeted for drug-based inactivation to enhance the efficacy of existing antifungal therapeutics.

[0319] In another aspect of the present invention, overexpression of the target gene for whole cell assay purposes is supported with promoters other than the tetracycline promoter system. (see Sections 5.3.1)

[0320] In another aspect of the present invention, intermediate expression levels of individual drug targets within the conditional-expression C. neoformans mutant strain collection may be engineered to provide strains tailored for the development of unique whole cell assays. In this embodiment of the invention, conditional-expression C. neoformans mutant strains are grown in a medium containing a tetracycline concentration determined to provide only a partial repression of transcription. Under these conditions, it is possible to maintain an expression level between that of the constitutively expressed overproducing strain and that of wild type strain, as well as levels of expression lower than that of the wild-type strain. That is, it is possible to titrate the level of expression to the minimum required for cell viability. By repressing gene expression to this critical state, novel phenotypes, resembling those produced by a partial loss of function mutation (i.e. phenocopies of hypomorphic mutants) may be produced and offer additional target expression levels applicable for whole cell assay development and drug screening. Repressing expression of the remaining allele of an essential gene to the threshold level required for viability, therefore will provide a strain with enhanced sensitivity toward compounds active against this essential gene product.

[0321] 5.4.2.4 Uses of Tagged strains

[0322] In still another aspect of the present invention, one or more unique oligonucleotide sequence tags or “bar codes” are incorporated into individual mutant strains included within a heterozygous strain collection of validated targets. In certain preferred embodiments, two unique sequence tags are incorporated into each conditional-expression C. neoformans mutant strain. The presence of these sequence tags enables an alternative whole cell assay approach to drug screening. Multiple target strains may be screened simultaneously in a mixed population (rather than separately) to identify phenotypes between a particular drug target and its inhibitory agent.

[0323] Large-scale parallel analyses are performed using mixed populations of the entire bar coded heterozygous essential strain collection target set and comparing the relative representation of individual strains within a mixed population prior to and after growth in the presence of a compound. Drug-dependent depletion or overrepresentation of a unique bar-coded strain is determined by PCR-amplifying and fluorescently labeling all bar codes within the mixed population and hybridizing the resulting PCR products to an array of complementary oligonucleotides. In preferred embodiments, two sequences tags are incorporated within each conditional-expression C. neoformans mutant strain and, therefore, two signals are generated by hybridization with the array of complementary oligonucleotides. Use of at least two sequence tags therefore provides a more precise determination of the representation of each conditional-expression C. neoformans mutant strain present in the population. Differential representation between bar coded strains indicates gene-specific hypersensitivity or resistance and suggests the corresponding gene product may represent the molecular target of the compound tested.

[0324] In one specific embodiment, the mutant strains are conditional-expression C. neoformans mutant strains, and each of the conditional-expression C. neoformans mutant strains of the set comprises at least one, and preferably two unique molecular tags, which, generally, are incorporated within the promoter-replacement cassette used to place the target gene under the control of a heterologous, conditionally-expressed promoter. Each molecular tag is flanked by primer sequences which are common to all members of the set being tested. Growth is carried out in repressive and non-repressive media, in the presence and absence of the compound to be tested. The relative growth of each strain is assessed by carrying out simultaneous PCR amplification of the entire collection of embedded sequence tags.

[0325] In one non-limiting aspect of the present invention, the PCR amplification is performed in an asymmetric manner with fluorescent primers and the resulting single stranded nucleic acid product hybridized to an oligonucleotide array fixed to a surface and comprises the entire corresponding set of complementary sequences. Analysis of the level of each fluorescent molecular tag sequence is then determined to estimate the relative amount of growth of the strains in the set, in those media, in the presence and absence of the compound tested.

[0326] Therefore, for each conditional-expression C. neoformans mutant strain of the set tested, there could be, in one non-limiting example of this method, four values for the level of the corresponding molecular tag found within the surviving population. They would correspond to cell growth under repressing and non-repressing conditions, both in the presence and absence of the compound being tested. Comparison of growth in the presence and absence of the test compound provides a value or “indicator” for each set of growth media; that is, an indicator derived under repressing and non-repressing conditions. Again, comparison of the two indicator values will reveal if the test compound is active against the gene product expressed by the modified allelic gene pair carried by that specific member of the conditional-expression C. neoformans mutant strain set tested.

[0327] In still another aspect of the present invention, each potential drug target gene in this heterozygous tagged or bar-coded collection, may be overexpressed by subsequently introducing either the Tet promoter or another strong, constitutively expressed promoter (e.g. analogs of CaACT1, CaADH1 and CaPGK1 in C. neoformans) upstream of the remaining non-disrupted allele. These constructions allow a further increase in the dosage of the encoded target gene product of individual essential genes to be used in mixed-population drug susceptibility studies. Although overexpression may itself disrupt the normal growth rate of numerous members of the population, reliable comparisons could still be made between mock and drug-treated mixed cultures to identify compound-specific growth differences.

[0328] In Saccharomyces cerevisiae, the molecular drug targets of several well-characterized compounds including 3-amino-triazol, benomyl, tunicamycin and fluconazole were identified by a similar approach. In that study, bar-coded strains bearing heterozygous mutations in HIS3, TUB1, ALG7, and ERG11, (i.e. the respective drug targets to the compounds listed above) displayed significantly greater sensitivity when challenged with their respective compound than other heterozygote bar-coded strains when grown together in a mixed population.

[0329] In another aspect of the present invention, screens for antifungal compounds can be carried out using complex mixtures of compounds that comprise at least one compound active against the target strain. Tagging or bar-coding the conditional-expression C. neoformans mutant strain collection facilitates a number of large scale analyses necessary to identify gene sets as well as evaluate and ultimately evaluate individual targets within particular gene sets. For example, mixed-population drug screening using a bar-coded conditional-expression C. neoformans mutant strain collection effectively functions as a comprehensive whole cell assay. Minimal amounts of a complex compound library are sufficient to identify compounds that act on individual essential target genes within the collection. This is done without the need to array the collection. Also, strong predictions as to the “richness” of any particular compound library could be made before committing to it in drug screening. It becomes possible then to assess whether, for example, a carbohydrate-based chemical library possesses greater fungicidal activity than a natural product or synthetic compound library. Particularly potent compounds within any complex library of molecules can be immediately identified and evaluated according to the priority of targets and assays available for drug screening. Alternatively, the invention provides applying this information to developing “tailored” screens, in which only those targets which were demonstrated to be inactivated in mixed population experiments by a particular compound library would be included in subsequent array-formatted screens.

[0330] Traditionally, drug discovery programs have relied on an individual or a limited set of validated drug targets. The preceding examples emphasize that such an approach is no longer necessary and that high throughput target evaluation and drug screening are now possible. However, a directed approach based on selecting individual targets may still be preferred depending on the expertise, interest, strategy, or budget of a drug discovery program.

[0331] 5.4.3 Target Evaluation in an Animal or Cell Model System.

[0332] Currently, validation of an essential drug target is demonstrated by examining the effect of gene inactivation under standard laboratory conditions. Putative drug target genes deemed nonessential under standard laboratory conditions may be examined within an animal model, for example, by testing the pathogenicity of a strain homozygous for a deletion in the target gene versus wild type. However, essential drug targets are precluded from animal model studies. Therefore, the most desirable drug targets are omitted from the most pertinent conditions to their target evaluation.

[0333] In an embodiment of the invention, conditional expression, provided by the conditional-expression C. neoformans mutant essential strain collection, overcomes this longstanding limitation to target validation within a host environment. Animal studies can be performed using mice inoculated with conditional-expression C. neoformans mutant essential strains and examining the effect of gene inactivation by conditional expression. As previously described, the endogenous promoter in the mutant can be replaced with a regulated promoter from C. neoformans or a heterologous promoter. Alternatively, the endogenous promoter can be modified by placing it under the control of a regulatory sequence, such as a tet operator sequence which overlaps with the start site of transcription or the endogenous promoter, and which can be regulated by use of a tet repressor, a tet-VP16 fusion protein, or a mutant tet repressor which display a reverse phenotype when exposed to tetracycline or its analog. Regulation of such promoters will lead to a change in gene product levels sufficient to impair growth of the organism in the animal.

[0334] In a preferred embodiment of the invention, the effect on mice injected with a lethal inoculum of a conditional-expression C. neoformans mutant essential strain could be determined depending on whether the mice were provided with an appropriate concentration of tetracycline to inactivate expression of a drug target gene. The lack of expression of a gene demonstrated to be essential under laboratory conditions can thus be correlated with prevention of a terminal C. neoformans infection. In this type of experiment, only mice “treated” with tetracycline-supplemented water, are predicted to survive infection because inactivation of the target gene has killed the conditional-expression C. neoformans mutant strain pathogen within the host. These animal models can be used to investigate whether the infection may be prevented prior to infection (i.e, administering the regulatory molecule such as tetracycline in drinking water prior to infection), or after a full-blown infection has been established (i.e, administer the regulatory molecule such as tetracycline in drinking water after infection is established). The results will indicate whether a target gene is useful for identifying compounds that can be used prophylactically. Furthermore, latency and persistence of infection can be investigated by establishing a latent infection in an animal with the a conditional-expression mutant, administering the regulatory molecule such as atc/tet, and monitoring macrophage occupancy by C. neoformans, or polysaccharide capsule synthesis by C. neoformans.

[0335] In yet another embodiment of the invention, conditional expression could be achieved using a temperature-responsive promoter to regulate expression of the target gene or a temperature sensitive allele of a particular drug target, such that the gene is functional at 30° C. but inactivated within the normal body temperature of the mouse.

[0336] The conditional-expression C. neoformans mutant strain collection or a desired subset thereof is also well suited for evaluating acquired resistance/suppression or distinguishing between fungicidal/fungistatic phenotypes for an inactivated drug target within an animal model system. In this embodiment of the invention, conditional-expression C. neoformans mutant strains repressed for expression of different essential drug target genes would be inoculated into mice raised on tetracycline-supplemented water. Each of the conditional-expression C. neoformans mutant strains would then be compared according to the frequency of death associated with the different mice populations they infected. It is expected that the majority of infected mice will remain healthy due to fungal cell death caused by tetracycline-dependent inactivation of the essential gene in the conditional-expression C. neoformans mutant strain. However, a conditional-expression C. neoformans mutant strain harboring a drug target more likely to develop extragenic suppressors because it is a fungistatic target rather than fungicidal one, or suppressed by an alternative physiological process active within a host environment, can be identified by the higher incidence of lethal infections detected in mice infected with this particular strain. By this method, it is possible to evaluate/rank the likelihood that individual drug target genes may develop resistance within the host environment.

[0337] A number of exemplary animal models of C. neoformans infections that can be used in conjunction with the mutants of the invention are described hereinbelow.

[0338] A model in immunocompetent C57B1/6 mice has been established. C57B1/6 mice develop eosinophilic pneumonia in response to pulmonary cryptococcal infection. The model can be used to monitor the severity and progress of the infection via survival, organ fungus burden, serum anticapsular antibody levels, and histopathology by light and electron microscopy (Feldmesser et al., (1998) J Infect Dis 177(6):1639-46).

[0339] Rats have also been used as models. Pulmonary Cryptococcus neoformans infection in rats results in a diffuse pneumonitis that resolves without dissemination or scarring except for the persistence of interstitial and subpleural granulomas that harbor viable cryptococci inside macrophages and epithelioid cells. Infected rats are asymptomatic but remain infected for as long as 18 months after inoculation with C. neoformans. Containment of infection is associated with granuloma formation that can be partially abrogated by glucocorticoid administration. Using this model, several features associated with persistent infection in the rat lung have been studied and can be used for monitoring the disease, including (i) localization of C. neoformans to discrete, well-organized granulomas; (ii) intracellular persistence of C. neoformans within macrophages and epithelioid cells; (iii) reduced inducible nitric oxide synthase expression by granulomas harboring C. neoformans; and (iv) reduced antibody responses to cryptococcal polysaccharide (Goldman et al., (2000) Infect. Immun. 68:832-838).

[0340] Another model based on weanling outbred rats has also been developed for the study of central nervous system infection with C. neoformans and used for testing an antifungal agent (Najvar et al., (1999) Antimicrob Agents Chemother 43:413-414). Weanling outbred rats were infected with C. neoformans by direct percranial puncture and inoculation into the cranium which led to lethality. Treatment with LY295337, a depsipeptide with antifungal activity, was effective in prolonging survival and reducing fungal counts in brain tissue.

[0341] Cortisone-treated rabbits have also been used in a new model for chronic cryptococcal meningitis. Normal rabbits soon recovered after intracisternal inoculation of C. neoformans, but cortisone-treated animals developed chronic progressive meningitis that was fatal in 2-12 weeks. Incidence and severity of infection was related to cortisone dose, not to inoculum size. The number of mononuclear cells that migrated into the subarachnoid spaces and cerebrospinal fluid of infected rabbits was strikingly reduced by cortisone treatment. Rabbits with cryptococcal meningitis were febrile; their high body temperature did not confer resistance to this infection. Potential applications of this model include study of the pathogenesis of cryptococcosis, and investigation of the immunobiology of the CNS in chronic meningitis (Perfect et al., (1980) Am J Pathol., 101:177-94). The cryptococcal meningitis model in corticosteroid-treated rabbits was used to assess the requirement for the phosphoribosylaminoimidazole gene (ADE2) for virulence of C. neoformans. A wild-type strain (H99), an ade2 auxotroph of H99 (M001), and a randomly selected prototrophic transformant of M001 (M001.1c) which had received the cloned ADE2 cDNA copy were inoculated intrathecally into immunosuppressed rabbits. While M001 was avirulent in the central nervous system model, virulence was completely restored to wild-type pathogenicity in the prototrophic transformant. (Perfect et al., (1993) Infect Immun 61:4446-51).

[0342] Recent findings that C. neoformans is a facultative intracellular pathogen indicate that this mode of infection may contribute to the persistence and latency of C. neoformans infection (Feldmesser et al., 2001, Trends in Microbiol. 9:273-278). Upon ingestion by a phagocytic cell, such as a macrophage or microglial cell, the yeast remains within the phagosome even when the phagosome is fused with a lysosome. Survival is associated with the accumulation of intracellular capsular polysaccharide and possibly synthesis of melanin. It is likely that gene expression during growth as a free-living saprophyte will be different than that if the fungal cell is located within a phagocytic cell of the host. Thus, expression of any given essential/virulence gene may be related to essentiality/virulence in either intracellular or extracellular environments, or both.

[0343] Accordingly, in yet another embodiment of the invention, the growth of conditional-expression C. neoformans mutants of the invention inside a phagocytic cell in the presence or absence of an inducer/repressor, such as tetracycline, can be monitored. Infected phagocytic cells can be observed directly with techniques such as intravital imaging (Farina et al., 1998, Cancer Res. 58:2528-2532) or observed in vitro after the phagocytic cell is removed from an infected animal. For example, in an in vivo phagocytosis assay, groups of mice can be infected with the mutants and after a period of time, the mice were killed and underwent bronchial lavage; alveolar macrophages were retrieved and allowed to adhere which are then fixed and stained to determine the number of phagocytosed C. neoformans cells. Also, the rate of yeast cell budding inside a cell and the number of yeast cells per phagosome can be determined.

[0344] In another embodiment, in vitro phagocytosis assays can be performed with murine macrophage cell lines, primary peritoneal and alveolar macropahages. The mutant yeast cells can be used to infect phagocytic cells in a tissue culture model in the presence or absence of an inducer/repressor. The number of mutant cells inside macrophages can be determined by lysing the macrophages and plating the cell supernatant and lysates in the appropriate plate medium for counting. Examples of animal models and tissue culture models include but are not limited to those described in Fries et al., 2001, J. Clin. Invest. 108:1639-1648; Goldman et al., 1998, Proc. Natl. Acad. Sci. 95:14967-14972; Lee et al., 1995, Lab. Invest. 73:871-879; and Luberto et al., 2001, Genes Dev. 15:201-212, which are incorporated herein by reference in their entireties.

[0345] 5.4.4 Rational Design of Binding Compounds

[0346] Compounds identified via assays such as those described herein can be useful, for example, for inhibiting the growth of the infectious agent and/or ameliorating the symptoms of an infection. Compounds can include, but are not limited to, other cellular proteins. Binding compounds can also include, but are not limited to, peptides such as, for example, soluble peptides, comprising, for example, extracellular portions of target gene product transmembrane receptors, and members of random peptide libraries (see, e.g., Lam et al., 1991, Nature 354:82-84; Houghten et al., 1991, Nature 354:84-86) made of D-and/or L-configuration amino acids, rationally-designed antipeptide peptides, (see e.g., Hurby et al., Application of Synthetic Peptides: Antisense Peptides, “In Synthetic Peptides, A User's Guide”, W. H. Freeman, NY (1992), pp. 289-307), antibodies (including, but not limited to polyclonal, monoclonal, human, humanized, anti-idiotypic, chimeric or single chain antibodies, and FAb, F(ab′)₂ and FAb expression library fragments, and epitope-binding fragments thereof), and small organic or inorganic molecules. In the case of receptor-type target molecules, such compounds can include organic molecules (e.g., peptidomimetics) that bind to the ECD and either mimic the activity triggered by the natural ligand (i.e., agonists); as well as peptides, antibodies or fragments thereof, and other organic compounds that mimic the ECD (or a portion thereof) and bind to a “neutralize” natural ligand.

[0347] Computer modeling and searching technologies permit identification of compounds, or the improvement of already identified compounds, that can modulate target gene expression or activity. Having identified such a compound or composition, the active sites or regions are preferably identified. In the case of compounds affecting receptor molecules, such active sites might typically be ligand binding sites, such as the interaction domains of ligand with receptor itself. The active site is identified using methods known in the art including, for example, from the amino acid sequences of peptides, from the nucleotide sequences of nucleic acids, or from study of complexes of the relevant compound or composition with its natural ligand. In the latter case, chemical or X-ray crystallographic methods are used to find the active site by finding where on the factor the complexed ligand is found.

[0348] The three-dimensional geometric structure of the active site is then preferably determined. This is done by known methods, including X-ray crystallography, which determines a complete molecular structure. Solid or liquid phase NMR is also used to determine certain intra-molecular distances within the active site and/or in the ligand binding complex. Other experimental methods of structure determination known to those of skill in the art, are also used to obtain partial or complete geometric structures. The geometric structures are measured with a complexed ligand, natural or artificial, which increases the accuracy of the active site structure determined. Methods of computer based numerical modeling are used to complete the structure (e.g., in embodiments wherein an incomplete or insufficiently accurate structure is determined) or to improve its accuracy.

[0349] Finally, having determined the structure of the active site, either experimentally, by modeling, or by a combination, candidate modulating compounds are identified by searching databases containing compounds along with information on their molecular structure. Such a search seeks compounds having structures that match the determined active site structure and that interact with the groups defining the active site. Such a search can be manual, but is preferably computer assisted. These compounds found from this search are potential target or pathway gene product modulating compounds.

[0350] In general, the method is based on determining the three-dimensional structure of the polypeptide encoded by each essential gene, e.g., using X-ray crystallography or NMR, and using the coordinates of the determined structure in computer-assisted modeling programs to identify compounds that bind to and/or modulate the activity or expression level of encoded polypeptide. Thus, the method employs three basic steps: 1) the generation of high-purity crystals of the encoded recombinant (or endogenous) polypeptide for analysis; 2) determination of the three-dimensional structure of the polypeptide; and, 3) the use of computer-assisted “docking” programs to analyze the molecular interaction of compound structure and the polypeptide (i.e., drug screening).

[0351] General methods for performing each of the above steps are described below and are also well known to those of skill in the art. Any method known to those of skill in the art, including those described herein, may be employed for generating the three-dimensional structure for each identified essential gene product and its use in the drug-screening assays.

[0352] The products of the C. neoformans essential genes identified herein are used as molecular targets for rational drug design. In one embodiment, the three-dimensional structure of the product of the essential gene is determined using X-ray crystallography and the resulting crystallographic data are used in in silico drug screening assays to identify agents that are capable of binding to and modulating the amount or activity of the essential gene product.

[0353] Under special conditions, molecules condense from solution into a highly-ordered crystalline lattice, which is defined by a unit cell, the smallest repeating volume of the crystalline array. The contents of such a cell can interact with and diffract certain electromagnetic and particle waves (e.g., X-rays, neutron beams, electron beams etc.). Due to the symmetry of the lattice, the diffracted waves interact to create a diffraction pattern. By measuring the diffraction pattern, crystallographers attempt to reconstruct the three-dimensional structure of the atoms in the crystal.

[0354] A crystal lattice is defined by the symmetry of its unit cell and any structural motifs the unit cell contains. For example, there are 230 possible symmetry groups for an arbitrary crystal lattice, while the unit cell of the crystal lattice group may have an arbitrary dimension that depends on the molecules making up the lattice. Biological macromolecules, however, have asymmetric centers and are limited to 65 of the 230 symmetry groups. See Cantor et al., Biophysical Chemistry, Vol. III, W. H. Freeman & Company (1980), which is incorporated herein by reference in its entirety.

[0355] A crystal lattice interacts with electromagnetic or particle waves, such as X-rays or electron beams respectively, that have a wavelength with the same order of magnitude as the spacing between atoms in the unit cell. The diffracted waves are measured as an array of spots on a detection surface positioned adjacent to the crystal. Each spot has a three-dimensional position, hkl, and an intensity, I (hkl), both of which are used to reconstruct the three-dimensional electron density of the crystal with the so-called Electron Density Equation. The Electron Density Equation states that the three-dimensional electron density of the unit cell is the Fourier transform of the structure factors. Thus, in theory, if the structure factors are known for a sufficient number of spots in the detection space, then the three-dimensional electron density of the unit cell could be calculated using the Electron Density Equation.

[0356] Another aspect of the present invention comprises a method of using a crystal of the present invention and/or a dataset comprising the three-dimensional coordinates obtained from the crystal in a drug-screening assay. The present invention further provides the novel agents (modulators or drugs) that are identified by the method of the present invention, along with the method of using agents (modulators or drugs) identified by a method of the present invention, for inhibiting the activity of or modulating the amount of an essential gene product.

[0357] This method of drug screening relies on structure based drug design. In this case, the three dimensional structure of product of the essential gene is determined and potential agonists and/or potential antagonists are designed with the aid of computer modeling (Bugg et al., Scientific American, Dec.:92-98 (1993); West et al., TIPS, 16:67-74 (1995); Dunbrack et al., Folding & Design, 2:27-42 (1997)). However, heretofore the three-dimensional structure of the product of the essential genes identified herein has remained unknown. Therefore, there is a need for obtaining a crystal of these gene products with sufficient quality to allow high quality crystallographic data to be obtained. Furthermore there is a need for the determination of the three-dimensional structure of such crystals. Finally, there is a need for procedures for related structural based drug design predicated on such crystallographic data.

[0358] Computer analysis may be performed with one or more of the computer programs including: QUANTA, CHARMM, FlexX, INSIGHT, SYBYL, MACROMODEL and ICM (Dunbrack et al., Folding & Design, 2:27-42 (1997)). In a further embodiment of this aspect of the invention, an initial drug-screening assay is performed using the three-dimensional structure so obtained, preferably along with a docking computer program. Such computer modeling can be performed with one or more Docking programs such as DOC, FlexX, GRAM and AUTO DOCK (Dunbrack et al., Folding & Design, 2:27-42 (1997)).

[0359] It should be understood that for each drug screening assay provided herein, a number of iterative cycles of any or all of the steps may be performed to optimize the selection. The drug screening assays of the present invention may use any of a number of means for determining the interaction between an agent or drug and an C. neoformans essential gene product.

[0360] In one such assay, a drug can be specifically designed to bind to an essential gene of the present invention through NMR based methodology, (Shuker et al., Science 274:1531-1534 (1996) hereby incorporated by reference herein in its entirety). NMR Spectroscopy and Structure Calculations: NMR spectra were recorded at 23° C. using Varian Unity Plus 500 and unity 600 spectrometers, each equipped with a pulsed-field gradient triple resonance probe as analyzed as described in Bagby et al., (Cell 82:857-867 (1995)) hereby incorporated by reference in its entirely. Sequential resonance assignments of backbone ¹H, ¹⁵N, and ¹³C atoms were made using a combination of triple resonance experiments similar to those previously described (Bagby et al., Biochemistry, 33:2409-2421 (1994)), except with enhanced sensitivity (Muhandiram and Kay, J. Magn. Reson., 103: 203-216 (1994)) and minimal H₂O saturation (Kay et al., J. Magn. Reson., 109:129-133 (1994)). Side chain ¹H and ¹³C assignments were made using HCCH-TOCSY (Bax et al., J. Magn. Reson., 87:620-627 (1990)) experiments with mixing times of 8 ms and 16 ms in solution and were not included in structure calculations. Nuclear Overhauser effect (NOE) cross peaks in two-dimensional ¹H-¹H NOE spectroscopy (NOESY), three-dimensional ¹⁵N-edited NOESY-HSQC (Zhang et al., J. Biomol, NMR, 4:845-858 (1994)) and three-dimensional simultaneous acquisition ¹⁵N/¹³C-edited NOE (Pascal et al., J. Magn. Reson., 103:197-201 (1994)) spectra were obtained with 100 ms NOE mixing times. Standard pseudo-atom distance corrections (Wuthrich et al., J. Mol. Biol., 169:949-961 (1983)) were incorporated to account for center averaging. An additional 0.5 D was added to the upper limits for distances involving methyl groups (Wagner et al., J. Mol. Biol., 196:611-639 (1987); Clore et al., Biochemistry, 26:8012-8023 (1987)).

[0361] The structures are calculated using a simulated annealing protocol (Nilges et al., In computational Aspects of the Study of Biological Macromolecules by Nuclear Magnetic Resonance Spectroscopy, J. C. Hoch, F. M. Poulsen, and C. Redfield, eds., New York: Plenum Press, pp. 451-455 (1991) within X-PLOR (Brunger, X-PLOR Manual, Version 3.1, New Haven, Conn.: Department of Molecular Biophysics and Biochemistry, Yale University (1993) using the previously described strategy (Bagby et al., Structure, 2:107-122 (1994)). Interhelical anges were calculated using an in-house program written by K. Yap. Accessible surface areas were calculated using the program Naccess, available from Prof. J. Thornton, University College, London.

[0362] Any method known to those of skill in the art, including those set forth below, may be employed to prepare high-purity crystals. For example, crystals of the product of the identified essential gene can be grown by a number of techniques including batch crystallization, vapor diffusion (either by sitting drop or hanging drop) and by microdialysis. Seeding of the crystals in some instances is required to obtain X-ray quality crystals. Standard micro and/or macro seeding of crystals may therefore be used. Exemplified below is the hanging-drop vapor diffusion procedure. Hanging drops of an essential gene product (2.5 μl, 10 mg/ml) in 20 mM Tris, pH 8.0, 100 mM NaCl are mixed with an equal amount of reservoir buffer containing 2.7-3.2 M sodium formate and 100 mM Tris buffer, pH 8.0, and kept at 4° C. Crystal showers may appear after 1-2 days with large single crystals growing to full size (0.3×0.3×0.15 mm³) within 2-3 weeks. Crystals are harvested in 3.5 M sodium formate and 100 mM Tris buffer, pH 8.0 and cryoprotected in 3.5 M sodium formate, 100 mM Tris buffer, pH 8.0, 10% (w/v) sucrose, and 10% (v/v) ethylene glycol before flash freezing in liquid propane. Once a crystal of the present invention is grown, X-ray diffraction data can be collected.

[0363] Therefore, any person with skill in the art of protein crystallization having the present teachings and without undue experimentation could crystallize a large number of alternative forms of the essential gene products from a variety of different organisms, or polypeptides having conservative substitutions in their amino acid sequence.

[0364] Once the three-dimensional structure of a crystal comprising an essential gene product is determined, a potential modulator of its activity can be examined through the use of computer modeling using a docking program such as GRAM, DOCK, FlexX or AUTODOCK (Dunbrack et al., 1997, supra), to identify potential modulators. This procedure can include computer fitting of potential modulators to the polypeptide or fragments thereof to ascertain how well the shape and the chemical structure of the potential modulator will bind. Computer programs are employed to estimate the attraction, repulsion, and steric hindrance of the two binding partners (e.g., the essential gene product and a potential modulator). Generally the tighter the fit, the lower the steric hindrances, and the greater the attractive forces, the more potent the potential modulator since these properties are consistent with a tighter binding constant. Furthermore, the more specificity in the design of a potential drug the more likely that the drug will not interact as well with other proteins. This will minimize potential side-effects due to unwanted interactions with other proteins.

[0365] Compound and compound analogs can be systematically modified by computer modeling programs until one or more promising potential analogs is identified. In addition systematic modification of selected analogs can then be systematically modified by computer modeling programs until one or more potential analogs are identified. Such analysis has been shown to be effective in the development of HIV protease inhibitors (Lam et al., Science 263:380-384 (1994); Wlodawer et al., Ann. Rev. Biochem. 62:543-585 (1993); Appelt, Perspectives in Drug Discovery and Design 1:23-48 (1993); Erickson, Perspectives in Drug Discovery and Design 1:109-128 (1993)). Alternatively a potential modulator could be obtained by initially screening a random peptide library produced by recombinant bacteriophage for example, (Scott and Smith, Science, 249:386-390 (1990); Cwirla et al., Proc. Natl. Acad. Sci., 87:6378-6382 (1990); Devlin et al., Science, 249:404-406 (1990)). A peptide selected in this manner would then be systematically modified by computer modeling programs as described above.

[0366] Alternatively, these methods are used to identify improved modulating compounds from an already known modulating compound or ligand. The composition of the known compound is modified and the structural effects of modification are determined using the experimental and computer modeling methods described above applied to the new composition. The altered structure is then compared to the active site structure of the compound to determine if an improved fit or interaction results. In this manner systematic variations in composition, such as by varying side groups, are quickly evaluated to obtain modified modulating compounds or ligands of improved specificity or activity.

[0367] Further experimental and computer modeling methods useful to identify modulating compounds based upon identification of the active sites of target or pathway gene or gene products and related transduction and transcription factors are apparent to those of skill in the art.

[0368] There are a number of articles that review the art of computer modeling of drugs that interact with specific proteins, including the following: Rotivinen et al., 1988, Acta Pharmaceutical Fennica 97:159-166; Ripka, (Jun. 16, 1988), New Scientist 54-57; McKinaly and Rossmann, 1989, Annu. Rev. Pharmacol. Toxiciol. 29:111-122; Perry and Davies, OSAR: Quantitative Structure-Activity Relationships in Drug Design pp. 189-193 (Alan R. Liss, Inc. 1989); Lewis and Dean, 1989 Proc. R. Soc. Lond. 236:125-140 and 1-162; and, with respect to a model receptor for nucleic acid components, Askew et al., 1989, J Am. Chem. Soc. 111:1082-1090.

[0369] Although generally described above with reference to design and generation of compounds which could alter binding, one could also screen libraries of known compounds, including natural products or synthetic chemicals, as well as other biologically active materials, including proteins, for compounds which are inhibitors or activators.

### 5.5 Transcriptional Profiling

[0370] 5.5.1 Analysis of Gene Expression

[0371] Gene expression profiling techniques are important tools for the identification of suitable biochemical targets, as well as for the determination of the mode of action of known compounds. Large scale sequencing of the C. neoformans genome and development of nucleic acid arrays or microarrays incorporating this information, will enable genome-wide gene expression analyses to be carried out with this diploid pathogenic fungus. Technologies available for making and using very large arrays of nucleic acids are well known in the art, see, for example, Schena, M., “Microarray Biochip Technology,” 2000, Eaton Publishing, MA, in particular Chapters 1 and 2, and also U.S. Pat. No. 5,143,854 and PCT Publication Nos. WO 90/15070 and 92/10092, each of which is hereby incorporated by reference. See, also, U.S. Pat. Nos. 5,412,087, 5,445,934 and 5,744,305; Grigorenko, “DNA Arrays: Technologies and Experimental Strategies”, CRC Press, 2001; and Rampal, “DNA Arrays: Methods and Protocols”, Humana Press 2001, each of which is hereby incorporated by reference. In particular embodiments, the nucleic acid arrays used for profiling can comprise one or more of the nucleic acid molecules of the essential genes of the invention, preferably DNA comprising the entire or a portion of SEQ ID NO. 2001-2361, or DNA comprising a nucleotide sequence that encode the entire or a portion of SEQ ID NO: 3001-3361. The present invention provides methods for obtaining the transcriptional response profiles for both essential and virulence/pathogenicity genes of C. neoformans. Conditional expression of essential genes serves to delineate, for example, regulatory interactions valuable for the design of drug screening programs focused upon C. neoformans.

[0372] In an embodiment of the present invention, the conditional-expression C. neoformans mutant strain collection is used for the analysis of expression of essential genes within this pathogen. One particularly powerful application of such a strain collection involves the construction of a comprehensive transcriptional profile database for the entire essential gene set or a desired subset of essential genes within a pathogen. Such a database is used to compare the response profile characteristic of lead antimycotic compounds with the profile obtained with new anti-fungal compounds to distinguish those with similar from those with distinct modes of action. Matching (or even partially overlapping) the transcriptional response profiles determined after treatment of the strain with the lead compound with that obtained with a particular essential target gene under repressing conditions, is used to identity the target and possible mode of action of the drug. See, for example, U.S. Pat. No. 6,004,755 which disclose methods for quantitative gene expression analysis with nucleic acid arrays; and U.S. Pat. No. 6,263,287 which discloses methods and computer systems for the analysis and manipulation of gene expression data, which are incorporated herein by reference in their entirety.

[0373] Gene expression analysis of essential genes also permits the biological function and regulation of those genes to be examined within the pathogen, and this information is incorporated within a drug screening program. For example, transcriptional profiling of essential drug targets in C. neoformans permits the identification of novel drug targets which participate in the same cellular process or pathway uncovered for the existing drug target and which could not otherwise be identified without direct experimentation within the pathogen. These include genes not only unique to the pathogen but also broad-range gene classes possessing a distinct function or subject to different regulation in the pathogen. Furthermore, pathogen-specific pathways may be uncovered and exploited for the first time. See, for example, U.S. Pat. No. 6,340,565 (which is incorporated herein by reference in their entirety), which discloses an gene expression array-based approach to the systematic analysis of relationships between expression patterns of genes as affected by the activities of other genes, which can be adapted to investigate the effect of pathogen gene expression in the presence of various compounds identified by the methods of the invention.

[0374] In another aspect of the present invention, the gene expression profile of conditional-expression C. neoformans mutant strains under nonrepressing or induced conditions is established to evaluate the overexpression response profile for one or more drug targets. For example, overexpression of genes functioning in signal transduction pathways often display unregulated activation of the pathway under such conditions. Moreover, several signaling pathways have been demonstrated to function in the pathogenesis process. Transcriptional response profiles generated by overexpressing conditional-expression C. neoformans mutant strains provide information concerning the set of genes regulated by such pathways; any of which may potentially serve an essential role in pathogenesis and therefore representing promising drug targets. Furthermore, analysis of the expression profile may reveal one or more genes whose expression is critical to the subsequent expression of an entire regulatory cascade. Accordingly, these genes are particularly important targets for drug discovery and mutants carrying the corresponding modified allelic pair of genes form the basis of a mechanism-of-action based screening assays. Presently such an approach is not possible. Current drug discovery practices result in an exceedingly large number of “candidate” compounds and little understanding of their mode of action. A transcriptional response database comprising both gene shut-off and overexpression profiles generated using the conditional-expression C. neoformans mutant strain collection offers a solution to this drug discovery bottleneck by 1) determining the transcriptional response or profile resulting from an antifungal's inhibition of a wild type strain, and 2) comparing this response to the transcriptional profiles resulting from inactivation or overexpression of drug targets comprising the conditional-expression C. neoformans mutant strain collection.

[0375] Matching or significantly correlating transcriptional profiles resulting from both genetic alteration of a drug target and chemical/compound inhibition of wild type cells provides evidence linking the compound to its cellular drug target and suggests its mechanism of action.

[0376] Accordingly, the invention provides a method for evaluating a compound against a target gene product encoded by a nucleotide sequence comprising one of SEQ ID NOs: 2001-2361, as well as the gene product encoded by genomic SEQ ID NOs: 1-361 and 1001-1361, as expressed by C. neoformans, said method comprising the steps of (a) contacting wild type diploid fungal cells or control cells with the compound and generating a first transcription profile; (b) determining the transcription profile of mutant fungal cells, such as a conditional-expression C. neoformans mutant strain, which have been cultured under conditions wherein the second allele of the target gene is substantially underexpressed, not expressed or overexpressed and generating a second transcription profile for the cultured cells; and comparing the first transcription profile with the second transcription profile to identify similarities in the profiles. For comparisons, similarities of profiles can be expressed as an indicator value; and the higher the indicator value, the more desirable is the compound.

[0377] 5.5.2 Identification of Secondary Targets

[0378] Methods are described herein for the identification of secondary targets. “Secondary target,” as used herein, refers to a gene whose gene product exhibits the ability to interact with target gene products involved in the growth and/or survival of an organism (i.e., target essential gene products), under a set of defined conditions, or in the pathogenic mechanism of the organism, (i.e., target virulence gene products) during infection of a host.

[0379] Any method suitable for detecting protein-protein interactions can be employed for identifying secondary target gene products by identifying interactions between gene products and target gene products. Such known gene products can be cellular or extracellular proteins. Those gene products which interact with such known gene products represent secondary target gene products and the genes which encode them represent secondary targets. Well known techniques such as those described in Golemis and Serebriiskii, “Protein-protein interactions: A molecular cloning manual”, Cold Spring Harbor Laboratory Press, 2002, which is incorporated herein by reference, can be used.

[0380] Among the traditional methods employed are co-immunoprecipitation, crosslinking and co-purification through gradients or chromatographic columns. Utilizing procedures such as these allows for the identification of secondary target gene products. Once identified, a secondary target gene product is used, in conjunction with standard techniques, to identify its corresponding secondary target. For example, at least a portion of the amino acid sequence of the secondary target gene product is ascertained using techniques well known to those of skill in the art, such as via the Edman degradation technique (see, e.g., Creighton, 1983, “Proteins: Structures and Molecular Principles,” W. H. Freeman & Co., N.Y., pp.34-49). The amino acid sequence obtained can be used as a guide for the generation of oligonucleotide mixtures that can be used to screen for secondary target gene sequences. Screening can be accomplished, for example, by standard hybridization or PCR techniques. Techniques for the generation of oligonucleotide mixtures and for screening are well-known. (See, e.g., Ausubel, supra., and PCR Protocols: A Guide to Methods and Applications, 1990, Innis, M. et al., eds. Academic Press, Inc., New York).

[0381] Additionally, methods are employed which result in the simultaneous identification of secondary targets which encode proteins interacting with a protein involved in the growth and/or survival of an organism under a set of defined conditions, or in the pathogenic mechanism of the organism during infection of a host. These methods include, for example, probing expression libraries with labeled primary target gene protein known or suggested to be involved in or critical to these mechanisms, using this protein in a manner similar to the well known technique of antibody probing of ëgt11 phage libraries.

[0382] One method which detects protein interactions in vivo, the two-hybrid system, is described in detail for illustration purposes only and not by way of limitation. One version of this system has been described (Chien et al., 1991, Proc. Natl. Acad. Sci. USA, 88:9578-9582) and is commercially available from Clontech (Palo Alto, Calif.).

[0383] Briefly, utilizing such a system, plasmids are constructed that encode two hybrid proteins: one consists of the DNA-binding domain of a transcription activator protein fused to a known protein, in this case, a protein known to be involved in growth of the organism, or in pathogenicity, and the other consists of the activator protein's activation domain fused to an unknown protein that is encoded by a cDNA which has been recombined into this plasmid as part of a cDNA library. The plasmids are transformed into a strain of the yeast Saccharomyces cerevisiae that contains a reporter gene (e.g., lacZ) whose regulatory region contains the transcription activator's binding sites. Either hybrid protein alone cannot activate transcription of the reporter gene, the DNA-binding domain hybrid cannot because it does not provide activation function, and the activation domain hybrid cannot because it cannot localize to the activator's binding sites. Interaction of the two hybrid proteins reconstitutes the functional activator protein and results in expression of the reporter gene, which is detected by an assay for the reporter gene product.

[0384] The two-hybrid system or related methodology is used to screen activation domain libraries for proteins that interact with a known “bait” gene product. By way of example, and not by way of limitation, target essential gene products and target virulence gene products are used as the bait gene products. Total genomic or cDNA sequences encoding the target essential gene product, target virulence gene product, or portions thereof, are fused to the DNA encoding an activation domain. This library and a plasmid encoding a hybrid of the bait gene product fused to the DNA-binding domain are cotransformed into a yeast reporter strain, and the resulting transformants are screened for those that express the reporter gene. For example, and not by way of limitation, the bait gene is cloned into a vector such that it is translationally fused to the DNA encoding the DNA-binding domain of the GAL4 protein. These colonies are purified and the library plasmids responsible for reporter gene expression are isolated. DNA sequencing is then used to identify the proteins encoded by the library plasmids.

[0385] A cDNA library of the cell line from which proteins that interact with bait gene product are to be detected is made using methods routinely practiced in the art. According to the particular system described herein, for example, the cDNA fragments are inserted into a vector such that they are translationally fused to the activation domain of GAL4. This library is co-transformed along with the bait gene-GAL4 fusion plasmid into a yeast strain which contains a lacZ gene driven by a promoter which contains GAL4 activation sequence. A cDNA encoded protein, fused to GAL4 activation domain, that interacts with bait gene product reconstitutes an active GAL4 protein and thereby drive expression of the lacZ gene. Colonies which express lacZ are detected by their blue color in the presence of X-gal. The cDNA can then be purified from these strains, and used to produce and isolate the bait gene-interacting protein using techniques routinely practiced in the art.

[0386] Once a secondary target has been identified and isolated, it is further characterized and used in drug discovery by the methods of the invention.

[0387] 5.5.3 Use of Gene Expression Arrays

[0388] To carry out profiling, gene expression arrays and microarrays can be employed. Gene expression microarrays are high density arrays of DNA samples deposited at specific, preferably spatially addressible locations on a solid substrate, such as a glass surface, silicon, nylon membrane, or the like. Such arrays are used by researchers to quantify relative gene expression under different conditions. An example of this technology is found in U.S. Pat. No. 5,807,522, which is hereby incorporated by reference.

[0389] It is possible to study the expression of substantially all of the genes in the genome of a particular microbial organism using a single array. For example, the arrays may consist of 12×24 cm nylon filters containing PCR products corresponding to ORFs from C. neoformans. 10 ngs of each PCR product are spotted every 1.5 mm on the filter. Single stranded labeled cDNAs are prepared for hybridization to the array (no second strand synthesis or amplification step is done) and placed in contact with the filter. Thus the labeled cDNAs are of “antisense” orientation. Quantitative analysis is done using a phosphorimager.

[0390] Hybridization of cDNA made from a sample of total cell mRNA to such an array followed by detection of binding by one or more of various techniques known to those in the art provides a signal at each location on the array to which cDNA hybridized. The intensity of the hybridization signal obtained at each location in the array thus reflects the amount of mRNA for that specific gene that was present in the sample. Comparing the results obtained for mRNA isolated from cells grown under different conditions thus allows for a comparison of the relative amount of expression of each individual gene during growth under the different conditions.

[0391] Gene expression arrays are used to analyze the total mRNA expression pattern at various time points after reduction in the level or activity of a gene product required for fungal proliferation, virulence or pathogenicity. Reduction of the level or activity of the gene product is accomplished by growing a conditional-expression C. neoformans mutant strain under conditions in which the product of the nucleic acid linked to the regulatable promoter is rate limiting for fungal growth, survival, proliferation, virulence or pathogenicity or by contacting the cells with an agent which reduces the level or activity of the target gene product. Analysis of the expression pattern indicated by hybridization to the array provides information on other genes whose expression is influenced by reduction in the level or activity of the gene product. For example, levels of other mRNAs may be observed to increase, decrease or stay the same following reduction in the level or activity of the gene product required for growth, survival, proliferation, virulence or pathogenicity. Thus, the mRNA expression pattern observed following reduction in the level or activity of a gene product required for growth, survival, proliferation, virulence or pathogenicity identifies other nucleic acids required for growth, survival, proliferation, virulence or pathogenicity. In addition, the mRNA expression patterns observed when the fungi are exposed to candidate drug compounds or known antibiotics are compared to those observed when the level or activity of a gene product required for fungal growth, survival, proliferation, virulence or pathogenicity is reduced. If the mRNA expression pattern observed with the candidate drug compound is similar to that observed when the level of the gene product is reduced, the drug compound is a promising therapeutic candidate. Thus, the assay is useful in assisting in the selection of promising candidate drug compounds for use in drug development.

[0392] In cases where the source of nucleic acid deposited on the array and the source of the nucleic acid being hybridized to the array are from two different microorganisms, gene expression identify homologous genes in the two microorganisms.

### 5.6 Proteomics Assays

[0393] In another embodiment of the present invention, and in much the same way that the conditional-expression C. neoformans mutant strain collection enables transcriptional profiling within a pathogen, a conditional-expression C. neoformans mutant strain collection provides an invaluable resource for the analysis of the expressed protein complement of a genome. By evaluating the overall protein expression by members of a conditional-expression C. neoformans mutant strain collection under repressing and non-repressing growth conditions, a correlation between the pattern of protein expression of a cell can be made with the non-expression or the level of expression of an essential gene. A plurality of protein expression patterns will be generated for a conditional-expression C. neoformans mutant strain when the strain is cultured under different conditions and different levels of expression of one of the modified allele. The set of proteins analyzed comprises one or more proteins comprising an amino acid sequence selected from the group consisting of the amino acid sequences of SEQ ID NO: 3001 to 3361. A preferred mutant strain collection for performing such analysis is a conditional-expression mutant strain collection.

[0394] Evaluation of the full complement of proteins expressed within a cell depends upon definitive identification of all protein species detectable on two-dimensional polyacrylamide gels or by other separation techniques. However, a significant fraction of these proteins are of lower abundance and fall below the threshold level required for positive identification by peptide sequencing or mass spectrometry. Nevertheless, these Aorphan@ proteins are detectable using an analysis of protein expression by individual conditional-expression C. neoformans mutant strains. Conditional expression of low abundance gene products facilitates their positive identification by comparing protein profiles of conditional-expression C. neoformans mutant strains under repressing versus nonrepressing or overexpression conditions. In some cases, a more complex protein profile results because of changes of steady state levels for multiple proteins, which is caused indirectly by manipulating the low abundance gene in question. Overexpression of individual targets within the conditional-expression C. neoformans mutant strain collection can also directly aid orphan protein identification by providing sufficient material for peptide sequencing or mass spectrometry.

[0395] In yet another embodiment, defined genetic mutations can be constructed to create strains exhibiting protein expression profiles comparable to those observed upon treatment of the strain with a previously uncharacterized compound. In this way, it is possible to distinguish between antimycotic compounds that act on multiple targets in a complicated manner from other potential lead compounds that act on unique fungal-specific targets and whose mode of action can be determined. Matching the pattern of protein expression determined after treatment of a strain with a lead compound with that obtained with a particular essential target gene under repressing conditions, can be used to identity the target and possible mode of action of the drug.

[0396] Accordingly, the invention provides a pattern of expression of a set of proteins in a mutant strain as determined by methods well known in the art for establishing a protein expression pattern. The pattern typically takes the form of computer data comprising the identities of the proteins, and for each protein, an indicator for the presence or absence of the proteins, and/or a level of expression expressed in absolute value or in a value relative to a standard. Two-dimensional gel electrophoresis is well known in the art for generating and qualitatively analyzing a pattern of expression of a set of proteins. Mass spectroscopy is a highly accurate analytical tool for determining molecular weights and identifying chemical structures. Proteins and peptides have been studied by matrix-assisted laser desorption mass spectroscopy and electrospray ionization mass spectroscopy. See, for example, Chait, Brian T. and Kent, Stephen B. H., 1992, “Weighing Naked Proteins: Practical, High-Accuracy Mass Measurement of Peptides and Proteins”, Science, 257:1885-1894, and U.S. Pat. No. 6,391,649, which are incorporated by reference herein. Matrix-assisted laser desorption time-of-flight mass spectrometers are described in U.S. Pat. Nos. 5,045,694 and 5,453,247, which are incorporated by reference herein. Electrospray ionization mass spectrometers are described in U.S. Pat. No. 5,245,186 and U.S. Pat. No. 4,977,320, which are also incorporated by reference herein. For a detailed description of methods and protocols that can be used to analyze the protein expression patterns, see for example, Link, “2-D Proteome Analysis Protocols”, Humana Press 1988.

[0397] In various embodiments, the present invention provides a method of quantitative analysis of the expressed protein complement of a diploid pathogenic fungal cell: a first protein expression profile is developed for a control diploid pathogenic fungus, which has two, unmodified alleles for the target gene. Mutants of the control strain, in which one allele of the target gene is inactivated, for example, in a conditional-expression C. neoformans mutant strain, by insertion by or replacement with a disruption cassette, is generated. The other allele is modified such that expression of that second allele is under the control of a heterologous regulated promoter. A second protein expression profile is developed for this mutant fungus, under conditions where the second allele is substantially overexpressed as compared to the expression of the two alleles of the gene in the control strain. Similarly, if desired, a third protein expression profile is developed, under conditions where the second allele is substantially underexpressed as compared to the expression of the two alleles of the gene in the control strain. The first protein expression profile is then compared with the second expression profile, and if applicable, a third protein expression profile to identify an expressed protein detected at a higher level in the second profile, and if applicable, at a lower level in the third profile, as compared to the level in first profile.

[0398] Accordingly, the invention provides a method for evaluating a compound against a target gene product encoded by a nucleotide sequence comprising one of SEQ ID NOs: 2001-2361, as well as the gene product encoded by genomic SEQ ID NOs: 1-361 and 1001-1361, as expressed by C. neoformans, said method comprising the steps of (a) contacting wild type diploid fungal cells or control cells with the compound and generating a first protein expression profile; (b) determining the protein expression profile of mutant diploid fungal cells, such as a conditional-expression C. neoformans mutant strain, which have been cultured under conditions wherein the second allele of the target gene is substantially underexpressed, not expressed or overexpressed and generating a second protein expression profile for the cultured cells; and comparing the first protein expression profile with the second protein expression profile to identify similarities in the profiles. For comparisons, similarities of profiles can be expressed as an indicator value; and the higher the indicator value, the more desirable is the compound.

### 5.7 Pharmaceutical Compositions And Uses Thereof

[0399] Compounds including nucleic acid molecules that are identified by the methods of the invention as described herein can be administered to a subject at therapeutically effective doses to treat or prevent infections by a pathogenic organism, such as C. neoformans. Depending on the target, the compounds may also be useful for treatment of a non-infectious disease in a subject, such as but not limited to, cancer. C. neoformans infection enhances HIV expression in monocytic cells that may further impair host immunity and contribute to the acceleration of the course of HIV disease (Harrison et al., (1997) J Infect Dis. 176(2):485-491). Thus, prevention or treatment of C. neoformans infection may prolong life span of HIV infected patients from the disease itself and not just from infections by the opportunistic fungi.

[0400] In another embodiment, the compounds can be used to treat or prevent infection of domesticated animals by C. neoformans. In particular, household pets, e.g., cats, dogs, and birds, can get infected suggesting that these animals can be recipients of the compounds, see Barr et al., (2000) Aust Vet J 78(3):154-158. In one instance, a 12-year-old, FIV-positive, cat was presented with a history of sneezing and coughing during the previous seven months. On thoracic radiographs, a prominent bronchial pattern and three focal, opacified nodules were seen. Cytology of bronchoalveolar lavage fluid demonstrated spherical, capsulate, narrow-necked, budding yeasts within macrophages. Culture of the fluid yielded a heavy growth of C. neoformans var neoformans. The veterinary use of the compounds of the invention are contemplated.

[0401] A therapeutically effective dose refers to that amount of a compound (including nucleic acid molecules) sufficient to result in a healthful benefit in the treated subject. Typically, but not so limited, the compounds act by reducing the activity or level of a gene product encoded by a nucleic acid comprising a sequence selected from the group consisting of SEQ ID NOs: 2001-2361, as well as the gene product encoded by genomic SEQ ID NOs: 1-361 and 1001-1361, as expressed by C. neoformans. The subject to be treated can be a plant, a vertebrate, a mammal, an avian, or a human. These compounds can also be used for preventing or containing contamination of an object by C. neoformans, or used for preventing or inhibiting formation on a surface of a biofilm comprising C. neoformans. Biofilm comprising C. neoformans are found on surfaces of medical devices, such as but not limited to surgical tools, implanted devices, catheters and stents.

[0402] 5.7.1 Effective Dose

[0403] Toxicity and therapeutic efficacy of compounds can be determined by standard pharmaceutical procedures in cell cultures or experimental animals, e.g., for determining the LD₅₀ (the dose lethal to 50% of the population) and the ED₅₀ (the dose therapeutically effective in 50% of the population). The dose ratio between toxic and therapeutic effects is the therapeutic index and it can be expressed as the ratio LD₅₀/ED₅₀. Compounds which exhibit large therapeutic indices are preferred. While compounds that exhibit toxic side effects can be used, care should be taken to design a delivery system that targets such compounds to the site of affected tissue in order to minimize potential damage to uninfected cells and, thereby, reduce side effects.

[0404] The data obtained from the cell culture assays and animal studies can be used in formulating a range of dosage for use in humans. The dosage of such compounds lies preferably within a range of circulating concentrations that include the ED₅₀ with little or no toxicity. The dosage can vary within this range depending upon the dosage form employed and the route of administration utilized. For any compound used in the method of the invention, the therapeutically effective dose can be estimated initially from cell culture assays. A dose can be formulated in animal models to achieve a circulating plasma concentration range that includes the IC₅₀ (i.e., the concentration of the test compound which achieves a half-maximal inhibition of symptoms) as determined in cell culture. Such information can be used to more accurately determine useful doses in humans. Levels in plasma can be measured, for example, by high performance liquid chromatography. A useful dosage can range from 0.001 mg/kg body weight to 10 mg/kg body weight.

[0405] 5.7.2 Formulations and Use

[0406] Pharmaceutical compositions for use in accordance with the present invention can be formulated in conventional manner using one or more physiologically acceptable carriers or excipients.

[0407] Thus, the compounds and their physiologically acceptable salts and solvents can be formulated for administration by inhalation or insufflation (either through the mouth or the nose) or oral, buccal, parenteral or rectal administration.

[0408] For oral administration, the pharmaceutical compositions can take the form of, for example, tablets or capsules prepared by conventional means with pharmaceutically acceptable excipients such as binding agents (e.g., pregelatinised maize starch, polyvinylpyrrolidone or hydroxypropyl methylcellulose); fillers (e.g., lactose, microcrystalline cellulose or calcium hydrogen phosphate); lubricants (e.g., magnesium stearate, talc or silica); disintegrants (e.g., potato starch or sodium starch glycolate); or wetting agents (e.g, sodium lauryl sulphate). The tablets can be coated by methods well known in the art. Liquid preparations for oral administration can take the form of, for example, solutions, syrups or suspensions, or they can be presented as a dry product for constitution with water or other suitable vehicle before use. Such liquid preparations can be prepared by conventional means with pharmaceutically acceptable additives such as suspending agents (e.g., sorbitol syrup, cellulose derivatives or hydrogenated edible fats); emulsifying agents (e.g., lecithin or acacia); non-aqueous vehicles (e.g., almond oil, oily esters, ethyl alcohol or fractionated vegetable oils); and preservatives (e.g., methyl or propyl-p-hydroxybenzoates or sorbic acid). The preparations can also contain buffer salts, flavoring, coloring and sweetening agents as appropriate.

[0409] Preparations for oral administration can be suitably formulated to give controlled release of the active compound.

[0410] For buccal administration the compositions can take the form of tablets or lozenges formulated in conventional manner.

[0411] For administration by inhalation, the compounds for use according to the present invention are conveniently delivered in the form of an aerosol spray presentation from pressurized packs or a nebulizer, with the use of a suitable propellant, e.g., dichlorodifluoromethane, trichlorofluoromethane, dichlorotetrafluoroethane, carbon dioxide or other suitable gas. In the case of a pressurized aerosol the dosage unit can be determined by providing a valve to deliver a metered amount. Capsules and cartridges of e.g. gelatin for use in an inhaler or insufflator can be formulated containing a powder mix of the compound and a suitable powder base such as lactose or starch.

[0412] The compounds can be formulated for parenteral administration (i.e., intravenous or intramuscular) by injection, via, for example, bolus injection or continuous infusion. Formulations for injection can be presented in unit dosage form, e.g., in ampoules or in multi-dose containers, with an added preservative. The compositions can take such forms as suspensions, solutions or emulsions in oily or aqueous vehicles, and can contain formulatory agents such as suspending, stabilizing and/or dispersing agents. Alternatively, the active ingredient can be in powder form for constitution with a suitable vehicle, e.g., sterile pyrogen-free water, before use.

[0413] The compounds can also be formulated in rectal compositions such as suppositories or retention enemas, e.g., containing conventional suppository bases such as cocoa butter or other glycerides.

[0414] In addition to the formulations described previously, the compounds can also be formulated as a depot preparation. Such long acting formulations can be administered by implantation (for example subcutaneously or intramuscularly) or by intramuscular injection. Thus, for example, the compounds can be formulated with suitable polymeric or hydrophobic materials (for example as an emulsion in an acceptable oil) or ion exchange resins, or as sparingly soluble derivatives, for example, as a sparingly soluble salt.

### 6. EXAMPLES

[0415] The following experiments are carried out using the preferred Cryptococcus neoformans strain of H99, which is a well-characterized virulent clinical isolate of serotype A (e.g., see Nelson et al., (2001) Genetics 157:935-947).

### 6.1 Media

[0416] Suitable media for culturing C. neoformans include, but are not limited to, 1) YPD (1% yeast extract, 1% bacto-peptone, and 2% glucose); 2) RPMI 1640 (Sigma, St. Louis, Mo.); 3) low iron medium (Nyhus and Jacobson (1999) Infect. Immun 67:2357-2365) for analysis of casule formation; 4) yeast nitrogen base (YNB) pH 5.6 and pH 7.0; 5) RPMI MOPS pH 7.0 with and without added glucose (2%); 6) RPMI buffered with phosphate buffer to pH 7.0. (Some isolates yield poor growth in RPMI MOPS after 72 h. Tests indicated that YNB pH 5.6 was the best medium for 5-fluorocytosine but was unsuitable for ketoconazole (Petrou and Shanson (2000) J Antimicrob Chemother 46(5):815-818)); glucose salts/urea/basal medium (GSU); 7) Birdseed Agar (Niger seed agar); 8) Caffeic Acid Ferric Citrate Test Medium (CAFC; C. neoformans light brown pigmentation); 9) CN Screen Medium (C. neoformans black colonies); 10) Glycine Cycloheximide Phenol Red Agar (C. neoformans bright red); and 11) Inositol Urea Caffeic Acid Medium (inositol sole carbon source, urea sole nitrogen source; C. neoformans dark brown; others unpigmented). See, Atlas, In Handbook of Microbiological Media (Parks ed.), 1993, CRC Press, Inc., pp. 135, 178, 254, 401-402, 454 and 915, respectively for 7-11.

### 6.2 Isolation of Genomic DNA

[0417] Genomic DNA from C. neoformans can be isolated as described in Nelson et al., (2001) Genetics 157:935-947. The method is a modified version of glass bead yeast DNA extraction procedure of Fujimura and Sakuma (1993) Biotechniques 14:538-540. Briefly, C. neoformans cells are resuspended in 250 μl of lysis buffer (50 mm Tris, pH 7.5, 20 mM EDTA, 1% SDS) with 250 mg of glass beads (425-600 μM, Sigma), and the cells are disrupted by vortexing for 1 min at high speed followed by one min on ice six times. The mixture is incubated at 70° C. for 10 min, briefly vortexed, 100 μl of a 5 M KOAc solution and 75 μl of 5 M NaCl solution are added and the mixture is placed on ice for 20 min. The cooled mixture is then subjected to centrifugation at 15,300×g for 20 min, the supernatant transferred to a fresh tube and extracted with chloroform. The aqueous phase is separated by subjecting the sample to centrifugation at 15,300×g for 10 min. The DNA is separate from the aqueous phase by addition of 100 μl each of solutions of 30% polyethylene glycol and 1.5 M NaCl, and incubated on ice for 10 min. Genomic DNA was purified by subjecting the cooled mixture to high-speed centrifugation at 20,800×g for 10 min.

### 6.3 Promoter Replacement and Conditional Expression of An Essential Gene

[0418] The following example demonstrates that promoter replacement and conditional expression of an C. neoformans essential gene is achievable by homologous recombination using a linear promoter replacement cassette.

[0419] 6.3.1 Preparation of the A Promoter Replacement Cassette

[0420] A gene that encodes a polypeptide product essential for growth of C. neoformans in a selective medium is used as an example. The promoter of the essential gene is replaced with a regulatable, heterologous promoter using a linear promoter replacement cassette. The promoter replacement cassette was designed to integrate into the genome by homologous recombination between regions of nucleotide sequence identity flanking the promoter of the essential gene. Proper integration of the cassette results in deletion of the promoter and introduction of the heterologous promoter, which is functional in C. neoformans. The cassette also contains a gene encoding a selectable marker, the nourseothricin acetyltransferase gene (nat1, McDade and Cox (2001) Med. Mycol. 39:151-154), for selection and easy identification of integrative transformants. The cassette can be assembled using methods well known in the art.

[0421] 6.3.2 Transformation of C. neoformans

[0422] Several methods for transforming C. neoformans known in the art can be used.

[0423] A transformation system using resistance to the antibiotic cycloheximide as a dominant selectable marker has been developed (Varma et al., (2000) Yeast 16:1397-1403). Toffaletti et al., [(1993) J Bacteriol 175(5):1405-11] and Davidson et al., [(2000) Fungal Genet Biol 29:38-48] describe two transformation systems for the disruption of genes by homologous recombination. The first is based on electroporation of all serotypes (A & D experimentally) which results in identifying recombinants/integrants at frequencies of 10⁻³ to 10⁻⁵. The second is a biolistic transformation method that results in identifying recombinants/integrants at frequencies between 2% -50% in serotype A strains and 1% -4% in serotype D strains.

[0424] A modified version of the method described in Davidson et al., (2000) Fungal Genet. Biol. 29:38-48 is described hereinbelow:

[0425] C. neoformans culture is grown overnight at 30° C. with shaking in YPD medium and the cells are pelleted by centrifugation. The cells are resuspended in 10 ml of YPD medium and approximately 200 μl of the cell suspension is spread onto YPD pates supplemented with 400 μg/ml nourseothricin (or hygromycin; and may optionally include bacterial antibiotics, such as ampicillin and/or streptomycin at 100 μg/ml each. The plates are allowed to dry. DNA samples are prepared by combining 600 μg of gold microcarrier beads (0.6 μm, Bio-Rad) with 1-4 μg of plasmid DNA comprising the nat1 selectable marker and promoter replacement cassette or flanking homology for gene disruption, 10 μl of 2.5. M CaCl₂ and 2 μl of 1 M spermidine. The mixture is incubated for 5 minutes at room temperature, subjected to centrifugation, washed with 1.5 mL of 100% ethanol, the beads are resuspended in 12 μl of 100% ethanol and placed onto microcarrier disks (Bio-Rad). The plates are then bombarded with the DNA-bound gold microcarrier beads in a biolistic transformation apparatus (Bio-Rad) at a helium gas pressure of approximately 1350 psi under vacuum in 29 in. of mercury. The plates are then incubated at 30° C. and nourseothricin-resistant transformants are isolated.

### 6.4 Isolation of a Strain Comprising a Heterologous Promoter

[0426] Nourseothricin-resistant transformants are streaked for isolated single colonies and screened for those colonies capable of growth in the selective medium. Oligonucleotide primers based on the targeted gene are used in pairwise combination to amplify a nucleic acid molecule comprising a nucleotide sequence spanning the junction region for each transformant. Proper integration of the cassette produces an amplification product of a certain expected size whereas amplification of the endogenous essential gene results in the production of an amplification of a different size.

### 6.5 Identification of a Drug Target or Target Pathway

[0427] A target pathway is a genetic or biochemical pathway wherein one or more of the components of the pathway (e.g., enzymes, signaling molecules, etc) is a drug target as determined by the methods of the invention.

[0428] 6.5.1 Preparation of Stocks of Conditional-expression C. neoformans Mutant Strains for Assay

[0429] To provide a consistent source of cells to screen, frozen stocks of host conditional-expression C. neoformans mutant strains are prepared using standard microbiological techniques. For example, a single clone of the microorganism can be isolated by streaking out a sample of the original stock onto an agar plate containing nutrients for cell growth and an antibiotic for which the conditional-expression C. neoformans mutant strain contains a gene which confers resistance. After overnight growth an isolated colony is picked from the plate with a sterile needle and transferred to an appropriate liquid growth medium containing the antibiotic to which the conditional-expression C. neoformans mutant strain is resistant. The cells are incubated under appropriate growth conditions to yield a culture in exponential growth. Cells are frozen using standard techniques.

[0430] 6.5.2 Growth of Conditional-expression C. neoformans Mutant Strains for Use in the Assay

[0431] Prior to performing an assay, a stock vial is removed from the freezer, rapidly thawed and a loop of culture is streaked out on an agar plate containing nutrients for cell growth and an antibiotic for which the conditional-expression C. neoformans mutant strain contains a gene which confers resistance. After overnight growth, randomly chosen, isolated colonies are transferred from the plate (sterile inoculum loop) to a sterile tube containing medium containing the antibiotic to which the conditional-expression C. neoformans mutant strain contains a gene which confers resistance. After vigorous mixing to form a homogeneous cell suspension, the optical density of the suspension is measured and if necessary an aliquot of the suspension is diluted into a second tube of medium plus antibiotic. The culture is then incubated until the cells reach an optical density suitable for use in the assay.

[0432] 6.5.3 Selection of Medium to be Used in Assay

[0433] Two-fold dilution series of the inducer or repressor for the regulatable promoter which is linked to the gene required for the fungal proliferation, virulence or pathogenicity of the conditional-expression C. neoformans mutant strain are generated in culture medium containing the appropriate antibiotic for which the conditional-expression C. neoformans mutant strain contains a gene which confers resistance. Several medium are tested side by side and three to four wells are used to evaluate the effects of the inducer or repressor at each concentration in each media. Equal volumes of test media-inducer or repressor and conditional-expression C. neoformans mutant strain cells are added to the wells of a 384 well microtiter plate and mixed. The cells are prepared as described above and diluted in the appropriate medium containing the test antibiotic immediately prior to addition to the microtiter plate wells. For a control, cells are also added to several wells of each medium that do not contain inducer or repressor. Cell growth is monitored continuously by incubation by monitoring the optical density of the wells. The percent inhibition of growth produced by each concentration of inducer or repressor is calculated by comparing the rates of logarithmic growth against that exhibited by cells growing in medium without inducer or repressor. The medium yielding greatest sensitivity to inducer or repressor is selected for use in the assays described below.

[0434] 6.5.4 Measurement of Test Antibiotic Sensitivity in Conditional-expression C. neoformans Mutant Strains in which the Level of the Target Gene Product is Not Rate Limiting

[0435] Two-fold dilution series of antibiotics of known mechanism of action are generated in the culture medium selected for further assay development that has been supplemented with the antibiotic used to maintain the conditional-expression C. neoformans mutant strain. A panel of test antibiotics known to act on different pathways is tested side by side with three to four wells being used to evaluate the effect of a test antibiotic on cell growth at each concentration. Equal volumes of test antibiotic and cells are added to the wells of a 384 well microtiter plate and mixed. Cells are prepared as described above using the medium selected for assay development supplemented with the antibiotic required to maintain the conditional-expression C. neoformans mutant strain and are diluted in identical medium immediately prior to addition to the microtiter plate wells. For a control, cells are also added to several wells that lack antibiotic, but contain the solvent used to dissolve the antibiotics. Cell growth is monitored continuously by incubation in a microtiter plate reader monitoring the optical density of the wells. The percent inhibition of growth produced by each concentration of antibiotic is calculated by comparing the rates of logarithmic growth against that exhibited by cells growing in medium without antibiotic. A plot of percent inhibition against log [antibiotic concentration] allows extrapolation of an IC₅₀ value for each antibiotic.

### 6.5 Measurement of Test Antibiotic Sensitivity in the Conditional-expression C. neoformans Mutant Strains in which the Level of the Target Gene Product is Rate Limiting

[0436] The culture medium selected for use in the assay is supplemented with inducer or repressor at concentrations shown to inhibit cell growth by a desired amount as described above, as well as the antibiotic used to maintain the conditional-expression C. neoformans mutant strain. Two fold dilution series of the panel of test antibiotics used above are generated in each of these media. Several antibiotics are tested side by side in each medium with three to four wells being used to evaluate the effects of an antibiotic on cell growth at each concentration. Equal volumes of test antibiotic and cells are added to the wells of a 384 well microtiter plate and mixed. Cells are prepared as described above using the medium selected for use in the assay supplemented with the antibiotic required to maintain the conditional-expression C. neoformans mutant strain. The cells are diluted 1:100 into two aliquots of identical medium containing concentrations of inducer that have been shown to inhibit cell growth by the desired amount and incubated under appropriate growth conditions. Immediately prior to addition to the microtiter plate wells, the cultures are adjusted to an appropriate optical density by dilution into warm sterile medium supplemented with identical concentrations of the inducer and antibiotic used to maintain the conditional-expression C. neoformans mutant strain. For a control, cells are also added to several wells that contain solvent used to dissolve test antibiotics but which contain no antibiotic. Cell growth is monitored continuously by incubation under suitable growth conditions in a microtiter plate reader monitoring the optical density of the wells. The percent inhibition of growth produced by each concentration of antibiotic is calculated by comparing the rates of logarithmic growth against that exhibited by cells growing in medium without antibiotic. A plot of percent inhibition against log [antibiotic concentration] allows extrapolation of an IC₅₀ value for each antibiotic.

[0437] All references cited herein are incorporated herein by reference in their entirety and for all purposes to the same extent as if each individual publication or patent or patent application was specifically and individually indicated to be incorporated by reference in its entirety for all purposes.

[0438] Many modifications and variations of this invention can be made without departing from its spirit and scope, as will be apparent to those skilled in the art. The specific embodiments described herein are offered by way of example only, and the invention is to be limited only by the terms of the appended claims, along with the full scope of equivalents to which such claims are entitled.

What is claimed is:

1. A purified or isolated nucleic acid molecule comprising a nucleotide sequence encoding a polypeptide, wherein said polypeptide consists essentially of an amino acid sequence of one of SEQ ID NO: 3001-3361.

2. The nucleic acid molecule of claim 1, wherein said nucleotide sequence is one of SEQ ID NO: 2001-2361.

3. A nucleic acid molecule comprising a fragment of one of SEQ ID NO: 1-361 or 1001-1361, said fragment selected from the group consisting of fragments comprising at least 10, at least 20, at least 25, at least 30, at least 50 and at least 100 consecutive nucleotides of one of SEQ ID NO: 1-361 or 1001-1361.

4. A nucleic acid molecule comprising a nucleotide sequence that hybridizes under stringent condition to a second nucleic acid molecule consisting of (a) a nucleotide sequence selected from the group consisting of one of SEQ ID NO: 1-361 or SEQ ID NO: 1001-1361, or (b) a nucleotide sequence that encodes a polypeptide consisting of an amino acid sequence selected from the group consisting of one of SEQ ID NO: 3001-3361;
wherein said stringent condition comprises hybridization to filter-bound DNA in 6×sodium chloride/sodium citrate (SSC) at about 45° C. followed by one or more washes in 0.2×SSC/0.1% SDS at about 50-65° C.

5. A purified or isolated nucleic acid molecule obtained from an organism other than Aspergullus fumigatus, Candida albicans or Saccharomyces cerevisiae comprising a nucleotide sequence having at least 30% identity to a sequence selected from the group consisting of SEQ ID NO: 1-361 or 1001-1361; fragments comprising at least 25 consecutive nucleotides of SEQ ID NO: 1-361 or 1001-1361; the sequences complementary to SEQ ID NO: 1-361 or 1001-1361; and the sequences complementary to fragments comprising at least 25 consecutive nucleotides of SEQ ID NO: 1-361 or 1001-1361, as determined using BLASTN version 2.0 with default parameters.

6. A nucleic acid construct comprising a promoter operably linked to the nucleic acid molecule of claim 1, 2, 3, 4, or 5.

7. The nucleic acid construct of claim 6, which is a vector.

8. A host cell comprising the nucleic acid construct of claim 6.

9. A purified or isolated polypeptide comprising an amino acid sequence selected from the group consisting of one of SEQ ID NO: 3001-3361.

10. A purified or isolated polypeptide obtained from an organism other than Aspergullus fumigatus, Candida albicans or Saccharomyces cerevisiae comprising an amino acid sequence having at least 30% similarity to an amino acid sequence selected from the group consisting of one of SEQ ID NO: 3001-3361, as determined using FASTA version 3.0t78 with the default parameters.

11. A fusion protein comprising a fragment of a first polypeptide fused to a second polypeptide, said fragment consisting of at least 6 consecutive residues of an amino acid sequence selected from one of SEQ ID NO: 3001-3361.

12. A method of producing a polypeptide, said method comprises introducing into a cell, a nucleic acid construct comprising a promoter operably linked to a nucleotide sequence encoding a polypeptide consisting of an amino acid sequence selected from the group consisting of one of SEQ ID NO: 3001-3361; and culturing the cell such that the nucleotide sequence is expressed.

13. A method of producing a polypeptide, said method comprising providing a cell which comprises a heterologous promoter operably linked to a nucleotide sequence encoding a polypeptide consisting of an amino acid sequence selected from the group consisting of one of SEQ ID NO: 3001-3361; and culturing the cell such that the nucleotide sequence is expressed.

14. A method for identifying a compound which modulates the activity of a gene product encoded by (i) a nucleic acid comprising a nucleotide sequence selected from the group consisting of one of SEQ ID NO: 2001-2361 or (ii) a gene corresponding to a nucleotide sequence selected from the group consisting of one of SEQ ID NO: 2001-2361, said method comprising:
(a) contacting said gene product with a compound; and
(b) determining whether said compound modulates the activity of said gene product.

15. The method of claim 14, wherein the activity of the gene product is inhibited.

16. The method of claim 14, wherein said gene product is a polypeptide and said activity is selected from the group consisting of an enzymatic activity, carbon compound catabolism activity, a biosynthetic activity, a transporter activity, a transcriptional activity, a translational activity, a signal transduction activity, a DNA replication activity, and a cell division activity.

17. A method of eliciting an immune response in an animal, comprising introducing into the animal a composition comprising an isolated polypeptide, the amino acid sequence of which comprises at least 6 consecutive residues of one of SEQ ID NO: 3001-3361.

18. An isolated strain of Cryptococcus neoformans wherein the gene (i) comprising a nucleotide sequence selected from the group consisting of one of SEQ ID NO: 1-361, 1001-1361 and 2001-2361 or (ii) corresponding to a nucleotide sequence selected from the group consisting of one of SEQ ID NO: 1-361, 1001-1361 and 2001-2361; is inactive or placed under the control of a heterologous promoter.

19. An isolated strain of Cryptococcus neoformans comprising a nucleic acid molecule comprising a nucleotide sequence selected from one of SEQ ID NO: 1-361, 1001-1361 and 2001-2361, under the control of a heterologous promoter.

20. The strain of claim 18 or 19, wherein said heterologous promoter is regulatable.

21. A method of identifying a compound or binding partner that binds to (i) a polypeptide comprising an amino acid sequence selected from the group consisting of one of SEQ ID NO: 3001-3361, or (ii) a polypeptide encoded by a gene corresponding to a nucleotide sequence selected from one of SEQ ID NO: 2001-2361; or a a fragment thereof said method comprising:
(a) contacting the polypeptide or fragment thereof with a plurality of compounds or a preparation comprising one or more binding partners; and
(b) identifying a compound or binding partner that binds to the polypeptide or fragment thereof.

22. A method for identifying a compound having the ability to inhibit growth or proliferation of Cryptococcus neoformans, said method comprising the steps of:
(a) reducing the level or activity of a gene product encoded by (i) a nucleic acid selected from the group consisting of SEQ ID NO: 2001-2361 or (ii) a gene corresponding to a nucleic acid selected from the group consisting of SEQ ID NO: 2001-2361; in a Cryptococcus neoformans cell relative to a wild type cell, wherein said reduced level is not lethal to said cell;
(b) contacting said cell with a compound; and
(c) determining whether said compound inhibits the growth or proliferation of said cell.

23. The method of claim 22, wherein said step of reducing the level or activity of said gene product comprises transcribing a nucleotide sequence encoding said gene product from a regulatable promoter under conditions in which said gene product is expressed at said reduced level.

24. The method of claim 23, wherein said gene product is a polypeptide comprising a sequence selected from the group consisting of polypeptides encoded by SEQ ID NO: 3001-3361.

25. A method for inhibiting growth or proliferation of Cryptococcus neoformans cells comprising contacting the cells with a compound that (i) reduce the level of or inhibit the activity of a nucleotide sequence selected from the group consisting of SEQ ID NO: 1-361, 1001-1361 and 2001-2361 or (ii) reduce the level of or inhibit the activity of a gene product encoded by (a) a nucleotide sequence selected from the group consisting of SEQ ID NO: 1-361, 1001-1361 and 2001-2361 or (b) a gene corresponding to a nucleic acid selected from the group consisting of SEQ ID NO: 2001-2361.

26. The method of claim 25, wherein said gene product is a polypeptide comprising an amino acid sequence selected from the group consisting of polypeptides encoded by SEQ ID NO: 3001-3361.

27. The method of claim 25, wherein the compound is an antibody, a fragment of an antibody, an antisense nucleic acid molecule, or a ribozyme.

28. A method for manufacturing an antimycotic compound comprising the steps of:
(a) screening a plurality of candidate compounds to identify a compound that reduces the activity or level of a gene product encoded by (i) a nucleotide sequence selected from the group consisting of SEQ ID NO: 1-361, 1001-1361 and 2001-2361 or (ii) a gene corresponding to a nucleic acid selected from the group consisting of SEQ ID NO: 2001-2361; and
(b) manufacturing the compound so identified.

29. The method of claim 28, wherein said gene product is a polypeptide comprising an amino acid sequence selected from the group consisting of polypeptides encoded by SEQ ID NO: 1-361, 1001-1361 and 2001-2361.

30. A method for treating an infection of a subject by Cryptococcus neoformans comprising administering a pharmaceutical composition comprising a therapeutically effective amount of a compound that reduces the activity or level of a gene product encoded by (i) a nucleic acid comprising a sequence selected from the group consisting of SEQ ID NO: 1-361, 1001-1361 and 2001-2361 or (ii) a gene corresponding to a nucleic acid selected from the group consisting of SEQ ID NO: 2001-2361, and a pharmaceutically acceptable carrier, to said subject.

31. The method of claim 30, wherein the compound is an antibody, a fragment of an antibody, an antisense nucleic acid molecule, or a ribozyme.

32. A method for preventing or containing contamination of an object by Cryptococcus neoformans comprising contacting the object with a composition comprising an effective amount of a compound that reduces the activity or level of a gene product encoded by (i) a nucleic acid comprising a sequence selected from the group consisting of SEQ ID NO: 1-361, 1001-1361 and 2001-2361 or (ii) a gene corresponding to a nucleic acid selected from the group consisting of SEQ ID NO: 2001-2361.

33. A pharmaceutical composition comprising a therapeutically effective amount of an agent which reduces the activity or level of a gene product encoded by (i) a nucleic acid selected from the group consisting of SEQ ID NO: 1-361, 1001-1361 and 2001-2361 or (ii) a gene corresponding to a nucleic acid selected from the group consisting of SEQ ID NO: 2001-2361, in a pharmaceutically acceptable carrier.

34. The method of claim 30, wherein said subject is selected from the group consisting of a plant, a vertebrate, a mammal, an avian, and a human.

35. An antibody preparation which binds the polypeptide of claim 9 or 10.

36. The antibody preparation of claim 35 which comprises a monoclonal antibody.

37. A method for evaluating a compound against a target gene product encoded by (i) a nucleotide sequence comprising one of SEQ ID NO: 1-361, 1001-1361 and 2001-2361 or (ii) a gene corresponding to a nucleic acid selected from the group consisting of SEQ ID NO: 2001-2361, said method comprising the steps of:
(a) contacting wild type fungal cells with the compound and generating a first protein expression profile;
(b) determining the protein expression profile of the fungal cells of claim 18 or 19, which have been cultured under conditions wherein the target gene is substantially underexpressed, not expressed or overexpressed and generating a second protein expression profile for the cultured cells; and
(c) comparing the first protein expression profile with the second protein expression profile to identify similarities in the profiles.

38. A collection of Cryptococcus neoformans strains of claim 18 or 19, wherein the cells of each strain further comprises one or more molecular tags each of about 20 nucleotides, wherein the sequences of each tag in a cell is unique to the strain of cells.

39. The collection of claim 38, wherein the molecular tag(s) is disposed within the gene disruption cassette.

40. A nucleic acid molecule array comprising a plurality of nucleic acid molecules, wherein at least one nucleic acid molecule comprises a nucleotide sequence that is hybridizable to a target nucleotide sequence or a complement thereof, said target nucleotide sequence being selected from the group consisting of SEQ ID NO: 1-361, 1001-1361, and 2001-2361.

41. A protein array comprising a plurality of proteins, wherein at least one protein comprises an amino acid sequence or a portion of an amino acid sequence selected from the group consisting of SEQ ID NO:3001 through to SEQ ID NO:3361.

42. A computer or a computer readable medium that comprises at least one nucleotide sequence selected from the group consisting of SEQ ID NO: 1001-1361 and SEQ ID NO: 2001-2361, or at least one amino acid sequence selected from the group consisting of SEQ ID NO: 3001-3361.

43. A method assisted by a computer for identifying a putatively essential gene of a fungus, comprising detecting sequence homology between a fungal nucleotide sequence or fungal amino acid sequence with at least one nucleotide sequence selected from the group consisting of SEQ ID NO: 1001-1361 and SEQ ID NO: 2001-2361, or at least one amino acid sequence selected from the group consisting of SEQ ID NO: 3001-3361.

The application's sequence listing, which the Patent Office published only in electronic form, follows.

SEQUENCE LISTING (3361 sequences)

SEQ ID NO: 1 - DNA, 2450 bp, Cryptococcus neoformans
catggacattgggagatgcgagcagaactaagatgcatattgcatgagttatccatgctatatacaagcaagcagttaccatgatgttagacctactctgaataatgcataagttgcggcataatgcttggcctcagcggcagactcaatcctcaacggttgatgaggaatcaatcgcacttcgtcgaggttgtagatattcttgctggtccgcttcctgagcgtcaccgagccggtgtatgtttgcggatccgatcctctattttgaaactgcagatatttgcggcaacaagcagataatgcatatcagctaatcagtctctaagatttacgtttgagaaacgaccacaatcgatcagggctttttcgaaaagctttttcacacttacactctccaccacaggtttctcccagcccattttttgacatttttcattcaatatcgttacaggcgacttgtacccggccgggaaaagaggtggcggcctaggagtgccgtctttaaaagtcccaaacggtgcattatcgggcgttgaagatttagcatctttttccttatctttgggcgctggctttgaagagttgccggcgtttcctgagcggactacgtttgcaggccgtcgtttgggagccatgcttggtttctgggaagccagaaatcgatagtaatgataaaaatgcacgttaatagaacgaatgcaactcgagaaacagaagaaacaagttccacgccatcatttctctatcaggtgaagtcacccgagaccggtcagaggctgcgaaacgaaaaatacaaaagttaagcaaacacccacatagccaccacgcctttcgatccttcgctctttcctctgggcgtattcgatagcactatattctttcattccacacatatatccacacatccacctcttttcctacccccagacccacagctagctacccataactcctcaactcttgaagtccggcagcaaaaactagcaaactcacgaacaaaatggccaaccttggtgttcccgtcaagctcctccacgagtctttgggtcatattatcactgtcgaattgaaaactggcgaggtgggtagtcatttctttatctgtcgaaatcatatggctcgcccttcttgttgctaacaatagcgtctgtcgttgctgtagatgtaccgaggaaagttgatggagggtacgtcccgttgtcttacctctccagatcacttgacaccgatgctaatctgctcatcttgccctgtgttttgccattctgccgctccagccgaagacactcttaacattgctctccgtgaaataaccgtcaccgcgcgagacggccgtgtatcccaactcgaacaagtgtacatccgtggtagtatgatccgattcataatcgttcccgatttgcttgcccaggcgcctatgtacgtgtcttcatctcaattccgctcctaaagattcccttttagtcttcccattcgctatctccagatagtacaagtagtcgggatgctttttgtgaaaggtctaaggctgattatggccctgcttgacaataggttcaagaggatcggtcctaatgctatgcgaggaagaggtattggtgctgcccgaggacgagctaccatccagcgaggtaagtcatcaaccccttgtcttccctctctatcccatagcagcataagaggaaggatcagagagctaacccacggtgtgtgttttgtatttctcttttttagcaaacgcccgacgtggaacgacaaggacaaaccaaggtgtcaggcgttaagaccgcttgcttttttcggtctgttgggttttggtttagtaggatggatggatgggtgcagtgcgggttttttatttggaggttgccaagaatggatcatgcgtatggtgggatggggatgtgcacggcgtggattggaggcggggcaatttactagacgtctgggctcggggttgaggcggtaagagcaaaaaagagcatgtctggcgtcttccagacggtgtaccatgggcatgaaattaagaatatcgtgttcttactgcctcctcaaattcgtctgtctgctgctttttgacattctgtcggtctaacatcatctcaggatcaataaccaatgtaaagattagatggcatcatctgacactatgatactgcagaaagtatacgcttgcgctgaacgcgtaaacgtaaagccaaaaccccaaaatcaatgattactggctaaccagcgataaagagaaaaaaaatactgttatatattaaattactcatctttaccggaattggttcacttttgcggggtcttatattggcgccccccgggcgcctcacaatctctccatctccttattgataatcatcaacagattcttcgcactctcattatctccactaagcttcaacaactcttgcaaatccgattgcgcctccttccatctccccatt

SEQ ID NO: 2 - DNA, 2314 bp, Cryptococcus neoformans
tcactctccatcccttcagcgcgaaggactttggcgtattgttttttgactttggcacgttgaatcaagtcggtcttgatcttcttagctgcggattcatattcggtgttagccaggatttgagcagagaggatataccgcgtcaagacgcgtaaaatggaatacacacctttaccgaggtaagcatctttgggtgcacgagatggtgcagtcttgaatccctgctttgcacttgcgttcggagccgacctggctctcggcttaggctttggcgccttacctgactctttctgtttctttgtaactctgggcattgttgccaagtactacttgcgttgtctttgaccaactttttctggttgtcattccgagaagcctctcgaaatccttcgttcgccgtcggtggaggccagctttgaaactcaaaataagctgtgggtggcgaacgccacctggaacaatcgccgaaaacgccgccataatcagcgctgacggtctccattcatatcagttgtcattaaagccgtgacttgatttacatatcgaatctctttctcttcttttcccgmtctcactcaccactcatctttctggctttcaaacacattttctcgaacaagcgacctacattacttagttgaatgagcactacaggtgcgtatttgatcgcagatctcgcgcattggaacattttcgccgcttttcaaaatattgtgtttccgcaattgatcagtgggaaaagagcgattatgtgattgtggcgaaacggaaaggcaaaggctgataaattgtcttgaaagttacccagagcaaggtggacgccactaccaagaagacaaaggcccctgcggctacagctggggttgagaacctcggtcctgcttttggtaagaaaacaatctgtttgtaaggacggacctaacgtccttaatagacccgtttgctcccgttaacgacttgaacgacactccctctatcgaaaaggccgtcggctccaaaaatgacaagattcacatccgtgagtcgccacatctctctcacatcttgcagctctagatatcctaaccgctacgcaggtctccaacagcgtaacggtcgaaagacccttaccactgtgcagggtatccccagcaagtacaaccactccaagattctcaaagcgatgaagaaggagtttgcctgcaacggtaccgttgtcaagcccgaagttgactctggcgaggaagactctcctgcccccgtcgccaaaaaccacggtgacgttttgcagctgcaaggtgaccagagggtcgccgccaagcagttcctcattgactcggggatcgtcgctcagaaggaggccaaggaccttatcgttgtgtgagtatactctgcgatacgaattgatttgttgaacgagttgctgattttttatgcgtcttagccacggttactaagccagagccttttagggacgaagcaacttgaatcccctgcaagtgggaattttcaatatttgtatctatccaatgctcgttgcctgtgtcttatgaattgatcgtcagataagcgctgcgagagggttatatgtagtatgagttgatggtgatgacatgtcctaatagtactgttacacacaacataaataaatgttcggcctaacttaaaatctcgtcttccaatgcctgcatctttcctaaagttagcacctatactaggggctgccacagaggacgtaccttgtagtgcagcaaccctrcatgctcgccaagttcttcgcctttccgccatcataatctgcgcagaaagaaatccatcagactgaatctccagacacactttgattgaattctgcaaagctctcgagagatgcgcgaaatgcgcagaatgatagctattctcctttctcatcagaaacaagcaaacacattacaatgagaagatctagaaccgacctgaaagaaatcccctcgtctacacagataaacctctgcatcacctctttatcattcggataatccaactcgacactcccaaaatctccttcagcttgtatactgaactgtcccatttcatcgatccgtcttcctgtccgtatggtagaggttgttacatcggcgttcatctcgcgctcgggggaatcattaccaccatcaccatcatgacctcttccatgagcgcggggtgggatggcgctgagtgttatgcgggatgatgaaggtgggaggtcaaggagggcgtcgcgcaaccagtcggaacgcatgatgacgtatagcgcactattgggttggccaggcatgacgattaattttgagatgaaattcaataaaggaag

SEQ ID NO: 3 - DNA, 2189 bp, Cryptococcus neoformans
acaggagtggaggatgtttgtgatgcagtctattttcgaaatgagcttggtcaagaaggcaactgaaagggctagccataaaaatatgcttacggtacgagctgctttagttaaacccatcacgaaaggactaagtaatgattgcaacattgggataaccgctgttgatggtctaactgctacacaccggaaccgcttcccttcttcatccatttgcagagggatgggatcggatgagtgggcagcagtagatgtttcagtagccctgttaacatgctctgattcaccgccagtagctgttgaagagcgatcatcgaggaacaggtatgctgtatcgtctttgatgatgggagcatttgttttggcctcccctggttgtgctggaggcattaggttagatattatggtgaggtagcgcgaaacttgattattattatcttgattgttatcgtcggtggttggcgaaagagggaattgagcgcgatatgtgcgaacttgaagacctagccgagaaggaggattatgcttagtgatagatgtcagtgaaagtcattagcgttttgaactaggcggttgacttactccgtagctctcaagcacacgagcgcatacgacatccgccaaagaaaccgcccggccagcggggggagtgcaggaccattggaggagactgttatatgccatttagcgtgattatatcacctgctgaagtaagtcaacccaactcacagagtaaatcccatgctttccgtaactatacatgcatagtgggaatacaaatgcttatgatatcgatgcccgtcattacctagtgacagtagtgaaaaagggcggaggcacaagctgtctcatcttccacgtcatggtttcatgattgttgttgtgatgctgtttggcccgtttgtagacagaagggtttcctaggttcattattcatcgattgtgagcgaactgccgagtatcatcactatcccacaaacaatccaacatccacagtcccatgaaggtggaaataaattcctatcgcgcggtagcctactggatttgggacgtttccgacgaacctcacaagctttaccactacgcgccgccggacgaagttggcctcgacgatgacgacgatcaggacgtctgcggtatatgccaagcggccttcgagagcacttgccccgattgcaaaatacccggcgatgactgtcccttgagtaagcgtagtgtatgtgtggagcaaaagcatgatgctgatttgttctgtttagtttggggggaatgcacccacgtttttcacatgcactgcttgttgaaatggatcggtcagaaggaagatgaatcacagcaacaatgccccatggacagaagaccttggggtaagtcttctattaaaagtctgtgctcttaactaacaattgagtcagtgacggccgataggaagcctgataaacaaccggcggcgagtcctggccaagtggtccaatatgaccacttagagcacggtcatgcaagccagctggatgaaagattaacgggcgcaaggggggccaccactagaggagcgcatgctcaggtagagagcagcatggaggttgacgagcaatagcattattcaaagagggccccccagaaaaggttattgtacttggcacgagtgaagttattatccttgctgtccatatagctctgtcccttgttgtatagatgtacttgtactcgaagtatagccatatctgcttccctctcattattctcatcatagccaacagtgattgatatatgagctgtgtgcggctcgaggaacgctcgtaactgaaactgtagccaatgtccgaattgctgttttcatggatcgaactgtccggacacggcctctacgctgctcggccttgcgctgcacacacgcagcatcgctatgtatatatacgtataaatacctcctttgctacttccacacgtatgttctcaagcaatcctggactcaccgagaaagagcaacaagtacaccaccaggcaggataaaaggcgctcaaaaccatacccagaactacaggtcgcaacgcacgaaccacctatcttatggaccaagagatgactacagtggcatctccagacattagggtgaaagcgacaagcccagactcaaatcgagctgtacttgaacaatcaatagtcctgtcagattcaggcaggttaga

SEQ ID NO: 4 - DNA, 2359 bp, Cryptococcus neoformans
tagagagcaagggtaagacgccaacagcagtttctcagagcgatgcgaacaattcaactggccagcaagaggaaatagaagtgcagcttcctgagcgggccgtaaatgaccagaagaaagaattataagacgcggaagtattggtgaggatattaattcaagatgcagtgttattatctcgaaatacgtctttgtccttatgtctccacagtgctggtgtcattcgctttctgggggagcgatgagcaggcctacacgcaggcagatttccttttctttcttctcagaaaccagatactttcttatgcaagttgtgctctgtacttacattattacacgttataccaccgacactactactatgtattggctgatggaaactgaagagtgtacggcaccgacaacggacacattcgctgatgtttttgccttgtcacatacataactaagtaattccgaattgcattgataaaacgttgcatgtaaaatttgcctgcgttgatgtctcatttgtgaacgtttcatttgtgatcaatcatataatagtacaagtgcgtacgcagtagtggtgcgtgatggtaatacaataacggtgtcatcgcagtcccagtgcctcctcgttgtcaccatctttcatagacgaccaacgcaatcgtcttcaatcatcgtcgtcaacaaccaccacacaccgtgacaaacgtgataaatgatgatgatgatgtgtggcggctgctggtggcggaacaccccgactgtcatacaacaactcgtactactgcctgcagtatatgttaattatactcttcttcttatactacgagtactatttacgtcgccacacctctcgctcgctaacgtggttcaatctcgtttttactctttctatcatcatcgccaattagctaaaacagtgtcagtgcaataatgtgagtacagagctttctaaaactgtcttgtctgttgaacgcatagaacatccggaatccaaaaaaaaactgatatgctttcatttttcagcatcatgcctccagcacccacagttcaacaaattcagagcctctattcagccactgtcaatgcgtcccagcgcttcacttcttataactttcataaatactttcttcgaagagccgacgaagtattcaaacccgtccttgcctcattagctccacccgctggttcggcaccttcagatcctatagacccttccagacttgctcagttttacgaacagcaaaagactcaacttgagatacttgagagggcttcagaagttaacaggatgtatgaaggaccgaagttggtagtggaacatgctcagcctataacaagtggcggaggggctggtatggaagctagtgccggtggtggcggtcaacctgaatgagtgtgagctatttgtctgacagctgccaaattattaaagtgtttagaggatcactgatacacataatcaggtctcaccaatagtgttcttgtgtcataaggttgtgatcgatttaggatatcgtcctccagtatgataaagtacctgttcaagtacagttgccccatttaacaaagaccctaccatggatcctttgtatgcgacttttcctcgtattacaattatgtgtttcgaccctatgtaaagtgaacgtgcgcttcctttcattagtcccggttagtatcttctggtcacataatagcttcatgtctacacaagtcggttgcatcctgtcctactgattgccatcgacaccccacggctttaccaatatgatctaagatgtctcctatcatgcgtttatttggcaaggcgcagaaagaccaagaacgtgatagggcatggactgcacttgccgatgaagaggtaggcgctaagcggaaaggctcgaaagaaaagagcaatcatcaatctgcgggagcgcaagcaagctatagctcttctaagttgcaacttaaaccggatgacgccaacgatctcgacactcaaccgttcgtggccaccatcccagaattctccaagggaaaacttttactctggcgattaagcattattttgcccttcctcacggccgggtgccttctgtacttgttgacatgctcgacatcgtcttggagagcaaattggagctccatcaagattgaattgccaagtactgaatttgaaagcctctatgctagtggctcaacgatcactagggagtcttcaaatagtacgccttctcgcagggattatgcgaacaaaggtaagcaccaaataaaatgtgatgatcgtatacagtacttaatacgacaatgtcaagtatcagccaaaccaatccataacaagcgagtaaacaacaccgatgatgcattaggcggacatctttcctta

SEQ ID NO: 5 - DNA, 2447 bp, Cryptococcus neoformans
gccgtctttcaacgtccatcattctcaaatacagtatggtactcgcaaaccaaaaaccggtctggcacgcccattagatcctttgagcattgagctgtgaaaagccgtttaatttaggtttttctcctctcgccttcgctgatcgtcggtcattgcgtactacagcggtattatactatgcacgcaagcaacaagctgcaggttgcacaacgcatatagccatattttgaactcctttttatccttattcctcattcctattattacctctcaagggttctcgagcttctttcaactctcaacgagttcaaccactagttttattatggctgcctagtgctggacgactaatttattgattacagttacggaaatatgaatacaaaactgctactgtacctgcctcactgctgctgtacagacagtactcgtagatttgtgtgtcttctgttgcctgctgcttcatgtattattatatcgacatcgtcgttttcgtctaaaagtggaagtggccgcttgtggcttgttgtgccacacattccccggctcagaaatgccgagtgacgtgtttctgcggattctgcccactactcaccatcatcagtcatcaaaccaagccaccgccggccgatggcgccacttactcgaagagatccggaccacttacttccacgccacatcgcaacagtcgcagcaacttccaagagtgcaagaaagaaacagcttaatcatcagcttagtctatcatcttccaacattgatttctgactcaacgacgtagcatactcgtaagttctttccgaattatttatcatcaattatctgctggaatcggcatgactcagcgatggcaatggggagctcgttgtataaaaacgagaaccaacgacccaaaagcccattttgtcaaatatctttgctttcgctgtagttagttttggataatcaactaaacagttatttaatagtgtcaccaacccgcattacacaaaacattaaaatggtcaaggctattgaagtcttacgacgagtggaagactctcgtaagctccatcccttagaattgtggtcgctatccgctaacccgtctcacacacagacttctggctccgatgtcgtcgtcgtcgactactgggcgacttggtgcggtccttgcaagatgatctctccccactttgccaagcttgagggcaagtttcccaatgtcaagtttgccaaggtcgatgttgaggagcaagaggttcgttacctcccgctgtgcagttggatggaatactcaccccttgcctttctgcaggacattgccaaggaggctcaaatcaaggccatgcctacttttgtcgcctacaaagacggcaaggtgattgagactgttactggtgctgtccccgcaaagatcaatgtgggtctatactcgttttttttgcgatgtcttaggtttggctgactgttccgtccaggctttgctcgacaaggtcgcggcttaattacatagattggtcgtgcatgccagaagttgaatgtataaaatggtcaattctcgccaggtgtcttaagtatcgcatggtttttggaatcatctagtggaaatatagaaccgtcgagttccaaagctacatttcagagctctgctgtatcatcgcaccgagtgttcgtggggcggtaggattgcaagtaattggctctgtcttttagcagcttggacaacgtctccaatccatcgtcaacgccatccggaggcagctcgtcgttgtgctcatgcgcatgcgcaaagtctattaaagcacatctgacttctgtcttccccgtaaactcggacactccatgcgcgatgagcagcgaacttcctggatagctccatcctgattctttcatagctgttcttatatcggtaacgctttcaatggtctttaaggtcctacttaacatgtctgccatgtaatccgacgacgtttttctttgcagcctactgctcgggtcagtccgtaaagtcagatgtggttttttagaaaaaagatgccaatcggtaacgcttgggaagacacatgccatagaatcgctcaaattgtcatctcgaaggctatagccgtagcttttggtagtcgaaacgcaggtttctttaccagggacccatgtctgcggatgggaatgtgatccaattgataagcctgatcaagtctgatcttatacaacttacatgtgcccctgcaaacataatacctgttgtaccacttgtcgtggccgcgcatgacttatcatgcctaagacgcttggcccgtcctgatcgacttccccaccatcgtttccctagtttgaaatcggctacgatagggctcagcaacccgtataataagtttgaaagtacgattgactgcgtatggcaatgagcttcgaagtcgcaatttttgaaataacatcacgatcgacgtacctgagtgtgcttcttt

SEQ ID NO: 6 - DNA, 2491 bp, Cryptococcus neoformans
acctcgtgctcagcgagcaactgtcaaaccaaattaatcagtcctttttcttttttccctcttggcttttgcttcatagaccaaattccaaaatctgacttaccatattggggataccgttagccacagggtaggcatggccacaccctcgacatgtcatgattccttcctccacatgcaactgttttcacatcattcagttgttcgttgtctcgcggcccaaattaaagctggaccgatgaaattattgcaagacatacctcgaaaaggacatggtgtaaagcttgtatttcctcatctgtccagttttcaggcatggtatcggggagactagtatcaccgagctgtaatgatagtcaagtcaatactcttgaccattcgggggcgaaaatgcgactaccacccccggctcatactcacagaccgagccgtatccaccaaagccttccaatcgagtttgggcaagaatcgcttgatgaaatccggattgataggtgccggtcgttcaacgagctctacctctgagaagacgaggggaaagttgtcctttgtgcagttctctggaaaaaagagagagagagagatcagttgtgtaaagctcaggatgatgagcggatggaatgaaagagtgtaacttactgacgtggcaagcaagcatgttatgggtgattaatctgaccatgttggcggatgagttggttgaatatggtagcgtctcgagtttctgcaatatcccaatgtctcatcattccatatcccccggcgctcgctgggtcgtcgccagaaaaacaaaaacagttgttaacttgaagttacgtaataatacttatccttttgcaaataataatccacgtcacccaaattccgccaaattctccctctcgcatgcgatttgaatcctcgcagctgtcttcctctttccttttcagctcatccagacagtcaccgctagcacctacactgccaagtcgctgtcatcaaaaccaatctacaatcaaaaatggccgagtacaaggaagacctcgaaaagactggcgccggtgcccagaagatccacaagatcaggatcaccttgacctccaagaacgtcaagcctcttgagaagtgttagtttgtggttggacggtcgtggatctgaaaaacgggggagaaaggctgatgaaaatctctgtagtctgtgccgacctcatcaaccgtgccaaggaccgagacctcaacgtcaggggccccgtccgactccccaccaaggtcctcaagcacaccaccaggaagtcgtacgtgataattcttaatgcttcctgccggcagggctaataaacgacttttgttttgcacagtccctgtggtgagggttccaagacctgggacaggtaccagatgcgaatccacaagcgtctcatcgacctcaactcttctgccgacgttgtcaagcagatcacctccatctccctcgagcccggagttgaggttgaggttaccattgctgcttaaatgtagtttggtctaggatgcaaccttgccggtcaaatacctagttccgtgaattgaattattcttgttttgaagactgttgcatttaaaaataaaacttttatcaaagcatcactacgtaaattcccactctttattcttttcgcgcggccaaccacttgtcaattctgtctgcctctctgaaaccactaataaccgcgccggcgacactaccccggttatccatctcggtatgttcacccgcaaagccgagcttgcctccccaaacaggtcgagaaagctccttaaagtccatgggactgcgctcacccgtactgatgatagaaggcgtcgtcgtcgcacctcgagaaagagggtcagtaagccatgtggtaagggcagaagcggaaggagcaggaggacgagaagaaggggagaagcgcttgacgaggaaggagtggaatgcctcggcgactttttcagtagggtgctgcaaaaggatcttggcaggggtttcagacaagtatgtcaggagcgtaggggtaggaccgggaagagtgggtgcggcaaagttggcagtgatcaaggtagacccttcaaagacttgttccaaggtagatgaggcgctgggctcaggtccggtagggaggaaagtatatgaaccaactttttcggcgtttggccaccaggcggtaggatattggacaagaagtttctcgagaacaccgacatgggtaccgccaatagtctcacgcaagtgagcaggcaaagcgggggtgaagaagttttcggggagagacttgagcacacccagggggatggtggaaagtacgctggcagcagagtaagtttcaccggactgagtggtcacttcgacgcccgaagaggtctccttgatcgaaacagcgggagagttgagtttgacttcagcctttgaagactcaagcaccttggttacaagagactggtagccaccgtcgggggcggcatccgatccggcataggatgtggtggtctccca

SEQ ID NO: 7 - DNA, 2463 bp, Cryptococcus neoformans
acacgctgagatcaagagatatgttccgtcgtcaagcctgctcgcacatcagtatcgtattattacacttaactcgatcaccgaccacgcacacgtttgagaattggagatgtgttacaggcctagtgtggccagagcacaacaatggctggaccttgatagtttcatttgattgagaagaagggaccgaaccaagacgaggctgaccggaaagctgcacttgctgagacggagcgtattgcccaatcacaggattagggttaagagacggcggaagagtcgagtagccgttgctgtatccctgcatggttgatattgcagtgaatattgtagattagattttgagtgatgtggtataatgatttggttcgcaagtataagagaggtctatgggacgtaaaaggagacgcaattacaccgtcaaggttgcgcgtggagtatcgtttcgatcggatcggtatgttctagattgtcgttcagtcgttattgatcgagtggcaatgtggtagagcactaatggtatgataaatatgtgttgtgcagttatgaatgacagctgaagtgattagaggtgcagtgtgggatccggagtgcgcagcgggatgatcgaaatgccgaaaggtggagcggaaggcggatgtgagcggagagccggggtgagggcggtgaagacgaggtttttgggggaaggagaggataagacttggagaagttgagatgtacaaggtacgggggataaacaatgagtcaacaatacaagtggagatagacacgaaggggcgtgacgcgtacaccgccactcgactgtaatgccgaaatcgccggaacactcttatgttctctgtctttcgcactccatacaaatgtacaccataaacaacaaacaaatctttcgggattctatatactcccctaaaactactacagacccagtactcatccgactccgtcttacagaatgaagctcgtcaggtaagtagatgcccatttttcatcgagcatgccttcaaaaggactaattcgtacccgctgtaggtttttgatgaagctcaataacgagacggtcacgatcgagctcaagaacgggactgtcattcacggtaccatcacttgtacgtggatggcttttgtgtccaaaaaagtgctcatgctaaacgtgaaatttagccgtggaccctcaaatgaacacccaccttaagtccgttaagctcactctccgttctcaaccttcatcccaaccacctttgtccctcgactctatagccatccgaggaaataatatccgatacttcatcctccccgactctcttcctcttgatactttgttggttgacgacgcgcctaagcctaagaagaagaaggaaggagctgctgctaggggagctagaggagcagctaggggagcaaggggagccaggggcggtggccgaggcgcgcctagagctagaggaagaggtttctagggtgttgaagggcgaatggaaaagtgaaaggagcgttgttattcatacattcggcattactatgcaggtgactgcaagtttgctcgttgtctgttgggtcagtttgcaaccgcaagatacgcttattgtattgtaggatcatcaagcatccattcagaaccaattagaacacgaaacttctattgcgtcaaacaacgatttcagcttctcattcagactcgtccctccgcgtatggattaacaacatccgagctaccgtacaggcacaaacatttcgcgcgaaaacctagctatggatgacaacggaataaaagagacccatattacaaactattgaaccttttactacctaagcatgagggaaatatgagctataggcgttcaacgccggttgtccaccgaggtggatatacaacacgtttgatccttccttaatggcaccttccttcacaagtcggatcattcccgccatggacttgccttcgtatacagggtcggtgatgaacgcatcggtttgggcagccactactaagtagtcagctgacgatttttgacaagaacgaaggccgattcacacttcatggcggcgatggtctcatcgtcaggaataccatagataccagcgtggaacctgtcgtccaagatgacgtcctcctccttaatctccaaacgctcatccaacaaggccgcagtattccttgcaatcttcaagacctggtttcttgtcgcttcgggcttaccactcgcgtcaataccgataatcttgcgcttccttccttctgcaacggcaccgacgacggtaccggcgtgagaagaaccagtgacggagcagacgatgacgacgtcgaagaagacgccgagttctttttcttgcttggcgagctcaacgacccagtttgtgaaacccaatccaccgagtgggtggtcagaagcgccagcagggatgtagctagttcctgtcaatccagtaattgtcactaggggtagataaaggcgtact

SEQ ID NO: 8 - DNA, 2546 bp, Cryptococcus neoformans
tgattgattcgggggtaagaggagacatgatggtaggcagataaaacgacagttcaaacagagacggaaggatagtgtcaagctactaagaagaatgtttatcaaatacgcaaagacgagtatctttccttctttcgatcccttcattggtacttatacacagcagtccaactcacacgaacaatccgaagtatgaaggcgtatcactgcttcagctccatcagcacgtctctcttttttctcttcggtaatccttattgttagctaggataaacaataaaactttcatgcactgcacagaccgcatgtattaactctacctgtggtgccaacggtcccaatggttcattgccgattattaccccgaagaacagacagcttgatttgtttcgaatgacgcgtttgggttggatcctcgttgttcttttattagatgggttgttaatttaggagagtttgttgaaaaaaaaaaggaaaaagatgattgcgtgtgggagtatcacgggtccaaggaatcattgtcttttcagtcgacatggccggtgaggaagtaggacagtcgcatgagaaacaataaactcagctgcgcaatctgtcagcaatcaacgattgtatcagtacatcgaaatggcttgatatctgagagtaatgggcgacgcgactagaggctttgaagacaaaaagtatctgttgtctgaacgagcaaatgaacaaaaacagcgacattgattccgtccgaaagacaaaaggcaaatgtatcacacttcggctctcgataaaaccggaacgaacaaggggcaattaatcagggtaatcaggtaccatcggcggcaagaaccgccttaaccttcggtgaacggggacgagacttatgtaggatacaaagtaaatttctgaaattactctcggtgccttcgagattttgattcttcgatccttaagtccgccatattcaaagcaataccgatacgacggcccgaagccccaaaaatccatcagaatgtcccaacccatctccaagcttgacaatccaagtactctccttcaatctgtctcctcaaatgccgttcacgaaaagatcactatagtgcgtcttgtggccaattgttggcgataccaggcattatactgactaagacatcgttagttaccaggacatgaacccgattactcagcttgtacttttgctctctggcaagaagatcatactcttggaaatgctttgcgatggattatcatgaaggagtatgtgtggccttacaaataccatcagatgtaaaattgacccgctgcagccccgaggtggagttttgtggctacacagctcctcacccgtcagaacccaagattcatctgcgaattcaaatgtacggtgagtaaggagtttgctctatcctgttaaactgcgctaactaagcttatagagaaccaatccgccgtggactgcttacggagagctctctccaacttgcgtgatcttctcaatgctgtgaacgattcttatacttccagtttacagtatgtttgcttatttcatgtcgtataatttcttggtgctgatttgcgtcttagaaatgacgattacgtgcgggaggatgactacgacgtaaaagcggctgtcgacgagacattgaaagaaagaggattcgctgttgaggaggatgataggatggatgtttcatgataggtgatataacgatttctgttggactatagagatgtaatgtacaaattcactttttgatccaattaagaaagcaagttaaggtactttactgctgacgattcttagaaacaatacagcgtcgattatcagttgattttgaaggagtatgtccgttgtttgataacgacaatccgctagaagtgtgagtagagagtaaaaagtcattaaatgaactgattgcaatgcacgcagaagctattaatgggcatcatggacatatccatttgtttgttacatattaataactcttacatacatatttaacaacgtcactcttgtgctttattcaaaatcctccatggctgcctcggcctcttcttccgaaatcttactaacagatttaccggctgacttaaaatctacaacataatcagcttcgtctgggtcatgcatgacttacagtcccagaaatcaggatgcttgaaacctctagccttaacagtttgctcaagagaatcaatgcagctattacaccctcagctcgtttttcgccacattttcgcgtcacccacttattatacgtttccacttcctcgtacccaagcgcggtagacctcatcaactttaagcaatcgattgctccagcaaagttttgccttgagaaactgctctccacattttcctttaccacttcattcatatcctgaatggccttgcgaaaaacatctccgacctgaatcacgcggttgaaatcgtcaatcggactaccattactgataagtctgcccggctttggcttgctttggtcttgaataggagctgcggttgtgggctgggacgacgtttgagtctgaagttcggtcttggtagtgggttttgt

SEQ ID NO: 9 - DNA, 789 bp, Cryptococcus neoformans
aaccaacgcatatccaccgagacacgctaccccacagctgtgaatcgacgacactcgaacaaggaaaaaaatcaatttcaaaaaccgacttttgaccagaaacatcccccgggccttttttatctaacaatacatcatgtctgctgctgatcacggacgagacccctggtacgtccccccaccccccaaaccccacgggaggaaatccgcgaataacttgccgggagctaacatcggtgacagcccgtatgtcatcttgaacgatttcggcggtgcgttctcgatgggtgcgattggcggtggtatctggcacggtatcaagggtgcgagaaatagccccagagtatgttttttccattttgaaacaacgccgtcgagaaacgtttttctgaccatggtttcgcctttatcccaactattcgccgttatcccaactgatgatcacttgatcactcgcctaccttacacccacagggcgagcgtctcgtcggatccctctctgctatcaaagcccgtgcgcccgtgctcggtggtaactttggcgtttggggtggtcttttctcaacttttgactgtgcggtcaaggggtataggcaaaaggaggatccatggaacgccatcatctctggtttcttgacaggtggcagtttggcacttaggtgtgagtcttttttttccgtgtgctgccttgagacgagtggggatgtttgggataggggataggatcggacgatcggttggtgaagatttatgctgacagcatgtagccggtccaagtctgcgttcgga

SEQ ID NO: 10 - DNA, 2539 bp, Cryptococcus neoformans
actcacacaaagaatcccgctacactcccaaacccaaacatcrtccctgcccatgcactcccttcctcttgctctctcggcggaagcgtgtcaaccaccaaggccctgtccgtactcataaccgcattaatactgaaatctatacaataaattgcccaaactgcgagggttatggccagccactggcccccaccaaagatagctgcgacctcgcgagaccagccgagaagcatcatggcggagacgcatatcaggcagccggcgagcatgaaaggtcgccttctaccaagaggagagcgggagcggtcggcgaagatgccgactagtggttgcacaatgagcccggacagaggaccggccatgaagacgagagacatgaatgatttggagaggcctaattcgaggagatagggagaggcatagcccatttctattgaccacacgcactacagcatgttataaaatgttctcaaactggttacagggcgaaactcacctgtatacccagcatgccgactgtcaacagcggtaatcttgcccatttcggtcccttgacaccagctgtcccaatccactgaactgcatgggcttcgccaaccggccccatatcatactcctcgtcattgtcggccgcgggggcaaagaatgctcctcctgtcattgcgagatgtgaaaagtagtcaataaaggagcgatctcgagcatttcccatctgcacgctgctcggaaactcgatctctactggtcaccgcgccagacggtgaccgatccaattacgtaacaactccactcgacattaaatttacttatttgaacggccccgcaagtctttcgttttcaaggctccgacaaaatctgacaacccacaagacttttacatctcaaccggctttctcgcttttacatttttactccttcccaaggcctaggatcttcgtgtgaggtcatcatcctaccatccctaccacacaacaaggaataaaacacaaatctggacgcgatgtctgctcaacccaaccccaaggctttccctttggccaatgcccagctcaccaaccaggtatgtctttacaagtcgccatcataaagagataggctggcggatgggttatcaattaaactatattgagaatgtcttggatgggggctgattaggatttttagatcctcgacttgatccagcaggctcagcactacaagcagctcaagaaggggtaagcatattcatttcttctccatccttatcacatttccccttttactgactcttctcgcaattctccttagtgccaacgaagccaccaagacccttaaccgaggtatctgcgagttcattgtcatgaccgccgatgtcgagcctattgagatcgtcctccaccttcccctcctctgtgaggacaagaacgtcccctatgtctttttgccttccaagactgctctcggtagggcttgcggtgtttctaggcctgttatcgccgccagtgttaccaccaatgaggctagggagttgaacgcccagatccaggctgtcaaggttagtcgtcatttctctttcttcattgttgtttttggtaaagacctgaagtgatggggaactcttgctgatggttgctttcacagaacgagattgagaagctcctcatctaagttttggacatagctcaaatgatgatgtttggtttaaatggaaaaccccaaagttttggcagaatgatttgagactttagctagtcttgatgcattttttcatcgcaccttttgttaatgttttattctcaagcgtttcgcgagcccatgcagtatgggttgtgttatcaatataatattctgacccgagatcaatcagaggttgagaaaaacgacaagtcaatttaatcgtcacccctgtcggctatctagaacaaatgagcttcattagattaaagaacccttttatgatttaaagatacgaggaagcaatgtgatatgcgaattatagattcaatatgacccaatccatgacatgaacatgcagcatgcaagactaatcctatagacaaccctgaaaacaacttcacccacttccaaccaaagtcataatactacacacaatccaatccgatccaaggagagccttttactgagttttcttttcccttcctcccgcgccttcaatgccgaaaccgatgcgattattttctcttcccacttctcgacgtgaccttttaggcatacttttccataaattccttgttgaacttttggaatcgaccgataaattcagcagtatcgggacacagggcagtcactcgcaaatggaacgtccccggttcttggccaaaaccgctgcctgccaccgcacagataccggtcgcatctagattatcattctcatcagcatcaaccaagtaaggcagaaaaaaaaaagagttggaagtagaaggaagggaaggaagggagactcaccaagaagatccaaagcatacatcacatccggttccttacccaacttcttcgccgcctctacagctttgggagggatattaatcctcgggaacaa

SEQ ID NO: 11 - DNA, 2443 bp, Cryptococcus neoformans
ggtacttgtaattggtcatgatttgtggggccttggagattagagagaggggaagggtagcagcttgaaggatcgagactgtaaatgaagaagtgtaagcttttggttggaagtatttgagcaaagggatacctacgaagactcaaaggacagagtgtttcagaccaaagaaagaagcctgtagcagcagtgataacagcaccagtcaagacctttctgccattggtatttctcttggaagagagaggtctggctccaatgactgctcctttttgaggtgcaagatggatgataagaagggtgataataacgttctggatggcaagaaagaaggtttcgccatatgtggagaatgggaatgcgtttcgggagttgtaagcgaggttgatagcgtaggcgactgtctcgagagccttgggtcgtgtcatgtcaacaggagcagaatgcaattgattactttgtgataacgtacataagcagagagtgaaagtccccttgcagactgaccagatacgattttggttatctataaggtgcaacagcatgagtggaaaggtataaacatgtattacaggagctgacctgagggatcttgacgatactgccaccaacgacgattccgaaacccaagcctttagacaaagcgtacttgagacattcgctgtctgtgatgttgaaatcgtacacgagcgttccgtagcattcttcacctataagggcttcggcgggagctcgcaaaaagtatgggatgttgtgggtgattgttgtgaccaaggagttggctgacatcggagcggatttctagataaacatacttcctggacgcaccataacatccgcaccgattcccatccggaccacaccgcgggatcaaatcgcccatttattctctccgccacataacacccgaatatttccatcctcatctcgaatccgtcttttctccatccacactactactcgttccgcaaacacattcaacaggtctcataatcacacaatggttgtcgttgttgaagaagtccgtgacgaagccgccgaggaagtcgtcctccaggaaggcgagaacgaatccgatttcgagaccgactctgaagtttcctccactatttcagacgatgacgactttaaccccgccgacgaatctttctacgaccggctcaccgctctcaaagacattgtccctccccagacccgctcaggcctctacaacaagtacaagtcaacaactggttgggcttggtggggtattcagagcgccggctctcttgcctggttggtgagcaccagcgcccttttggttggtttgcctttggctcttgccattgaggacgaagccagggttgtcgctcaggagaaggagatgcagatgcagagtgccggtcagcagcaggtgagtttggcttttttggaacgtgtcataggttaaggcgctattgctgatcatcctctcttctttctgtctctctctaacccttgattcaatccgctcttgatttccatttttatccttgctcaaaacattgcttccgacaacacagatgctcggcgcccctcagggtcaacaaccccagggcgtccttccccccgggttctagacatctcgaaagaatgtagtggcggtgataagaatgaagaaggaacgaacaaaacgaaacagaaggaagagaagaagtctggaaaacgactttgtgcggttgctggcggagcctcgatgaaatcagatagatggaggggaattttgttggatgaaccagaggatgtaatcagggcaagaggtccagtgtatagtacagctttactacgcctatgatctggatgagcggcatgtattcttcacccctctcgatttcgcatttccaaccgtttcgaatgccgataagtctttcaaatagaaataagatcgataccatgacatgcaacaaaacgatgcttaaatatctatgacaacccaaaaaaaatctccgacactgcaactctcttcggatcaaaccctctctatactgtcgcaggtatcgcaccatttaacgataaacccgccatctcagcctcagccgctttcagaccgcccttcactaaaccatcgaaccatagcgcaatcttgatggacctcgctcgagcatccaacccaagctccactaaacccagtgtggtattccaatacgcgtaatcgaagaatgagctgataaagcttttgaacaagttcagagaaaagccctgggtagagagggatttgcggaagttggcatagtcggcttgccagactgtttgtgtcgaaatgtcagcaaaaattaaatcccgggtcgtaaagaaagccagcgacgtaccagccttggcacagtagcgagcaacaataacaaagactcggctttgtccatgggtggtaacaagactctggtccagtgaccgttgcaagtctgacaatttgagaatcatcaacata

SEQ ID NO: 12 - DNA, 1532 bp, Cryptococcus neoformans
gtccgtgcggccccgagcgaatatccgtgagtgagtttctgtgttttctccgggcgtcgatatttcgcagatattctcagataattctcagataacttgcagatattcgcagataccttgattctctcgcccccccgccatggacgtctcccacgtgctcgacgagtacaccgccagcaagtaagtcgtgccagctccccccgtgtcatcccccgctgacagccgcagcaccaccgccgtcctcccccgcgccgcacccgtccacaccgaccccgccctgctcgccgcctttgacgcctcccccctcgaccccgcagcgtacgccgaccgcgagcgccacctgctccagctcaccctcacctccacccacgccctcgtcgccgccctcttcgccctccccaccaccccctcctccgccggccccgtcaccgccttccccccgcccaccaccctcctccccagggagaagcccctgcccacgccaaaggcccccaccaagtgggagcgcttcgccaaggaaaagggcataagccacaggaagaaggagaaggacgtgtgggacgaggagcgccaggagtgggtcccgcgctggggcaggtttggcaagaacaaggacaaggaggaccagtggctgcatgaagtcaagcccggcgacggtgcgtctgtctttcgtcctgttgactctttgcgctgacgctttccagaagccgaccaggacccgggaaagacggcgcgcggcgagcgcaaggcgcgcatcgcccagaacaccaagcagcactcggccaacctcgccgtcgcctcggcctctgtcaccgccgcccgcgccaccgccgcctcggagcgcgcagcccgcaaggaagagctcaacaggaacatgctcatctccaagacgtccaccgcgtccttgggcaagtttgataacaagattgagggcgagccgaaagcgaggggcatgaaacggaaattcgacgcgaatataccctggtggaagcgagggcacggaaaaggagaggcagctgtccgtgctcaagcgggtcgagaggggcgaaacgaacaagtcgaagaggggcggagagggtgtccagggcgggttgaatgtgaggaaagcgctcaggtttagtggggaaggtgggaaactgaggccaaagacgacgggcaagaagggcaagagaaagtagtcaactctttagatatagtcttttagatttttccatgtaaccgtgtaccataccatcgcttgttcctttcttgtttgataaaggatgtcgtatctagcgtgataaaaccgagtcaatgtattgcaacaccattagctcagggtgccaaggtttgagaggcggttcagtaggttgcttgacaaaagatcatccagagttggagaagggttgggagatgaagttactggtgtttgtagaaaatcagaccaatatttagcgtcggatgatggaggtaactgtggaggtgtgtttgaagagccatccttcagtgcatctgctaaccgcttggcattggcgatgatttgacggcgagcg

SEQ ID NO: 13 - DNA, 2620 bp, Cryptococcus neoformans
ttctcgaagagtattcacttcttgagtaataactcctagagagcccatgatcccaagctcttttcgattcagactatcatcacatttggattcgatggaatccaagcgcgtttgtactgtttcagcgaacgcgtcgaatctctgggcatgcgcctgaaatgcattactttgagccatgataatggctgtcagtgttgacagtatttgcgacatgtcctttttttcttcctctggctgttctttggggttcgagcgatgtttcttgtaaagggacccagagcgaggagtccgcgcagatgatcgttttgatggaatcaaaaccgtcggaggatttggatgaaaatttgaagatgaaagcggcatgacttcgtatcctctaccggtttgagaaagatgcctgaaaatgattgacgaatgtgggagctacgggagatattagcggatggacaacgacttcagtatcttatcaattacacgccggaagtcttttcgtcgacgcgcttcttgctcagaacattagtttggctcctgacccgcgaccggcggcggaggcacctttaaaaaaatgtgacgtaatcaaaaaagatgaagctatctgggcacccacttagtgaccccaaactgtattccgcttctttgctgcactttcgttctttcttttcaattcactttcattccccggtcattctttctcctctcttcccatccgaatgagcaataacccccacattatatccgtaagtccatgctcaatttgaaaaaccctggcatcttcgcatgattattcaacaaactataataatctgtcaatccacggaatagacgcttctctcattgagagtcgacagcctcagccgaaaacgtttgaccactaatgactcttcttatgattcctgtcgtgtatgatcacattgtggtaacttgggctgacgccatcacagtgctgttgaacatctatatattgcacatttcgcacctattttgatagtagatagtcgggatgaatcagcctaataggattgactcatggttgttacaagatgatgagaaaccgtgagtttctccatcacaccgttacgaagcacatatatacataaggatcaaaagttaatgagttggactcgacagattaacgatcacggaggaccccaaactgcccaacgcctccactatagtcatacgacgacaggatcatacattgggaaacatgctcagagcgtgagccgcaagccattgaattgatctcatgatggatgtgctgacaactggttaagacaattaatgctcgaccctactgttctcttcgcgggctacaaagttcctcaccctcttgaaaacgacattcttctcaaaatccagaccgacgagcggtcaaatcctgcagaggctctcaaacgtgcttgtcatgaactgatccggcaaaccgtacacatcaaagctcaattccaacagcaagcaaagaacatcgagatgggtatgggtcccgaacaaggagtcgctccagatgcagcaggtgcgaatggggcgtacgatccgtatggggatgggttcgggagggagggcaatgtggtcgtcggcggtgcagtgagggaccaggggcaggatgtatacgacttttagaatgtttgtgagattgaaaaatccttgttgtaaagttattgtcagcagtactcaaatatgcataaactaaaggctacaattatgatacaatctagagctcttcatctacaaatttcaatggcagacctgacaaaaatttagcgatggcgcacatcagatagggctactcaccagataaatctctcttttctacgatttttacaaggtcctgtcgattcatacttgatacccatccgttaacacaggaatcaaaaacgtttggagaggtgaatatagcacttactagaagcaggcgccttttagactattccatagcgtctcgctcgtaacaccttttgcacctccaccattctggccgtatgcataggcttcacttgcctcagagtgctggagcctcagggcgtcgaggattgattgggcggcagtttgatattcaccgagattcatgtatgcgatgccaagattgaacctgaagagaagagctgcgttagaaagctcgcatcacccgagatatagtggtgaaatgcttacaaagctcggacaaaaccgggatgcaacctcagagcttgatggtagtactgtacagcttcgctggatcttccgctgttcgcaagtgttgcaccgagacggttgtacaacaaccaatcctataggggcagttagcatctgcgagatgtattacaggaagcaagctgccttacttcaggccgggcctccaaggccgccaaaaagcaatcctcagctttggaataatcctgtcccagatggtcataagtaatcgcgcaatggctgacaagaaagacgacttacctggcccccactcatattgaacagcaccccgagtgcaacctgaacatcagcatcaatctcgtgcggcgtttgcctcgcaatttctattaaactctcaatgagtttgtttctgtcttttcctttttgtccatcagcgccggttgtatttttgctgtccttcagtctaatccaatcctccagcatggtgcac

SEQ ID NO: 14 - DNA, 2722 bp, Cryptococcus neoformans
cttctcatccctacgcacaagctcttggagaactgatacaatatcatcgctgtggtcgatgtcccccgaaagggaaagacatgaaagcaatgtcgttaacaccattggtacttgagctggtggaggtgctggatccgacatcagttaagtggaaatattcattttgatattacttacattgttctgaaacgtaaagatatcgagaaatgaatgctcttcttctctttttacttggatctgacaatgaaagcctcatggactgtccaagctcctcccaactgatatcatcttcccttctccctatcacttctcctgctatttccgcgtcatcctcgtcttcctcgtccacatctatgggatgtttcccattaattcttccatcatcaagatcgtcattttctgaggctgattcataggcttccgcttgagacttgtcgttgtgctcaagccacgagcctactttggcttttgacgacattccactttgggcttggagtttcttgagcggtttcttttgagaggaaattttgggatttacaaatgtgtgatgggttggaaggaaaggtgtggcagttgacgtgtgctgccgagtagcagtggtagtggtgggtgagcgaatgtaatggttggctggacttctctttccatgaaccactggcgagcagcggctcaacaaaccattcgagaaagactatattatgtaatgcggagacccgcgaccggatccgataccaggccatcacttaatcttgtaacccatttaactccaaccgcataattcggagatttttcttaacgccgacagtttagccaccgaagctggtgccacattccgtcagtagctcttcggcgttttctcgcactcgagagctctgcgttgaggatttcgtccaagtcgcatcgacacttggtggtcttctctttaaccttcaaaacccggaaaagtgagcaaatctcctacagcaaatcctgttacaagcactgactcacatcaaccagaatgccgacccgattcagcaacacccgaaagcaccgaggtcacgtctctgccggtcacggtcgtatcggcaagcacaggaagcatcccggtggtcgtggtttggctggtggtcagcaccaccacaggaccaacttcgacaaggttagttggattataattatcggggatatggatggggttcagcggagggaaaacgggatctacgaaaggaataagaatgcgtagaagatttgtcggaaatggagaatgagaattttgatgagagaaggatggtgttcgatttggacgacgaggattttgagagttgggctaatttagaatactttagtaccaccctggttacttcggtaaggtcggtatgcgtcactaccatctcctcaagaaccactactaccgacccaccatcaacctcgacaaggtgtgtaaacgaaaagactactatcccggaatgagcagcggctgacatgttgggcagctcatctctcttcctgaagccaaggttgacgctcctgagggtaacgttcccgttatcgaccttgtccacctcggcaagttcaagcttgtacgtattatttgctgtcattcgttgatcactttctgatatcttacagttgggcaagggccgaatcaacaagcctttcatcgtcaagactcgattcgtttccaagttggccgaggagaagatcaaggaggctggtggtgttgtcaagctcgtcgcttaagcgcgatgtgttttgggagggactgttgctgctgcggcatgcaacgtgtacatgatatccgacatcatcctggagtatatgggttatgatggattacatgggtttttgcgtttataggcgctgcaattttttgttcagtggggggcatgatggtgtatgtggattatgaggacgaggatttctgctactgatttatgggtattaaattacattctgacgatgctgtcagacacaggttgatggtaggggcttgtaagagagtagtggtgggatacatgccttgaatcaacaagcatcttgggacaatctacgcaataatctacttccccacatctccaacgcagaacttgaccctctctttcatgcacgggaccgcttcataaagaccttcctcaaccaacttcatcatagtaccgtacgtcttgccttcctttttcgtaaaccttccgacccataagaacgcccacattgtcttgtccctggtatgcttttctttctctcccactttttggactacatcatcctccgggctaaagacttcggggtgagcatatcggagaatggatttgagatagtcgattgtctccgccacagaccatgcgggatggctccagagttggctgtaagaaacgacattgagagtgccgtagcagacactgggtatacaaggcaccttgtaaggtacatgtataactctgtcaggaatatggccttgtgcaaacttcaattccatatacccttccttgccttctctactgatcttgcctcctgatcgggtttcactttctggaagagggagcgagggcagctcgtcaagactgaaaatgaagggccagtaacagagcaatggctgggatacggccgccagtgcaaaagcgcaacgacggttgggcggggttattgatgaccagccggtgcaatggaggtgaagctcgtctaggcttgggaaagccacaatacatctcctttgtagagactggaaaacggacgtgatcttctc

SEQ ID NO: 15 - DNA, 2725 bp, Cryptococcus neoformans
gtaagtcattcttccgtacatcctccatccatacaacatttctccctcatatcactttcttttgctgaccttcctcagtcatctttcatggtctggtggaataagctctagtatcttaatactgaacgttagtttgcacataatagcaattatatgtgaggcaatgtacctaaaagtcgccggtttcgttatttttcaatgataaaaatgattgaggattcagcatgatgatgcatatgtatcaatatcgcctcatcggctggccagctgtgcatgtcacgacaagatgagcaaaaggctcgaagctatgcttgttcatgaaggccgtcatttttgtacgatcgttcagcagctgaacttcacaaacgaggatcgatgttagcaaacaagcaaagcgcgactcagcttgatgccgcgaaaaagtgcggcagcataatttagtagaaatgttgtattccatgccagttttttttatatctttggcggaaagaacggggggcagataatagaacagggaacgaagtccgatccttaatgttaccattattgctgctatatacactaacgcgtacatctttctggctcaagcgagtcatgctcaacttccaacgcttgctgcttattattactgctcgtcgcttgcagcgagtgcacgcaggtctcgttcgccagtcattctgggtctggaagcagtggaagtcatttctcaatgtatgttacgtaagtatattttgagataaagcaggtgcataaataagtctggaaatgggggaaaacgcacgaggttgtcttctgttgtgtcgacgaccacgaacaaaagtccatttgcactacagtacagtacatcggtctcaactctggtagactagtcgtcttttccgaagaaattacatacaaacgaatatttcacagtacatgaggcacctccctccgcagtaattttttttgcctttcgcaccttcgtcagacttgcgacttgccgtgcccgcaaggccagcagatgcgttgtatagtgaatcactggccagtacgtgcgaccactatcggtaagtccttcagcttgttccatccccatattttgctagtaaatcggttggggatgagccgagcttatctgggagatcaggtattgactttaagatccgaacaatcgagctcgatgggaagcgaatcaagttgcagattgtaagttgccgtttccattcttatttatatcaaacagtagtgctgactggtcatgcatgtagtgggatactggctggtaagcatatccgtccagtttgccgcagcagctggcatgcatggggctgttactaattccgcaattcgtcagggcaagaacgtttccgaaccatcacaactgcttactacagaggtgccatgggtatcttgctggtctatgacgttacagatgaaaagtcctttaacagtgagttacaccttcaaacctcggaccattgattgcagccctttttttttacatggcactgaaccgtctcgttagacatccgaacctggctctccaacattgaacaacatgcatcgcccggcgtgaacaagattcttatcggtaacaagtgcgactgggaggagaagcgatctgttacgattgagcaaggacgtgcgcttgccgacgagtttggactgcgtttcttggagactagtgcgaaagcaaacgaaggtgtggaggaggcatttttcacattggccaggtacgtcatgtaggcaggtggacatgatgggggtcagacagctaatgcgtcatgttggattgtagagatatcaagactcgtttgattgattctcaaccccaagaagccgcccctgttcaacttggtgcggaccgtaacggtgtgaatgtcaacaagcaaagcgattcttcttctggcgggtgttgctaaccgcaatggatatgaattctgtattcgtcgtccttttggcagcaaaggagcggcagtcaatgagcacgtgtattgccttgatataaatgaccatggatgcccgtcaacatacagttatcctatcatagtttttttttttaactttaccgaaggtctttcagtagtcctttttttcttccttctccgttttgacctagcttttttttctcgcgagattctatgtattgtacgtgacaaatatgctttttctatccagatacacgcacatcgaatagtcttttcttttcttcttcttttcgtgaagcaatccgcttatacccaatgcatgaagattattccctagcttttgcaattttgcgatctgacaactgtttccaatacgctatgaacggtaatatacctcacttgaagtacttggtaggcacaaacggcatgggcttgacgaaggcatccctcaattttttcctcacctcgactttgactgcggtaccctttttatgggatccgttggcaatgtatcccatggcgatgtttgtgccgagtgtaggggaaggaataccagaagtgattacacctatttttttttttttttttttgagaaagagagaaggagagcaaaagtcagtggaattcaggaacgtgaagtactacaaaaagatcaaagatcggcactaaccaatttccttttcacccagcgcatccaagactttgcaaccttctctcgctggggagcctataacctcaaagccgacccttcgcctggaaggtccgttggcaagttcctcgaggattctcgattttccagggaaagacggctgagcgtc

SEQ ID NO: 16 - DNA, 2824 bp, Cryptococcus neoformans
gcttggaaaatacgccgagaagggcacattggcgcggggttgttgggaaggggaagagagggtgggggagggatgttatcgattgtgattctggtggatgttgagataatactgggtgggaggggacaatgtgaaagtggccagcagcaggcgcgccggcgtgcttggtcttggtctttgccggtgaaaccactatgggtgcagtgacattctccttgacgtcttctgcgaacagtccttccccactttctttagccttttctgcttttgctctcgccctcgcctccctcttcagcctcgctttttctccccctttatcgaaagcttttttcgattcttccaatctctttgcttccgcctcccttgtcttttcttctaaagctttcaaacgcgcgacgcgggctgccgtatgggctttaacggtttcgtcagagggtgtagatgggctgggatcaagaggaacgagatgggcgatgcctttttgtttttcatgtcagtaagaacaatggcgatgtgaggaaaaaaagatgaatttgtcttaccttgggtaacaaggtatgcagtctcttcctgcatcaatgtcaggggaagacctaaaaatccattctgctgggctacgcctggcagtgtgccggctcttaaaccagagacattgtgcacgcaatggagagtcgcggcagctgtgaagaggggttgtcagcttgggcgtatgagctggagaggatggagattggatactttgtgcgtcccagacggtggcgacaccgtttacgaggtagagggggatggagtgggggggaggggacatggcttgtggcgagaagggtctgtttgtgcggagagagggtaaattatcatggtggtggagaaagaagaagcaacaagtggaggtggagggatgacgtggaattttcacccccgaagatcaccaccactcactctactcctaatactgcaactataactatatatcattacccatcagcacatcccagaagccatggtgagtcgtttccgctccagagtacccatatttctcacgcactcatccgaaatagctcatcttctcgtgagtctctctcaccgacaagcaacaatcccgtaccctgccttcgatgtgtcctcaaaacctccaagatatgcacatacgaacagtagcttatttggaactgctcatcgtctagtttcttcaagaccctcacagaccaagtgatcaccgttgagctcaaaaatgacttatcaataactgggactctcaaatctgtggatcagtaggtcgagtcttgcgtctacgaccttttatatatccagtcgcccacaattcagtccagtattatctgctactaggatatgggcaaaggtatgcaagagtactaacatgtaacggctaggttcctcaacatccgattagataatattagcgtagaggaccccgaaagacatcctcatatggtaagcgtatatctttttttgacacatgccaaatgcggaagtgggattctggacggtgaaaagatggcaagcttgcggtgggggtcaattatttgtctgtatctttgaaagaaatataattttcagtggtctatccgggatcggagcccgcttcgtgtccgccacgccccatgccctcttctggaatatttcttttctaaccaagagatgctgacaacgtgcgcttcgacagatggcggtcaagaactgtttcatccgagggtctgtagtacggtatgtgcggatggctgcgcgatcggtggacactacgctgctggaggacgctacgaggcgaggtgagttttgtgtctcgggtgttggcgggtatgctgacggagggtgtgcagaggcgaaggaaggaaagaagtagaagagggtgtgcggaggtggccatgggcttttgtacaagatatatgcatgatacattacaggagatacgatacgtgacctatccaggcacgggggagagtggcccgccaacgggcaaaaagatggacaaataaataatttatcgactcttctcttttactcgcccacgtagacagacacccagcgatgcttctcctttcccgcacccgtctcttcccccgcccgctcctttctcccctttctcgacccctcccactccgcccacgcgtgctcaccacctctgccatccgccgcgcctctctccccccgactgtcccccgcgtctccacagagctcgtccaccccaaggagcaacaacaacaactgccagcgcaaccacccacagtctttgataaaatcctcccacaatgggctcaaggtgccaaaccctacctctacctcaccaggctcgataaacccatcggctccgtccttctctactggccttgcggtgcgtccttcgtcccatgcatcttgtcctggcaggcattactgacacccatagcagcgtggtccataacaatggcatctaccgtgaaccaccttccccctaccactcctctattctacatgtcactcttcgccgtcggagcactcatcatgcgaggtgctgggtgcaccattaatgacatgtgggactggaagatggacgccaaggtcggtacgtcactttttccctcccaaaggcgaaacgttcgcgaccttactgagttggacgaatgtagagaggacaaagacaagacctttggccgccggcgatgttactcaattcggggctctcacattccttggagctcagcttactgccggtcttgccgtgctaacccaacttaactggtacaggtgagttgcttatggttctatcatcaacctaggaaaagaagaaaaagctgatacaacactagcatcgtcctgggagcttcct

SEQ ID NO: 17 - DNA, 2645 bp, Cryptococcus neoformans
tcatctgcagcctcgtcacttgcgtcagagctgtcaatgattaaactatcatcatcgctgtccagcactgtcagatcgataaccaaatccatggctttcttcctagctgccttcttctgagggccggctaaacctagattccgagacatgctaccgttgctgatgacattcggaagtattgacggtatggaagacgttctgatgtcgatacgaggacgtttagggttgggcagaagagccgtatcagccatgcgtttgcgatgttgaagatcgaggtggtatgctttctcagtaagggacgacgtcagctcacttgacaatccaggtgtgccaggcgaggccgaagaggcatcgtcggcagatgaagagctgctatattgcggttgagacgcagaaagccttgatccgggagtaactattccccggggcagtgtccttccagcaagtcgcaaagaacttgagccctcaggttctaactcatcctcttcgctcttgatattggacttgtcggtgcctgcatgccaattggatgctctcttccgagcggctttgaaactgcagatagaaggctgattggcgggaggtgaggagcaggtgctcataacatgacgtctcgagggcaaataggtgattgccgggctagggactggaagctgcatggagagcgacggtgagcagggagagacagggagaattgaggggcgttgctctagcggttgtggaagcattggcagaatgtgggcatccttatctgtgaatgggaggaaggaaggaacgaagaaagaatgcccgaggtgttgtgatgtttatatcgataaattagtagtacatatctgttttgtttgtccagagcaccgaaaagccccccgcgactcctcggttagcgattaattaatcacctcttgcaggtccaccactctttataaatctatacgttagtattcattaccaagcaatatctaaccgtccactttcaattcatcttctcccattgctacccatgacgacagacatccccgcgcaacccctcaaaaccactaaagagacacaccccgatttaccgccgggcctcatcatcggccctgatggcaaaccatgtaaagtctgcaactcgtggcaagattgggccaagatcaaagtcaagaagaaggctgccagtggtggagaggatgctgagaagaagaatgtttctgggtccggggcagcagtcggtatggcgggattcggcagcatgctgtctggtgcaggcgcctcaaaagctcctaccaacgcaccgttagaccgaacgccagaccggtcaaattgtccacctgacaccgcagcccttgggcgctctacatggacttttctgcatactaccgctgcttattatccaatcaacgcacccccacagacccagtccagtatgcttaatctcctctcttcactgtctttgctttatccctgctcgtggtgtgccacggacttccaaaaggatatgcgccgacatccgcccgatgtcagtgggagagagagtttgatgaaatggctctgcgagaggcataacgaggttaatgaaaaattggggaaagagaaatttggatgtgatatcaaaaatttggacgtgagatggaaagacgggccggaagatggtagttgcgattaattcgttatagagtctttagatcgtaagatgcatcacacaataccactcgacactcgcgttcaacaccaaccaagtttccgcatccatgccttttgttgccatccaagaagaatgggtaacatatctgataatccaaactctggccagtaggttttgacaaagtgcagctgggtatcgtctgaagcctatcgatactcagtcggtatttgtccatattttctggaaaatgaactcacctgccacatcatgaaatcacttagtcttttgacatctgatgttcggacgagtatatcaagtttttctggctcttcgggattgacgaacagactcttgtccacagtgttgattgctttagacactcccagcgaatcgaacacatccttagctgtgatatcactttaagcgttattagcatcctcgttaaccgatcactggacagccgggttttattcacctcggagcaagctctccctcatatgcccgccgaacgctttccttcatcgcagtggtgatctcatcccgagaagcgtacggacagcatacattcaatacgccactgcagagtaacttatcagctgtagatttccagaacaacaaaaggctcactttttgttatcctgggtcatagcctccatgtcgcggacggcttggagcacatcaggtggcagcatatcaagctggcctataaagcgtatcttgacgccatactcttccagcaggtctcttacaaggataaatcgcgttatcactggtaaataaaaggctgtagactgagacatgcgcacccatgttcacacagctctgcaagacgctgcttggcgagattcatcagagcaccgacttccttttctgacctgctgaagttgtctatagcaaaggcgtatatcgacactgctcttattctcaatcgtaggcatatctcgagagtcttgcatgtacgattagtaggtacggagctgcgagtagcggcagctcactcttctgagggcattgaaacctt

SEQ ID NO: 18 - DNA, 2684 bp, Cryptococcus neoformans
aatggacgaccattgaactaagaagatcctgggcatacacctcgtttgccacttgcgcaacggcatccgggtttggctcagtgtcaccttcgccagaaagaagaatcttgacgatagacagttggcgagaaatatcttcattaatctgtgttggtaatattgtcagtcggtattcgcgagtgggccgcagcttgattgtatggaagcaagtagctatacggcctcacgtaaagacgcaaaggcatccgaatgcaatttgctgccaatttccaagcacctcacctttctgcttgcctctccagccggggcattatctagacgtgttatgttgtccttcaggctcttgactgtgtccgcgggcgtccgtgtcttttgtcgattgaaaaagttcatcgttggtttggttcggtatgggtagaagctgtgtgtttgtatacctgtattccgggaggatacagattaaccaagagtatattttgtgccgtataccgactttacagtacttgcgacaataacaacagtcgcccgaggtcaaagcgttacgtaaacataatccaactgcgatgacaccaccccgacggcggggaaccttgcggggaacgaatgtgcaagtcccacaatcttacaactccatctcatctcgagccacaattcgtcaaccatggacagctcaccaacgtacgtacaggccatggagctacatggctacatagatgctgatggttcgcagtgcactctttgagaattatgatgaagacctcaagcaactcttcggcagcttgaagagcaagctcgatggcgaggcgaagtctctcactggaggtaagcactttgaccgtcgctctgtcgatttatctcactgttttcacatagagcaaaggaaggcggcgctgaaaagggtgtctgaagagattgacgaggcagaagagattgtgagtttgtgctcttagcctgctatgacatggggggttatatctcatgggacgtgtaggttgctcaaatggaggtagaactcccatccatgcctacatccatccgtcaaacataccaaggtcgtcttgcagcctccaagcagagccttgacaaaatcagaaaaactcttgtaagtttaacccgccgtgttggttgtaaattaccccaccttatctgaaagcgctaccttagaaagacctccgtctccaatcccaacgatctgatctcctctccggacctgggttcccccacggagacgacccatacaccgacgatccggaaccttactctacccgatcccgtctactagctggcacgcagactcttgaagatggcaccaccaggctcgataatgcgcacaggattgcactggagactgaaggtgttggatctgaaattcttcgaaatttgagagggcagagagatcaattggagamcactagggatactgcaagtcgccatgttaacgcatccaaacgccttccactaacgccttgtagcttgtccaagcggactcttctattgatcgagcagcgggtacacttaagaagatgatcttcaagtaggtttacctttgtaaacaggtttattttcgctcatttaaactgatttataccatagaatgtaccaacaaaaattcctctcggcaggtatcatcgtcgtccttgtcctgctcatcctcctcgttctctactccaagttctttggataaacaatttccgccccttttgggacaattttgaccatcccactttggcgcttggtgcggtttgcagaggaaaggtttcctcaagcacaaggctgtgttgtacgctgcccacaagacactgtttagactttttggctgtaatatgtaatgggatcatgataatgtctagatccgcctgaaagggatgtgtaggagtattaataagaaggccagctgtcttgagaatgggtcatgaaaaagcacttgctttgtatattaaccctttgtctaggaatgacctatatcctgattgagacaggttgatataagacgcttctgctttttttttacccttcttcactaataatagacagcagaaagaatagcaaaaaaagatggatcggtttgaccactttctaattcgctcctatcttcgtaactgtctcatggcatatagatctcttatccaccagtttgagcgcaactgggcaaaggtcataacccgaaaggaagcggctctggcggtggtatggactcaatgtaagacctagtcactgtattgtacaattaaaacaacgtcacgcataggcactgacatgctactttttctttcttgtgcataccctgctattgtaattgctaaaaatgctggaagaaagcgttccaaagagatggaaaattgtcctatgtctaagtaaagatacccaaaaccacggccgaatctatgacgatacttttgtatagaaggaaattgagacaggaaaggcggggtaataagaaacaaaagtgcaaaatattaatgatttgtatgtctactgattattacaagattaatgaccactcctggaggtcaaatcttttgggttgaaatagcattcaagactgcggcaaccgttagtcaattatgacgacaaatcgaacgacgaccgacttacattaccttcttcgtcgttctcccttctttactgctcatggtctacagcgcatgcggtgaaccctcaaatgcaaactgtggactcttcgt

SEQ ID NO: 19 - DNA, 2784 bp, Cryptococcus neoformans
agcgcggaggaaactcacatgatgcagccaaccatgtcagaaggaatggagatattttgagtgcgaaggttggggtcattcagattgacctgagggccttcgctaggcctcctttcgccagacacgccggaaggaccagaaatactgcctcctctgctaggcctcctatcgccagagtaacctccaaagccagcggctactgatgtcctcctgataccgccggtagaaccagtgacagcctgggcgccaagaccgccggcaagaacaccggcatcaccagcagcgccggggtggtacaaaacagtaccggctccgcggtcccagtcttcaagaagacacttgccaatctccaggacagcagtcttgatcgcgtcaacagagccttgtacctctacgacacgctccgtagattgaggaagcatctccttggatgcaaccatacgggcaccggacatgtcttggatttgcttaatcttcaaacctgaacggccaatgacggtacccatgaggttgtgggaaataaggaggcgaatggaagtgaaggatccgacaggaggaggagggagggacgagtcagaaaggggagtctcaagcaagagacgagcgacttccgcataggcggaagcgaccccttcgagatcaccagtgacggacaagacacggtcctgaacgccctggacaaccttggagacacctgctttaacaccggtggagtcgcgaatagtggcgatggtggcgcctgacttgccaatgatgatgccggcctctttggtggagacaagagacctgagggagagctggtgctcagcaccgtgggcgtccggggaagggagttgttcctggacagccttgggagagaggttgtcggcgggagaggagtcggccatggtgggggaagaggagcagaagcgagggacagaggatagggatataggatggagaggaatttcgagtacgaggtggggagaaggacgacgagacgaggagctttcgaattcctatgaggagccacgtaaataaaactaaaataacacctgcttaaattaatagatcccgctttcaccactaaactctgctaattttgcaaccgtaactgccacataggccccctaccggcgttatctcctctcgaaaccccgccgcggttactcgcctcacatctcgacgaattttgtcatcttctttgtcatccagcagcttctcgaggactccatatacttggatagacaagctcttcaaaatgcaaatcttcgtcaagacgtaagtacttctccggcctcctgcatccttaccttggctcacacgtctccagccttcccggcaagactctcgcccgagatgtcctccccacctctactgtctcctccgtcaaggagatgatcgcctccgctgagggcatccccgcctctgagcagcgactcatcttcgccggtgtccagatggacgacgagcgtgcccttgctgagtacggtatccagaaggagtctaccatcaacatggtcatgtctctctgtggtggtggtaagaagaggaagaagaagaactacgtgagtgatggcttagtaatcgtgcacgacaatgtggctgactggcatctgtagaccacccccaagaagatcaagcacaagaggaagaaggtcaagatggccatcctcaagtactacaaggtcggatccgacggcaagatccagcgactcaggcgtgagtgccctgcgcccacctgtggtgctggtatcttcatggcttggcacaaggacaggcaggcttgcggcaagtgcgggtgagtagttttcgtctagtcgggtaaatgtgatggggtggctgactcgccgaaccagtcttacctacactttcgagcccggaaccaagcccaccactgcctaagcggtgtgtgcctttaagggtatggtggagaggagtgttttggtgaaactcgtagtctatccatgcacaatcctttctcgttcactatttgtacagctattatggttacatgtgtcccctctgtactaatgataattttcacgctggccctaccatttggaataataatcttctgacaatccctgacatggcatcgggttggtgctgccgtcgttagcaaagtgcgtctcgtcgttttacgcgtaccttgtaagcatccattaccatcgccatggcccccgcccccagaatcgtttctccgaaaggcactagagggacccaagcccgttttctggcaccagaccatgcagactcgagggctcgtgggagcacgtacattgcaatttcggcccttcttttctaaaatatcctcagccaagacatttgcagtcataaatgggtattttaccttctcttcgacgagaagacttaggcatgttgtaaagcccaaagcccaaaagacctctttcctcttcaaaagactcctcatgaaatctggccctctgctcttctctagtgcttgaaccctcgcgcagaataggactgggtccgtcagctacgaccattttcacgaaggaccgccaagtcgccacagtaagtcgtgcttaccttggtaaatgactacaaatgcacccaagaaggaacagcttctacctatcccccacaaggccctggccatcattcgtatcgggtctcgcttaacatgatgtctccttaaaaccagcatggggatcaggtgtagtgcagagtagacaggaagcatgaatcgacaaactgcaaagaatcgacgaaagtttgtttcggtgcaagtattgcaccatgggtgaaccatcccgctgttcaaaatcagcaataatgtgc

SEQ ID NO: 20 - DNA, 2690 bp, Cryptococcus neoformans
atcaaagttgataccggtggcctaaattccgcgcgtaagactagcttcctgcatcaaaaaaactggagttccgactcacctggtgcaatccgtctcccacttcaccatacatttccttctccatcctcgtgttcctagcaccgacgacgtgctggccattcttccagctaccaaatccgggaggggcaccatgctcaaaagttttcctaacacgaggttgtgcaccccatccaccgacatcgtcctcggcaacggcggcaggcacaatatgcctggtaggaggggtggtggcgggagtggggagaccggtgggagatggcctgtaggcagcgggggccgcaggagggacagcggcggggggagcggcacggttcctcaagtgaggaggaacgtaggcaggtttctgaggtttctgagaggcaccgttaaggttaacggagtctgggcaagtcagtatccactctgatacgaagaagcgggaccagcttactcatttgggacgcgagtccattgacatcggtagcagccataatgtgttctagtggcgataaaggaatttcttgtgttgacaaagggagtatctgctgttgctgttttctgtgtggcgtgctctctatcttggtgtagaaaagagcgactgtggtgaatatggattttttgtttcttgaatgaaagaatagatgaggaagagagatggaagatttaataagaatttttttttgtgcaataaaaatagtggtggtcaaagatggcgagtgggagcaaggggcgatggccgctggtggcaaattatcattggggcgccacctgggataaataatggtaaataaatagataaaataatctcagaacgcgtcgcgggcctggacagaagtccgtgcgtgttttcgagtgtcatacatcgcccatgtttttgttagcctgttccttccttccttgcaatactactagagatggtacgtggctgacttagctccaaccctgttgctgactaaccgtcatgcagtccggcaacaacgcaggtccgtactcgccacccacccgccacttctccttccaacccactagctgaccgccctcgcagaataccgagaagcctttgccctctttgacaagcgaggcaccggccacgtgccccgtgaatcccttggtgaacttttgcggtccttgggtcagaatcctacccaggcagaggttgccgagctcgagaagactgtcggagccactttcagctatgacgaatttttggcggtgttgaacaggccggatggatggaagcctgccggcactgccggtcagtctcctttcctctcttcctccttgcgtgcgaatttccttctggagtaatcatgctgatgaaaatgcagacgagtttatcaagggattccaggtctttgacaaagctggaaacgggttcatcggtgccggtgaacttcgctatgtcctcacccagcttggcgagaagatgactgatgaggaagtggacgagctgctcaagggcttccctgtccagtcagtctaatcctcttcaaacttctcatagcattcaccgtttactgacatacgcctgcagagacggccagatcaactaccactctttcgtccgatcaattctctctcaataagaatgggagagggagatggaggacggaaatgtattctattctacttgtttcttgacgaactttaacgatgcaatctcgtgcaaacctctttatccaccccgctatagagtcaaaatatacatgatgctaattatactatcccactttctcagtaatcgctacaatatctaactgatccattcttccatctcccttaactctgactccttactcttcctccttcaaaatctctctacagacaaaacaccttctatcctccctaaaccaccttaatgcacaactttgatgggccgcatgcacgcaagtcggtgtcaacacccctttctcaccccccctaaactgactcaagcagattgggcatttacccactctgacccccaagagcgaaagtttaagcttcactttaccttgtggcgtggtacggcgagaatcgatggtgatgagtcctgggagcagggtggagatcgcttcgggagatgcggcagtaggtttagaagggccgaggaaggtcgttagttgtgaataaccctgttttcccaaaaaaaaagaaagaaaaaaagaagtcaatcacatcagccactgtcattttgacttttaaactttacaagacatgacaatgggagacggactcacttcatactcgcgcccacttccttccaacctcgaaacaaacaggtccaaatccgtatactctcttatccccctctgtccctgtgcttgactgtgcaaccccacaccgggtccttcaccttcttcacgtctaggcgtttccaccgggcttatcctactttcatccccatctcccgcgccccggctgccaatcacaggagtcgcagaagtcgcaggacttaaaggcctctcccttaaatcaacagtcgacgcccatcgattatcgctctccctctcgttcatctgatgtatccgcagctgagactgggtcgggagaggggggaaatcgctatgtgatctttcgactggggatgggcgggaaccattggttgtcgtggagttgttcagcctaagagccgggattggggtgggcgtgagggttgacacaggcgtagg

SEQ ID NO: 21 - DNA, 1017 bp, Cryptococcus neoformans
aagagaaaatgggtcaaaaggggcgggtgaataaaaaaaaaagtggtttattttttatgttttattttcctcttccctctgtacgtatatacaattccacataccaccgttccctcttccactatcccccccgctcctgaatcggagggaattaatacgccatggccgaatcatccaatatcatctttgacgacaggttcaccgtcgatgtgggtccttttttttattggttacacatttcaactgaacatttcgtttttcccagactgtagacaaggacggcaagaaatttgaccgaggtgattaatccatattcagatatatttcgcgcgcgcaaggcgactgataaaagatggcaaagtgtcccggataaccgcgacgtcacattcgctttccatgtccctcacgctcgacattgccaacgaactctacccactcgaacagtctgaaacgtttacgctcacactcgcgcggtcgctggtcccgtcggagctggaaacgttggatagtcgtgcggatggggacgaaggcgaggaggggagcgaagtgcggagggtgaagcgagagttgtggaggagtcatgagcaagggttggcggaagattatgattatgtcatgtatggcaaggtgggtaaaggttttgggtgggagaatggaaattgatggggacggtgtagatttacaagtttgacgattcggcgcaaggagaggctcagacgtgagtgttgaaggcgtctcaatggcactcgctgatcaaaggcggtagcacggcatacttttctttcggtggactgctcatggctctccgtggatcgtatcgacatcttgcgggggttgttgttggagaaaacgtgtatttgctcatgcgcaagtaatgaagcgttagacatgaaagatattatttgggatgtatttatagtctacaaagagcaacacgactgcatccacaaacgcagcctactgatcctttctctccttgccgacaactaatcccttgccaatctccatcatcttgga

SEQ ID NO: 22 - DNA, 2725 bp, Cryptococcus neoformans
tgggaaaactcacccaattgtctgaaagaaagaggcgagtcaggtcggtcaggcggtctcggttcctataaaccttccaaaatacggtcttctcccatccattatgctcccgttcctacccaacccaccaatcgcacattccccaatctgtccttgcactttcgaagctcaactcactagggcaaagagatcggaaagccttcttaaactgctggcagggagcgaactcctcacccttggcgttgacacacttgtggtagtcaacaaagttttgctaaagaggacaacaaatcagccgacacgtcttgtacgacagctcgaacggccaactcacccagctaaatggtcaaggaaaggttgaagagattagtagatgttgtcgttgcaggcacaaggcgacgtaccagtgcttggtctggttctggttggggaatcgggcgctatcggaacattagccaagtccttcaatttgttgttgctgctttcaacaaaggtacttactcaaagccagtagtctggagctgcatttgcagggcaaaataaacgtcaaccccattctcattcgactcccagcttcatcctcttccatcctcatctcctgtccatttgcactttctccctcgcatatcggaccaacgcggaccgctctgaatgtcaactcaccacgaaagtcctgcaaactgtcagtgcttcccatgcacgagatggcatctactcacttgtcctcggccattttgctgtttatagatggagtatggaagttgcaaggagtggtgttcgctggaagttgcggatgagagatgtgagtgaaatggttggtgcaagtcccggagccctcgtagggcggagttatttcgggtggaatcggggttagccgcgagtggcatctcccagttcagcggatcacgtgaccggctctctctaatctcgatcctcgagaatacaattgcttcgtttgactatacttccatttcaacgtcacgtacaagcctcgaaaacaatgtcccgccagctcgacaacgtcaaccccaccatttttgcgccatcagctcccagtttcgtccgaagatcgacaggaaaatcggccaaatcgagcttatgggctcccgaagctttgtcagatgatggggaggactactactccccaggagcgagaagtagcggtagtgtcagtgacgaggaggaaggaagggaagatattgatgcgcaagaggtttatggtgggtcgttttactgcttggtgctgagaaacgagtggcatattccgcttgccaccgtttccaagtctttttgtcaccatgactgacagttccacagaccttctgcggtcaataaccgaccctgaacatccagtatctttggagcagcttcgagtggtaaaccctgaggatattcatgttgctggaaatcgtgtgttggtgtatcttacacctacaatcccacattgctccatgtccaccctcattggtaagctgaaaaccatgtcgaagtttaagagtgggaactgatcatgtaatagggctatcattgagagtgcgattattgagggctttgcctccacgatatagggtggatattcgaatcaaatcgggaactcaccaatccgagcacgcagtcaacaaacagttaaacgacaaggaacgagtacaagcggctttggagaacaagcatctgttgagtgtggtggaaggctgtttggcgactgctggaaagcgtggcgaataggctaggtatattgtatcagatcaaaagtgtattcatgttaaaaagttgtactgttataccatcattttcgtaaggatgcattctggtaacgtcgtaagagatcttgttctaaaggaagaaggaaaatgcaagattgaaggaataaagtctcaatgcaaagtgatatacaaatgtaattccgaatcaggtgccacacagttccaaataacccacatcagatcatccctcctctcttttttctagcctctcttactgcattgatctctctcactacacctgcaacccaattgttcacaacttcctccaacatctcttcccagccttcaagtttcttggcaacggtcatcgggtcaaattcaatcttgggtacatctcgacctttgctcgtggtagaagtgggtgtattaggtagagaagaggcggatttgggggttgagggtggagcggatgtggaccgttcaactcggtctttgctgggttgagggagagcaacaggtttgggaaggaatgaaggggcgcttgtggaagatggcatgaggattgggagttgatatcgatgcctcaaggctctgttcgagatcagctcattgtccgggtttagcttgattaaaaagaaaaaaagacgtacgctgcgaagcaagtcagattcccgacccttctaaacgtccactccttatctttcttcccctcttcacctgcaggtgtaaaatcaccgtgcccaccggtggctgtgagagtaggatgtatgtcttcctccgggatgaatccccagggctttgacgattggaggagaacagcattataggcctggataagtacgtaaccgtcactaattcacgtttatcagagggtgcagtattttcatttgtttgagaaaggcttacgagagggaggaaagaaaagtgctgcgaaagttttcactttggggtgagggtaacgtggatgccaattcagtaggcagatgtgacgacaagagagcatgcaatcgagctatcctagg

SEQ ID NO: 23 - DNA, 2676 bp, Cryptococcus neoformans
gatgtaatgtctacctcatcgtcagcacacacttgcatctaccgagtattattattcttacctttcacaccgccaagcagtcttctgagctccacgaacccatccataaggtcgacgttgtctcccgtatccaagcttgctcgacctcgcctgctacctgctcccgcgaggccattgtttttgctcctcagagacggtggaagggtcgggtatgagccgtaggacgtcgaagatgaggcccatctctggttcctgcgcatggcagaggtgacggactgcacctcctgaaggagaagcgtcgtcggagggaggtctgtaggcggcatcatcctcctaatgactggagatgtgaaaagagagttgttatgttcatatatatctctcgcaccatcttcgctagatacacgcctcgtcgacaacacacagtttaggtacggttacgtaatacctttatcgtacacttggttagttggctgtgggtgactcccattgcccagtcaactctatagattttgccatgtgcctttaggattgtcgagacactgattgaacatgtagataggcatatcaagcatacttcaataacgagttttcttgctacggggtgagtgattataactgccgtcgaccgaggagatgcagcatgcaagtaatgacagctctgtatgcttttctgtcttacccggtagcgcacttgaacacgagccccaaatgaatcttcctacactttctgctttctcatcagcctggatccacccattattctgagctcatatataataacatcatgcaacagtagtgcagtacgtatggcgacctccacccacctactgagcggtcattgccgttttgaggccaattcgactttgcattacgtaacttattaactatcgctgaacgcgcaagctcgtcactcacgtttgtctcgggtgcgtgtatcgatgggtaactgtgtctcctccatctatattctcttttctttcccctttacaaactcatcatggagtgctcattcggtattactggtaagtgtggctacggcacaaacggtatctaatgctgatatttccctatcacaggcaaagactatgtcatcctcgcctcagacatgggtgcgggacgatccatcgtccgtatgaagtctgacgagaacaagctcaagaccttgggtccccacctcgccatggcttttagcggtgaacccggagatacaaacaattttgccgagtatatcgagaggaatatgcgactgtacaacatccggtaagtccctgcgcccgtgttatatgtaacctcaagagttatcttggaagaactggacagagttgatttttttgtttttctgatttgggttactcggcagaaaccatttcccgcttcttccaccagcagcctccgcttgggtccgacgtactcttgcagaagctattcgatcccgacacccctatgctgttaacctccttcttggtgggttcgataccaccacctcaaaaaccccacttgtactggatcgattatctcggtaccaaggcgattgtcccttatgctgcgcatggtatgggtgtgtatgttagtttgagtacgatggataagtggtggtacgaggatatggacaagaaggagggtgtcgacttgttgagaaagtgtattgacgagacggagaagcgtgagtctaaattgccccgaggggccgtctgtgcgagtcaattactaaagtacrtatcaggtctcacaatcaagttcgactttaactgcatcctcattgacaagaacggtatccacaaggttgacctttcccaagcagaccccatcgccaacatccaggaacacccacaagaaaccgaggttgaagcgcctcatccccccatagaagttggtatatccgcctaaggtgttgtgtatggagcaatgcaagtagttgatgtattttataagaaacatattaatccctaagcccaaagtgggaaactgaattgttgttgcatcaccaaaacgagaaactctataaaaaccatgcggaatgaacgacgtaaaactcttcctcgatcaatgtcaactgagggaaaggaagcaggggtttttctaggtcccaaagctacagtcgttgattagctttgcccccatcacgaagacgaaaaagaagaagaaaagaaaaagatgatggacttacactccaagcatcttgaaaggtgccgtcttttcgccttctttaccaagcagaacacattccacgtagtgcgatccagtcgagacattctcgtcgatcaaagttaatctattcgtcccagattagggattagcgcccaggagttttcataagaatggcgggggtatacatacgtgggcgtggcttcctgcacatcagatactccgctcaattctactgcgctcgcaaagttgtcatccacccagcaagccgctcgacccaagggattctcggcggggctcctattctgctgtgagcttttctttctttccctttttctttttctttttagccgcagacaggcaactcactgtaaataataaatagccacatcgcccgcgctcaacgtcacaggcactctcatcttactaccaccaatctcagaataccagtaatgcttctcgtcgtctgaggctcctttacttgggtggtatgcatgccatccggagccgtaaaagtggcttgggggc

SEQ ID NO: 24 - DNA, 2726 bp, Cryptococcus neoformans
gcaagctcggctttgcgggtgaacataccgagatggataaccggggtagtgtcgccggcgcggttattagtggtttcagagaggcagacagaattgacaagtggttggccgcgcgaaaagaataaagagtgggaatttacgtagtgatgctttgataaaagttttatttttaaatgcaacagtcttcaaaacaagaataattcaattcacggaactaggtatttgaccggcaaggttgcatcctagaccaaactacatttaagcagcaatggtaacctcaacctcaactccgggctcgagggagatggaggtgatctgcttgacaacgtcggcagaagagttgaggtcgatgagacgcttgtggattcgcatctggtacctgtcccaggtcttggaaccctcaccacagggactgtgcaaaacaaaagtcgtttattagccctgccggcaggaagcattaagaattatcacgtacgacttcctggtggtgtgcttgaggaccttggtggggagtcggacggggcccctgacgttgaggtctcggtccttggcacggttgatgaggtcggcacagactacagagattttcatcagcctttctcccccgtttttcagatccacgaccgtccaaccacaaactaacacttctcaagaggcttgacgttcttggaggtcaaggtgatcctgatcttgtggatcttctgggcaccggcgccagtcttttcgaggtcttccttgtactcggccatttttgattgtagattggttttgatgacagcgacttggcagtgtaggtgctagcggtgactgtctggatgagctgaaaaggaaagaggaagacagctgcgaggattcaaatcgcatgcgagagggagaatttggcggaatttgggtgacgtggattattatttgcaaaaggataagtattattacgtaacttcaagttaacaactgtttttgtttttctggcgacgacccagcgagcgccgggggatatggaatgatgagacattgggatattgcagaaactcgagacgctaccatattcaaccaactcatccgccaacatggtcagattaatcacccataacatgcttgcttgccacgtcagtaagttacactctttcattccatccgctcatcatcctgagctttacacaactgatctctctctctctcttttttccagagaactgcacaaaggacaactttcccctcgtcttctcagaggtagagctcgttgaacgaccggcacctatcaatccggatttcatcaagcgattcttgcccaaactcgattggaaggctttggtggatacggctcggtctgtgagtatgagccgggggtggtagtcgcattttcgcccccgaatggtcaagagtattgacttgactatcattacagctcggtgatactagtctccccgataccatgcctgaaaactggacagatgaggaaatacaagctttacaccatgtccttttcgaggtatgtcttgcaataatttcatcggtccagctttaatttgggccgcgagacaacgaacaactgaatgatgtgaaaacagttgcatgtggaggaaggaatcatgacatgtcgagggtgtggccatgcctaccctgtggctaacggtatccccaatatggtaagtcagattttggaatttggtctatgaagcaaaagccaagagggaaaaaagaaaaaggactgattaatttggtttgacagttgctcgctgagcacgaggttggcagatgagctgcgtgcaagttttgcacattagatagtttgttgtacaataaccatgatgcatttctctctctctctctctatgtcgttttgttctatctccgtccatacgagccgtaccctcctccgcctccaccaccaccaccaccgccgtactggccatacccgccggaagcggaagcgcccgtaatttccttggccacctggattattattctgagggggtccttgagaaggtcgattataaggataactttgaggaggagcaccggggtccagggggcatagcgtaattgggtgcgggcggatagccgggttggttgttgggcggaggagggtaggatgacggcgggtaagggggatagttgggaggagcaggggggtaattgtatcccccttgacctggtggaggaccgggaggaggtccccctggcccacggccatacatctgattacctcttggatcctgtcttccccctcgtgaatctctatctctatccattccccctctgtctcctcccccgttcctatcccgatctgcaaacccaccacgcgagccgtgattatgccgaagcatatcgttctgactaggaagcgccgaccttcctcgtgggaactgaccgccttgtgcttgtccttgggcaccaggaccgggaggtcccatggacgaaggggtggatacgcgcgatggcggggtgccagcatggacattgggcgcacccagtcctggaagaccgggtggccctccgcctgtcgtcgtcgggccggtcttgacgctgttgacagcggcaacgaggttggacaaaccgggtaaagcgacttgctgcttatcgccgccgccgccgccgccgccaccgcctgcagcgttcgcaggaagggcgttcgtcccccattcacgctttgtgatgcgttccagttctttttgggcagcgccttcctcggtaagatgccatttatcgaattcttgtccccccgg

SEQ ID NO: 25 - DNA, 2809 bp, Cryptococcus neoformans
gaacgtgagctgcaagtaatcttcagtgactcaaccaaaaaatcattttgaatgttatactcacacaagagtgggtcctggttgggagtagtgacaatctcgagcttcttggtggccttgttatagccaagccagccccagccagagccttggatggcagcagtcttggcattcatctccttcttgaggttctcgaagccgccaaagtcagcctggacctggtcgtagaagacaccagaggtgggaaccttgacttgagcagagccggtgggagcaaggttcttccagaagagctgcaaatcatgttagagggcgcccatatgtctgcctctgtgaatttgttattgatacttacagagtggttactaacattcaaaatacaattagcatccatctcggccaatgaaatttcgcacaactcacatgtgaccaccaccgttgaacttgagggcaggctgaagggcaatagcagccttgaagtcgccagcagcagaggccttctggagagactcctcagcggcgttgagaccgttgacgtaagtctggtggtgcttggtgtggtggagattcataatctcagctgagatggaaggctccaatgcctacgtccgagtgtattagctggatcttcattgcatggtagagattttacaaacatcataggcgtaagggagaggagggagggtgtgcttggctctaatggtggacatggtcgcaagagaagtgcggagagtagctcgcggaagagcggttcgagtgatagcagtgatcattttggaaatgggatctgtgaaagtgtatgtgaaatattttaggggatgtgccggtgtatgggatactgtggactttgcggttgaggcaataaaagcagaagacgatatggttctcaaacggggatgcgggtctgaggcttttattacaaaagcaaccactccaccagcagccagcaaaatcattctgcgtcatcattcccatcgtcaccccgcctatccccgaaccaatgccgagttccagggggcttcagcccttacacgcgaaaatcatcagcaataacaaacgattattgtttatttacctattattgaacctattaccgacaagtaccctcaagctagcccgccatgtcttattttatgacccagtaagtctcaccagccccgtaatcgacccactggctaacgcgcatagtcttcactctggctggcatgtcgaccaagccatcctcgtcgaagaagatcgtgtcgtctgtatccgtttcggccatgaccatgatgaagaatgtatggctatggacgagacactctatggagtctctgaaaaggtccaaaattttgccgttctctatttgggtcagtatctctctttaatcttgtaccttcgcgaagacctaatgatctgtagtcgacatcacggaagttcctgatttcaacaagatgtacgaattgtacgataattgtacactcatgttcttctaccggtaggtctatcacagagcaatagatctatcattataaatgataacattattatagaaataaacatatcatgatcgacttgggaacgggtaacaacaataagatgtgagtgcgggtatgcttcattcaaatcatttactgatggcgatattctttacagcaactgggctataacggacaaacaagaagtaggcaggccatcagatcaaatcatattttttttccagaaaagctcacatggatttagctcattgatattatcgagactgtctaccggggggcgtccaaaggtcgaggtctcgtcgtttctccaaaaggtgggctacatttttaattccttgcgacttttacctgacatgcttgcagattattctacccgacacaagtattaataatcacccaattcaagttgtacatcatatctataatatgcatttatcatacggccatagaaaagaaaagggaatcgcaacaagcgcaacgagcggaaatctattcagcctaggagaacaagatgaccaacgtactttcattagtccaccgaaaaagattcatgtcaggaaacacagagctataggccagttctggcataccagcgaggtccatagtttgatgattttggacaagacgaaaaggacaatcttgcatggttggttgtaaccaaaaacatttaccgtgacacctacgtaacaacgggagatgaaggtccgctttgtgtcgattatgacagcctacccccatctcagccagaaatgaaacatcgctattacctcgcgaaaaacggacgaaagtcaaattgcactcatccatagcctgatatctgtccgaagaagacgactgtcacgtgaatggagctatatgccacaggattcaaaacaagcatggatgtttatatttggatctatctatatacaataaacgagagaggattactaacaatttacagcgtgggaggcggcacatctgtttgcgcatgtggaacttctccttcatctcttcccatcctcctcgtttgtctgacctttccagtcgtcctttccctttccctctcctcgtccccgtcagatttcccatgtcctccgccaaaccagctagacgaaaacttggaagtcttcggtttcggcatgaagtcggtcgtattcggcatgagaagaatatgatatgaacgcgtagctgtgggagaggtgaggagccagtcctcgagaagggccaagttgcggagattggacttgaacaggttatcgagaaagtcaccgatcagaggtacaataccaacgacacagtcgattaatacgttgaaaagctagaatttcatttagcctgacatttctcca

SEQ ID NO: 26 - DNA, 2743 bp, Cryptococcus neoformans
cagaaatgtccagagagataccaccataaggactgctaaaatggccttcaagagaagttccacctgagaagggggtgatagggaccttatacttgttggctaatttgacaacttcctggacttcttcggtagtgtcaacccaaacaactacggtcggtttcttggcaggatggtaagaccagtcgctcacaccgtgtgtttcaaggtcggcgtcatcagtgctgaccttgtcgcctttacccttcttctcccagctggctttgagatcgttgatagcagctacgtagtccttgtgggaaccgtacgaaggttggtgtgctttctgatgagcgataccaacagaagattcttgcagtgctgtagaaggaggaagcgagttgacattaccgacgaggtagccagctccgcagaagatggcgagagagagggcgtaccacgcggaggagatgccggcgggaggctgtggagggggaggagggggaacggtagagttgaagcgtcgagagacggaggatgggcggaaagagcgctgggtggaacgtctgagagcgttgagtgggcgtgctgctgacatggcgaatgttttcgggagtgaagataacttctaactctttgaccaattaactgctacagcaattcggctcacgacggccaacgagcgcacacctaatcacgtcactcggacagattgccgaaccacatcatcactcagtcagatcaacattgctcggagaagcccgcgcacctccaccccagctctgacaccgtgcttatcggtgattagacaccagcttcggcgtttacattataaaggaaataccttacgtaaactatttcctcagaagtcatgacatgaccatcttcgagccacgatttttcggctcggcgttttgctaatcccgtcaatccacaaccactctctgccggcgtccgcacctcgctctgaagaaaaccttgaatattctttcggttgattcttacgcctcaagaaccgtcaaaaatgggtgcctacaagtatctccaggagctctacaccaagaagcagtccgacgtgcttcagttcgtctcccgtgtccgatgctgggagtaccgacagctcgccgtcatccaccgagcttctcgaccttctcgtcccgacaaggctaggcgactcggatacaaggccaagcagggctatctcatctaccgtgttagggtcaggaggggtaacaggaagaagcaagctcccaagggtgctacttacggtaagcccgtcaggcagggtgtcaaccacctcaagtctcctagaggtttgaaggctaccgccgaggagagggttgccaggaggtgtggtaacttgcgagtgtgagtagagtttgcatgctagaagggacgtgaattgatgtcatgtttagtctcaactcttactgggtcaaccaggacggtgtatacaagtactacgaggtcatccttgtcgagtgagcaaaatattcctctcctacgccaaaccttaactaatatcgtcactctagcccctctcacaaggccatccgacgagacgcccgtatcaactggatcgccaaccccgtccacaagcaccgagagatgcgtggcctcaccgccgagggcaagaagaaccgtggtttgggcaagggttccaagcacaaccaccagccccagaaggccacctggaagaagcacaacacgtcagttctgttctgtttcaccttgcctatccatttaccattgctgacgctccgttgattacagcctttctctccgacgataccgttaagcagctcgatagacatcatgcggtgcctgcggccgtgcggtgtgtttttggctctagggagatggagtgttttgtttcgatgggatgcatttgggtcccgtgtatagtcgtccaattcagcagtagcaggggacttgataaaaagaggatgacaagaccagacggcacgagaatcaatggaaggggatgaaagctgacctttgtagtaatgaactgaagaccgaatcgctgaatgtttttgagtcgacacaatttgaagaagaatggataacgggcattgtcgacagttctggaattcatcttgatacaaccatgatggtccgtgtcaacacatcacgaaggtggagttttctgcaacggagacagcgaaccgatttgtcgaggcattcccttccttcgcaccatccttgttgaatttttctttttttttggcgtctccggcttatgtgtcgacaagggccaagaatatgagagaaacaagcgaaatggtttactcaatgtcagactttttcgagccttgcaagaaatatgacgagcgctgtcggtaactttgcacaaggctccaagccagtcgctcttcattgtgctcttaagacgtgtttgtaatcaaagctccaatagttgttcattacagggtctgggtcgctaacacaccttgcatcccgttgaaacatatcctgttaccttaaatcggtgcaaatagtttcctgatgatgacagttgatttcagctgcaaagatttttgattcatttctgggtctgggtgaatgtcttaaagggttcttctgttaactgagtaacggtgcagggagcttagatggactcctccgctgaccgttgcattaggcatatggaactgggacaatgtgttacttgtgcgcccgcttgcagattaaataaatactccatcctgcaaagcacgaccagcgcccaatgcggttggtcaacggaaggatcctgttgtacaaa

SEQ ID NO: 27 - DNA, 2716 bp, Cryptococcus neoformans
tcttgcctgtcatcccacatactttcaggctgtgatgtcaggagctaccgaaccacttcctcctaatgaaaaggcgtgacgcaggagtcctggatgatagactaagctgtctttgctggatgatcatgtgttttgggcaattccgcaatgcctttcgttacgctttactctttgacggaagttcttgggttagagttgcgggttttgctggttgagccttagcctagacacggtggcaagttagtatcataggtcgtatagtaatcaatcatagccattatgtataattgttgacaattgagagatgggaagaagagacgaagctgatgcgcgaatggaaaggaacggattgtttgcaaggtgatgcgtaaaattgccttttcaggaaattctgctgcaggagtatataacagggaagatgctggatccgccctcccgcgcccccgctccctcctttttgctcccttgctagctttcgtcctacatccatcttctttcatcctcttatccacataattacgcagcactcgctcaatcagcgacatcgttaatagacacgcatagcgtaccctagaaaatttagccctccgaatcaaaggattgaccactcaaaagtagccgccaaatatcatcctcttatctctcgccaccaacgtgcaacatgtccggtctcgcccttcccaaagcgtccaatgcgggcccgtccagctcaagtagcaagccagaaggaattcaaacacttgatggagaaggatctctcgccacaagaccaccgcaaaaggctattgctagtgttccggagattacagcggtggatggtctagtgccaaccttacagtgggtattacaacgtttgtggctgggatctttgcatataggccatggtgtatgagtggaataatttgcatgggatggaacgagagacgaaggaagaaggaaggctgcgaaaggtgacggcgatgaaccaccctgtgacggaagtgttgggccatcctagccaatgccttcgttgcgaatggactcgccgctgcactgttgctacctggtggcgcccgctgtttgtctcacgtatgagaaagttcagtgggtgctgactgcgtgtcttttgcagaaacattgtcgccaccgtcaacctcgactgtcgtttagacttgaagactattgccctccacgctcgaaatgcggaatacaacccaagagtatgcttttctctgtcctggaagaagcatcaaactgatgtattgtttagcgtttcgctgccgttgtcatgcgtattcgtgacccaagaacaacggccttgattttcgcttctggaaagatggtcgtcactggtgccaagtctgaagacgactctcggttagcatctcgtaaatacgcccgaataatccaaaagcttggttttgaggccaagttcgccgagttcaagattcagaacatggtcggcagttgcgatgtcaagttccctatcagattagaaggtctggcattcagccacggtgcattcagcagttacgaaccggaggtgaatccttctcataattgtctgaattgttttctcacatactttcagctgttccctggtttgatttatcgtatgctcaaacccaaagtcgtcatcctcatcttcgtgtccggcaaaattgtcctcaccggtgcaaaagtcagagaagaaatttacatggcgttcaaccagatctactctgtgttgctcggtaaattgacctttccctcatatgtgaaggcatatgctaatatcttcctgtgcagaattccgaaagacgacataaagtctcggctgacaggcttctctttcattaccatcctctgcaccgcgacctgtactgcccctacatcgttgagcataacatttgggtttcaagttaatctcttcttttttgggcgccgcgcccaccccggtcatcccgatattgtctatcacattagtcatataacgtacttcacgaaaaaaaagcaattatccatactggtgacaaccacattgacagtcccctcagactatacacagttttatcgtctggcatgtaattctgtttcgaaactgtagtgattgaagccgttgcaagtatccatttttctgctgtctagttctactcgggcctcaattgtgctccagttattatgtgaccagattatgaagaataataaaagttgtgaccctaaataattaattacggctatcagagacggtcacgtccgtcatcgctattttcgtcatcacttgtaccagcccggccaccggccatccacgcattcctttatttctccttttttgatcttttttgctcttggttgtacttacaggcaggcataaaatgcaggccacccacctcatagttctaatacatggcctgtatggtgacgtgcacaacttagacgccgtcaaatcagagcttctcgcactcgccgaccccgaaacatccaacatatctgacaagggcgcaagtggcgcagagaaacacaacagatgtatacacaatgagagaccaaagaaaaggatggagactgtcgtttacctgcccaagtctataaaaggggctcatacatgggatgggatagacgtttgtgcccaccgagtggctgaagaggtgcgtccttgatcgcctctgttcaatagctgctgtttagtgaagtctgaccattgatttagctggactatgagattgagagacttcaagatgagggtaaagacatagtg

SEQ ID NO: 28 - DNA, 2794 bp, Cryptococcus neoformans
cagcttggcctgcatatccttttgcatctccgtaaggtttccctccccaccgaccttgagcttggtgccctttgatggaggaggtatcgggatgggcagctggacaggctccagtttgaagcccggagtgatcttgttagcctttgatttcttggagggaggtgtatctgtctgattctgttttgcggcttggttcagcttggcttggtccgacttgggcgtgggcttgggcttgggcttgtcgccttttgctctgggtgtgctgtgcactatctcctcgtcgttgacctgtctgctcttgtttttcttattccttttcttcccgactacgcccatgctttcttttccttcttcctttccaatcgcctctcctccctcaaactttctcatgagtttctcaaagttggcatcagcctgctttacttgctgggcctgccctaaaccggcgttcgcgtctgaatgcttgcgcttgttggtctttttgcctcccttgcctgctgaagcgagtgtgggagaaattttggatactcctgattcgaatgctgaggggaacaaggacattgccacgatagctttcagtgtgctgtatatcgagaaagtcaagtatactgcgaaaagttgccgaaagagatgatgagcctccacctccgtgaaatttggtcccgctcttcatacgcccgccttcgacggatccttcgtttgttcgcttactccgacgttttcctcttgcatccttcgttcattttcaatcgtccatatcccaggagcaaaaataagcagcgcacgagagtaactatgggtaggcacagctccactgtttgtattgctcaacgtcagtgctgacttcttctctgaatgcagattaccaagtaagcagcagctgtctgttttccttatcaataaaacgtactgacccgtttgcagaatcgagcaggtgcaaacaagggtagtggtggtgtcggtgagtgttgtgcattcgtcaaaatgcgaagcgttattgatgtatttctctgtagctggtgcatccgagacagcagtggacaggagagaacgtcttcgaaaacttgctttggagactattgacttggccaaagatccctatatccttaggtcagtgcttgtgcttgttacgatgtcaaattattgttttctgacattctgtcattcataggacccatctcggtacattagaatgccgtctttgtctcactcttcacgtcaacgagggttcttaccttgcccacactcaaggaaagaaacatcaaacaaaccttgctaggcgtgcagccaaggacaacaaggatcagacattaatgatccaagctcccacagccgcgcaacaagtgaagaagaaagtgtttgttaagattggaagacctggtaagtcggtttcgacgtccaatcttgcctctcaggagtctgattcacggcccaggatacaaaatcatcaaaattcgagagcctgtcagtcaaaggatgggtttattattcactgtgtctttacctgagataaaagcgggagagaggccaagaaggaggttcatgtctgcttttgaacaacggcgagagattcccaataaagctttccagtacttagttgtgagttctactcaatcggacatttcttccgccctactaaactataggttgtagttggcagccgagccatacgagaccatagcatttgccatcccctcaaaagagatggttgacgttgatgaagacccggagtcgacatgggagcactgggatgccgacgagaaggtttacagttgtcaattcttgtataaataaatgctgggatatgattgtcatattgtatgattattatgcagcatccgcttgacttgactaggggatgtgagtaaggcggtacgcaagtttcatgatggaaacgtcaagaaatctgaaaggaccatgctgaaacgaatatttaatgcactgatgcatggggcgacaaaatacagttggacagtgactatggaacttctactaccacaattgctaaacactcattatcgtttcgatattatttattattttttcttaatggtgtctaaccaagccactggccgttgttgaggtgcaagaaatggccagtcatagcatttgcgtcagatgaagcaaggaawactgagaaatatcagatccgttcgcatagcgcagttcaacaacgtcaaactcaccgtatgccggacccatctcagcgggcatagaagctcgaccgtgtaagggagggccgccgacagaccatccctccatgttgtcaggaggcctagaagctggctgcaaaggagtataaacggggccagggcagacaccgtttacccggataccctggggggcgagttgcacagccaatgacctggtataggagacgatggctcccttggtggaagcataatcgaccatagcaactgatcctttgaaggcggtaacagaagaggtgttgatgatcgttgatcctcgcttgagatgaggaactgcggctttagtgagggcaaacatggcaagaatgttgcttctgaatgtgctttccacgttttcaagctattgaaatatccagtcagcttagcaaaccaagagacgggcctaaatctacctcgatttctgcgatggactgggacatgatttgcttactggcattgttcaccaggatatccagcttgccaaatttgtccatgtgctgcttgacgacatctgctgcgaggtcggcctgcataaggtcatgagcgattgtaagacattgctgtccgtcttgttcgatagcctttttaactcgctgggcactacg

SEQ ID NO: 29 - DNA, 2804 bp, Cryptococcus neoformans
ctcggcaaacttggggatggggatatggcactcgttgagaccgtaggtcgccttcaacgcctcgagactgggcagaccagcctcaggcgcggtcggcttgggcctggcggcagggtgcgtgaggatgccgcgggcggtctggaaggtggagaggggcggagacgagtcacaggggtaggggataggcgtgaagacattgtcggcgcctacagcgcgggtcagcgtgcgcggtgcagatggaaaaaggcgcctacggttgtagacataggtgtcacgctggtagctgaaagagtaggcgggctcggtcgcgccgggtgcctggagcgtgtcagcgagttacaggccggtgcacgtacagttttgcggtcgagcgggacaatttcacccttgcctctgcccttcttggggatgacgcggactctggacgcggattccagcgaggcggcctgtgcgtgtcagtgcggctgcagcccacgcgtctacgtacggtcgtgtagctgatccttgcattcatgcggctgctccaggcggtgaggaggaagctgagggcatggcctgcgccgaggaggacggagaagacgaatgtccattcctcggagacgatccactggtcgtacttgtagtggtaggcgtagtagaagaggggatagagcgctgcgggggtgagcaggggcgggcgcgcacggcggacggcttacagaggacggggaggccgtacagccgggcggcgagcgggattttgttgtggagggagagccgctctatctcgggcgagacgatggctgggggtgacctggggtgagtcagctgggcccgtgcgtgcttccttcctgcccgccacttacatgatggctgcgggtgcagagacgggcggcggcgacgataaagcagcaggcggcggcgtgccacacccggcgttgtccgcaaaccccgccgcgctgcacgtcgggctcgagatgagcgatccccgtcttccgccagcactctccacgcccccgccatgaacatattccgcttcctcggcgacctctcccacctcgcctccatcctcatcctcctccacaaaatccagacaaccaggtcctgccgcggcatctccttcaagtcgcagctcctctacctcatcgtcttcctcacccgctatgtcgacctcgtcacccacccgctcgtctccgtctacaacaccgccatgaagctcttcttcatcgcgtccaccgcgtacaccctctacctcatgaagttcaagtaccggtgcgcccgctgccaccgctcccgcacgttccgccgctgactgtccgcaggccgacacacgacgcctccctcgataccttccagctctcgtacatctttggccccgttgccgtccttgccctcttgttcaactacaagttcacgccctttgagatcacctggtccttctccatctggctcgagtcggtcgccatccttccgcagctgttcatgctccaaagaacgggcgaggccgagacgatcaccacacattacctcgcagccctcggtctgtacaggggattgtacattcccaactggatgtacaggtgagtctggattcatagattgcatactctacacgcgatccaactgccaaacaacaggtactttaccgaaggcgcctttgacgccattgctgtcgttgccggtatcattcagaccgccatctacgccgactttggatatatcgtgcgtcgccgtccgtccttccgcacgtcccgcagctgactcccgctcaccacagtacgtcacaagagtcctccgcggccaaaaattcgagctccccgcctaagtgtgcaatccaggcatgtagtattaaacaagcataggggacgctgatggtcagtatggccgctgcatgcacacgaatctggcgcaattaccggtagctgtgccgaacacctttgttgttgtcgtcgtctctttcatttgcatcttcgtcaacaactgccacaaaaatgtctctcttcttcgccaactcagacacaccccagccagacccgatctcgggcgcagattacttgtccaaactccacaagtttctcaagtcgaacgctccccggctcgcaccctcggcacctcggaacacgtcaagaaacctcactccatcaatatggcagcaaggctataccgttttgactctcggtctcgaccctaattcggctcctgttagaaatactaaaggctcaatgggtttgggctttgggatgccaagtacgaagaggacaccgccacccaagccattactgttgcgattacctcctgatcggctactgtaccttttattacggtggcaagcccttcctcagtcgctgccccatgttggaaggacagatattccgatagaggaaggggttgtgatagcagcaagaggtacggagggcgaaggcagaggcaaagaaggagatgtgagaagtgttaggagctgggtcgggagtatcaggagtgttagtgggactctggttggtggtggacaaaatagaggatggtggggaagtaaacaggctgtgaacgaaggcaagctagtactttgcatctatgcgcattgctaacaaatgtacagacgagctgttgctgtcgctctactccatgttcaccctcattccggccttgctcattcacccacccaacatatctgagccacccatagcagaactagttgaggctggcggatacacacaattaggcggtattgatgttcgagttcccttggatgttttgagaaatctccaaatgtatgcctcacctctagtgtcatgagggcaattgctgacaaactgtagcttggagtt

SEQ ID NO: 30 - DNA, 2835 bp, Cryptococcus neoformans
cgggaagtgtatcgaggaggggacggagaccgggagccttctcgttcagactcttgatcctcctagtcaaatgtgtcaaatttaatttcgccgaaactggtagaaaagagatacgcacgaggagacttttcctgggcggtaatccttctgtttcctccagcacgctcctctgggttaaccggggaagaatgatatcacagacacgttcctgggtcaacagttcgtctatgaattcatcaaagtgggtcaaagaataaccgcctgtaatgactgttggtttctgtcttccaaagttgcaaggagtgcacttaccggcatgaacgacccgtaacttccgataatccttcatcagtggctcgaggatttcatagacctccaatgatctgaatgttaaccgcacgtaaaaggctgcgagcgccctcaaatatctgcccgagtctcagctttttgtccatttgtgaagagtacagatggcgaaaccacgtacttgaactcctcagccaacagatactctatcaggatttccttttccggttgaagttgcaaaagcttgagaactagacatatgaaaggcgtgggtgtttggcgatctgtcacacctccaatagcacgaagatctatagctttatctattattgattcggctgcaggaacaacgataaagagcggtgatcaagtgaatacacggtaaccataccctgtcagtcgagtaatcaagcacgagctgcggacttaccagtaagggcgaaacagtgctctttccaatacagagagtcgtatatacgggctctgatgaccttttcaatgaggtactataagacagccaagtattgttagattgagtggtgacgtttgggcaagactggctatacctgcgggttgctgccgtgaacggctgtggctcctcgcttggttgcactcatggggtctgggtggatggatgtaggacagggaatatgttcggaggaagtagctgggggaaattgtgaatatagtaataatgcgaaaatacaaatggaggtggactgaagcgggcaaaggcgaagacgcgaaaagaaaagcgaaaacaaatgatgataataattctcgctttccctgttactacttctcttgccacttccaattttatcactcatcccagacatatctcaacatgacaggtaatggtaagggcgaagacgacgtcagcttgccgaaagctaccgtcctcaagatcatccaaggttcgtcttttgcccgtgtatggtagaccacagcgcaaaactgaccgacttgcctcgcagaaatgcttccagaggatatatctgcatcaaaagaggccaaggacattatatttgactgctgtactggtgagcagacgcctatttgtgtatattgctcggttgtcaagcgcaatattgactgatgaacatcctcgacctgtacagaatggataaagctcatttccacccaatccaatatggtctgtgaagcctcttctaaaaagaccatatcgcctgagcacgtcgtagaagcgctcaaagtgggttgccttgtttttggaacaatatcattatatattgtactgatttaatgagccagcaactggggtttgaagactttgtggccgaggtggaagagtcgaacaaggactttaaacaggctcaaaaggtatgtctacgagaattgtaccttttatagtaggatgtatggctgactttgatgttacaggagcgtgtacgatcacagccagataccaagggcatgacagaggaagaactgctggaactgcaagaacgtctgtttgcgtctagccacgccagatttgcagcagggcagcaataaaaataaaatgaactttagaggcagaacaaaaggacgagtggacatgttgtatttctactattgacatttggcagcataatgcatgtacgataccaatctatcataacatgccgagggcccccctctctgtctgccactgctctccatctgccccaccctctctacgttctctttccctctttcgcttcttcctctcgaactcatgatacctttcttcctcaatgacatcactctccagctttctctctagttgctgtaacgtttgcagcgcatcttctccccatcttcctccctgtaaaatttctctcccagcttcgtcaaccacccgactaacgagtctgttggtatccttgtcccacttgacacccatcatttccatctcgcgaattcccctttgtacaccatcaagatctcggaagctttcccaacgacatgtgaggacttcgttataagctcccgtcaagcatccaaaaagataagattcgagggaagatgatmgggcatggtggaaaagggcgaggacgaggtgaggagaattgaaattctcgcgtaatgttttgagtacacgagtcaggattttgggatagacgggggagaatgtaagcaaggggagaaggttggcggggggcttgtacgtgttttgatgcgggctcgtagcagcagtcgactgagatgattctggtgtagctgatgtttcgtcttcgacagatgccttgaccttttctgtaccctcgtccggttttaatggatctattggagtgaagacccttttcttggcccattccactagttctagatcactcgacaccatgtccatctcctctgccaacatttcatactcctccaaattgtcatcttcactccgattcctatcaaacattgtccttaattgtttagccccgtcgccccattcgttgctgccgtatccagtgactccagattttgtggcaaggaagggatcagaaggggtcgagggaaatgatgtgagtatcgaggagatgacctcgttga

SEQ ID NO: 31 - DNA, 2871 bp, Cryptococcus neoformans
  misc_feature (2790)..(2790): n=g, a, t or c
ttagtccgatcgcacgacatctgccaaggacatatatcactgtcgggaaacctacctgatgcatagacccaacaacctcgacggtcaacttggcttggttgtcatcttccacgacatcctttccagtcccttccttgctccgggccgtgtctccgttcgtggtagaccacggaaccggtgtgggttccgatgccggctcgacaagtgcacgagggagaatgccatggacatacccattggcggacaatgccgattgagagacgacgcctggaggtaggttcagtggggtgtgaagtattgatatcggctagacatacccatgatacctcgtcggccaccgccatagacaagcggtatattggctttggcaagagctttaccaactgattccgcggctttgacaaaaaggggcttgtttcctggggatgagccacagctaaaggcattgaaatgagcaggattttacggggcatgtaacgttattgactgacaagacacagacagggttattgagctttgcggtctgggggaaaggggacatggtgtcaggccgtatagattgtgaggagatatcggaagatggcggggagtcaggaggggactgggaatgcgggtattattgtacggcaggggaagaagctgagggcttggaggacaaaagacgtgtcttgtgtggttctggtgaatggattgcacagccgagaaggcggggaccccgcgcctccactgccacaggcgggcatggagatatctccgggtgacgcgcgttggcgggaagtgtatcttctgtatcttctggcgccgtaatacgctgctctgcaacatcccgtacccatactccccacgcacacgccatgttcatcatcgtaagcagccccctcccgcccccgcacaagctgaccgctggtaaatccagaactggttctgggacgtcctcgcctctctcggtatgtccaccactccgccgcctccactccgctaacaactcccattaggtcttatgaacaagagtatgcagcctatctactccaccggattgagtctttccactgatatccacaccaggcgcaaagctcttgttccttggtctcgataatgcgggaaagactgtacgttccacgcggccccactgtcacatctaatctacccactctgacatctccacgtccaccagacccttcttcacatgctcaagaacgaccgtctcgctacccttcaacccactcttcaccctagtgcgcatctttttcttcataaacatccacacatcagttgacagcgttttccagcctctgaagaactcgccatcggcaacgtcaagttcactacttatgatctcggtggtcacattcaagctcgaagattgtggagagattacttcccagaggttgacgggattgtgtttttggtagacagcgccgacgccgagaggttcgctgaaagcaaggccgagttggactctttgtgtaagtgacttgtttggaagtgcaaagtggagcgcggagacacgagttcgctttgggggggggtggcgakcaatagagaatacggcggacgcgtcccagctgctaattcttgtgcacagtgtccattgaatccctcgctcaggttcccttcctcattctcggtaacaagattgacgcctacggtgctgtctcagaggagcagctcagacacgagctcggcctttaccagactaccggcaagggcaagattcctctccgtgatatccgacctattgaagtattcatgtgctccgtcgtcatgcgacagggctatggcgaaggtttccgatggctcagtcaatatgtaggttgtctctggactcaacggattggcaaagctcatgtcgcatattaagatctaaataattgctgagcaattgtaagctaaatgtggaatgggagtgctgggatggagcaagaatgtggcgacaaggcagtcaaaggaggaagtggctgtagatgagggcatagaagttggcgagtttgtcatgaccttttttgaccttttttttttcacgatccagagacatgcagagatataatctaattctacacagcggactaaatcgtaacatacccatgaccttggctaacctttgatttgcgcttttgaaaagtatctcgcgttcagttgtggggaaacaaaccctctcaccggcatccccgaatcctagcaactgatggacctcgtatctcgatacttttgccccgctcgtgatccgcaacattagaaaaagatgtgagacgtaaaaggtacagagagcaggagaagaaaagaaaactgtgaacggtgttgagaaaatctagccattgcgcacaatgtgttccagtccataagcgggataggtgattggccagcgcgagaatcaattccttttttgacaatggcaatgtcgtctagcaagcttgttgaaagaaagggtgaagcccaagtgaccgaggcggtggtgtgccacagataaataaaaaaagggaagcgaataaagacccagaataaccatttccccggggcccaacgcttttcatctcttttgttccttttcatcgtttttctccatctgctccaacaatcgatcccactcccattcctctggactttccggctctggcacgaccaccttgttttcgtcgtacccagcttcttcatatccttcctcatcctggtcgtcttcgttttcttcaaagactttcaggtattcgtgcgttatcgactcgtcgttgctgccgacctctacctcctgtgccattcgtgatccgtccatccctaaaccgaccccttgccgancgttggccgacttttccgaggtattcagccgtaaaggccaattatttacatcttrccgcttattgtccaatcgtgaccggt

SEQ ID NO: 32 - DNA, 2246 bp, Cryptococcus neoformans
gtctttctaaagcctatatcagtatggcaagtgaatgacaactaaaggtaacgcaccgtcgtgggtcttctcgtgattcttgagatgagctttcgttgcaaaagaagcgctgcaaccttcatgagtgcagatgaaaggtttggtaccgggaggcatatgggctacagcgacgtgttctcggagaaggtggtgcttgttgaacgcagcctcacacttgtcacactgtggccggcgtcagcatcggacaatatatagacgctagtgcttcagctcacaggataggcaccgtccttatcgtgaacctcttcatgtcgacgaagttttgatgcagtccagaaagactgtttgcagccttcacgggtacacgggaagggcttgatctttacgttcgaatgggtgcgcgcatgggctttgaggtggtcttctctgaagtatgtccgagggcattgtgaacaggcgaagggtcgctgggtattccgtcagctaattacagagtcgggcacaaacgatacgcacctcatttcgatgggtcatctcatgctcagcaagtcttgatggtttggtgtaagctctatcgcatccttcataggcacatttgtatctcttttccgtccgacttggccagtcatgttttctctcagccatggacttgggttggtgatgagtaggatgagtgagaaagtcctcaaataccataaggtcacccagtgacggtggttttaggacgagcgtcatcctatgcggagatgagccagttataactgaagttgcagagcgaagatgtcgaggatttagaatacgaaaactgttgcctgaagggtcccccctaccgcgaaaaagtggaggtacattaaaatggggtgtgaaataacatgcccgtagtgtttacgcgccagttgaccttacaattcaacaattcatcaacctttaatcattcttcttatatcccgacacgaccgtcctccggatcctgaaacgaccatcaacgaaacccaacgacatgtctgtaagtgctgggatccgaaacacctcgaaaagatcattcttgatcgagataactgacgccgcacagacgtacgacagcgcacctatgagacggccggatatcaaaaagaaactcgttgtggttggcgatggtggtaagttcgagttctctttcgaatttcgatccttcatcggatattataatagctgatagcttatgattaggctgtggcaagacttgtctattaacggtctacgccgagaatcgttttcctgaagaatacgtcccaaccgtttttgagaatctcatgaccaccgttccttcccctaccgacccttccaaaatcattgaactggctctttgggatacagcaggacaggaggactttgacagactgcgaccattaagttataacgacacagatgtgatcctaatagtattcgcctgcaaccatcgaccaagcttgttgaacgtgcaagataaggtaagtctaacaatttgtggtcagatataaagtggtacaggaggctgagctggctggtaaagtggtatccagaaatggcccatttctgcgaaaatgtccccctcatcttagtttgcactaaaaccgatcttcgcgaagaccaacagaccgtctcccttatggctgctcaaggcacaacaccaatcagtgcttcagaaggtgaacgaatagcaaaggagattggagccagacggtatatggagtgctcagcaaaggctgggatgggtgtaggagaggtgttcgacgccgctattagagaaagcatgaagaagggagggttaaaaaagatgaagggcaggaagtgcgtggttctgtagcgattgtatggatgctttcgagggattacgactagacgctaatcgtaggttttgagccgttgtactgttttatgaatttacatgaccattttttgtcgtcactgtgcatgtttttaactatctctgtcgccatggacttgttctctcaatcgcttgcatagccgtacaattgattgaatcacttggagtcccgtctgagccaataattgacggctgaggttgaccaggcttacccatacttgtccttctcgaggaatacttcataggttttgaaaaaaaggcatgctcaacacaaaacgaaatcaacatgccgcttcctgatattttgagcttgactacagctcgtgcttcgcctacagtcgctttaattttgccacgtcgtccaacatctgcgttgmtcttgttgctttgacgtgaatct

SEQ ID NO: 33 - DNA, 2023 bp, Cryptococcus neoformans
aacgatcccggcgtcatggtcccggtaacatctccggaaccgggagcgattgcgcggaagccgtggcaagcagctaatacaggaggagatcgatgagccactctcactcaacgcaaacaaacaacgaaggcggacgccagtgtgacagagccaactaccagttctattgaaatctgcactcatctttcatacagcaccgccgtaatcgtacactactagcttattccttcgctactgcaacaaggaaaggcttgttcaatttcctcaacttcacaaacctctgcgcacgggctgcacatccaccttgggcacaagtaagtaaccttttcctagcttcattttactattaacccacttacggggcctagccaagatgtcatcaaccggttgggagattcgtttctccaattctcgtcaaatcccctacttctacaactcggaacgtagcatctccacttgggaacccccttctgaactcagcgcagagcaaattcagcaattgcctggcgcggccaagtatatgaatgtacagttggctcaacctgcaggtggcaaggaaggtcaggtgagggccagtcatatcctggcaaagcatgctggaagcaggaggcccgcttcatggagaaatgtccgtgtgacttaagaacacttcgcaatgcaaactgatttcggacgcaggataagatcacaatcacttccgacgaggctcaagctattatcgaacagcacatcgcatatcttcaatccctccctccggctgatcttcccaaggaatttgcaaagattgcctcaacagagagcgattgttcaagcgcgaggaagggtggtgatcttggatggtttgggaggggacaaatgcaaaagccctttgaggtaagcggccagcattgacagagtggctatatctaataagcggtctcactaaccttgacgcaggacgcgacgtttaacactcctgtcgggcagctgagcgggattgtcaagacggactctggtatccatgtcatcctgcgtactggataggatagtcgctttgacgaatttagatcgggtgatctatgccaacgaacggctatggaaatcaaagttgggataccgtatgcattatcatatacaagtgaatggtgtaacctgcgtacttggtccgattttagaaaccagacgcagataagtctaactaatgactatatacatgcctcgacacttctcgtacatataatttttgtaacgagccgactattgctgaccatcaactgggtaatcatgtgtattaacgcaacatgaccaagcaacatacctgggtcctcctcatcaaagtttagacttgccaccaggacctatgccccatccttcccacgcagggtgaaccactctcacgtcactccatctgggatctactttcgccttttcctctggtcctgttgttctagtctgaggtatgggctcggaggacgatgtgacatgcgctctcgtttggatagaaggtgtggaaaagctcgaggcagcaatgccctttgtaagtgatggatgattagattgctcagcagaagatgtaatggtgggccgtttgtctttcgaatacatggtggtaaggtggattactattgctgctgtatgcgtgtattttaatattactatacgtacgcactggacaagaatgaatcgaggatgacgcaaataatagctagaaggcatgaccaacaccaaataagccaaaaagccgaaaagatttcgttaatccggccataaagcgcaaaacgccaaagaagttggcttacccgtacctttcccggccgacacaagcgttccgttggccattatccaacaagctcaaatcgagcgacttcaccgccagcgcgacactgatactactgtacagtaatctcgtctcatccacctgcatcttacaacatcaagcccaccatggacgaagccaagcttctttcagatgccttggcaaatgtcaaggttcaaactgtacagctcaagagatgcctcgaccaagacgaaataatggaagctc

SEQ ID NO: 34 - DNA, 2926 bp, Cryptococcus neoformans
cagctcttccttttcccttttcttgggtggtatatcgtggaccgtattcgtcggaggaagataacgagtcctcgtgaactaaaaccggcgttgactgattggtccttctctcgtgtgtaccgctccgactggtaactgcgctgcgtgtaatccgacgagaatgtacatttgcgagcgtctgtcctcgacttacggcctgaggcgaaatagccacgatactatcaccactcccattaccattctcactttcgctttcgctgatctcgatcggttcttgagcagcccttgattgacttcgtgatggagcgccacttgctactaccgaaggggttgttacagtggtcgctggaaccagtaacgctactcttgatgacgaggagcggctagactctctactaccgcttctgcttgcgccattgcttcttccgctgcttacactgccggcccgagagccatcacgaagccttctccttggtgctatagggacatctgcgatagtcggtctgggccttagagaagcatgtggggagggaggggatgctgctggaggcatcagtagatacgtgactaaggttgtcgctgtcaactactcgaaatgaataactggagctttgattaaccattatcaccggttcaatggcaaatgaaataatcccgagcaagggtaggcgggctgcaaaagtcacgcagatttcgttgggatataggcacgcgaaaaacgatttggccggtctttgttccgccaccctcttttcgtcactccttgtgtaacactttcactccatctgctatacctataaaagaccctgccgacttgaaaaagaggcagcgacatcactttttagtacttaagacacagacataggtctatcaaaatgcccaaggtgagttttggatgtcagcggattgggcgaagctaatgggtttctgcagaacaagggaaaggtttgtgtgcttcacttgattattaaaagtaatattggtagatctagagctgaccatggtacttgcctgctcttcttaaatctcatcatatcgctgctgcatctgtgatatatcaatatcaactttcgacatttatccacccacattatcaacacgactcgcttcgattgtcgaaaactcattttctccttggtaaatgaatctcgcagggtggcaaaaacaaccgacgaggaaagaaggaagacggtgagaacaagcgagaattgatcttcaaggaagacggtcagggtgggtcattttccatcattttgctgccagaccagactgtcttctttatccagtgctaaatcaatacttgtagaatacgctcaggttgtcaaaatgcttggtaacggtagattagaagccaagtgtcaggatggcgagtctcgtcttgctcaaatccgaggccaaatgaggaagaaggtacgttttccccatctatctcggctcttcctttttatgctcacttcattaccttcaatataggtttggattgttgtcggcgacatcatcctcctctctctccgagatttccaggacgaccgtgctgatgttatccaccgatacactcctgacgaagctcgtaacctcaaaacctatggagagttgaaggacttccagcttgtggagaaccaggaggctggtggcgaggaggacgaggagggtggtattgaattcgaggaggctgacattgatgacatctgtaagccctttgctctgcacccatgtttgaaaagacagccactgatggcctatgcagagacggttggcgtggttttttgtgtatataaggaatgcatccaactatctagtgtttatcgtgctttctcttttttccatgtcatctggttcataatatcatcgacactgtcatggccgttgtctgcatcgtgcggaattcgaaagaaggggattgggcgaccctctccacttacgtaattgcatccatgacgagcgctagcgtttgtgtctgttctctatttattgcttctttcgttctttcgtccttaattatagataattgtttcttttgctcacattttgccggattcttcaagaccgttatcctgcgtaccatgtcgtctcccttcccaatccctcagctcacctatccgtccccttccaattccacttctaaccctgcaacctttgctccttctccgctatctcaattcgtagcatctgcattggcttcgaccacgctcgctcccggatccaacggtggtggaacaggtaacacacccaatttagggactatgggcatctctcccaactttagctttggcctcacaccgtccaacttgtctcaaggtcctacttccaatattccgttttcccaacttgcacttctcaattcgaccgaggccacaaacgcggctttacctgcagagaacgatggcacaggcttgttgaggggcttggaacaggcggatggggttttgggaaggatggaagagctgttgaaggagatcgataatgttgagaagggtgtgttcggggatggtgagggaatcggtagattggaggggttgtacctcgagtgtacgtcttttctcccacatctcatgaatcatcgtgctaaaattagtttagatacccagctgttattaggcctccttggctcatcccagtcccagctgttcggcgccctcccaatcttgcctgcaaatgagcagttagaaaagaaggaacctacagcgcaagatttggcagcatgggcagaggaaagggcttctctcgagttttcaagaaaagaagcgttacgcgcaggaggcaaggctgttctggacgttctaagagctagtgctgctgcaggagggaaataaagtcagctaaagcgctgaggagaaggatgggtgatcgtagctgaaatcacatgttaggaagctggcgcattgctgtaagtgcctgtttttcactctgatgtccgcggacttct

SEQ ID NO: 35 - DNA, 2786 bp, Cryptococcus neoformans
tagcttgtctggtctgatctaatctaacctgatgatctgacaacattggtctacgagtacaattacaaccagcctggtggccagtctggtggccagtctggtggctttggctccagtggtaacaactcttacgggtcctctggccaaggtggtggcacttacggctccggtggccagtctcacggtagcagcggtttgggttcttccggcaacgactcctatggctcttccggcggcgattcttacggttccggtggtctttccggtggccagcctggcggcttcggtggtaaccagagcgggggtggcttggggtaagtcggttgtaaccagtgaggcgttgacgtactgattgattaccttggcagcggcggtaactctggcggctttgggtaggttatcacccagttatttgatgacctgatctcactaatcatgtagtggaagtggcggtaatgactcctacggctctggcggcaatgctggtggcttcggcggcggtcgtatgtgttcattaaacccgttcacttgtctattgataactgatgacttttcttgataggaggcgatgactcctacggctctggaggcaagcccggtggcttcgccggaggtaacaacgacgccttcggctccggaggcaaccctggtggtctcggtggcggcggcggtgagtcttacataaatttaatccacttagagccttgctgatgtcctaatcagtgcgaggttccgagcagggtggcttcggtggtactggcagaagtggatactgagctgtcctcactcagcgtgtaatcactatgactgggtcatcagggaagatttaataagaagtttatgaaatggaaggaaatacatactggaaacaattgcgaatagcagtctgaaggatgaatgatttggaacctttgtcatacgttctttaaatatgattacggggaacaccagaaatacccattactcgtaagtgtcgatagtatgagcacgtcgtcgtgttatggaggatatggaagagctaaaggtgcagatgtcagcgctggaacgagctaacaatatccaagggatagaggaggatagaatgaggaagcgaaggaagaccagtgcctggccaaagaacagagagcttgaggtgagtcctgactgttggttatgatgaattgtcgcgtaagtcgcgattccactggccacaccgcagctttctctgccgaaatacgccctccctctcatcctctccatctgcctcgaaacacggcaactgggcacctctatcgcgtctatagcagagtcccatggccaattatccctgacgcaagaccgcggtcttgtttgcaacctcactgtccaacatttagcggcgcggaggaataagagatgtatgctggcgtatttggcgaccagggtgggaggaatcaaggagagatggtgggacgctgggggagggttggcatatctgctcagtcccgctgcaagtgccagtgttaatcctgaggcggacgccccagacctacgctcggctctgagtcctcaagaacttgactttctaaggggatataacaaccttctacttgactacaagagcgatttcctagacgtgctcgacttgacggcagggatagagaagccgcctggggaaataatggtcgatgtgcgagttgtaagggacgctggcgaggtgttcttggatagcggagagagggttgattttaggaagggtcaaaggttcaggctggaaagagcgcaggtggaaaggttaatcatacaggggtacttggaggaggtgtagtgcggatatattttgtacatatatgttgtcagatagggtatatactatgttttttctatcttctagcccaatggaccttgtctcatttgggaatagcatcaccattcaaagagttcgcccttcgcctaggttgcactgacttcaacagggctttgatcaggtcgccattctctgctctcagaacttcctcagcgtccttcttgtccagccctgtctgctgagcctaagaacatgatcgcagtcagcttccaagtgcttaaactgacccaaggagacgtaggcttacaatgaattcgacgtcctgggctttgaaaccttcagccttgctcaaatccaaagcttccatcgctttcgcagccttctgcccttcctctttggtgtttcgtctttcgtcaagttcagtcacagcatccctgaggctgtctaatttaggccacgtctttgggtcagctcaaatatatatactctgagtatagtctttcaatgcagtaattactctatacgtacctctgatataagagccgccgtcaaggaactgcaccagttatgttaatctcgctatcaccccggaaaacgaccggcatcggacgtacctcctgtataacttctccctggcgtggacgcgtagtcgatccgctggccatttttataaatttgttgtgtgtggacgagcttcaggttgaatgaatgataaatgaccggccggttctttcagtgacgaaggaaagagaagaagagtgactatgaatatttacgtaatacatccccttaaagctcggcccgctgcgacgagtaatgacgctgcagaagagctcgtctgcggacggacggaacgttcggcttgcagtgttcgttcgctgtagcctgtctccgttatatacgtgcccatcttttgctttcttctgcttttggacctattcaaactccgagaaggaattgtattcatgtcggttcaatcacccctcatcgcggtcccccgcaaaacaactacagacgtgga

SEQ ID NO: 36 - DNA, 2878 bp, Cryptococcus neoformans
gcttctagaccgaggtgatcttatgaactcagcgatagcaggggccgcttcgggagtcaaaccgcaagctgcgagatgcagttcccgaagatgtggagagttaaggttgtgcaggaacctttgcagtccatctgaatctattaacgaattatttgttaagctgatcatctcgacatgagacatgttgagggatagagcgatggattcgacattttccagcaagcgcacaatattgccttggaggtacacttgacgtaacaaaccatcctttttggcgtacgataaaataccatccaaagcctcatcatcgacgcctgtagctgccaagttgacttcatgaagaccccatattcccattcctatctcaggggctgaatgtttggatctcaaagcagaaagacctttgaagaggatcagagcccctgaagagccgagggggttgtgggacacatttagacggtgaatctgacgggtaatttgtggaagaatcctgaaagctacacgccaaaatgtcagcgcacgctcaccaccagtagcagcggctacatcataatatctataatacttaccgccttcttcgcccacgaagccatgatctgggagatagacgaggtctgtatttgagcgcagaacgactgccatagctcgatccgactgatatgccgatagttcgaatgcgttccctggtcgcgcgtcgtcaagtggggtaggatgaacagaaagagacaagaatccaataaatgtaaagcttgaatattgccacaaaccggtccaagcgagctgcaaccgcagaccatgcagcagaccgaacgaagtcacagcggatgtataactgatgacgtcatgagatactgcactgccaacggaacagcatcggtcaatatatcgtattttagttgtcatgcgtgatataattatagtaactttctgtaaatatagcttagtcaaaaagagacggcaataagcagagcacttaagaaacaacaccatactactggccatgtcccttggccggtatattggctggtcgatacttgccttcacttatttagtgttggccatcttgcttcgtcttatctttctccaaccttcaaaaacctcgagagcgtcgtatcgacccaaagatgccaaatgttccttgggcgttttcctggggtctggtgagcattcagatagactttgaaattagatgactaatgagtaattgtttataggcggccatactagtgagatgaaggctttgttgtcgacactggattatgaacgataccagcctcgaacgtacatctactgccatggtgatgatctgtctttgagagccgtctcagacattgaatcgagcaagggaggtttgatatcatccaaggtaagcgctttcgaacaccaacgctcagagcctgagcctagactataactgattgactattaaaagatgtactatctgttaagcctcccacgggctcgtcgtgtaggccaaccactattgtcaacaatggtttcagttttgaaaacactctacattgcagccctaaggctctttctaatccctctactgaaaaacccacgacggccattcgttgatcttttgatcgtcaatggcccaggtacatgtgttgttttggttctagtatcatatattcgtcgggtgcgtgttccgtccgttttaacgatcttacaagacctataactgaagattcgcccacttgatagatactaggtttagaatatactcgtattatctacgtggaatcattcgctagagttaaaagcctgtctttaagtgggaagatgatcagaccgcttgcagatcgttttttggtccagtggcccgatgctagtgacagcgataatgtcatacacaaagggcttttagtgtgattagtataatgcatatacgctataatatccaggtcgtctacaagagatttacaacaacaattatactttactctagactgccgtcagtatctcatctagaatcttgcccacccctctacccatgccttttttcatacctccagaagctgaccctttcatcaaccacatgacttcatcccgaacctgcctctttcggatcctgtggatcatgcaaactttccacacgccctgaacattcaatggcgttgcgtaccagtcctccagctcttcctctcctcgaccacaatccccgcgcaaatcatttatatcaggctcctcccccgccagtacattccatgtatgtactccaactacaccacctcccgttccctgtcggtccttggctgcccgcgctcggccatcttgttcttcttgtagccgtatctcgaatccattgggaagagcaaagtctccaactaagaggcgatgagctctaacatattctgggaaagctctgactgctcgttgggtgatggcagaatggaggctggggtgacatgttagggctgaaaagagattcgatatgtgaactgcaagaggcggatgtatatgggtgtacggaaggagtagagataatgtcgccagatactgagaaacagtttgtcaataacaattctaaaatagactatcttcacctacagactgaggtatgacagcacccagatcaatatcattcggtggcaagcttatctctgaagattggatgcttgtcgcgcacataaagtgatcaatctaggcgatccaatgagcattcaatcactatcatgaagatgaaggaaatgacataccacccaccatggcacatctgcaccattccgtctgatccagattaccatgggattgaaatcacacaacttcaacatctcatccccaagtgtaccgttcacctgaccggcacgaacttctatcctttttttagtaaagtattcgcatagcttcatctgaactgtgctcgcagcgc

SEQ ID NO: 37 - DNA, 2857 bp, Cryptococcus neoformans
cctcattagtcggcggataacggctattttcgcttgccagctgttcttctgaatagattcttccctcctcaatatcccggactctttctttgccggtgtatgaggctcgtttgacttcaccaagagcaccttcatcaaacgtgagcgtcttggctctctctttaccttttctacttgcactaggtgatagtgtctcttcggagtcatttcgcatactcatacccgctttctgcaagtcatttaatctcactgatgatgaggcagctaccataggtggaaagctgggctgtccatatatcacagacccgttatgggggacagttttggtgggagcagaagtagcgatagaagggttggtttcatctgccaggggggcataggacctggacacgggattattaggggagagaacggagggcatagtgtggcagcaggagaaggaagacaattgatgggtgtttggagatggaaaggaggcagtgacgtgcccctcctgtccttgtggtttgcttccgcaatgggctttaagtgggaggggcgagaaagtcgggaccgggtgtggactgaagatgggtgtcttagctggcggctggcggtcgctcgtggcggagtggtaaacggtaatagccaagatgtaatacagtaataaatagccactcatcaattatgcctgctttcctgtacgaccaggtctggaccatggcggcctcctccgatggctgcagtgctgcagcggctgcttcttaattatttattaacttcttcttctgccgccgccgccgcttttcatctcacacgtggcgtttaccacgtggcccccctttgagtgctctattatgtactaaccttcccccgatcccgcttgcgttggcgctgctcgcgctcctcaacaagcatcacgcaagcgtccgcgtttcagcaacattcaagctatacactatacacttacagaatctgtctcttccgctatttcacctctcttctttgcgtaccccagaatatggccaacattaactcagtagacatctctcgtctgaaaaatggtgaagtaaacttaggtgtacggtctactctcaacttcgttcgatttgcgtctgaccgttccctagacatccatcatggccgttcagttcgatggcggtgttgtcatcggtgcggacagtaggacaacaactggttcctatattgtatgtttcattgtgctggtgtgctagtcgtgttagcttacactctctttaggccaatagagtcacagataaactcactcatatccatgatcgtatttactgttgtcgatctgggtcagctgcagacacgcaagctgttgccgatgtcgttcaccagcatgctcaggtttatacctctgtctatgggtcacctcctacagttgccactgctgccgcactgtttgaaaagttatgttatgaaaacaaggatcagctctcggcaggcatcattgttgcaggttgggacaaggaaaatggcggatcagtttacaacatcccactaggaggcggaatgttccaacaaccttgggccattggaggtatgggaaattatctgtttgagacgatgctgctattgaccgaacgaatatcaggttccggctcaacatatgtttatggttattgcgacgctacctatcaagaaggatggtcaaaagaagaaactgtcaagtttgtgaagaatagtaaggcccttctctagtgtttggacatgttgctctgacagtgactgatttaatgcatgattagctctttctcttgcgatggcgcgagacggttcttctggtggttgtattcggatgtgtgtcatcacccaagacaaagtggaacgtcactttatccctggaaatgaattgcctaggttttgggaaggcaaggaggtgttgggcagtatgaatgcaggaagcacggctgtggtggcataaagtgaacggtagaagtattgtatgcatatgatctcacgttgcaaacgtggagaaagctgcgatagatcgatagagcacataactaattcgtctacactgcccgcttcaccaccagcctacattatccacacaaggcgaattcagcatgatgaagaacttcacaacattagattgcttagggtgtacagaatatcagaatattcggctgttgaacaattacatactgccttttgtccttttttgtcctttataataatgatagatagatatcgtggcgatgatcatagcgtatagcgtaagagcttcgtttgatgatagatgattgaaaatagaaactcgtaaaacgtaggtgagttgcaaaatgaagatgtcaccacttctatcaccggagcgcaagtttttccaaaatattttgtgcatttctttttgctgcctatatttatcagttaacacttttgtattcgtcttgtaacacctaaactccactatattgacaaaaagccatggtttctttccagtaagcccattatccattctgccggtcgctttctgacacgctttcaggtgcgacgcttgtgccgataccgtcaagaagcctaaacttgaccagcatcggtcaagatgttttgcctctttcacctgccttggtatgttcgcacatcgttattttttgtatggtactcactttcctttaagactgttcgaagactttcaagaacccttcagaatacaagtgagttagatccttcacaccacacccaattgtttgctaacttctttcagaggccacacttcctgtatctcagaagcggagaagtatcagggcgccctctataagggctctaagaaggtttgtattgcttccttttctctgtggtactgcactgacccctgttcaggagcagagccaaagccagccacagtcac

SEQ ID NO: 38 - DNA, 2944 bp, Cryptococcus neoformans
cccaagccagacaaaaacaggagcctttcaactctggcgattggagtgatctttcctgttccacctcaatggaccccgacgctcagggttctcgaagacgacaatctagtgcttttgagagtaccagatcttcacaatcacccaagcctgccaacggcttcgagcataggttgttacaggcacagaatcagggcccccagagggcaactgcaatatgtggcgtacagtcaccaagacctagctccttggtcgggcgacattcctgcagaatccaatgagaagcaggcattcgcctttacttctagtcaacaaggatttcagcctggccaacagagcccacctacgttttccattgccgcacatacatatccattgacttcacggcatttcctctatcctcagcctcaaccccagttccaactcacgataatgccagaccaacaagtgtccaacgagttttatgttcacgacgctgctcttccattttctccatctgctggtcaatttactttccaggggcaaaacactagcatgcacgctgatgatatgcccacctttgacatcggtagtgcacaacagcaggtcgttcaccctcccatgtctgctcgatgggataagggccacttactaccaccttcaagcgacgtgcctcttgagggtttaccattcgatgacggcctgatgctgggagactttgaggcagcccttgctcatgcggatgacatggttggaggggtgtggtaatttatatgattttctgtttcctcttgttgctagtgatatcacgagtgtcattgctcggagtgtagtgctgcgtttttacttggacgttacgaacataccaataccactttgcatgcattgcatattgcatgtcggagaggagagatgtgtgcgagggatgacccggttatttatcctgaatggatgggcaacgaaggtggaagctgtgtagagctgttcggcggcctttaacaaaagaaaggttgggaatgacgtcatgatatttgcccgctgcctccccatatacagggcccagactcatcatcaacattctccgtccaactacgacatccgcatatccaccactccccccacacgcagacaaataacatcctgcctctcccgagacatcaaacaagtccttctaatgggaaaatcgcaatccaagttatcttctgaagagctggccgagctccagaaaaacacttattgtgagtacgctccgaggccatcagagcaggtgagcagcgctgatcacgtacgcgcgtagtcgacaagaaggtgagagatatttgcatagactggcgtacagtttcctgacgagaatgacctgtcggatcccgcgtattaacaggaactccaacaatgggtgggtgaattaagggatgcgagtcctgagggctgactgtgcccgggaacagtacaaaggcttcctcaaggactgtcctagtggtcaactcaacaaggaaggtgggcatgttcaattttgatttgatttttgcgtctggctgaaaggatgcacagagtttaagaaaatctaccgacaattctttcctttcggtgatcctagtcagttcgcagattacgtcttcaatgtgggtaaccagaacgcgtcgccattagtaaaactgacagttatttacgtgtaggtgtttgacgaagacaaatctggcacaatagaattcaaggtgcgtttgtaccgaggaattacgtggaagatgacgaacagctcatgccattgcaggagttcatttgcgccctttcggtcacctctcgaggtcgtcttgacgaaaaactcaaatgggcgttccaactgtatgacattaaccaagatggttacatcacctacgacgagatgcttcagatcgtacgatctatttataaaatgactggacaaatggtccagttgccagaggatgaagatacccccgaaaaggttagaacttgaaacacttgcaaggaccatcattacagtactgacatgttttgtattcaagcgcgtcgacaagatctttaggaacatggatctgaataaggaccatcgactgacatatgacgagttcaaggagggctccaagcaggatcctaccatcgtacaggtgcgcgggtggatatcatggacgttaaaggttacggcagctgacgtgcatttggataggctttgtcactgtacgatgggttggtgtagaagaggctgcagagaacacaagttcggtttgaaatattgaattttaggatatgagatagactggatcgggtcttgcctgacctgcatacacttatttattatccatatgtatgtgtactaccacagcttctcgagctgaagttgagcaaaggaaaggtgcattcgacttatttataagataaggccatcgtcgatggcatgcaaattatgatacagtctactttgaaaacaatgatttctcttttgatctacgctatattcttttcgacgcctttgcttcttctgcttttcttatcttacaattcttctccaagtacccttttcaaccattcatcactttcctctactaaagcttttccccgttcggaagctctcacccttttgacaaccggatgcctccaaacatcaccaagactccatcgtcggtcggggttgcatcgcatcatacccttgatgacagtcaaaatgtcatcagacaggactggcatgttgggatcgtcaggaggaggattacgattaggagatgatgcggaatgtggacggggaatgtaaattccattaagatcagagaaatcatcattgcgaagttgcacccaagcgtccccgtctgaaaaaaaaaaattaattagcaacatgtcaagagacatccaataacagtcaccacttactgctaggtagcacaacattgagagccgcttccaacaacaaaatacccaagctgaacacatctgcgcccttccctatcatctcagc

SEQ ID NO: 39 - DNA, 2242 bp, Cryptococcus neoformans
ttactggagggggagcgcggacaggggggtgggtggccgtggcatacggggactgttatgctgcaccacgaaggtagtcgcgtgcggccatacataccgacccatttaaagacgcgacgcgtgccctactgccacgccggataacgccgtaagcgcagccacgtggcgtcgttctacaccaggccgcgcgagcgtatcctcaagtggcccagtccaccgcacatacatacatatactcacatacctatcatcttcctgcccaaccatctccatatcaattatctaccatggtatgtccttccgcgctgtaatcagcaacgctcaccacccgcagtctgtgatggagctcaacggcggctcagtcgtcgccatgatcggcaaagattgtgttgctattgcgtccgacttacggctaggaaatcagcaagtcggtatcgctgccaactttgacaaggtcttccccatcaacgataaactctactgtggactgccggggcttgctacagacgtatacaccttgtaggtgctatcaagtaaccagtgatcaggacaaatgcttaaacctggaacagacgagaacatttgcgattccgggtgaacatgtatcgaatgaaggaagagcgcgagatcacaccaaaaacatttacccaccttctttcaagcacactatatgagaagaggtgagtgcatccctgactgacattcttaacacatcaaatcctgacatggtgatcataaggtttgggcctttcttcctagaacctgttgtcgctggtctccccactcccacctctcttgaacctcatcctagaccttacatctccacaatggacacgtacgttcttgaacactttacaaaagtcgatataacttatatggattgatagcattggttgcataactacaccgaaggacttcgctgttgctggcacggctgccgataagttgtacggtatcgctgaaggtctttgggaacccgaccttgtatgttgctcttatacctttggttgcattggacactcctgatgaaaacgcttcaataggaaccagaagatttgtttgagacaatctcacagactcttcttagtgcggtggatcgagatgcgttgagtggttggggtgctgtcgtcaacatcatgtatggtcaggactttatatcagatgtacttttcgctgatttcgctatgctgtagaacacatgacaaagtaattactcggacactcagagcgagaatggactgaggaagcttggtgaagaggtacaagtacagtaatagactgagagacgcaaattatgacatgtatatcttacttgtatggttgtgccgatgcacttgcaggtttaggactctggtggatggagacctgcgatgatatagtcgaatatgtggtccttgtatatatgtcgtacagtgtcggtcgcttgaactaacaagaaatgccgggagcggataaagactggtgacgcaatgaattatgcggcggaaatggagaagaaagaaaagcggaaaaggccgctgcgaggattataatttgaaagatggtttttgttattgtaaggcggactttgttcatattttcttttttcctgtcactcaaaaaagttgggtagtcaacgtagataccgggcaaatctctcggtgtcacagtaactcatccacaacaaacgatgcccccccagcccgcccccgccaggcagaacggcgtcccccaacagcccatcccccgccctccggttccccagcaaggcatcccagcccacttccccgtccccaaccaacccccagctcagtatcccatcatggcctatcctccccaatcaggattctacgtaagcttcacactacattccacattcgtatcctgactataaccccttaccctttttgcaggccggatacaacccttatgagcaacagcagaactttgggatgcccccccaatgggctccccagcaccaccctcaaaaccagtttccgggcggctacagtgctcggcctgtctccccgccctctggaacagctcctttccagcccgcgcagcaatccttcatccacaactctcccttccccggcggcagtgggcctaacggtcctcagacaccccttcggccttccggtcctgccttgaacggtcaccagcaaacttcttcaaacgcatctcaaacatctgctccttccacccccaacttctctctctctggtgccagtgctacttttactcctcgacgatctgccgcaat

SEQ ID NO: 40 - DNA, 2912 bp, Cryptococcus neoformans
tagggtcggttgtcgttgggtctgacgaaaagaatgcgtccttacgagcgatctcagcagcagtctcttcctccgattctgaatcagagtcgacgacctcgttttcaccttcctcatcgtaatcatcttcctcttcttcttcctcttcatcactctcgtcttcgcgtttaagactctcgatttcgttctcatcctcttcgtcaccatccccttcgctcatgtcaacgtccatttcgtcctcttcactgtcgccagatttcgcggcatctgaatcatcattggaatccccttcctcctcttcatcttcctctaggtcatcctccgaggtagcgtcttcatctcgttttctctttcgatccttgaacgctctaatgggcttgccacgttttcgctcaataatgtcgtcgacattgataggctaggatatagatatcatcagttgagtctatatcatgttgccgaatactacgtacctcattacccttttttacgccttgaacctcgtctcctccccaaaggtcaagtccctccgatctgcctcctccaagatcgaattgaaagtcggggtccaactcgtcgtccttgatttttggtaaggcgcttggctcaccatagttcgatacttcgtcatcagagtcaatggtagtgataaaatcgtccgccatggtgtattcttttttggagttagaagaggaactgtgtattatcatacctgacaattatgatgttagacgcccgttgctcttctttatttcttcctcttccaacttttttacgacggcgaaggccgaattaaatttgtccgcctcaatcgtccctcctccaccaccaccataattgacggcccacgccgctgcaaacggggaagaagaaagaccacgaaggatgcatatgtgatgcattcctccttagcctcacactgtaagaactagaacatccaccaagaccaccagtcgcttgaccttcaatcaaaaacctaagagaccagagtatcaacctcatgccaactcttattctaccgggggaaacagtccctatcccatcgacatcgaaagccgtcgtactaggccccggcatctcccaatcgactccaaccttacaagcttcctctagtaccgcgtccggatcctcatcagctcagggatatatcgcaacgagactggggatgctgcattcgggaaaaggaaaggaacggagtcagaaattgtggatagaaggaaactcgaagagggtcagttgttgccaatgcaaatgagatagggccgtaacttaaattgacttgtagtatatacctgcgcaaaaagatatagtcttggggataatcattgctagacatgccgacggatatcgtgtagatctgggctcttcgcagatggcccaactcgacgctttggcgtttgagggtgccacaaagaggagtaaaccaaacctcaaggtgggctggttccaattcatgtttgactagacgaaaactgatcgacttacttgatcaataggttggtacattagtgtttgcgcgtgtgatgtccgctagtcgagatatggaacctgaacttgaatgttttgatcccaatactggcaagtcggatggttttggtgagttgaaagggggagtgatggtcaatgcaaccctccagctgtgtagacggtaaatatcttcctactcttgcgtctgttgttcatactaatctgcagtggtagtcttcttgatagaaaccacattgtcttgcccactatcgcttctatttttccttttgagattgctattggtcttaacggtcgagtgtggatgaaggcagagacggtgggcgagacgttggcaatgaagcgtttgatcgaaagcgtggatgatcacatcatccccgtggaagaaaaggcaatcaaggagaaattgcgagagtacctgtcctgaagcttatattactatgggtgaggatgcatggattttcagccctaagtgaaattcgacacacgcagagctttcagtgtcgtctgccatttcggcatctagctccctaatatattagtaccataaagcataattaaataagtaatgcgcgtaatagctgacctattacacaactattaattatgtagcaatttatatccatgatgcacacacatcctcgacagttattattcgcggagggggggtacatacgtaatacgtcaccgtctcgccgcctccacctgcgtggctgaactgccagcaacgaaagagattggatttacggatgtgctactcaattcattttctgttttcatccttcatcctctgctcgacgtgtatggttctatagataatcatctcatactatgtggtggccattccaatggctctttatttatgtcttaggcggcttgacgttcgttcctttggtcgtcgtcattatcgttggtacgtcatgctttcaagcatcagctagtcactaacattccctcaagtgtacgctatcaagtatggctcatcccctataagggatgatgatccttttaagcttcgtaaaaaccaattgcaaagtcagacggagaaagaggagcaactgcagaagcgtcattcgaaagagagggcgactacttccgagacgcattctttatcaggatggctgacgattagacgtcagtttcactccaatagtacaggcggcgacggaggcatttcttcatcaaacaagggaggttcctcgatggcaactactggatcaattgcgcctccactaccagaagtactgactgaggacgaaaatccggcgaaacggtcagcagagctgaaagacattgatcagtcgattaacactgcacttggggattctaatgccccaagcatgaatccagcggcaaagtcaacatattcctctcgtatcgctcaaacatatcgcagcattgttccccgacagaataaactacctgca

SEQ ID NO: 41 - DNA, 2829 bp, Cryptococcus neoformans
ggctaccctcacgtccaaaggcggtgcattcgctgccccattctgctttcctgacgacaagtactctgaaggcctaaacgccctcggtgtccgcgagctcgccctgattgaagcttatagagatctaggccgacccgagttggctgatctcgttcgaacaggtcgaaaataccaccgcctattcgacgtcctcttccgcgaatgcgtaaccctcacaacgctcaacgctctccgtcgagcgttccttgggctgcctgatgggaaacaagggttaccacagactttgaaagagtggatacaggttgcgaagcagaattatagcacggatgagcatcttgagacgatgctcgcgaggagcgaagagtttgtgaagaacagcaatcagtccgcgatgtacagtgagcattggggcttgaagtagatgggatgaggatcgcaggactggaaaggggggggagttcagtggtgtgacaacgataatgtttatgggctaggaaacttctcacgacggagttgagtaaccagcggtcggaggttgaaggagatagtttgttccttcacatataaatcttttcatgatccgcatgacttttaacgtatatagtcttattgtcacatatcacatattagagcgtggtctacgctcttgcgacgtattatatgaatctttcactttacgggctacgcgtgccaagaatcggttccaaaaaaaagacaatgataataggacaaggaagtacgattagtactgtagatgaatggatggaagtagtatgtagcggcgttcgccgctttggttcgaaaaagttcatccttcctgctgctctacatatctgctatgtccaacaagacacttgctagatttgtacttttcttttggatcatcttccgcactctattagacaaacaacgcataagcctgtagtacatctcaataattgatcactccttctatcaacactatcgcttaagacaaaacgccaaattaatctgcttgaatatgaccacccaccacccccgcgcacttcccatcgtccttataaccggcaccccaggtaccggcaagactttgcactcccaactcttagtatctgagctctcggaggccgattcgcctatacccatgaaacacctcaacattggagatatcgtcaaggaacacggatttcatgaaggatgggatgaggaatggaagtgctggattgttgacgaagagagattgttagattggatggaggaagttgtgaatccaagagatggaccggctgagactggtatgttcaaagtttatttagtgttatacccagggtgcgttttgttaataaacgaacatggtaatcttacagggtttgttattgatcaccatgatccctcgcttttccccgagcgatggattgacctcgcggtcgttctcacttgcgacaacggtatcctgcatgaccgcctgaccgcacggtgcgtacacgtctcatttatgcttcattgaatatcgctgaaatctcgctatgaatatacagtaactaccctgccaacaagatttccgaaaatattaccgcggagatcatgatgacttgtctcaatgaaactcgtgaatcctatgctgaggagatcgttgttcaacttcagagtgagggtaaagatgatggagaagtggaagaaaatgtcaggaggatagcgcaatgggcggagaactggagacaaaatcagcaggaagaggaatcatagacatgtatgggacatcgataagattgatggacgctcggattgtagatggtaccgattgcttgtccgtgcttcttgtagaatatattatgtgcattgattcgtaataaagaggtctgatcccacggatcctcctacatcccactcctgtaacaagacaccgcttatccgtagttgctgcaatggtaatttagaactttctctcgcaacaagcagaacatgtaaaaactcacagcctgaaaacgtcgttgaagacgaagtagctgcccccttcgggtatcaactaattgagtaattttgtcagtagagtgcacatttcgtaccacttgctacaaaaactttgcattcctttccacggacccccagccaataatcttccgagcttaacatcagaggaatggaactcacatggaagacctgagtgaattggagagggttctggccgtcgtcaacaagcaattgtccggtgacgagcacgataagagaggcgacctggggagaagatggttgggcatcgatggtaactaccttgtgttggactttttggaagggaaggctctgcgagatgaataaattggcaaaagttcgaaaacgcgttgtttgataagtaatctagaaaacatagagaacattaaacagttgcttacgacgagcttctctgtgatcgcggcagagccttgtacttgagtagactcccaggtcatcatagatgtgtccctctgggatttaaaagtcagtgttcagagcgaaaagttgctacaaggagagccaacacacgtaaagagacgcaagaccattacggtcggagtcgaactgctggtagtagaactctgtgcatgtcagctctgtaaggcaccagtacaacttccatgtactcacgagtgaactgctgggcaatggaggtggggtcagacattgtggcggctggagaaaaaagtcgagaaggacgatcgtaaacaacaacagaaagcactggacctgaactgagggcggagaggagaaagcacaagggcatccgccgctggatgtgccactctcggcgttactgatttggtggagacgcacgttgcggactgtcccgatccaacgaactgaatggtttttccg

SEQ ID NO: 42 - DNA, 2737 bp, Cryptococcus neoformans
ggtgggatagaagagaagaataatagtcgatgaagttcgggaagtgtggtggttcaaggcggtgaggtggataagcgataagagagtcacgaagagcagcaagtagtgggcggcggaaagaagatttacagagatgtttttgaatgtaaggcataatgaaactagggagaagacggcagaagctgcgaggaagccctaaaaaagaatgagccatgataacgcacagacatggaagccaacgtaccaccttggtggagcatattctctcacttctcctggacctcgtaatccatgcaagaccaccgttcagtccgcctttcttgagttgtcttgtgattctcaagatctgggaaagtgcgagcaaggtgaagaaggcgagaggggcgggcagtaaaacggcgtgctcgaagcactgggtaaagtcgagatccctatgggacgagacaatttttggaggaaaggtacagtcatacgggcgggtgtgcttcgaggcgaaggcctcgaaggctgcttgggcagtcatctagaagttggcgaagagattaaaaaaagtgactgtaagggcacgctccgtcaaggtcgagcgacagccaaagtatcttcccgactggccgatctgtcaatagcaaactaaagagcgtactatgtaattgaaagtggcgaggcgtcttttccaatgattgctatccacgttagctaaagctacaggaaagtgacagggatgtggatgagcgagggaaaaagttatcgaagatgataaaattgaagaattgcctgttcatccgtcatccattgctgcgtcgcgacgattattagatttatttattatgcgaccttcggtcaccggtgagcgactgcgcccacagtgccatttcccaaataaaaaccccccggaacctgaattattggtaagcaaaaattaattaataaacattacgtaagtgacaaatcgcatcggtgatcgccgaaatctggcgattatgcgcgcttcacctcgacgatgaccatcgcacgaccaccgatcgaacattccttcccttcggcttttataacctgtcttatcattccattatcctcgttactcacctccagaacaaatcgcaaaatgcctcgcgaagctccgatggcccccgtttcccgatcaaaccgccctagtatcgtaggccctgacgagcctgaagctccgtaccccctcaagcttgaagggaccgttaccaaaggttttggtagaggtgcgaggtatctggggatccccacaggtatgacttgcttcccatggtgtgcctatggtttgctgacgaatacctgactgctccagccaatcttccagacgagtctttgggtccactcaacgatcttggtcttacaggtatctactacggcttcgcccgtgttcatccctccttatccacccctctcccatccgcccttcctacccccgtcgtctccaaaccctctacacctggtcctgagggcaagaaagtcgagagcgaagctcaattggaggcgttacctaccatcaccgcaccttaccctcccgaacaccacgcccagagatggagtaaggaagatgagaaagtttggccgatggtgatgagtgttgggtggaatccttactttaaaaatgaaaaaattaccgctgtaagtcgtgccgcatcctttattaaataccaaatgcttacgctggagagtaggaagtgcatattatgcaccccttcaaagctgatttctatggacaccacatgagtatcgttatccttggatatatcaggcccgaacttgactacgtctctaaaggttagctcaccccaaccatcctctctgctttttatttcccctgcggacgatctttcagattagaggctgactttattaccctctccacccattctcaacttccatctcaccacaccctcgacttttgactcattcccatccatttttttcccattttcacaatgactaaccaaccgcaccgaaccaccaacccaaaaacaatgatgcagaggccctcatagatgatataaaaacagacgttaaagtagcgcttaactcacttgccaggcccaagtacgccgatttcgcccatgacgagtttttgttcaaacaatctctgttcacagccgggcagtcacagaacaatctgggagtttaaatccttgttgtaggaagcgccatcgagcagaggggtagagtacgttcgcatattctgaaggggggagggacttgccggagggagagtagtcgagaattttcacgttgtacgagtacagataacccataaaccatgagccatgatgctagataaatagacccagaagagtacaaatttatggacatttttttgcatatctgcactccatctccttttccccatctgaataaatcactacggaaagtcatgagatatcatgcagttcataaaaattacgttatatagaagcggaaattgccagcattcagcatcacctatgtctaacacatgtggcctgcgagactatttggggttactggtacgtactaatccaaaaatccgagagcggcactttgtccgtttttgcgtggctgcgagaaaaggtttatgcgttactttatatatgaaggccggaactgcttctcttctgcgtggcgggtcgtgcgtacgaagatttgaaggtgattatttggtacaacaatgatggtctacttcacagattattctcttttcttcctcccactctaccctctttcctccacc

SEQ ID NO: 43 - DNA, 2988 bp, Cryptococcus neoformans
gacatcctgaggactgtgcaactcacccataccaccaccatgccaacagagagcagtgcgtctctcaaagtcacgccatttttatcaacaagttgaagggtcttccatccagtgataccggtccatgcagcagcttctgcaagagaaagtgccgccaggacagattctttccatgctctaggccgacgagcttgttcgtctgctttttgcgcagccgtagctggttcaggaggtacgagggagcgaagggtgacaaagtcggaggaaacgagagcaagtcggttgccgagttgcttaaaaggcggaatcgagaagagcaaggagagaagcagcacgatgagagaagggacagttcgaatggtggatataagagaaggagaagggaggctctgtatctcatatcagccaaggaatgtgtactgaactgtaggattgacatacgatatttgagacgtccatgatgctccagcgtcactgtactactctagtatggacgaaatagcaatgcaccaacgcttcggggcactcttaatctgatgtagtcaacccgctcgtccttctaggtgaagacggagaagacttgatataaacgataggggtattagacgatattcactgctccccaaagttctacgattgtttcttgtagaagaacaacaaatgagccaaaaaatcaacgaaagcagacaacgaaacgagcagatccgtgttgatgaattcgcacacccatcggcatccgaaaattagccccggtgccccagcaaaaggcacccgaatcgccttccatggtttttggcgcgcctatttgttgatccctttcagctgctaatcgcaggcctatttcggccgcaaaatgttatcaatcgctgtcccctgcgtcctccgcaaacgagcgaattctatccacctctaaagaaatcccaaaaaatcggctcttaccacattttcccgcctagcacatctatctacccaccaccacaaaaagcagagtccatcgaaaatgtccaatgaagcgaaccgagaattagctagattatggcgtgtttcccgaaccgtccacgagatggttagagatcgagtgagtcttggaactctgtgctctgactttggctgggtagagagagctagtaatgtgatttactaacagggaataatggttaggggtacttgcttgccgattatgagatcaacgtttcgttcgaagagttcaaggacaggcatggtgcgactggatctgtcgagtgagtgtgcccatcctcatgaacctgccatcttgccaggagggctgtcgccatagatggatgaaatgtccgcaagctgacaaatcttcaagccgttccaacatgagcttcgatgccattcacgagaacgacaacaccgacaaaatctttgtgtacttttgcgcggacaagaatgtcagcaaggcttctatgaagacgtatgcatctcttcgcctcggagaggtgacgcatggactgacggctatgcgttaatttagttttattggttctatggacaagatgggtgctaggcgaggaatcatcatctggagtgaaaagatgtcaccggcggccaaaaaggtgcgttgttggccccatcttcgtcttttaaagcgcacatcagctgacgggctgcggtcctcaaaacagacattacaagaaatgcagtccgagtatcacctcgaagatttcccagaatccgaccttctcgtcaacatcaccaaacacttcctcgtccccaagcacaccgtcatgaagcctgaagaaaagtctgctctcatcaagcgatagtgcgtcaagtcctttcaccccttcacccgctcccagtaatcatctgctgatgtagtactattttagccggttgaaggagactcagttaccacgtatcatgatcaccgatcccgtggccaaatactacggcttgaagagaggacaggttatgaagattgagcgagcgagtgagactgctggacggtcagtcatttttagtgcctctcctagagcgtttgtgcgctgaccccgaatcaggtacattacttaccgtatttgcatgtaaagaggttttggtagatgacagtaaagtagtttcgggatatggatttgttttcatctattattgcatgatatgtataacgtttattttgacaagcggggcaattgtcttgcaactgtaccgcgtctagctgcttgatccggctctagtgaacatgaaagggagcaagcattgaaagatccatatgcaagacaaacatctatctgtaaacacacagagctctatatatataacggaacgaaaatgaccccaggcatccaaaaaagttgtaaatctttaaaaacaaaactcatggcacattccttcttctatgagtatgatgcccacctatccttctaagcatccagagcaacagtagccgtagcagattgtgtctctatagcttcagcgatagacgcctcctctcttttaaccacaccttccgcagggtcactattcttatccgtcgattgtgctacagcagtctctaaaattgctgcagactttgttttgggggtaggaactcgacgaatggccttgtcatcacgttgcttcctcatccatgcaccctgtagaggaaaagacaaggtcaatcagctgctgcttgaagcgaatgtatgatatgaaaaaaactacacggtactcacatcctttggcctcctcttcctcgcccaagcttcttccagctctctctgctccgccattactttctcaaggtgcatcttgtcattcgcaaggtcaaacacgggtccaccaaacttgaaaccaccactttgtccggcagccacagtgggcgcggttgacagatctgcagaatcgacgggcaggggttcctggtagcctatgcctgcaagagcggaaaagaatactattgtgcagctgtcataccgattgtcttagcttgggggcctgggataagaaaaaaggtgcgtgccaaaggacttacgagaaaaagat

SEQ ID NO: 44 - DNA, 2984 bp, Cryptococcus neoformans
ctcttcaagtgaggcgttggggaacagatgatagtttttttcaaggtatgtctttgccgattgagagcgggcaccgatggagtgggcatagtattcaaaagcggtgccggctggggagaattcaaagaggtgagggccggtttcctgttatgacatgacatgtgtgagttagctcggcgttcgaaaagaaaagaaaaaatagaaaggaaatcagaaggcgagatgaagggttcaacctacgtcctttccgataacaaggaatccaactccatacggtcttcgcccatactcttgagtgtttgtttgagcgcggtcggcgatactttggacgagacgagcgacaggcgtggcgcgaccgtatgtcatcctagattgcatagccttttgtcgcatataattgctatattacaggcagttagcaaccctgataatttaaaagagagcatgtcgtcttctaagaagaaaaaatgttaaagacatacctcaagacacgagcatcgctggtcaaaccagcaatggcgacaccaacgtgatcgtcaatcctgatgagcttcttctgatatgtcgcaagctcgccagttgatcgctacatcattgctccttgtaagcgttcccttcattgtagctgccacgaccccacgagagagcaacacaccttgagagtaagcaagacggcgtgggtgttggacctgaggccgatggctgctgaaccctgtttgacggcttcgagagcgtactctacttgaaaaagctttccctggggggagaaggtagtgttatccgagtcgtacgagtttctgaacatggtggggcaagcagaagtgacgagtgcagaagtaagaagcagtagaaagcgaagatgacacctgggcggagaccgcgcgtcgatggtgagatggaaatattacgtaaactgacaggtggaggtcttgaagatttctgatgattgggcggttattttctgacttttcgagttgtctctatacaaacacatcctacaatgaggcccttaacagaggaagagacaaaggctgtgttcgaaaagctcgcaaactacatcggaaagaacctcgttcacctcatcgacagggatgaggatgacgagtactgcttccgtctccacaaagacaggtatgttctttctagctggactcctgttgcctggaaaggactaacatgaaagaatggccgtagagtgtactatctcccccttcccatgctccacttggccacctctgtcgcccgacctaatctcgtttctctcggtacatgtttcggtaaattctcaaaaactggcaaattcaagcttggtataatgtgtttggactatctcgccaagtacgcaaagtacaaggtgcgtctctatttccatctaccatctctattccaatccctctttcccttatctattatccctcgtccagcttcccttgtctctcgatacggcttgagtcccgggctggtggggtcaggatttggtgtagagtattgagtgttactggaactggaactgacgaaaagacctgtgtgattctggtttaaccctttaggtctggattaagccttctggagaacttcctttcctctacggtaaccacgtcgccaaagcgcatttgggaaggataacggaggatacacccgaacatcagggtgtggtggtgtacaacatgtcggatgtgcctttagtgcgttcccaattttaattcatatccccctccctcttccccccttcctcgtctgaatatggaattgacggggtctgtgctaaccaaattttccaattattcggaaaacagggattcggagtaacagcccgctcaacactcgatacacgtaaactcgatccgacgggtattatcgtcttccaccaagcggacgttggagagttcttgcgtgatgaggataccatgttctaagctctttcaccaggttaggaatagcagtggaagtcgggagggtttggaggaatagacggaataggtgaagaggcgaggctccgaaaagagaggaaagaaaggggggaatgaaccgaaagatgagggatgaggttctgggatagaaagactgtttccgggggacgattagctcgataccagttgccaaaccaagatgatacgtggagctcagagctataagattgagagattagatttgagtgggagacattccgagggtctgagggttcagaaaagaatgtttgactttgggcatcatctccattttttttatttcgtgtaatgagtgttaatgtattctacttctaaaaatccataataaaatgtacacgcacccattcacatccagcagacactgaaggaaacagaaataatcgaagataggaaatcataatacatgaatattcccaaaaatacgagacgtgagaatatctaggatgaatgggtgactaatgcgatagataatgcgataacatggaatgctgggtataaatttgaatgcctctaccaccactatcaccaaccactattcgaacaacgatcaacgtagtggtaaacatcctcatttctatagttattcttcctggtcaagggatcagtaaacaaatgtaggacgatggaatcttggaactggaacttacttgattcagaaaggaatgagtatgcagtaacccttccttcccccatgccgttttcgttggtccgttccatctctttcacgttttgcgtcctgcattccttccatttgattgactgactaatggagcgacttttctgaactgatcatacaacaattaagttcttacagaaacttctcttttcgcctactgtgagaatcatatcagcaccgatgtaaatgatccgcaatggtcggagaaacttacctacattaataagaaatcataaaacccaaacaccaagatctcatcccatcttttcctaacccttcttgaatctcactgtctaatccttgtacacctcccccttcgtatcattcattctcgcaccagctctcttcttcctatgaaa

SEQ ID NO: 45 - DNA, 3202 bp, Cryptococcus neoformans
tgtagtctttttccccatcccgaactgaatcacattctccaccgccgtctaaaaatcattcttgatggtgcctgcccatattcatgtatagtttttaccgaactccgatggtaatacaattttcttatgttgggtgtccgacatctttgagacctcaatggccctgatgattcgaatgcgactcatcgtcatgggtcctggagcacaacaaggatatatttttcatctgggatcggtatcagcataaatcaagacttggttgcagagaaaaaaataaaatagaattaaaattaaaacaaaataaacccgtggtaaggtgctgtgaagaggctgctgaagctcaggcgtacccggtgtgatgatcaactcatgtttcgtagttcgtatcctcatgaacctcaactcgtcctatcgaatcattagcaaaaatcatctttgcgatgctgagttgtgaaagagacaagatgtaagcagaatgcctacattctctgcgtcattacatgccgtcaaagcgtccgccacacccttcacgatactctcaacagcggcagcatatctctttccaccttcgccgtcgaaaatgtgtccagtggtcttaatgatagcattatcggtgcgggagacaattatagtacctataacactcgggtgagatgtgagctgctccatgtttgggtttttagcgtatggggtatagaacaaggtataggatgacgaacaaacgaacgaagctggagttaaacatcgagccaaacaacttttaactattttattatttattcatcatcagtggtacggcggttgaggccgatcggggaaaacgggattaccgaagtgtggcactttttacacctcccattatttctgcgaacccttcgaaaccaatattgctatacctatcacaaaaaacaaaaatacagccttcgtatccaaaatgagcgtgcgtagactcgtataacgtttcagcactacggaaatgcaatgacatactgacccccacatgcagctttcacgaactttcctccgtcaactccggcccgcctcttcttctcgagtcgtcctccgatccttctccagctcccgatccactttctccgagacccctgctggcgacgccccagttaacccaaagattgcccccatagttgacagcatctcttctctgagcttattggaggtttcagaacttgttactgcccttaaggtgcgcccatttccttctcgaatcgcccattttggccgttagtctcatcgcattaccatagacgaaactcaacattactgaaatttccctccctgctgcctcttcccccgcctccgctgctgcttcctcgacatcgtccgaagcccctgttgaagagaagcccaaggagaagacaattttcaccgtcaagctcgagaaattcgatgcggccgctaaggcgaagatcatcagggaggtcaaggctctcatgcctaatatgaacttggttgaggtgagttagaggctacgagcccaaacgaacaatactggagagcgaatgaagaggaaatgagagtgagcggagtgtatcggagaaaatgacaaccagggacagctaaggagagtagaagagaaagaatgagtgggagtgtaacaggaagaggcagaataagagaccaaaagaagagtgccggcgaaaagccatgggatgaaggagcgaatgaggcaaggtcgtatctaacgcgtcgaaagccgtcaattcggcacgttgagacgctgtgggcatatattgcccacggtccttctcttgtgtttacctcacccccctgcgtctttctccttcatgttaatccacggatgtggaatacttcgagagagcgcatgcttgcatttttaggatcggtggtcttgcgagagatccacatcttcttgttctctttctttccctgccttctgtcatatgttggtccgtcgctaaccattatctcttttttctctctacacgcggcgacattcgactactacacggctcgtatatcattcacttcttatcgtactcaacgccccgctcttgatccataacaaccctccgcatcctacttaaccgctgttaccgaaaacaggctaagaagttcgtcgaatccgttccccaaacccttaaagaaaacattcccaaagaagacgccgaaaagcttcaaaagactctgcaagatttgggtgccaccgtctctctgatctaatttccttcatctgccaatatcgacaaaccattgacatgttaaaatggctggttaaaaaggtgcaaagggagggacggtataaaggcgtttatgcatggtatttgacttgaattgggatttaggccaggatttattgggttgctgggaagaatggatgtgataaccgcaggaaggattcggatggagaaacgacgataggcgaaaaggcaagaaaatcgataaagacaagaaagcgatatacaggactgattcactagaagaccaatacataagacgtggatcctacgactgaattcaacaattcaggcttggaatagaaatctcaataaggacattatttgagtaggacaggaaagagagacagaaaagaaagcggcactgagcgtgaggacacattgaaaatcgatggatggaagcgacattgaggcgcaggcaatgaccaagaaacacaacgacgacaatgaaggcgaagatcaagtttaagatatgcgaactaaatcgcaaaattgaaactaaattagatccataccatggggctgaagcattgataataagcgagggcaagcgacggccagaacttcagaagtcgatatttggcattcattcggctgggctcagaggatcaggagaaggaagcatgtaccatgggtttgtgtcttgagtatgtaaatcagtcgccacttgtggatggtaaagagaaagaaaaaatgttcccaaagtaagcttcgaaagctgcctggtgaatgaatgtatacttatttcaactcccagtcgggaatattgacgtacagctcttatcagaagtcgatctgaagtttgaaactcgaaatctcgaatcgcgagtcaaagttagagccaattgggaaattgctgagtcagtactgttagggaaagattgagaccttctatgttgtcacgagcctgcacatagtagaagagataagagatcataggagggagttatgtaaaagagaaaggcaagattgtttcagataagaag

SEQ ID NO: 46 - DNA, 2672 bp, Cryptococcus neoformans
ggcaagaagggtcgtcgggatttggacaaacttgacgcctcgcatactatccaagccaagaatcagcgcaactcgtcaccatccaaaacaaggaacccacaaagtagcagcaacaaatccagtaaggtcgccaatgacaccaccaccgaatgcaaggatcacagtatctctggtgcacttgttatcaagcatccaatcctcgatttcgcccttgacttttcggctctttgcgccctctccgggagcgacttcatagacgaggaatctcgccttgttgtcggcctcggatgcagcctcttcaaatgaggctttgaagtcattgagatagattgcggagagatttgtatcggtgataaggacataggtggaggaggggagagtggttgtgatggttttgaagatgtagggaaggagatggaatccaacgtggatggactcattccccaggatggagattttgaggacatcggcggaggacgaagacatgttgccttttctttcgcctggcctgttttgttcttgccttgagatgatataaatcaagtcgatgtcagagttccgtttttttgctggttgctttcttttgaccgaggtttccgactcgaaacggagatgccgctatctccgcagcaccagacccccccaccagtcccttgtatagccgatgagacgcgttccgcgttttggtcgcatcataatctaatcttgtcgtttgtccttattaacgtcccattgcgcttgtggacgattgtcaagaattgattccaatagcatcgtgaaatccgccatgccctatctcagtgtctttgtaacctctcccgatacccattcggagcgcagatttgattcgggtctcactgttcagcagctcaaggtaaagctcacttgctcttccacgtcccgggaattgcggccactcacttttaataggataagctcaccccaattaccggtatttcacctcagtatcaagtaataaaaatctgtcgatcggccgatcagacctctggccctcctttggcggtgcttgatgacgactcccggacattggcaagctacggtctggaggaatggaattgtattaaagtacgatttccttttttacagccatcgaaagcaaagctaaccctttcctgccaacaggtagacaatatcgatcctaactaccgcccaggggaattcaccgacgaatccaatctagagcgttttgaactgagccctgaagaatacgctgctcgttcagacactgtccttgctcatctgaaagccaacaagctaggacgatttgctgatgctccaaccactctcgattcccctcttcctcctcccccaatgatcatggacccgactatcgtcccaggaaagaggtgtgaggtatcacatggtgaagatgggatggcaaaaagaggcacagtgaggtttgtcggggaagcaaagatcggaaagggtggaatctgggttggagtagagcttgacgagcctctggggaaaggagatggagagtgagtaacagagggagtgcttaaaccaggatttatgctgatcccttgtcagaattgagggcacgagatacttctcatgcttaccaaagcatgctgtttttgtcagatctgcgaaagtcacagtgggggacttcccggaagaggacatcttttccgacgacgaaatatagttcattccatacatacgacatatatataaagtgcacataaaattcgggctttgcatacagctcggtaaagtcaagcgtcccttacctgtttaactactcacaaaaatgtctcttcaaccaaaacttcgacccccatggtcaatcgtcctcccatacggatccttcaaaactcgtctaactccgaatcaaccatcctgctttttccatttttggcagacgttctcttgggcctcgactctgtgttcccctttccacttcttgagaaaggggcaatagttccttcggtgggacgtacatctgacccggaagaggaagcagatacatgtcgtcgctcattgttaccatcactccaaagagcaatccctgatttcaaagccggtaggatgcgcttgtccatgtcagtaggaaccatcttctacaacacgctcccactcacattgtggtagagatcatgtagctccgtcccagtaatctcccccttctttttttcccatcctcgtttttcatccttgttcagcttttgactgagagcataccaatcacaggtcttcgagctttgcaacttggccaaaactatctgaaggacaaggtctttagtcaaatcgagtgacgcgtcgcatttaggtgataaggggagcagcgacatatccgcagatgatgaggaagactgtctggacttctttgccttggtctgtaattttggtttggccagagaaggcttggctttggggttggtggttttaggcattgaattcgggactcaaagaaaatcaagtggttggaagcaaaaggggaagaccggagaagcgacaaattctttgcgccaaataaaggaaggaaggaaggaactaagtggctggaggcgagctggaaacaccgtgcgtggtggatctgtgcacggaagggaggtcaccaaaggacccttgagtcgtgttaatcatccaacgactacttggtatgatatgcatgagaacgaccctatcatctctcgtctcccatt

SEQ ID NO: 47 - DNA, 3002 bp, Cryptococcus neoformans
agtcgcagaagacgagctggaaggtgaagatttgatgaagttcccattggcatccttgatcctatcggcataggacccaagggcgttgaacacagaactttgctgtcgagacggcgacatgatgtcgagaggagaactggctagaggaagaggtgaagactgaatggcaggtatggcgtcagcgatcgggtttctcgagttgaggatagaacgggccataaacaacacgttcgaggaaaactgtgggattttgaacttcaaacgagcaacgaaatcatccctaatccctaaatcatgaagccatgagcaaagggttaaaggaaaaaaagtgcgaaaggaggggttcaaactcctccctgacagatttttcgcccgcaaagcagagatgtagccccacaatggccatgagagttgaacaaaaggtatgattcttatttcctcagtctaccgctgccagcaaatcctcacaagccatcttcgcactttcattccacagaatggaaagccacttacaactttctcgctcaatcaaaaaaacctctttgtccgagtatcaatcgataaaaatagatagaactgaagttagttccccgtcgtcgggggatttttgagagccgtgtggactttttctgtgtttaagtccaaaaagtcagcaacacgttgtcgaccactcgtcttaatcaccctagccacgtcacggcctcgaggtccacggaactaagtaagacactcgccccttctccaccttgacgaacacaataccatatcactcaaaatactcacactgattccttgaaatgcacaagcccttatcgaaaacgtcgccaccgataagttgttcgataaagagcaatcaattcttgtgctgttagcggtttgccggaccagtaggtagtttttgtgactggcgaggaatatgttgtaagggcgagggtagggaggtgtccagggcgtggattcgagaaaaacaggttgggaatcgagcagggaaagaggaggaatgtggttttgggagagtgtagatgtggtgaagaaaggtcgcccggagattggcggtgttataacgaggcgcggtattcactttgcacgatacttttgcacttctcaaaatttgttgtccataacatatccccttgttcgccacttttcattaatacaacacccctcacaaatatagcaaaacacccacaatgagacagcttaagcatcatgaaaagaaactcctcaaaaaagttgattttctcagtgtacgtagctactttacaagtctaacctccggatccgaattcactcaaaaggcttgaaaagaatcgaagactgacagacgaccgttgcacagtggaaacaggatgcttctcagcgggaagtcaaggtgatgcgcaagtatcacatccaagatcgagaggactatcacaagtgaatcgaattcacttatcgaaagcagggtcagttcgagtctcccatgctgattcccatctcgtagatacaacaagttgtgcggttcattacgatcattaatccataaactctcacttctcccggcgaacgacccattccgacaacaaaaggaggctgaaatgcttgacaagttgtatgatatgggtatcctcggtacgtcaccaactctcgaaatccacttgcgaaagtcaagtcgaaactaatttcttttccagacatcggctccaaaccctctgacattgaaaacaaagtaacggtctcctccattgcccggcgccgtcttgccgtcgtcgttgcccgtctcaaaatgtccgaaaccgtctctgacgcggtacgcactatcgagcaaggtcatatccgagtaggacccacaccagtgactgatcctgctatgcttgtcacgaggagaacggaggactttgttacttgggttgacacaagtgctaggaagaggactattatgaagtataatgacgaggtgagtgttatctttgaaccttgtggttccttcctctcagttaagcaccaggagagcgatgactgattgtaatgtcatcttagctcgacgacttcgacctgttgtaaaaaaagcattccttagtaacatttacctgtacactatacagattatacattatgcatgtatctaacctcctgacatccacccaaacctaggctggtcacgatagttttcggcgtaggcgtagaagaactcggcgaggttgataggttgatgggtcggacagcagcatggctacatggcacagtcgtgaagtgttttgatacccacacggcgaatttgcgatctcaggcagtgaaatcaagctgccctctaggacctagtgtaataatacagcaataagtcttgcataaatctgaacttctcagccgtcgactagaccgaattaggttgaggcagaacgcccatcacaccattcacacgcctgaggagggaggatcatacaaacgtacgcagcgtatcgcttggcgtgaacaacgaactttaggagtgtgaacagcgaagaataaggagaagaggaactagcatgcaacatcatttcgttttcatccaaactgaaaagagaagttaatcatcgacgtctgaaggtcattgaaacaacggagatgaggcacaaaacctgaacattgaaacggagatgaggcacagaacaacattcataagataaagctgtgccgtttatgagattgaattagaagcctcgtgagatatgttttcttgtccttttcgcagcatcatcgctatccgttgtcaaaacgcgacgcaagccaaggaaataatgataaccaatagttatgtatgattgagaaaaatgacaatctctcggctattaagaaccactaaagatacatgtgctccatgaaactcttccttgtgatctcaacacatgcacaaccgcgccctctcgttattctcctcttaatctcctcagcagtccacttctcctcttttttgcttcaattttcctccttatatgctcctccatatccctcgagtcgagtgtatcttgattataccagagaac

SEQ ID NO: 48 - DNA, 2892 bp, Cryptococcus neoformans
gccaacatccatctagttgatagacagatcaaaacaccatcacagcctttaggctgggaaatcacgggcccaaggggtctcagtcgcatttcagtttccagcaaggacccaatcaaagccctgcttgcctatcccagcgttacttttaaatctgtcgtagcttgcctgttctattctcctagcaataagctttgtcgggaatcctgaaacgagcattgctctttgtcggaaaagtgttgtattatcgggccgtggtgtataagtaatatgctctaggcatgaactgaacgataactgcgtgagcatgacgcgtatgagctgtagcagattgaagccaacgcacatgtactgagcaaggttcaaatttaccgacatgcttgtggctgaagtttctgatgggtctatgaatacaacctctcgcacatatgctattggagggagatggaacagctacagagacaattacgacaacatcagtcacaaccatggcgagcgatttccaacagcccaccttggtaacccattttggtgctccttgctgaactcctattagtctttctgacctcaatattcctgtctctgcatctattgaccgctccatcgtgtcgaccgagtagacatgggtcgcgaacggatttgggtactttcgatgaagcaaattgagcgtatggcttgccgggtaactaccgaatatcagctagatacagcacaggaaagcaatggatttactcacttatatacaaggtcattctcgaataccttcatgttgtacaagcataatatgttgggtagaagattggagtcaaaatggtttttctatattgtcgccgtcattctcgggcgttcggcgcgctgacgtcggtccaccctttgatgttttctgcctccattttggagccgctgccttcaacaacgccagacctgaaaactctttacactttctgaccatctcctcattttctttgcgtatacatctctcctttatagtaggcaagccagtatgctacgccagcccggaacccagatcaagtatgtgagatatagaacactggaaccagtcatcccagcaagatcgctgatatgtctttataggcttacaaacgtcagcattgtgcgtatgaagaaaggtggtaagagattcgaggtgagtcctgcagtctaagaattgtaaacatctttgatcagtcagtagatcgcttgctatcaaaataaagtctcggaattccgatctggagtgtaagcaccaaggagcccgccttatcatcatcttgatgtctgaccctacaacagcgagaatgatctttccgaggtccttcaaattgaacaggtttttaccaatgttcccaaaggtttagttgccaagaaggaagactggtccaaatgttttggcacggatgatttgaataaagtgattgaagaagtgcgtaatcgatgaaaactagaacgaattctgccgtgacgattggctaaagcacaacatagatcttgaaaaaaggtgaactacaaatcaacaatctcgagaggacacaacacctctcatccctctcccgtgaaattgcaaccatcgtttctgaaatgactgtcgatcccaacacctctcgaaaacacactgttggtatggttgagaaagctatggcagaagtaggattcagcgtccgagccgacagacctgcgaaagctcaagctctggaattgatcaagaaactcgctgaaggggatgtcttaccggttcgaagagtgaggatgagagtacggataactatgcctggaaaggatgccaagagatgcaaggacaagattgtcgccgaatgtgacgaggttgaggaggaggatatgggtatggagtgggaagcggtaggtggctcttacctacggttcagaacgtgaactaactaattaaatcttagattgtacaaatcaaccctagcacctttaggacactgacagatttggtcaacaacgaagccaaagggaagggaagagtagagtccatgggaagcgttggaaactagattgtcttgagccgatcaaacatgtatcgcatcagtcaaaaataatgtatacccctgtaattagtttatcctgtgtgacgccgtccacaatacacactgtatatcaaaagatggtccacactctgccgaaattttgcttttttaactgattttgaccttcatccagcttcgataatgcaatggtaatacaatacaggtttatccgaagtacaaaatatttattccgcacccttcacgttgaagaaaaccttccaccacggccttcgaataccctgctctgcgttgtgaatggcgtttctcgctcgtgtgtaaaacagttcatcgttgggaggagtaaggagagatttcgataggggatactatgcatacacattcgaatcagcattgctatcatggatgaaagacattcattagacatacgtctcgcatggcatttccagccttcagccgttccacagcggccttgaactgcattaaacgctgctgttgtcccgcttcccgcaatgctccaagagttgcttgactagagtttgcttgaaaagaagtagaagcggcatcggacgcgagtgtacggtcgaggattgatatccaggcttccgaaatttgggtgggttcggagagcggagagcgagggaaggatctagcgatggatttaagctgggagacgcggtttgcgatgggagatgacatattgggttgttcccgatatgttgttttagaagagtcgttgtaaaaagtagacggatacgaggatagaggtgaaaacaagaaatttgatatgtgcgtgagttgcgcactgcgaacgaacaaataattcggtcctccaccactcattccattttactttgcacaaatcccacttgtttgtaagctcactgtc

SEQ ID NO: 49 - DNA, 2420 bp, Cryptococcus neoformans
ggacgtcctgcacgctcttcccggagtggaggatgaggtcttcgagggtgggggcgccggcatctgcggggggctgcggcaggaggtcggcgggtgcgggcgggaggggggtggacgtggccgctgctgctggttctggctgctggagggggagggggggcgttaccggctgctggctgtgtctccagggagtggcggagaagctgcgcgcgaggcggcggggggggaggggggcggcggcggcggggcggcgggcggcggtgcggagggcgcgctgtatggcggagcgggcgagcatggcgtgtcgggtgccagagtgcgagggcggcagaaaataaaactagcacaccccccgccacactcggcgatatcgcacaatgccgcgttgcaataccgcatctccttattggcccgtgcgtgtattgttgctgttcattacttactactcgccaccatgtcgcccttccttccagcactcagatcaggtaagcaccgccgcccaccccgccgccaccgctcaccccgccgccaccgctcacacccaccagccgccaggcccgccgcgttcagacccgcactcgcactcggtacgcacccctgcacgcctattctgactcgcatctaacccgcatctaacccgcatctgcagcccgtccgctctcaagcaccgccgtcgcccccaggccccacacacccacctccgccatcaactcgtacgaccactcgccctccaccactctgccagacaccaccatcgcccagcaaaagagcaaccagttgagtctcgagacacctagaaacggcgccgagtatgtcctttcaacgctcgacaagattgtcaactggggtcgccaagggtccatgtggcccatgacctttggtctcgcctgctgcgccgtcgaaatgatgtatgtgcaatcgcttgtttctgaatggccagttgctcatttggcctcaggcacatggctgccgcccgatatgatcaagatcgactcggtgtcgtcttccgagcgtccccccgacagagtgatgttatgattgtagcaggtactttaacaaacaagatggctcctgcgttgagaaaaggttggtctgaaaaaaaaaaaacggccaatcaaactgacacggccgcagtgtacgaccaaatgcccgaaccccgatgggtcatttctatgggttcatgcgccaatggcggtggctactaccactactcgtactcggtcgtgcgaggctgtgaccgaatcgtgcctgtcgacatctatgtccccggatggtaggttttcattcgccactttacccttgttcccctgcttattttttgcatagtcctcccaccgccgaggcccttctctacggaatgctccaattaatgcgaaagatgaggcgtaacaggcagagtgtgcgatggtaccgaaggtagatggagtttttggtggcgaatggagagtcgggcgtgtaggatttatgagagttccgggtctcttgtgaggggcatagagatgagctgtagctggacgctcgttgtgttttatttcatccatgcataggatcatgacaattatgggcttgttgctgcatcttgttttcagtgaatccgtacgacgacgcgacgcaagaatcaaaataatagaatgacgtggcaaattcaagtgcgggtggtgcactgggttgaaagaagattaattgtctgccgccggtgtatgagctgtcgtttcttcatcctccttctctccccgctcctccatcctcccatccacccaaaagcccaggcatggccgccacctcaccgcacctcacaagcatcccccaggcagtcagagtagcagcaagcatagacccatccatagacccaggcctcaaacagcaggctatcgattacctcacaaaagtcaagcagctgtctgaagagacatggcaggtatgtatccttttttcccctgcagcgtctctgcaattcccagacacacatgtttatcgccatacaggactgtttacagctctatctccagggggcaggcgctcccgggccatcgaccacaggcagagacggcaaagaaaagcttgaaacggacatgaggatgttttgcttgcaagtagtcgataccgtcttgattcaaaagtgagttgttgttttctctccgctttgtctttgcacacatatccctgccacacggctgcgtcggatttccccgtctcattcttccatttccattttcgaaccgcttgtaaaactggaggaggctgacactgccagcagaccagaagtgatgggtgcagatgcggtccagggcatgtacgaggccatcgtcgagtttatccaggtcgagtacattggaggatcttgtgaaggcggccaaggttgtgagtgtcacacgagttttttatctttttgcgaggctttgcgcatattaacaaccttt

SEQ ID NO: 50 - DNA, 2967 bp, Cryptococcus neoformans
aagatggttggagtttaagtaaggcttctcggcttgctcaagggcaggaaggatagcagcgatgtcaagctccgagtcgggttcttcgccttgcattgagcgcagggctgaacgaagaagggttgaaaggcggttcagtaggagagaaagagaggtagagtcgtgtaattgagccgaggaatgcgcagtttgaagcgtttgcagaagagaggtataatatgaatggagggaaagatcatgttgttgcgaagagtgctgctggtggatcagtttggatcatcatcgcaatatggcgacgtacagctacgccacggaacttgttcatcacagtctctagcgtctgttcatattctttcagcaaggcgttaagctgtttgttctcatgctgtagctgctggttctccaaaacgagatgagacccaaacgcctcaagttcactgtggaattcctctgcgccatcgagcattcagcccatttgtccggctatgctactcatcaacgcaacgcaccgtttgatatatccagattgaaccttcgtaaaggaaaccctgtaccgacgtgaacggcctggcctttgacattctctgctctcgccttgagttgggcgactaatgccctgttgttggagagttgttctatgacgctgtgagctgggaaggagtatgcgaaggaagagctgcgtacctgaaagctcgcctacgagtgaccatagtcttaaaagctcttcttcgaggtccatcattgacctggacatggctgaaatcttgtgagctaagctgcgctatagtctatagttcagcagcgacactgcatatggcccatcctcggtagtacacgggttgctgtttgaggtgtcggtgttacgtaatgcaacgcgaaggccgttcgtggacgcgcctcgttgtgcttcgttcgttgtagtaactgtatttccattaactctggccccacatcgcactccagcttgcactctctccatacacgctgccagcaaacacccatgtcaggcttcctcaactcgatcgggtatctcccctccctcgctccctcctcccacagccactgaccaacctatagtcgtctccgtgcccctaagcgatcccccaccaacactcccactcagcagggcttctttgatcctctcccttctccgggcgtcgagaacgccaaccaatcgtatcggcctccatctcccgggcccaagcccctctatctatgtcagccgtttgtgaaggccgcgctcgttaaaggtagttttaagactatcgttgcgccgcccaagtatgtcgacatcaacgagtgggtggccatcaactgtgagtcaaagagcgtaaatataccgaatgaatgctgacatattttgctagtgtttgatttctatcataacctcaatcaattctacggcgttttgacagagttttgcactatgcagaactgccctacgatgtctggtggaaagacgtgggtttctgtgattcatacggtataatggcagctgatgacttgtgaaaattcagtctaaacttcctttggccagatcacaaccagaggctagtctctctggcggcgccaacgtacattgatttcgtaatgagttggttacaaaagcttttggaggatgaaaatgtcttccctacaaagtctggtaagttatgaagtcccccgttagagaccctacacttaacacgcattcagggaaaccgtttgaccactcatttgcatacacggcyaarcacatctataagcaccttttccgtatttttgcccatctttaccatgcccatttcgagcaagtcctccacctctccatcgaagcgcacttcaattctctcttcgcccacttcctcgcattcggaaaagaatttgatcttttggtaatgaaggaccttatgaccacccagggtatgggacaaggtgttgcggagttgagcgagaagtggaggcagatgggtattttggagtcataaaagaatcggaaaaataatgcgtcagagttgatctctggatttcacggaacgagtgagagatgatgagagmggataaggttgcatagctctgcattgggtggtctgtggcttgtcaaccgaggtggacccgttgatacggcgagagcaattagtcagctgttgtagattcttgtttcatatatatgcatgctagagacgatattcatgattataagggtctgcgcgctaccgcctggagttgtgctgcgtttgaagatttgttacatctaatacaactatctattggcgtttactagggctctcaacgagaccatactttgatggtcccatcgttggacgcggtgatcatttctttacctttgggatgagtgattattgaagtgattgtccgtttgtgtattggatttgggtccttgtcaattggctttgcctatttaaagtcagtaagagaaggggaattgaacatgaaaacacctacatcgaggacgttccatgcccataacttgccttcttcgtcacctgccagagcgagtccatcgccatatccccagtccattccccatcttgcagtttgttctcccaccttgtgtccttggaacgtctgcagacaacctccatcttttctatcaaaaatcctgacctttccatcatttgttccgaccagaacactttcctccggagctgtaggagatagcttcaaggaagtgattggccatccgacgaggtcatccgtgagtaaaccaaaccgcagatcgtaagtacgaatatacccatcagatgagccagttattatctggggggacgtgggcagtataagagacgtaatggtggatgtggcttccttcagtgtttggattgggtcgcgtgaagatgcacgcatatcccagagcattactttggcgtcaaatcccgctgcatgatatattagcaaatcacaacgactcacatcattaagtaggcgataggaactaaccacttgccagtacttgggcttcttgac

SEQ ID NO: 51 - DNA, 2931 bp, Cryptococcus neoformans
acattctcagcagatcggcgtactgtggcgcagcgattagcatggcgcgaatagcacatggcgcgattagcacacgacaaacgccggactcacctgtccatgcacatcgccgacaatcttgacgggcggactgagctcgatgagcgtcggctggctgagaaacacttccctcgccgccgcacagacactggtgatctctgcattcttcagcggggggctctttgtgactttgccgctgtagcccgcctcgagcagccgctggatcatgttgtccacatcgaggatctggaagccggcgccgcctgctccgagggagccgcgcgagacggtctgggtgagtgcgaagccgggcgagagggaggatgcggagtcgcgggagaggtggctggctgcggcgggcgagctggacgggggcggggaggaggagcgtgcgcgggtggtgcccgcgggggagacgggcatggcggagggcggcgggggggaggaggcgaggaaggacttggagggctggctgggcgctgcgatgatgttctgggtggtggggacggcggcgggggaggggggggtgttctggcgggcggggccgctgctgtgggcgggcgcatggctggggggcgaggcgtgggcgggggggagggggtcgcgtgcgctgctcctgcgcttggcggcgtcgggcgggggggggttggggtctctgtctgcgatggaggtgcgggcgaaggagtcggcgaggtccggcggggggagctgcttggaggagatgcggcccagtttcttcgaggactggccctggcccatcgtgcgtgtgtgggggagtgcaaagaacaggcagagaaacaacgatggacatacaagagacagagagagaagacagggcctggaacgcggcggctcctctaatcgccctctaatcgcattacaaatcgcattacaaagctcctaatcacccgccgccattacaaatcgccgatttatctaatcttcccattcctcatccgccatggcataccctgcagcccagagccgcttctccgcgagtgcaccgctccccaccaccccgctcgcacgcagggactcggcacgcaccgcgccacacccctcgctccagcagcagctctttggcccgcccgcagccggcgccgcaccccccagcatcgtcgacaggccgctcgcacgcacaaagggcgcagaggtcgccgtgggcgcatgggcattcatgtttgcagagatcgttgcatacagccagagcagggcggacagcgtgtccgatctcgaagcgaggtgcgtcgcccagcagaaccgggccatgctcacagtgcaggctgtcgtcattaggctacgatgcaggccagaggctcctcccgctgctgctgttgcgcaacacccaggcggccgggaccaaagtgcgatcgctgttctttatttattttcgtatttattttgtgtgctaagtatacgtctaggaacccaaaagggaacaccgcctcgttccgatactccaattcatccatacgcaggtgtaccgctattgctttggcagggccgcagacggtctcgagcgcagcgtcgaggaagaaaatgaatgtgtgtcatcactccaacgagcatgttcgcggcgctaacgcattgtgacgtatccaagacatgatcacgctgaaccagccgcctctgacccagtttatatctgtgcccaaggacatgtcgcagctgagctgcgaggcgtataccgcggggatagtggagggtgtactggacggtctcgaggtggtgcgtgttttggcgtggtgtgacaaagctcatccatagacgcagcctgcccgcgtcactgcacacaccgtgccgaccgatgcgttcccccagcggtcagtcatcctcatcaagctggaccagaaagtgatggacagggaagaggcgctgggcaagtaatgtagactgtgcatatgcatcattcattatccgctccaccacgctcacgcatctccatcgccagttggagcacatgcctgcgggcagacccttggacgcggtcgtgtttattttttcattaattgttttctcgcgtcgcgtccaaatctcaaatccatcctccacagccacccatgtccacgcgcttcatcgtcccccccgcgccctcgccgctcccccccgcccccgcgctctccctcctccccttctccctcggcccgcagcacgctccatacacagacaagcacgccaacaccgcccactactttcagccccgtcccctcgccccacccgcgcactctccaggcgccgaccagcagcagcttgtgcgggcagcgttcagaggccgtcaagtcgtcgggcagtacctctccgtcccgcccgcctaccgcggcatcatcctctcgacgacgctgccgcccaacaagggcggtacggaagaccacacgcattctattcctgcttccgcgcctcccacacctgcgtctatagacggtgtagacggcggcggcggcggcgggaaacggccgcagagaaagagcgtactcgccaaaatcaagggtgcgggacagactgccctcgctaaaccacgtacgcgccgaacagcgcctgcaaaaaaacgtacccgtctcgactcggacgacgagcaaaatgaagaaggagatggagatggagatggtgaagagacggcaagaacgcctagtaaacgcttcaaatccaccaccaccaccccgaaaaggacactatccgttccggaaatcgtgatccaagaagctaccccgctcaaacagccgccgatcgctactcccaccaccgctaccacgcgtcaagaaggagaggaagaagtgcaagaaccattcatcccttcacccgaaacggaaaataatccgcctgcatttaacatctctcctcctccacatacactcgcaagcaagaaccaagaagagcaaacggacgatgatgggc

SEQ ID NO: 52 - DNA, 3004 bp, Cryptococcus neoformans
tggcttctagagtattttgcggatttttgacatgcatctacaacgttgtgcttctaggcgtttgtcatgaaaggtattgcgttaccggtcgttactatttacactactctgtttactatttaacgcgcggctaactttgtgacgagccagtccatcccttccatcaacccagctcccgtcagggcactacatcccataatctgccattctctctgccgcaggtctgtgagactgagagcctcggatatttgggcgggtgtgagacgaccttgagacactggtagatcctgcttgtttgcgagtacaagcaaaagtgcggttgataatgactgcacccaaatatcagctagtcgctcgtggagttgcaccaataacgcacttcgtctgcaacaatcttcatcaactcttgcttcaccagccccaatcttggtccatcacacgaatcaatcaccaagatcaccgcttcggttccattgaagtactgactccatgaactcctcaagctcgtttgtccaccaatatcaatcagcccgaatcggacacctttatagtcgtatatttcgtggttgcttcctactgtaggtgcggatgcgactacggcgcctgttgttatgcggtaaaggattgttgatttaccggcattatcgagaccaatgaggaggactttggtctctttgcgtgcaaacaggcgtgaccagagagatgagaatgtgactgtgcgatgttactgtgtgtaccatagatatatatagcacggcgactcacctcccatagttggtatatgtgcagctgttgacaagtatagagagctgtgaatgcaagaggagaagggagatgcggtgacctccacctcctccacgtggcatcataacgccgaaattttccgttcctcatttcactcccaccattttccacaaaaatactcggttttattttttggtcctttattttgacacaccctactcccccacccacccacaaaaacaccacatacacaagaatgagcggacgaggtttctctagaggcggcggtggtggattcagaggcggagcgcgaggtcagttctttcgggagctgctggggacaaaaacttggaatgagcgacaagttggtgaagatggggtttcgctgatgtgttttcggaaatgataggaggacgaggtggtggccgaggcggtttccagcagagggatatgggtcctcccgacactgttctcggtgggtatactcttcgtttccatccaccacaacatcagttgacgtatgtcgacaatgcgttttgcagaaatcggctctttccaacacgacgttgaatccgagatgctctgttccctcacagcacctacaaaaattccctacttcaacgcccccatctacctccaaaacaagacccagatcggcaaggtcgacgagattctcggtcctatcaacgaagtgtactttaccgtcaagatggagcaaggaatgttggcgagcagtttcaagaaggaggacaaggtgtatatctccggagagaagttattgccgattgagagattcctgccaaagcccaaggttgccggcggtaagggtgagtggtcattgccgttgggagatgtgggggtttactgacagatggcccctttgttcctgtcaaacttttgcccattttacagtcgaaagtaagtcataacatgtgtaatagaatatgattaatgatcctttactgattattcgtctacagagcgaggtgcccaaggaggtcgtggtgctccccgaggccgaggtggtgccggtagtcgtggtggacgaggcggcttcagctcacgaggtggccctggcggacggggtggtgctaggggtggtgccggtggacggggcggtttcagttctcgaggtggtggtgcgcccaggggcaggggtggtttcaggggaaggggacaataaggtgtaccaggaggatatgtgtgatagattttcttccattcgtttgctctggatatgtacatgtactttcattttgacccatcacaatgcttgcgatataggcaaggggaaatattgctcgccgatctacacacgactgctgcatgtccattaactaccactctatgcttcttgcccggcaatgagtctctcccccttgaggatagcgccaggcttggcctcgaagccagttccaaactcgcagtccttgacttgcgccttctcaccgatacgaccattggaacagatgatggagttttcaatcctcgcactgaattacgtcggtcaactgacaatcttgcaactctgatctgatgcgacttacttttcttcaacagtgacgaaatcccagatcacacagttattcaacttggcccctttgccaatcacacaatgccttccaatgatacacttcttgatacttgtcttttctccaacccgtgtaccctccccgagcacactatccggcgaaatctgcgccgcggggctgattgcgggcgctgtccccgcatcttcaggtatgatatttcgcacaggctgagcactcttagcagccggggtggtagaggaaagagacttgataaatctacggttaagctcccagtaaccggcgagcgagttggcacggatgaggtgctcgggttcgtacacaggtgcgcgtgatttatcttgcttcccacctttcccttgtacgggcgcaggcgcaggaggagcgggtggaggagtgataaccaagacttgacatttccactcgggcttgaagcccttgcgggtacgggaaggagcggtggggaggataccagagctgtacatcgtatcggcatcgccggaaggggaggccggggatgtttggggtaagggagtacggtcagatgaaggagaggatgatgggtggagaagagagcgggaaggaggagcagtagttgaacgagcaagagcttcggcgagaggatctcggctaggcgggtccaggataggttcccatctttcacccaaacctcgctgccacccacccttgaccaaccaaggcacaacctg

SEQ ID NO: 53 - DNA, 2577 bp, Cryptococcus neoformans
gagtgtttgagagaaaagaggatggggaaggttatttccctcttgcgggagacgaaaaggcgcacgcgaggatggtcttggacgcatgctgggcagacgagagaaatgacatgttcgcgaccgcatccagggataagactgtacgttttcacgcttgttctggagcttgacaatgactaatgcagatcttcaggttaaaatttggacttcagcagtagcagatggctctcaatgggctgcagctgaaacaatcaaattaactgtagcttctacagcggtggccatgattaatgacggttctgacggctatctgttggctgttggaaaggagagcggctctatcgaagtcttcactgtagctgtgaaccgggatggggtaaagagtgatctactctctactttcgatcgtcggtgagtaaccgaaaaccatgtttgcattcttgagttgcgttcttgagctgacctctttgtagagtatcacatgtgagcgcagtgaataaacttgcatggaggaacgtcgagggtgttttgagcttggcgagttgcagtgatgatcgaagtgtccgcgtatacaaggtcgagttataatgcacatcaatgcccggccgccggagatgtgaggaaagagcaaggtcggcaagtactctgtaccatatgaaaataccatgcatcttgataataccgatccgaataaccgtgcatgcagacaaatgtagacaaatgtaacgaaagtcaacaagtatcccattccttccgtcgcacttgcagttttggtctggctgcgtgacgagtggtgaaagaagacgaacatgcattacgtaacagatccgacgcttgcgacgttgcatcgagagagcgcgctttggtgtcgctgtccatgaagctcaacggtgaacaacggtctctacattcgacattctacagttcatatacctcagcacgtcttggaggtaatctattactgcccgaatttcccctgaaccctcgataaacacccaacatgtctgctcccggtggtggtggtgcttactcgtgagtccatcgtcgtgatctcaagtctcaagcgacattgatacgtctaagcggtagactgacaacccggtagattttcccttacaaccttctccccttycggtaaactcgtgcaaatagaacacgcccttgctgctgttgccggtgggactacttctttgggtatcaagggtaagttcaacgccatctctctcatgccccttttgcttaccatgagccttctcttatagctaccaatggtgttgtgatcgccaccgagaaaaagtctccctccatcctcctcgacacctctgctcttgagaaggttgccccgatttgccccaatatcggcttcgtttactctggtatgggccctgattttagggtgcttgtcgccaaagctaggaagattgcgcaagcatattggaaggtgtatggagagtatcctcccacaaaggtcttggtgcaggaggtggctgctgttatgcaaaaggcgactcagtctgggtaagtcggcaatgtgcacactggctttgctgcaagtctcgtcggactgatagataaccgcagtggtgtgaggccgtacggtatttctgtgcttattgctggatgggattcccacaggggtcagtccttatggcaaattgacccttcaggatcttattgggcatggaaggcgagtgcgatcgggaaaaacatggtgaacggcaagactttcttggagaagcggtgagtcactcggtttgacaacttaccctaaaatcaaaattcatgcctttttcagatacaacgatgatctttccctcgaagatgccatccatactgctctcctcactctcaaagagggctttgaaggccaaatgacagaacaaactatcgaaattggtattgtaacatgtcctacgcccgagcagatgcaggaaaagcctggggagaggttgcctcctacatttaggaagttgactgaacaggaagtaaaggattacctttcgttgtagaacacggcaggaagtgatgtatacagtaatgcaccatatgacataccttcctgcggtttgctcttgatattgccaacctcacatgttatactttccttcgccgtctcgtgcgcttctcgacttgcagctcaatgccgaacgtattcaaaactcttgttggtgacttcgataccaggagcggatgcattttccttccttgctggttttttaaagagactttgtccagcggtgatcgccgatatattctgcgctaatcatcaatcacctcttcgcctcttatgaggatgcccgggaggtgacacatttcctttcctgtattccacgacaaaaaaaaacctacaaggcctgtatccaactacaggaagaatctggcgacacatagggcatagaagcagattttatcagactcacctgcgatcaaaatcctcaagtcagaatgccgccccgtcgaagtacggccaagtcgaaagttcaatctgcgacagcttcctctttctctcctgccgaactcatcacaccctctctcaatgagcaactgttggaatacatttcaccaatgggaaacaac

SEQ ID NO: 54 - DNA, 2992 bp, Cryptococcus neoformans
caaggggtttgacttggaagaaaacaaagaaaggtgctttttcgtccgcagcatcgaagatcaagaccaaagcaaccatactaccgtttctcaaccgagaaagactatgctgcaaaaactcgagctgttcggtaacgtcaaagcaatgcgattcgatgatgcagaatcgattatagcaacttctgaagccgtcatggagctaaaacgctatcaaaaaagcatatctacatcagagatagcaacacaagatccatgtggaccatacaacattcttttcccacaactacggcgaattagttttgggccttcatctctccccaaagtctgtcgggatggactttcctggggtgcgatactagatactcttggcagtgcatggccagataacccttcattgtgtttccatctatcaccaaactctctcgatacctacggcagaatagcaggataccttgaaacaagagtgaaatcgctcgtactccatcaagggtaccctagcgatctcatcctactggataaaccatctggtatccatgcggaacaggtgaccatgtatcttaagcctcatcagataaaaggtacatatacatgttgggaggatcaccattggtccatcgtgaacttctgcaaaaagtattttggagaaagacgggcaaggcactttgtgtgagttgagtagacttggctaaataatctccaaggctgacctgagctgtgtgatactagcgatcctaattctgttcattcccccatattcacatttgtcaatatatctggcaaccttgacgatattcgcgaagacatcggccgtcagttgcgagagatggaattggaggacgggctggtagaggcggtccagaataagatgagattagtaggtgttggagatgtacgggaaggtgggtgcgaggtgtgtgggacgtgggatacatgaagagacatatacatagagcatgcatatagcaagtagataaagtaatatgtagatgccgggaataatatgggcatcggacaggcatcggaagaagtcggaggaagaaagtgggatgagcctgataattggcgccgggtattggacgaatgggattcggtggattatcttcgattctctgcatcttcgtctgcctctcaacgtcaactcatctgtgcttctttccatctttgcctactcgcccccaatgtccacttccatcctccgcaactccctcgccagggcagtccacaagcgtgcgtacatccacagcgccgcaaaacaccgatgatcaactgacttctcccagcctcaatcctccggacaactcctggtctcatgctcgcccagcgacggtgtgtaccaacaagtttactatagaggagcaatgcgaaaggtgctgaccataaacagactcgcctccaccgagtccgtgactgccgctgagagcattgcccttcttaactcccaaaggcagcaccgacctacgtctcctcacttggccatctaccagcctcaggtttgtatagacctgctctgccatatcttatttcacatcgctgacatatgtccatagctcacatggtatctctccagtttgcatcgtatcaccggtgtcgcttttggaggtgccctttacctttccgccatggcctacctacttcacccccttgtccctgtcatcgactctgcccacctcattcaactcgtgcacgacttgcctggatggttcaagggaagcgccaagttcatcatcgcccttccctttacctttcactgctacaatggtttgaggcatttgaactgggacatcggaaaaggtgagtttttttcttactctcttggatgagacaccgagagcggcaaagtttcgattgagatggtcatgatggcgtgaaaaatcgttgaaatgtgaactaatgcaatttgtagctcttaccattaagggtgtctaccgaacaggttacgctgtcctcggtgccactgtcctctcttctctctacctcgctttcttcatttaatttcggtgtatatggcttgcgatcaggattagggttgcaaggttgttattggggtgaaggagatgggtgtttgagagacggcacgattgcattttgctgtgccgctgtattttttacgatatggatgcaagggatcaatttcatggccttgtgtcgtatgagaggcatgtttattaccatattactctcaatagcatggacaatacactgcattcgctatctgaaccaggcattgaccccaaccccaggtccatctacaccttcagcggcatgccaccatccttcaggtatcaacacactgtcaccagcggctacgttgacctgacatgcgcccggtatggaaaatgctttttcaagctgttctttgcacttctgcatcgtcccttgaggaagatcctgcacgtcctcattcggcgatacgccagatattatccgggagactgggacaggtatttgggatgtattggcatgtcgagggataggagatagatccaggtaggggaacgcatcaggtggtaacaagtggaatgtttttctgcccacgactaaaagaaattcaactcagcctcggctagatgagtagttagaagtaacccactttgcgagtaaattcctacataaggatctttgtggaatggggtaaagctaccattggggccaatccatatcgtccgcctatacaagcttttctctttaccctgataaaagtgagttaaggcaggtacatcgtctaataattgaggcgtggaatccagcaaatcagattgggcgagatatgctgttggtagttctgcaggagacgaagatggtataagattgaatatgaaagcatctagaaataggcctgcaatcatcgtcagagtcatcaacgcacccaagtgtagaaaacaaaccaaaaggcatatgtatctgttgccattccttatgcaagtagctccgtcccttttttcctagttcgatttcagctactctaccttctcctattttctctctcagccgc

SEQ ID NO: 55 - DNA, 2934 bp, Cryptococcus neoformans
ttttccttgctcttctccctcttttttctcttgtaatggagagacggcactggaagcaaactcgttatcaggtttagacgcagcgtcaaaaactgcagtccccatttttcgtctactactctctccctgctcatacgcccagacgtagatcatgaaccttccgtacggtggctgacttgataagcgaagcggtcggagcatgatctatgaatttgatcagtatctcttggctgaagaggcaagacaggcaagacaggcaagacaggcaagactcacttggacggcatgctgcctccgctcgggagtagagagatgatgaagggccgcaatggaaattacaaaatcgaacacccccgctcgccaagcatcaatccccatatcccctctcacacactcggccacttgattcccgtcccctgtttcttctctaccatcttcctgcctgtttgcgttgagcccgccgaaacccattttgcgagcatgagataacaggcccgagctccgatctaatgcgatcatttcgcatcccgcttggtgcgctacgggcaagtatttgccgtttcctgccccactatcgaggccgatggatccgggtggttgcgtggagaggaattgggcgatcagcggccatggctagatgggaaagtgggaacattagtctgtttagaccaagtggcagaaggagttgaaccgactttgaatctcgtttgggagaagtgaggagcgatagcttcgtagactgtgtggactgttcgctcctcgtcctcgtgggggttcgaaaagggtgcgactggctgaggaatcggtttcggcattgtcgaatagacagaaagttgtcacaacaacaccgaaaaaagttgtctatcacagtggtccgccgggcagttgcgtcgtatccaggcacgactgagctttggagtgcctttcgtttttggccatcaaacgaccttcgttatcccccctttccgtttcaaaccacccatatataaggcaacaaggaatgcccacccctttggcgctcctcttatcggcaatcttaataataggcacctacttcgcgatgcccttttggccattccggaaatcgaactacgaccctcgagggaaacactgttacatcacaggcggctcgtcggggttgggcaaggctcttgcggagcggctggtgaagcaaggagcgcatgtcacgattgtcgggagagatagtaaaaaggcggaaggtgtggttgaggaactcaaagtgagtttagagggtaaacaaagagcgcccgagctgattataatgtaggcaatcgcagcaccgggccagatcatccagtgcatcgccgcagacctcacgtcccctatcgcctctactaacgctatccacgctgcgtgcaagccacacgcagaccaagcgcctgactatgtctacctctgtgctggattctctcggccgaaactgttcgttgaaacgacaaagcaagagttgaaagatggacttgatggtgtgtactgggtatcggcttataccgctcacgtgtgtttcgtctgttttcctggattctttggggaaaagctcatggaagaaatgacaggaggcatgccagatgatgagcaaacaacgccgtactggcaaaatcatctttgtcgccagtttcctctcctacgtctcttttgccggatactcatcctactctcctgccaaatacgctcttcgcggcctttcagatgctctgcgctcagaaatgttactgcacaatattgatatccacatcttcttaccgtgtggtatcagcggccctggattcgatgcggaaaataggacaaagccagctgtgacaaagaagattgaagaaggggatacgcctatcaccccggaagtctgtgcggcggctttggaaagtggtgcgtctattttcttacatttatgtaagatgaagaaaactgattaggccccgatcaggcttgaagaagggctactaccaaatcacagacaatctggtcaccgaacctatccgcttacgttccaacggtggtgtgccgaccaataattttttactcgacacactctggcttatcgttagctccgtcggtgtacccatctggcgaatgacagccgactctgccgtgagatctttcagggccaaagtggagaaagagcttgaggcgaaggggtattatgtgtcgtaatagaacgcattttactggctctcattgctggattttgagatggttttgctttacgatgaagtgccaaaaggggtaaagccatggagtttgaacagcaaccgtagcggtctaacttcttaacttcttaagcgaaacggggttgcagagatcgtgcatggatgtactgtaagttgtccagagcgtctcaacgcagtcgcaagtatcattgttctacatcatgtaagatcaagaagtatgtacagtgctcgtactcacgtgattttcggacgcatggcaatttggatgttcgctcagacgtccctataccatacatatcatcaatcttatacctccacaatgactgattgtatgactctcgcacttgagcacaagaaaacaaccccgtgacagctatcagaaagtcgcagatctatgcagagtctcaaaaacatcgtctacggctgttacactgtcgtacacgcgtcccatacgacttcggcccctcgacacctctctatcatgcagaaagaggaattggtgaaaaagatcgacgaatacgctgagcaatgcgccctcttgacgccgagacatgtcgtcgaacaggcagaagtggtctatggtggagaattgggcgtcaatttgggacttgcggttcatccaacgacatcgcgataccatacattcacgttttttctcttacaaaaaactcggacgtctacaagcagacattccaaagacgcgcagagccttttacctattatctaacacagttcttccatttat

SEQ ID NO: 56 - DNA, 2894 bp, Cryptococcus neoformans
atatacaaaaccggcaaaacccatgatgattgatctacaaaccatcgataaaagagggatagtagcttgtcttgttgattgaagctaacgtttttcagtttcaatagctcaagtagagcaattaatgtaagatactcacgcttctgtatagtccttggtcttgtacagcgcgtaaacacatgcgcagtgtcgtacagcaatttcatcccacaaatcgggcagcgtgtgccccggattcttcaagcgcttctcctattcacatccataagtattcacatctttcatttaggatatagatgacctacgtcaatagcaccgaccgtatcggcgatgcccttcgcagccttgccgtgaacagataaaagccgaagaagaggggtgtgatcttcgtgttggagtgggtgtgtgaagctgttgacaaactgctggtacttcattgtggtgcccctatgtttggatatgggtaaaacaacagtttggcagaagacagcagcactcgttctgctcaactgatgtcttccgccatttttcgcgcggtggaggctggccaggcactatacgtatgatgaagtcgatgaaattgtttggctctccttgacgacctatgcatcccttaatcccatgagaaacatcttctacccctgcagcgctatatacgcaagcgaaccaatttatgcccttcggatccttaccccactcgtcgaatgtagtgactgatcgttcgtcgtcgcaattcactggttgtcgctttacgttacgtaatgaaaataaccttaagtaagcacccatattaaaagttacgtctttgcaggtgttggttctccggatccggggggaggtggtgattattttcgacatctctgttctctcctcaacagcataaatactctacaacaaaaccattaccattcccacattcagcgccttttcgcatttctatcacttttacaacaacaacaactagaacagcaacagagacccatttaagaactttgtcagcatggccgtccgtacgtcgctccacccctttagtttgcttcccactcgctcactctttcatcaggtactcaatttgaaaactctaccgacattggtgtcttctccaagctcaccaactcgtatgtcaatgttgtagatattgggcatggcacaagactgactctgttcaaagctactgtctcacagctctcgcttcttctacaaacttctactctgtctttgaagccgagctcgccgatgtcgtgcccatcgtccacaccaccatcggtggcacccgaatcatcggtcgtctcaccgccggtaacagacatggtcttctcgtccccagctccaccaccgaccaagaactacaacatctccgtaactctctcccccccaccgtcgccattcaacgagtagaagagcgtctgtcagctttggggaacgttatcgcttgtaacgactatgtggctttggtgcatcccgacatagatcgagagacagaagagattattgccgatacactcaaagttgaagttttccgacaaactattgccggcaacgtcctcgttggttcttactgtgccctctcaaaccagggaggtctcgtccaccccaagacatctcgatcagaattggacgagttgtcttctctcttgcaggtccctcttgtggcgggtacagtgaaccgaggttcagaggttatcggtgcggggttggtcgtgaatgactggtgtgctttcactggtttggacacaaccgctaccgaggttagcgttatcgaggctaccttccgtgagtttctccccctattaaatatcgattgatactaacaacatctacaggattgcaaggacaaacttctaccgctgtcatcaacgaaatgcgagattcccttatcgaccactacgcttagccttctttgggaaaggacgcgtagattgttcagtgggtggcggatgtattcatgaagcaatgtatgtggaggttggaaccttgtgaaggaaaggcgggggatgatgatagaagggaagatgattgcaaagatagaccgggtgttagccttctgtaatgtataccccaaatctcatccatctgcttggtattcgctcaaagctgcaacatatatgccttattcacacctacatgattgcgtccgtcagcggccttctttgactatattgtcaatggtcgagcatccagaatcgttcttgcctgaaagcgtgtaaaatatattcttgaaacatggaaagcgacgttattgctactgatccacgctgtaccggtggaagtatcgccccagaaagggtgaaatggcctcgtcctgctccccagcgggaggcaaagcatccctggggtctcggggtgttgctttgatgttggccagggtctttggtgaatgatgatagtcttcttctctctccaaaagtttctcaaatgcaggatgcacccatggacatgaacggcaacattggaggtgttgttaaggacggtatctatgcttacgttgctccaggagtggtgtgacttatctccaacaggggaaaccttctgatcattcgtatccgccgactggatccgttcgtcactataattgaaaggggcttgcgaatcacctggaataaactcagtcggaagatctgcttaaggtttgggccgatgaaagtgatttcgagtcgaggcatttccgctatgtcctttaagacgttgagcaaccttggtatggtataactgtgtttctgttgcggtgttataattgaagctaagagagtttttggtagcagaacctggctcgttactgggtaggggtcaccaagcttataagcgcccagtattggatcggattatgacggcttcatggaaagacgactgtagatgagttcaatcaaaaagccaatgattgtcattgtgcggat

SEQ ID NO: 57 - DNA, 3124 bp, Cryptococcus neoformans
cgttctaatgatatgattagtaatgtggtggggtgtggcaaagagagatgtcggggcgaggtaccaaacgtgcaatgttcactctctattcggaagaggccagggacgacgggctttcgagggcgagcagatgagaagatacttgagagtgattgcgctgagtgttgcactcggcagggtagttttcggcgaaaagcgaagaggaacgggacgcttgggaacaattaagttgcgtgggttggtcttctattgacggttgttatagcagccaacggggctgttgctcttgcttgctatgtacgtgttgaggactaggcaagcatgtggttgtttacttgcaatctgcgattaattatgcatacatggaatataaaatgtggaggctaatagtcatcttgtcagggacgtatggagtaacgagagatccccaccgaggtgcttcattcgtgtccttttgttcttttattctattttcgcgcccgctcctttgcatggatccatgagcgaattatacgataaggagagcctattacctcttatgcatagctaggagctcatcctgagcgtcttcctacattagccgcttgcagcttcttgtttcttgcagagacagcacagctagtccgggtacaaattaccaagatgggcaaaatggatggccaaaaaagcacttccggccacagcctatcgcgccttcttgatttgcttccaaagataaggcgcgcctgcttgaatggaggcaaaaaggcaagcgggagagtgacacccagagggttaacggtttaggcgcgcgccgtatttggcatatgcgctcgtcgccgttgttgcttacgtgctgccgctctacccacgcccgctgggctatccgccagccgtcattctatcgaacctttgcccttccttccttcttcttcttcttgtaacaccttcccttcacgcatctctagtacgagtctactcactacttctcctttccgaaacaaagtcgatatctgcaacaatggccgagaagaagcagaccgttatcctcaccacttctgacgatgagcaattcaccgttgagaagattgtcgctgaacgatccgccatgattaaatctatgatggagggtgagtagtttgttttggccctaggtgtctatttgaggcttgaggggaaaaaggaaatgtggtgatagagcggtgaaatatggtgtcacgtcaagcacccaggaagtgggatcgaagagcaaaacgaccatctccacgtcatccctcggtatcaaccactcatctttactacaccctatctctccaccctcaagccccaacagaccgtattgtaaccgcttgatgtgatctgcgatttgcgagtcgcattacgtctcggcacgaattttcacaccagacgtgtcctgtcaacagtttgacgctgacaaattctttttcctcaacccaatagaccttggtgaccaggagggtcagcccattccgctccccaacgtctcttcttccgtccttaccaagatcctggagtactgcgaccaccacaagaacgaccctctccccaccggtgacgccaacgacgctgatgactctagaagaaagacttctgagattggtgactgggatgctcgatggatgtgagttatacctgcctccttttgtttggagttacaatggaatgattgctaatgggtccgtaattagccaagttgaccaagagatgctctttgagatcatccttgctgccaactacctcgacatcaagcctctcctgtatgtctcaatcggattatcgatcgttcttagtctgttggctgacgagtgtgtagcgatgttggctgcaagaccgttgccaacatgatcaagggtaagactcctgaagagatccgaaagctcttcaacatcaccaacgagtaagtcatatgcctaccatcaagaattctccagcgtgctgattcaacttcagcttcactcctgaggaggaagagcagatacgaaaggagaacgaatgggctgaggagtaagtctgtttcatattatacctagatgtcatcgtttgttgacaaacactttcgttgcagccgttaaacaacttcatgtatggggtgtactttatatttttcgcatgttgttcatatgaatcgcctggttttgcgttctgagcaatctatcgtttttctgtaaatagctaaagtaaaaaaaatattagtaggagcgcacaatggaagacgaatagtcgattcagtgataaagtttgctgcaagattggaagagaatgtgaagtgtggtggtgtccagcgtgagcacggtggcggcgagtattgacaaaccgactgctgcatcaaagttttcacaaagttgcaagttgcacaacagagtacgttagtttatacaagcacaagtacttaattactgcacggtttagactttgcggattccaaattaaagatatggataggatcagattaccagaggttacgggccttacaggttagtagcaggttagaggtcggaaaggccataaaccgtaggttatatagattataaaggcagcaaatattgtagtaaagatctacaggtacgacgacgcagggtttcaagctgaagccaagaatgaagaaaagaacggaaaaagaagaagccaccaccagaagcccgcctgactactcgaggagtgtggcggcatgaagttttcacgaactcattcgagttcatacaggagtaccaagtggccaagcatccatgttctccagttatatgggcgagaagagcatccgctttatgattcgcctgattgtgcaggccatgtataggggtcgatgacagcatggcttatttatggatgttgatgtagtccgatgtgcaaacaacgaaggtgggcgctgaaattaaaacccgacgacaagttcggatatatggccgacatgcgagccggttaccgcgggtttccgctatgcacgctggcaggttcatcatctgcaatactctgtttttgtatttctccaaggagttattatattccccaaatgtatccgtgaaactgatttactatcattcctgtcgtaactaattattccccgctaacctgttggctacattatcaaacaactcctggacagaaaaccatgagtgaaccacct

SEQ ID NO: 58 - DNA, 2939 bp, Cryptococcus neoformans
ctctgggttgatagtcacatcaccggtcatcagtccaacgtcaccaaatgtttccgtgaattctctgaatttttggttcgacaacgcctgcgcaatattgatggtaaatgtttttgttggatgcgcctaaaactgtacttaccttgataggacttgtatagaccactcgcctcccttccttcaaacatgtcgcaatagcaaactcagccaccaccgtcttaccagctgaagtgtgagctgatacaagaacagactcgttccgttcaatacaggaagtagacacaaactggaaagggtccagctcaaatttgtaggtacgggctggcggatctttgcgcttgtgctgattgatagggatgtaggggtaatcaggaggaatagcaacctgatgtcggacctgtagatattggtcagaaggcttgttacaactccgcttcccggatctggctgacctggtgtacaagcttcaacttggcctcctgtccaggggcagtaacatcggcaaagtcctttgcagcgtcgacctctctttcagcttgaacctcatactcgtcttcaactttgggcattgctccgtcttctaaggcttccatgggatccctcgatcgtccgtccttcccttcctccaatacgtccataggatcgtctgcgccatcctcttgatcgagacgagcggttttgctaggccgaggggaaggagtaccgctcttgtctttggaggatctctttttatgctttacggtgagactactggctgagagaggcgggtcgcttggggcagaggaggacatggtgttgtgggatacaaatggagtgaccagagaccatcgatgcaattttgggacgagatggtggacgaggaggtggagagatcacgtgacacggagctggagaaattgggcgaaaaacggcgggatgaattgctacttctttcgattcattccatgtcctccactactgtccatttcaactttgtactttaaccaactctataaccacaatggctatcttcggtctcttcggaagctctgaccccgcccctcaagaatcctcggcctccgctgagctgttcagttccacaaccttcagatcaaacgtcgtcccttcccagccggaagcccaggggtcctccttcatccccgatcctccttcccagtccgctcccgcacccgctcccaccgcacccgccccaacagcccttgatgcatttggatccgcgttcgatcccgctagactccacccattggctggattgagtgaaaacctagattttttacagctcgatgaagaaaagttgaacgaccttgaaggagcggccagtgttttgccaagcaggggctggacggatgatctctgtgttggcacagggacgacttatctttctggttcgttgggtgtatgctatacatcgacatggcgaaaagctgacttggtcgctgttaataggtttggctatcggtggcacctggggcttaaaagaaggaatgtcaagaccgctgggaaacaacccctccttcaagctccggctgaacagtattcttaacggttgtacgagaaggggaagttttatgggcaattcgcttggtgttttgggtgggttaatcttgcactttctcttttgatattacctctaatgtcgtacaaaaagctattttctacaatatctcaaactcttcttttgacgccatcagggggaagcatgatgtacttaatgccatggctgcggcgggtttgagtggagcgatttacaagtcaactggtgcgtctctgcctatccccgtttatgcattcttcagcgctcaattaatctttatttagccggcttacgacccgctcttgttggcgccggtcttggaacagccgctgcagctggctggtccgctttcaagaactttgtgtaatccattttaaggggcacacagttcttcatcatcactaaaaaataatccgcaaaccttgatagatacccctgtactcatcctttgcatacggatgacggtttatggttcttacgggaattatgcacacccctctttctgctcttctacaatgttgatctcatgtatctgggaacggtatgggcgcgtgagaaagtcatcaagatgaaagtgtgcagtcgtgttgggtgttgatggtccatgaggggatagctagacgacggttggcacctataaaagtagaatcagtatctttgccgaccgcctcatgacgtggtggcaaaattactgttctcagcagacatcctgtcgtagcggcatggcaacggacctgacaattctaaaaaaaaaaaaacgaaaagtatttaaaactaaaaaaaaatcggtgagctaaaagtgatgacatcatcaggaccacgagaaatggactttattcggatatccgttcgtcgctgctgctgttgttggcatccaatggtacacatacatacatactcttatcattttatcttgaaagtctttccatctcccatagattccgccgctgcctccccccaatctacgaccatatacttccaagccttgaaagtaaaacagacattacagttaaaacatgtcccacgttgatgtcacagtcgatgaggctacgatcaacgccatccgtcagagaatgttggaaaccggcgattgggagcggtaagttatatcctgcatagctcagtcttttttgagacattccctgcatcatattctctcggacaagtggtgcatgtcacacgtggaaaagccgaggttacagctaaaaaagaaagctcaaaaattatgcagggctaggcgcccctctctctcatgcgaaatgttttgtgaacgcaaggctgaggacattgctgatttttttgcattagaatacaaaagctactaagagcacatttagaagagagcggatgggttgatgatctcaaggaccttgcaaaaggtgagaaaggggatggtgaaaaggca

SEQ ID NO: 59 - DNA, 2968 bp, Cryptococcus neoformans
atactcgcttgtgtcgcccttatggcctcttggtttgtctgcatggccaaatacctcggcagggttttgatagatgctgctcccttggcaagacctgagcatgcagagagaaccgaagacttgagagaagtggccagggaagctgtagaagaacggttttgtatgagatgagctatggtgagaatcataggtagaagacatggcgagaagaaggtaagcagaattcgtggtaataatgagagatatggtcgcagagggatggtctctgacagtcgagagggtgatggtggagagtagggggtatgaggcgtcgctggaagaggagacgcagcatattgtgcgaagggcggtttggtgggtggagataaaggaataatctcgtcaggattgacaaatttggaaggagcttgtgggtaagacatgaatgagatgacggcttgtaagcgtcgagagttggtggaaaggttcaggctatatgactagtgaggaaaagagtaaacgaagtaagctggtatcgtaaagtcaggatgttagtggcaaacatgattcatggatccaaagaataccatatacgtggttgcgaggtgtcccatgaatgagcccatcgtccatcggcaaaagtggttgatcgacatgactattttcacttgcgcatgtttcagcaccttcttaaccgtttgttcttgtcatctgtcggcgtctaaaagggcgatagctgtgcatgggctggcggtgcggattgacagcttgaagagaagacaaaaagacaaaaaagaaacaattgttacaaaaacaaaaagaaaatggaccagcaacttcaaaccaaaggagaaggaacggggcagcgtgcctggaggtttcattgtcgattacataacacagaataaatgccacattggaccaattgccgaatttggttccgttccacggtgacgcgttggtggatgcttgctcgtcgctcgaagatggttcaagaggtgtgtatagtgcatgtctctatatgatacagaattatccaacgatggccctctacgctcctccgccaccatcttaccaagatcatgcagctggacccgtccaacagtgaggtcttctgtgaaaatggagcgatttgcaaactaatgtaacattcgtagccatggattcaacccttacagtgacaacggtggctccatccttgctattgccggcaaggactttagcatcatagcaggagacaccagacagtcagaaggatatagcattcaaacccgatatgctcgaaaagtttggcaattgtgagttgctgcctttggtaacgtcagtagatgtccgaactgactttaccaatctcaacagaaccgataaagtggtcttggctaccaacggtttcgcggcggacggaaacaatttcgttaagagggtaaagcaaagattagaagtgggtccatgagatgtggcttgtgaagcggatagcggatgtttattgatgtgtattgcagtggtatgagcacgcccataacaaagctatgggcctcaaatctatcgctaggatgatccaaaccatgctttacggaaaacgattcttcccttactatgtatacaacattttgggtggtatcgaagaagacggtgagtgattgccgagcattgtagcgaaggcgcatctgaccttttgcaaggatccggagctgtctattcatttgaccctgttggctcttacgaacgagaagcttgtcgtgctgcgggtgccgctcaatcactcatccaacccttccttgacaaccaagtttatttcaagaaccaacaacccgaacctggagctgctcccttcgtccccggtaatcttcccctctccaccgttctttctcttgtcgtcgactccttcacttccgcaactgaaagacatattgaagtcggtgatggcatggagatctatgttgttatggccaagggaaggtcaacagacgatttgcttggggaaggtaacttggtgcccggcatggaggttgaggagttgccttctcttggagaaagtggtagtgagagagcgtttttggtgaggatgcccttgaagagggattagatgttgtacattacagacaattcggatgaacgatatcgtgagaataccgaaaggtcgatgatagcggttaaggcgagtgtatcgcccttaaaatactcacgatatcacccatagatagaaccgatggtagttatacgttctactcttcaagcagtggggatggcgagtgagaaaatgagcactggttaaatacctgtgtttcggccttcgacccacgtccgttagcaacaaagtaccattaggcgcacctataccgccgcatctataccgccgcatctataccgctgcagcacaatactgaatcgtagcctggagttcagaaaggaactcgtgtctgcccatggattggtcataaatttctactgacaggacgtatgtaggccatcggagatggtcattgcagatttgttatggggatgaaaagaagtatgccattcagggtgatcatatgagtcaatgattctttatcgataagtaggaagacggaagatgattaacaacaaacctctcgctgtttcttccgactgcccgaagaaggcaagacaggcaacatattttctatcttgcacacggaaattatgaaggaaggaaggaagttttggtactaacggtctgaatgatgcacgttatcgtgcgtgaggagaaagaactttgttgaatgtccatgacgaggttgtaaaggaaagaaaacacacatggtattatcatctgtctggctttactttgacaccacgtgcatgtcatattgcatttgcacagtgacgaattccaaaagattccaagctcatccatgcgcactgctgagctgctgtaatagattgcttccgtcttccacgcctcctctgctcgagctctatccccattctcatttttcgctctaaattagagtgaatcatcttcaac

SEQ ID NO: 60 - DNA, 2992 bp, Cryptococcus neoformans
tgcgcagatgaagagagatgcctgttgagtactgcgagcctagaggtggccgttgggcgagacatacgctgtaggagctgtatgcgagctgtggaagacattgggggcggaggaaggaaatatgagatttataagggtgatctacggctatataattgcgcgatgaatacccagctggctattttggatgccgaaagaataactcgacggagacccccctcatgtccgctcaatttgaatcttacgtaaaactgcaagcagtgttgctgatttgggtcattaatccgtcaatcatcttggcggtctttatatctaattaagcataaaaagggacagaacgcaatgcactgtaaaagggacagacaagcaaaaaagttggtgtcctcccggctctctctgcgctgctacgactgtccaatcctcttaaagcacgtatgccaaaccagccagaatgatccgttaccggcctatctgtcatttacgagaaatgaaaactggcttgattaccgagttaaacccaaacacaaaatcatgagatcttggtgggactcgaacacacgggctagaggagacgtggccgcaatttggcagagctgaagagaggaactccgtgaaagtaaaagagcaccttcccctaagccattacagcataaaagagttcgtccatattgctcctttatatggaactttccgactaaccgattgttacatgcagggttgcgcgcatagtaaaaataaatgacgaagatcgtgttcaggcgcatacaaggcgttcaggctcttttgttttctttgtttatcgttctttacgactccaatttattcatcttacaccctatctaatctgtcatttgacttgatacaataaggtgcaggtcttcatcagtgcaataacatatctgaagagcatcgcaccggcacaatagctatccgtcacttctaagtgatacgtttggcttggacttatcagtgtgctaccggatcttcagcacggtcaaacatgcagtctttaaatgccttggggaacaggcaaatagcgagtttgaatgcagacttgtctagaatggagaatggtgaaggaggcccggcaattcaaggtgagttgcgcgacagttcaaccatatccggaagagttatagacatggcgtatgtcacccttctcacaatgaattggatgcttatccatctctttcaaggtcaaattacgactactctcagtgctctatcgcgactgatagacgattatgattccatggcgaggaaggagatggttaccgttgcccgggataaggccaacacgtaggttcgatctctgtctaattcggtccagcccaaaaagcgaaccgttaaactgattacgccaaaagtcgagtagcaaggttaaaaaatgaacataaggaacttaaatcaagatttgaacaagcaaaaaacgaaagtcaactcaaagtgggttgagcgattgtccagttgcagttccactgatatggtaccaggcccggcaggatttgctcggatcatcttcctcctcttccccctatccatcaacagcgagtacttctgtgtctcagcgtcgcgcgccaaatcaatcatccttcgcagaatctccatttgcttcctccgaccctctctttcggcccaatcaccctccatcatcgcgcgaggattttgctcttcgcgaacacactttcttacaagagtctgagaactctatagatcaatatattgcgcaaggaagagcagtgctggggaatcttgttgaacagaaaggaatgttaaagggtactaagagaagactattggacgccgcgaatacgttgggaatgagtagagaaactataggatgggtggaaaggcggacgtgagtagtctgctggacctgtcatgtggatcctaacagtgcatgaaattagcaaacaagatgcttggatcttcggtgcgggagcaacattcacattgtttagcttctgggcgatttggtattacttgggataatcacgatatcgaccggtcatctacattatctctcaccattagcaaacaaaagcagtatgtcgacgggacaatgaatcttatataattacattggggcattaaaatggggcccgtctctatccagccccccccccacgcgcagtttatctccttgttgcattcttcttctttcctccgttcatttcgctttaatatgttcccaatgctagaaactgtcgaatgataaagatagcttgatatgcaacttgatgtgataacactctactacttcgctacctttcttcggtctttttcgaatttttcctttgtcacttcaactgtgtgatttatttggagttgcaacaaagccacccatgcctatcgactgatgaaaccttgtcagcgcgtaaaacgcacaatagtcataacgttggttctcattgcttcctgagcgtagcgacttaacttgcactttaacaagaaaaaggaagagacttattcgttcttctctgggcataggttgaagttccgtcggaaacaattggtctaataaacgaaatcgtcgccacgatgtcacaacaagtcgtttccgaagtactgcgtgatacaaagtcctctccaggaaatctctcttctcagagttccccattgccaaccgcctggtctgaagcgagacaggcgacatctatcgcgactaacagcgggcaagacagtggtgattcagaaagtcaatcaagtcgcgcggcatcagaggctgacgacgacgagccaaataactgggacagggacagggacatttcagacaacagcgaaggcgcatctaatcacagtagcaatccaagtacaagctcattctccacggatcaacagttttaccgtcctgaaaaggctagcgaagtgggctctgattctaactctgataccaatcactctttgataccatcacaacgctcaagcgatattgagtacgaagacgaagccgaaaaagtacccggtcggcaatataacagcagcccatctt

SEQ ID NO: 61 - DNA, 2911 bp, Cryptococcus neoformans
cttcctgctggtttgagcggaccagctcgtgcttattatcttagagtactttccaggggagacgcaatcgattgggatgaagagcgggaggctcaaagagcaatgggcgtgggggaagaacaagacgagcgcgatagggttggcttgttgtagtttttccggttgtaactaagagtagatctttatttttgttcttgtttgtatgcatggtttgcgtcttttcttgactagacctatatcggggctatctcaaattatgtagtacacggagtcattctcaatgattaaagcgaacgaaaatcccttctgaggaagggaaggagtctaagtacataacagcacgggaatcagttacttaatcgtagttcaagatgaggtgtttgtttaagttgatataataattgtattccctttccatgtttccccgctttttttaagaccatttcttatgtcccgatctcagtgcgttcccgttgtcaagccatgcttccgaagcaattgaagcaatctccctttttacaggggaactcctctttaaaagcagttgataaaaagggttcatgcactcagtccatcatccaatacgtggcagtggaggatgacataatatggtgatgctattgataaacggaaagctagacaataatacgtagtaggtgaacaacgaacttgctgtctgttgctgttgcatgttttagccacaatcaacagataacacgattttgaagtgtgacaaggtcggaacagcttaacagaccttctaaactgaagtggaataagaccaagccttttggaacttcaaattgaaaatgtcgttctttttccttttcttgaagtactgtactcccttgcttaaacatcacggagtttggaacaatctccgtgataacaatctcgcccgccgcactccgccagcagaacgaagatgaattcaatcaccaaccggcaacggcatcaactcgcaacttagctgctaatacaacttagctatccacccacaatgcggtacgcggtgctcgtaacaggcccagcaggtgccggaaagtctactttctgtgcctctctaattacacacgctcaaacgattggtcggtccgttcatctggtcaatcttgatcctgctgccgacaagttcgaatacgagccgactatcgatataagggatcttatcaatttggaagatgttatggaggagctggagtttggaccaaacggtggtttgatatattgtttcgagtgagtaatatgggcctcaggcaaggggaagacgcctgataaaggtattttcagatatcttctcaataatcttgattggctagaagatgaattaggcgcatatgaggacgactatcttataatagattgccctggacaaatcgaactatacacccatgtccctcttcttccccgcctcgccacattcctttctacttctctcaacttcagaacatcagcagtctacttgatagactcgcagttcatgcaggacaagagcaaattttttgcaggtgtaatgagtgccatgagctgtatgctctccttgggaattagcatgttgtgtttgatgagcaagatggacttggtaaaggataagaagggccgaacgaagagagaagttggaaggtaggcatctgcgaattcatagcgtcgtcttggccgctcacaagccttgctcagatatcttgacccagaccccaatctgctacttgaggatatcaatcagggcaccaactcgaagttcaaccagcttaaccgagccgtcgtctcactgatagaagatcagaacattgtgtctttcttaccgctggacgttacatcagaagactctgtaaatactgttctcagtcatatcgacaacatgatgcagtatggcgaggatgaggagcccaaggtccccaaggacatggatgatggtgagtttgttgcacctcctcgtagctacaacataaaactaattgttcgtgacaggtgattttgactaggtcatatatatgtatccatatgtattactacatttgccagcaacgatacaaaagttaaaaacaagcgacgggagtgtcagatcgatcatacaagcgcaacaataatctgaatatttctcaagtggcctttaatacgcgtcctgttgagggacgaacatcagctctaatcttagaagaaatcgtagtgcgctcacaacgtttcacatcattcaaaatcttctcaaattgttctgcaactttgtcccagttacaacgatcaagcactaccaaaggacccactatattccttgtagctctcagcagtgcaaacttgtgcgtatcaggaagagacctaaagaatgaatacggcatggcggaaatatccaatgcaggagcgccaaaaatcccatcctcgtgtaagtcaaactcggagcctgacgagctgagctttcgctttttacagcctggaagatatggctgcggatgatkkttaaatcagtggcactagcaaagcccgcctgacctaagcttacagaagaaccactccgacttgctccaatccatgtccattcattgcccgcttgaaccgcgaatttacatagctcctcatcacccatcatacatcctgctttgaagattctgcttgcagagatacagccctcttccaaccagactctcaacattctacccagctcctctagtaaggctccatcgcattggaatttcttgaggaacgagatgagtgtttcgtaatggctgaatgactgggccgttggtgtcggtaatgatgagcaggactgagaagacaataagtggaggaaaagggttattgtggcggaggcttcgagatgggagtcggcgaaatagattattgatggtaagcccaatttggaaggtcttgtcattgtagcaaagacggggcttatcatgttctatgcatcagtttttat

SEQ ID NO: 62 - DNA, 3068 bp, Cryptococcus neoformans
ttgaacttggtcgcaccgcacttgcatttcttgcatatgttccctcaggacattgagtttctaccccatcagatatgcttctgttacccagtaaacccacctggtcaacctctgcgaaagcttcgagaaacttggtactcccagtcgcaaggcacgtttcgatgtcctgtttaaggtacttcctcgctatagcagcactttgaccttttaatgtacgtctctttgggagagtgtcatcgtcttcttctagttcttcatattctggctgcgctttgaccttcgcttttgggtcttcaggaccatacatccctgaagcaatttccaaggcttctcttgacgatacatcgtcgaaagatgtgccgatggctttgtagatcctgagcgagatgggattcgtcctcgacgctggtggtgcaggtgtgtttgggttggtggacatgattcctgggatgggctgtgccctcgaggactgtattgaataccggttgactgtatggacttcccgatacggtggacaacaacagattcgatgagttaattaatgctatttaaccttaatttgcatgacgttgcaatccgccgacgccccgtggtacattctccccagttcgtttctgtttatcaacatctttttccctctctcaattctcttccttacatccatacatatccccatgatggcgcccacaacccgctcaaaacagtctactcctgtacttgaacctgaggaatccacatccacatctaccgccacctctctcggccccggggagggagagctcaagcagcgcgccagggaaggaagtaggtccaggacgagagacgaagtttgggatccaaagtagtaagtatccttctggctatgactttggtggtataaggtcaacatggatgggatggcaaactgatttttggcctggtgattatgtagtgcggttgatttggcgtgagtattgctttgataaactgctgcccgaggaagtatgaccgagcccgagggatggggttgagtgtgctgaccattttgcatatgtgctaaccctccctgccaacgataccaggactaccacgtgagccatttttctcctcattttgacacaagcttatccctctgtccgagacagcgtggacgaaaatgtatttctcttcgtccccaacctgatcggctacacccgcgtcatcacggccgccgcttccttattcttcatgccttaccaccccaaagcatgtactatgctctactccgtctcgtgtatgcttgatgtagtcgatggccaagccgcaagggctttgggacaaactagcagatttggagctgttttggatatggtgactgatcggtaagtcctcaagccctgtattgtttttctttttgaagactcaaaatgtgaatggttgctgatgtagtcaaaattattagatgcaccactgcctgcctgttgtgcttcctctcaagcgtgtaccccacttattctatgcttttcatgttcctcatcacccttgacttctcctctcattacattcacatgtactcgtacgtccttccgtctctccttttcccgcgaataggagctaacgcggggtggatttcaggtctctcaccacgggatcatctagccacaagactgtcacctctgatgtctcccgtatcctctggtactattacaacgattccgtaggtattttctatcaccaaaccaatccatatccgtctaatcttccaaaaaaaaaaaaacagcgtactctcttcgtcttctgcttcgccaacgaactcttcttcgtctgcctctacctcaaccactactggactactcccttgatggccaactttcccattcccaccgctatcctaacctcggagctcactgccgctcaccccaagttggtcggcggggtgatcaatgtgttgaggaacttgaattggccgcaagtggtggccgctatgactttcccgatttgtgcggggaagcagattatcaatgttgtgcaattctggaaggctagcaagatcgtaagtccaagttcccctgtcctcctttcgctctctttttcttttaaaaatgaatgagttatatgggtgctaattttgaattagcttgttggtgtcgacctcgccgagagacgagctgctcgtgaacagaaacttgcagcacaacttcgagggcggtaaattttgcctttttcatattgttacaaacccacaatctcataaactgtaataagatgaaaggcaagagagggctctttacacgcaaaatgtttgaatttcttttcccccttaagaataagagggaagtaaataatttagcatgatatgtatgctttcgtacttaattatttttcttcatgttctgttctaagctgcaagagggtaagagggtcaggctttttagttggtgatgaaaggaatctctcgcctactccagtcaccgaaaagagggtgttcacactactagactgcccaatggttcaaagggtcattgttgtcgttcctccttcatcgggggtgataaagatttttgcggtataaggattgtaagttgtcccgatctatgttcgtgcacgcgaggagcactattaccctactctattcctctgtaacctgtactcgtactgcagttttgaagaaggagggttcgactgataagataaggagggaaatgtatcaatcagatgaaaagtggaggtttggagtggagcagacgacgttgttgttgcctggtagtcgttcgttctttcattacgagtgatgtcacatcgtgtcatttttcacaccyttcttttcattcgccgtgaaagtggcacatacgtataacccgcttttatagggcaaaccaactgctcatgctccttaccaccagaacaacaacttataaccacgaccaaagcagcaaatcatgacagaccaactccgtgatcaactgcactttggcattgcctcggcctctcttggccttaaccccatccacacttttgagaacaagtttcaagcattgcaaaaagccgggttcaagttttgtgaagttgactttgggagttatatgacttgggttagggatcagaaacct

SEQ ID NO: 63 - DNA, 3217 bp, Cryptococcus neoformans
tatttcccttggagagttctgtatataccagatcaatggttttgcaataaagtaacaggtaggcgcgtaatatctgagatgaaaacacgtcttcctgcgttgattgttttggctcgaatgatggatccatcaaatacaagttatgatagtagaggcaagtgtaaacagactggcagagtgttgcccctcgataccacgatatctaaaccgatagattccgttaatgaagtgccataagaattgggaatattacttcacttcaagggctgtcatcttatccatgatccaacaaagttcttcgggtgtgagagggtcttcaggccgaaacatgtatggcgatttaaagttgctaaggatgccagtgtccattttaggatccagcagcttatgctgttagttgatataacatcaaaaaactcacttggatagctttcatggcatccatcatcgtgagggccgaaggcttgactaactcgccccataacagacctacatcatttaccaatatgagcctcagtacacgttaataaatacacaatgtgagatgctaaccatcgcactcctctaaaaaccactgagtgatatcttgcatgatcctgatggaagaaacctcgaccccaaagtgcaattaggaggtgcttgggaactttatgggcgacgaaactcgggtttctaggttatgatatttggatatccgcgtgcgtcccaacaaataattaatgtaaatgtaaaatgtaacctcgtcatttatttagtagtcagggcatcgattgtggaaggagctcaatcacgtgactagagaacttggagaatttgagaaaaatgagaaaaataaaattaaggacgcaccacacaattcgataactgctgtgttgaactggttgtcggtgctctttcgttcttacgtccatttcaacccatctcagctcgtagacgccttataacgtccaacacgattttcaagacctccaccaatatcgaaccagaaaaagctgttaaaatggagaacactgctaccttcaaaatggttttgtgcggtgacggtggaactgtacgtgcttatttttttatccttcattctcgccccatgctgtttgatggtttgctaacttgaattccagggtatgtaatgtccttctatttacttgtcacgatcgctgcttcatattttgtgcctgactgtgtcatgaatatcagggaaaggtatgtgcgagcgttgttgtgttggcaagattactgctgattttcaaaaacgcgtagaccacctttgtcaaacgtcatttgaccggtaagtgacacgccatctagaaatgcccatgattattgatccctaactcatcaataatatattctaggcgagttcgaaaagaagtacattggtaagcgttaaatggctgtttcaagcgtacgactcgtactgacgctttatcagccactctcggtgtcgaagtccatccccttactttccacaccaacttcggcactatctgcttcaacgtttgggacactgcgggtcaagaaaagtttggaggtcttcgtgatggttattacattcaagggcaatgtggtatcatcatgtttgacgtcacttctcgtattacttacaagaatgttcctaactggcaccgagacctcgaacgagtgtgcgaaaacattcctattgtcctctgtggcaacaaggttgatgtcaaggtaagacgctacttacccttttgttttaggagtgtcactgaacatgccgtgcaggagaggaaagtcaagactggtaatgtgactttccaccgcaagagtgagcactgtttcagcgggcacatatctatgttgtcagccaaacgtaaagtcactaacgccagcatttcagagaaccttcagtacttcgaaatctcggcgaagtctaacgtgagtgcctaatgttcccaatagataggctcagtctcacattgcatgccagtacaactttgagaaacctttcctttggcttgccagaaagcttgttgggtgagtttcaagactttgattcaaacacgattatttgctgacacagttagcaaccaatctctcgagtttgtggctgctcctgctcttgcgcctcctgaggttcaagttgaccaggcgctcattgccaagtatgaagaggagcttaaggctgctgccaacgcccctttgcccgatgaggttagtttttcaatgtgtttaatgagaagattcatctgttaactcttgctgcaaacaggatgacgccgatctttagatggctacattgtcaaataatgacttggtagtaatgatgcatgccaatgatgttgattaattaataatacgacagggcttttcgcgtttgatgccaacaatgcacagctaacatgtagtctccgatgaatatctttgccttgcaattttggcgctagcttactgtgatgcctgttgcctgtaagctgatacatgtttatctacaagggaatggcgatccatgctacttataccatggtattgaattttgtttttgaccggaaagagtctgaacaggcgtgaggatgacttggcccaggacatgggtgtcactacacttgccgatggatgtgttgtggtgttaatctaaaatcgaataaaaatcaattataactcaagcctatcaaaagacatttcagcgagtggattgagttccttgagtacctgaacgtaacgcgcaagtgccagtttcactttgagtgagtaatgcagaggcagaacagcagaattaaaactgctgtggtggaggcaggcagccggcgaagaattgtggttttacaaacatcatgtcttgttgtattaatatttctacgtcatcacttgtattctaataacccgccgacgcgttgtagggaaatacccagggcttctattggttaaacgatccagttggttccgttccgctgccgcccacagcagataacaagtatatcgattccttggtatcaattctacggaatacaaagccttcctaggtttggctgttgctggtcaatctacctagtaatgatactgacaataggtcgttaggttgtgtagtggtataattgaactcgggtctcatgtcgagctgttgttgtgtgttgtgcgtgtggccaaacgcctgaggggaaacggggctcttctttacgagtcggaagaagaagatcgtatagagagataacatgaattgagattggatgcctacgttgcgtccctccaacagggc

SEQ ID NO: 64 - DNA, 3250 bp, Cryptococcus neoformans
tcgccgtttctgtcaagagtgcagagcgcgcacgccgattatcaggccgagaggtggtcgtgctcgtacgtggtcttgagcgttctgccgataacgcggagagcgtccgtgcgcgatgtcggcccgagggctcagcgaaaatggaagtatacccagggatgagaagtctgctcgatgtcggtgcaagcatatcaccaccacctccaacacctccatcttcttcaacatctgcaccggcgtcggcgtcgtcatcgttaccagggatatgttgtatagggaaagatgcgtatggtggaggttcttcctcgttcggtcttgtaggatcgaggaggaagaggcgtgaaccgtcggcggttaggacgtagatctgctgtgagggggatgccgatgccctgttttctccattcacaccgttcaagcttgcgagagaatcattgacatggactggttcggaaggagatcgacggaggagacgaggtggtttgggatgatatggttgggaagcggaagtggagtgagcgtggggacgggtcatccgaacgaatgattacttgtccttcctgaaatgtcttgtatatatgggtaatgtggcgatctaatctgcctttcgcagttcgccgggacagtgcacgagtcctggaggtgtattatgggaatgtgcaattctccgtgctcgtatccaggatccaaacttgtcgaggtcgtttggtcctctgctcgtagccgctgcagtactcgctcgctgtggcggtcgtggatctctcctttttggcagtgggtatagaaaaagtgggtgggaatgagaaataaaacgtgcggaagcccacggaagacgccacccgggccgtcattgtaacgcgcagagatcgggacagtctggttcagcgaagtctctgtcgtaaatgatgacgacatcattttggttccagcatatttgccattgacctctgaaaaagtcgggatattgtcccgtctcaccacccatcgacattactcagacatgccccgcccgcccgaagacccagatgtgagaaacagcaagacattggcgtacatcctccgccacggcgctgagaaggagggtctctatatccgttccgatgggtttatcaagcttgccgatgtcgtgcgtctctcttttcctctttcactctatccgtcaattagggtgctgaagttgtgtttctttgatctttatgttcttttatatatcattatctgtcccctaaactacttgtagctggcaagaccaaaacttaaaggcgtggacgaacccaccatcctccacctcgtgcagacaaacgctaaaaagcgattcgagctattttgggggtatgatccctcgccgcctagaccgaagaagaagcctacgcaggggaagacgaaaaagcagttgcagagggatcgtgagacggcggcggccgctgctgcttctgctgctgttgctgcttctgggacaggagaggggcaagagaaggggaaggagcccgatgcagcgacgatagacattatcgcgtcttcccttgcttccacgaaccttaccgcaccatcgtcttctttgtctataaactccaccgcgcctgccccagcccagagttcaacgtcagtggaccctccagaactccctctcatttcccttcccgacccacacacctctgcctccgattctgacgccaacgccaaagccagcgccagcgccaatagtgacaaccccaagggcgaatactttattcgcgcaacgcaaggccactctatccagctcgagtcgactgcacatctcgaacaagtgaaagatgatgaagaagggaaaagaaaggtaggcttgatggtccatggcacgagatgggagttgtgggatacgttgagtaggtttcttctccgtcttttatatatatatcgaccgagatgctaatggataccaaccaaacagaagaacaaggtctccaaaagatgacccgccagcatatccacctcgcccctggcttctcgggccccatcacccctcggcccaactccacactgtacatttacctcgacctgtccaagcttgtcgccgctgggatcccggtgtatgtcagtgcgaatggggtggtgcttacccctggttccaagggcggggagaatggagagggggcaggagtggggaaagagttttggagaagagcggtaaggaggaaagaggggaagaggtgggttgtgtgggaggatgggagggaggtggagagggaagagttatcaggtgaggagtaggaagtaaggagggaaaagtaacggaagaatgagatgagtacaacgagtacgccgttttgtcctgcataagaaccgcactgtgacaagagattttacttttaatgacaaaactataaattctttagacgttcgaatcgttgagcaagttcttcttcttctgtcagctttgtttctctgggaatttccacttttttcggtgatccttgagattccttttccttttctctgctttccacatctccaccatcgctatccccgtcctcgtcattttcatcctcctcatcttccttcccctctcccttgaccccgaccccagtcccgcccccgtcctccccaccctcatcttcgcccccactcacacccccacccaacctctccggcacccaatcaaccttgtaagactttccaatctcccataaataagcatccaccaactcttcccctggcgtgaacagtttgagcttgtgtgcgactctggcggggactgtagatgggggtggttcggtagggagcaggctgagggcgaatgttctcccaaactatgtgtttttttgggtttttaaatcagtgatgtaatggtgaaaatgtgttatgtcagcgcgggtgttgcagtgaaagcgccattcgacgactatacacgccggacggtcaagagacgagtaggcttaccctgtgcatgaggatttcccgcaagacttgcagttctttaagttctgtacgtggtgcagcgtatacgatggagcatacggcgtcggatatacttggatccggctctgtcgctctggtgccgagtacgagttagttgtctttagggcttgggctttcctttgaccaaggtgtgcgagagaaagacgtacggcgatgcttcgaggatgttgaaccgggcttgcaacatctcgagatataacttggtagtagacccgcgttagcccatccgattccactggacgggacacagagacgcacctccaagagctctagcagctcgacatagatgtca

SEQ ID NO: 65 - DNA, 3019 bp, Cryptococcus neoformans
acattgacatcttcgttctgccatccatgctgaccaaattcgcagtggtcctggggatgatcgtttcttgctgtatgtaaacaatcagtatgtaccttaattattagggtacatacacaccattgatataatgcataggagctgttccacgatacctgttccgcacaatgtcggcccaagcagctaccggtgctaggtgacagttggcttcctcgggaagaatactgcataactttgcccttgtcgatgggaaaagatgtatttgtgctatggttgcaaccatctcatggcctggaatcggtcattaccagttaataaccagcagacaccaagcataattcaggaacacctaccagctgcgccccaggatagggctgaaggaagggcggaggcaactaccacggccaatggcagaagcttcatgatgacagtgattacttgcgacctgtagaatttgagtatagcgcagcgcctagtattattgacagttggtggattgcgacagattatgaagagtaaggatgggagttttcagactatcgaggatagcaacctgacgtatgacggtgggcacaggtatatcagtagataaaagtgtgggtgttctcaatataacgtagtatctggatggttaatgtacttgggtaggatgaattgcaggacagatccatcactcatcgtatcattcgttgtccagcttcttctgctgctgtgctcgccatcgtcatattatccgcctccttcccccccgacgtccccggaggcggcggtcgccgttgtggtcgttcctaggactgacgtgtcattgaaagccctttgtgccatactagttacgtaacgtaaaagcatttctatcaaacggtgcgcgaccgggaggacaaagtctcggcgagggcttcagtgtttggtcattatttccgctttcgatttcgctctgatagtaataaaactttaatttctcttatcatcttcttgccagtgctcctcctggctttccaacatgtcgacaactgctgtagaaaccgtcaccacctctcccgcgactctcaccactgccgtcaatgatattaatctcgattcgtatgatgaagagcaagtaagacttatggaagagaggtgcattcttgtcactcccgaggacaaggtttatggcgaaggaagtaaaaaagtctgtaagtgaaaaaaaagaagatagctagctagggtaagctttgcttattctcttctcggtaggtcacctcatgtctaacatcaacactggtcttcttcatcgtgctttttccgttttccttttccgccccgccgatggccgtctcctccttcaaaaacgtgccgacgaaaagataactttccccagcatgtggaccaatacttgctgttctcatccgttgagtatcaaagctgaacttgtggaagagcaccaggcaggtgcgttggccattttgtctatagagattgaactgacttcgttgcaggcgtgaaagccgccgccattagaaaacttcctcaagagctgggaataccagagagtcaacttaagcctgaggacttccatttcctcactcggatacactatctggcgcctagtagtggcgtctggggagagcacgagagtgagtaaatcattgtaccaaggctgcgtcaattgcctactaaccgagacgcaagtcgactacattctgttctctaccctcaacgtggaccttgacctcaaccccaacgaggtcagtgatgccaaatatgtttcaaaatctgaacttgaggccatgttcaccgatccttgtgagtgccttcattcctcagcagccccagttgctaacatttatctgctcatctgcagccaattcattcaccccgtggttcaagcttattgctcgagaccttcttttcccttggtgggatgagatgcttgccaagtctagatcggccgggtgggacgaggagagcggagttggagaggttcgagcggacgtactggctaacggaccgaaaataaatgagctcattcggatgatctgagttctgtcatagttaaagagagcagcattgatctttgagatagtggacggcgttttggacattcgtgtaatttcatacttttttttggacataatggaggtatattctctatcttagcgctgcattaatcggatgttctagtcgaaacggaagttttgctttgaaatgaactccccctcgatagatctaatgatatatgtcggatcgacaagataattcctgacctgttcgttatttttcatgtccacggcatcgactgtcaccggacgttagaatacagagtgtcgtttacaatcattccttacctctttcttcacattttttgacatcttcaacaattccagcctcccagtttctttttattactcgtttccttgctacattctcatcaacatcaacccagacgcccatatccatcattgctgcacactctctccagccaggttggtcaagaagagtataaagaccttctatgaggatgatgcggtgtccgggtaagatagggaaaggtgaaggcttgggatctttagaagcatggtcgaatgttggaaaggggatgtttctcggcgggtgagggtaaagaggaatgcggagaagtgagaggaaacttctatatgaattcaaattaaaagtaaaagaagctccctatagggaaactgtttcagtattgtcgatgagatattttcaaggatgtgctcacccttctccaatgagcgtcctgaggatcatcaaagtcgtctaattcctctcgacgataatgccatccatccaaacctatcgttaaggcaacctcgtcgtcatttccttgctggatattcccttcggcaagcaaagatgaaacaggattctcaatgtgagaaggatttgtgggtggatggccaaggatgaaggaattgagggcatcggcgaggggatatgcgagagtagatttacccgatccaggtggcctgttatgccgcccgttcggtccatgccgtgagtttttgttggctcatactga

SEQ ID NO: 66 - DNA, 3026 bp, Cryptococcus neoformans
gtcaaggccaaccacttcgcccaaagttggcaggagtttcttccactttcggtgagatcgaaacaagcttgggtgccgcttcccgtaatataatattatatggtacaaaatatacaaatcgtgaggattcgtattctgtcccattatgattagcattcattacaccgcgaatcgatatgacatacctcttgagcatcagacatcataattcctaccatccgctcgtcgtaataagaaaataattcggaatcgagaagcatggtaaccgcttgttggatatcactctggctgggaaggtatttgtctgttttgagtgtatcaatcgttagtatctatccaaagtagctgtgatagccatttattatacgagcgcgtagtgcagaggtacaccagctaataaggaggactgaaccggacaggaccgaagagtcctttcggatctcttcccaagtaatagcaaagatctgaacagtcgaagagcacaggcctgccggggagaatcaaacaaaacaaggacaacacgaaccatgatatgctgcacagaagttgacaaacatcctcattgtattatccagctgatctaaagtgggcgattccgggatggtcactaccagctcgatctctactcgccagtcagatcagctacctgtatctcgctctgcctcgatttgactcatttccgcagttgggaaaaaatgatacttgcctctccagaactgttcagcatcgtgaactttgacatggacgtgcatgctttcctctgtgaggacgccgatgccagtgtcaagtcctgatcgggaggtggatggcgagtgcttgtggtggtggtgatgatggtgatggtggcgatccctggcctttgcctgggggtctctatgtggcattacagagacttttttgctgtgacgagattatggaaatcccaaaggcaacgaatatggtacaagtgtatagtatagggaaacgagaagagtagtagtggcagttaagaacacaccttatgacgtaataacgtaaaaataaagtacttaactcgtaattaaactcaccattatttgttttcaagaggcagcgaaagctgcagtgcacaagcacatctcatctcatctccagctacgcatcatcttcaatggctgcttcaagggtaggcatcctcaacgacggaggtatgtcacaattggcccccttcttctcgcccactcactttctttttgcacaaaactaggtctcagacaagatgcccgccgtccttacgaactccgatccacatccttccagctatccacgcactcttcttctgacggctcgtctactgccacgcaaggtctcaccacagtagaagtttctgtgtttgggcctcgggaacccaggaatagaggtttggcaagccacgatcgcgcggttgtaagcgtcgaggttggggtggttccgtgggctgctggagcaggagctagacggacaaggggcgataagtgagttgagtagtcaatactgtgcggacaggtctgacagggagtgaagacggttacaggagataggagctgcgatcagacaaacgtttgaacctgtcatcatgacacacttataccctcgaagcgagatcgcaatccacgttcaagtcctttccgcagatggaggtacatatcatttctatgttggacacaataaacccaaaattattaacgcgatttgattaatgtacagggattcttcctacatccatcaacgccaccaccctcgctctgattgatgcgggtatagccctccttgactacgtctcctctatttccatcggcctacatctcctacaacccctcctcgatctttcacaacctgaagaatccgatctcccatcccttgtcattgcatctcttccgtcctctggtaaaatcacgttagcacaaatggagacacgacttcatgttgaccggtttgaggagatgcttactttaggcgtagaagcctgcaaggtcttgaaggaagagatggatggagtggtgaaagatcggacagaaagaattgttgagagaaggggtataaagattggaggacaagggacagggcaagaaggggagatggttatcgacgattgaggatgaatgtaccttcgtacccgacatatgcttctggcgtataggtgtctcgccaacggcccacgaagatgtcaccagcgagaacgtagcctctatagatccatttgcctcttgagtcaggctatgtataatatgagcatacagttgaatcgatagaaagagacaccaaaaaactcacggcatattcttttacgagggaggccataccatcccatgctcttactctaccttttagtataaaatttccccatgccgaatgtcctgtgccggttaacaacaactcgagccctaccccttccccaccatccccgtcttcttccgtttgccgtatcatctcatccaattcgtgttctggcaccgcttcatacccctccaaggtctcgagctgctgctgaatcgtctcgtttagcgtcgctgcctcggcagcaaaaggagcaaggacgggaaaaggaggtgtgatttgatcaactgggaaaccagcattcaacataggtccagagacgggtgatcggcccaactcttcctcatcctcttcatattcttcttcttcctcctgattggctttccctttgcctttttcattttttctcccccttctaacccatccttgcttcctcacccaggtctccttgatcttccagacctgcgcctgttctccataaggcccttcgtacaacgcccttgcttgtcctcccaacatctcccggaacgcatcaaaatcgaaaaagctaaatgtcccttcccagcatccttcaaatctgcctcgccatgtcggccggggcatgccgggcgtgtgcatggggtcgtagcacaaagaaaggcgggaaaagtcaaggtcgtgcatcgaagaggacgaaaggaggggcggtgaaaatgagggcaggaaggaggcagagagagaatgacgagtaactggagtagttgtgccagagc

SEQ ID NO: 67 - DNA, 3085 bp, Cryptococcus neoformans
ctttttgttgttggcttcgacagttctttgcaattcttccacccttgccttcagttcatcttcgcgttctgtaagattcttgacttttcctctcaacctttcagcttcttcatgcgccttggaaagctctaaatgcatagcctcacgcttttgcgcttcttcacggagacggacaatgtcgcgatcgaggttgatcgcacggaccttgtcactgacaggcccggcattcgacgatggttgcgaagatgcaaggtgtgtgttctgcttggggggtaaaaaagcgacctctgatacctctgactgagatattggaggggtgatttgtgtgccacatttggtctgaagtggttttgaaggactgaagggactggtgggtggcgcataggaactttttatagcatctgactgcatggcacgggaatttctgttcttctttctcttattcttcttcttccttttcccacatccttgcggagagcttgtttctgttgcggggagttgaacagaagtatcagatacgtgacgcttatcttgcttgttcaaactcttctgcttcgtatccgaggctgacggttgtgctgcaggagctgaaggtaacgggcgctggtatggatggagagctttgcgacgcggagatgaactcctgtgggacctggtcgaaggacgcatgttgtagaagatgaaagggagaggggggaggaagacaagatctaaaagagtataatacagctaccgaaacaggagatgaggaaagcacgacgacggacgcgcagagccgaggtggacgtgattggacatttttcccacggtagtgcagtaaaaattattgttgccggcggctgacgggtattgacacgtcagggcttcccgaaaaaacaagttgaactgctaataagcaagatttatggccacacccctgcagaaggaggacattgaatactattgacacagcagttgtccatttactgtcgttctctgaaagactacatacaatcccaaaatggcccacaaatcacacagacacaaggccctccaggctcagctcgaagctcagcctaccatatcccttatatcccaaaaaactcgaaagcctcccgctccgtccatggacgtagaccaagacgacgacgttcttatcagtaccaacgctgcttcggcccctaataccaccgatccctcagacgctcctgtctctgcgaccaccacatcttctggatttgcccctcttaccgctgccgcccaatccactgtccttaaaaacgagttcagaaggattcctatccctccgcatagaatgacaccgttgaagagagattgggtcaacctttatacacctatggtggagatgcttggtcttcaagtcagaatgaacccgcagcgaaaagctgttgagttgaaggtaagcacacaaccattcattcctggtcaaaatttgttgctcatagcagagaaagacttccgggcacactgtagattctggtgcgattcaaaaaggggccgattttgtcaaagcatatgcccttggatttgatgtcaatgtatgttttaaatatggataacgaaaattcggtcatcggctgatagaacatgtcaggacgctctggcgctcttgaggttggatgacttgtatcttgactcttttgagatcaaggatgtcaagacattacatggagaccatctcgctcgtgctattggtaagctgcttcacgtggtcatgatgcggagattaatgtagtaaccatctcttttaggtcgtatagcaggtgaaggtggtaaggtcaagttctctatcgagaatgccagtagaacacgaattgttctggccgacacgtatgtcctttctgagctgttcacttttagttgaaatcggagctgatcattggggttgcagccacatccatattcttggttctgtacaaaatatcaagattgctcgagatgctgtcgtttctcttattcttggttctcctccaggtatgatcatatttgttgcttttggtagaaggcattcactgacggaaaacccaaggcaaggtctacgcacatctcaaggcagtcggtgcgaggatgaagcaacgtttttagagttcattattcttctgtcagcatttgggctatttgtacaattatttatcaggtctgcctgtatggcatgcatgtacactctacgttttctcgttcaacgtctgttctctgcttatacattccatgcaacccagaaagactgatgcgcaaaatgaagaacgaggagtgatcagaaaaagctgcaccacagcaataacgccgtaaatcgccgaaagtgccacattcgtattgagctctcttaccttcgttttgaccattgttcttcaaaatcctcagtataccaccacgacccacaatttcagaggataaaaaaagcatagcagcaaaatggtgagcatataagaggtcccaaaatgaagtggccaagatgatgctgatattcagtatagaaacctatcattctccaaggtccgcttttatctcttgcaactcaaaacgcatttcagctaaatgtgccgtgtctataggtcatgagcgatctctcaaccaaatcgtctttaactccgaaggcgatcttctcttctctgcctcaaaggatagtgtcgtcaatgcctggtacacctcaaatggcgagcgactggggacttatggcggaatcaagggcggcgatgggcacaacggtagcgtctggactgttgcggtggattgtaagtcgaatatcctgtttagggtgttattgggtctataaatggaagtggggatggaaggagatctttgtttggtcggcaagggcactgcagaaacaatgatcacgggaggaaaatcgacctttaccttgggcgaggtttttggacttactaatcatgaaatacatagctcaaacaagatttttacttactggcggtgccgacaatgcgatgaaactgtgggaagtcaagactggagaatgtttgtacacctgggagttcctaaccgctgtgaagagggtcgcatggaagtgggtcctgttttgtgtcaaacggacatggaaggtatactgatccaagaatcagcgaggatg

SEQ ID NO: 68 - DNA, 2975 bp, Cryptococcus neoformans
atccagttgacaatgtcattaggtttctgatgtggtcgtcagtacgtatgacaatttttaaaagcgagaatcgtgcgataacgaaccaatggccagttgtcgttaccatttgatagcaatgcacgtcctacacgcagttagcatccatccatgcatccatcttgaaaagtgacgtaaaacttaccaataaacagattgacactcgagtttggcggaggctatcatcggcaaaggagatggtcagcatcaaatccatatctaatctctgggtgtggcacttggatgtggcagttggaatgtggcacttcgcgagatgggtggatgcaagttgtgcaatcgagattttgactaaaacaagactcacagcaggccaaattggctgggattgcaaagcaaggggaggtgcgatggctctcatcaacttcgcagtgggacttcccggcatatcatcatccacctgactctccaacgcctcgagatcaataccctcatcctccccaagccgtggcggcatgaagtctccaggctttgggtctggagcctgtgcgatactttctgtgatacccagagtgtgtggttcagaaaaaaggaaatcgcggtcatcggccgatgcggtatggagacgttcatcgtgggtctctggtgcctcttggtgggaaggagcagcatctactttgggagattgctgtccagcaacagcagattgtgttgctatctccatgagagatggatctatcatgggctggccatttccttgagctggctgctgctctggctggtgttctggcgtgtcgaatgcggcgacctcgggtgtctttgaggacatgatagtaaatgagacttggttgtttgcgcgattcttagatagtttttcgctttttcttcagcgacaggcgaggccaagggtgacggtgtccctgtatggcgtgtatactgcctaggagagtatttccgggctatttgtgggtatgtatgggttgtgtttttgttattgctgagtatgggcgctctgtctgaagtggagatgcgattccctgccgtaattaaggtatatttaagattatgttttattaacacatcccacctactcggtcggttttttcgagcagacggcttggcagacggtattcatccatctctttccacagcctgtcaccaaagcaaacacaaaccagagcattttaaaatgaaccccagatcactcactaccgctgttcgatccttcacccgcagagtcccccttcgacctgctcttcctgccgcccgaacttttgcccctcagcttcaagcgcgagcttacagcgaagagaaggagttccacgagaaggaggacaagcggatagctgatctcgaggccgccaaggctgagtcagacaaaaaggctgctgagtttgaggagaaggtcaaggagttgacagttagtcatcattttctccgccttaccgcagcgtgcggggtcttagtcatgatttgtataactgactttaccggcaatgtagaaagagatgcaatacctccgtgcagacgtccagaccgccattcgaaggaccgccgaggagaaggccaaggcttctgaattcgccatctcctctttcgcccgcgctctcctcgacacagctgatgttctctctactgctctcaaacacgtccctcaacccattcccgccgagaacaaagacctccaatcccttcacactggtgttgaacttacccacaaggctcttctcaaaacttttgagtcacacggtgtgaagaagctcgaaagcttgaagggcgaacagtttgatcccaacgtgcatgaggctttgttcactgttcctcaagcggttgctcccaaaaaggagaacggggagcctcatggccctaacgaaatttttgacgtaagcaaagaaggttggacgattggttctagggttttgaggccagcgcaggtcggtgtcgttgcttcggagtaaaaaggaatacagatgggtagaaaacggcatcgacaatgttattcaggcgttctagccgccaggtgtagtaatggaatgtagagtagatatcttaaggttatgatagcaatagtagcatatgcatccacccctcaacaggtcatacatactatagctcgaggtactatagctcgaggcttggtctaagacagtacaactacatacatccaacagcagatatctcacaagctcgatcagcgtcttctagacgcccttcccgtcatactttcttcgaacttgatcctcctcgatcgatcaatgacagccacataatagttgccccactcgcctttccatgacacccagtctcggtagtagtcgtgctgggtagagcggaggatagcggcgaaagagtcgcactatgcgtttgtcagcaagaaagatcaagtgataacagggattcagtgatactaacgttactttcattcattctgaaaccttctggcacaaagggcttgagactgacaatctttgcaccctcctttaaatcgaggaacatatccgcaaggtccatattcaatgatgacggaaacacttcgttgttgaccagctgccgaatgatcagtttgactttggattaaggcacccaacactcaccacaacatcggcttcccttagtcttcggccaacctrcttgtgaaccctaaagtctccctcgtgcacttccacatccagatttcctttcaatgcccacatagcccatctcctctgtacctcccgcacttgtagacgagcacagtgagccggaacgggtagaagttcgaaaccatagcttctggaacctgcttgaagagatgcttgaagtacgcagttgccaacaccactaccaagatcgacgctgcgaatgataagctcaaatcatatgactttagcgttaaatggctcacaatacagagtcaggccctagctttgtttgttctatgatcttgctcataaacgcgtgcctcaattctccataagcatcttccttcccgctgatgg

SEQ ID NO: 69 - DNA, 2460 bp, Cryptococcus neoformans
  misc_feature (688)..(688): n=g, a, t, or c
gcgcgtatgaaggcacgacacaaacaaacagtgatataagaatgccacatcatacataaaattctccgtctggacaatgtgggacgaagcgtctgaagaagtccaaatccgcaatgcgctgccagcggccgccggtcgattcaacactcttcggacactccctgtcggacagatgtatccgacgcacttcagacgcaaaattacaaattattgccgaacagtctcttaaattattcgttctcctgactggccgtgacgctgcatctttcggccatcgtccgcaccttacgtattgggataggttgcttacgtatttagtaacactattcggccgtcctgctgcgttctcccatctgcgtatttctcgtttcaatccatgggtattatcgttgttaccagttaccttctcattgcgctattgaacgaaagtgtaattctgtaactatgatagctacacaaagaccatttcctatcccatcccctgtccctctcgcaccatcatctaccgtcctgccgaccacagtaccggaaaatgcgcctgaacattgccccgtacgttcgttaagtcccatttcctagacgccgctgatgtctattttctaccgcagggggttgaatcttcgcaggctggtaaggcagatgcttgtgaaggctgtcccaaccaatctgtctgtgcagaaggacccanagggcctgaccctgatttgccacttatccgagagcggatgagctctgtaagacggaaaatattggtgctttcagggaaaggtggcgtggggaaaagcacatttactgcaggtttgtcttgggcccttgcagcggatgaagagtgccaagtgagaattctctattacttcgacaggtccatggctgatacgacactaggcgggaataatggacattgacatctgtgggccatcgatccctttgcttatgggattagaatcttcaaccatccacacctcggcctctggatggtctcccgcttatgcacttgacaacttagctgtcatgtcgatcgggtttttacttccttcctcgtctgatgccgtcatctggcgtgggccgaaaaaaaatgggcttattaagcaattcctgaaggatgttgagtggggtgatttagactacatggttgttgacacgccccctggaacaagcgacgaacatctgtcgattgtgcagtacttgaaggaggcaggtatcgatggcgctgtacttgtaacgacaccgcaagaagtggcactgcaagatgtgagaaaggaaattgatttctgcaagaaagtcgggattcccattctgggactggtggagaatatgtctggttttgtttgtcccaattgcaagaatgagagccaaatatttgcccccacgacgggtggggcggaggcgatgggcaaagagctcggaatagaattactgggaaaagtgccactggaccctagaattgggatgacttgtgaccaagggatgagctttttggatgaatatccagagagtccagccactatggcttatttagacattgtgcaaagaataagagagattcttgacgatgagtagaggactattattctacaatgtagtggtcttaatgttgtatgtatgcatccctttatcctattcgctttcgtcatgtgcccctctctcagcctcgattgcaccttcatcaactcccacttcttcgtcatcgattgcttccccttgcccttcagccatattgtcgccaccatgtattcgtctgagttcttcatttgcccatgtagggtcagcaacctggcttttagcttcatcacgatggtcaatgtccgcctggctaggcaatctgaagcccacgcgactcttatcccatctgtcggattgtccatcgacctcgtcatgtggctgatgagttagcgatacccacccttcattgaaacctaccttcgttctggtctttctcaaaagggttcggaaattaatttctttataatagacaccttttctcttcttagtagctggctcattatcattctcttcgccttcttggaaggaaacaagaatctctttcttgggtgctgatgtagagacaacttcgtatgtacgtatgcggtcataatagacattctgataatggtcaggaaaaatagtaatctgagcaattaacttacggaaaaaatatgatcaatctctggatcgttgggattttcctcattcaaccgcattatcttctccaaaggctcttcatccacggcgcgtccataagcctcgtccagcttaggaaggtcttcctcctggggaagataaaattccatcatctgctgatcatcttggacgatagggcgcagaatagatttggaaagacgaggggaagacgcgcccgccgcgggattctacaagcgagcatgagctttgaaatgtcgacttttcttctgcttcctattgtatctcgcggcggtgaatctaaactcacaattgctgtcg

SEQ ID NO: 70 - DNA, 2985 bp, Cryptococcus neoformans
ctttgtttcagtcatgggatgggccccatataagcatttcccaaagtcaattgtgacattgaatgtatgatagactgtcggaataatctccttgaaatgtgttttggataaacgcatgtaggtcaaagggctgacgcgggaaaactcttcgagaatgcgagactgtaaggatgcaagaggcgcgagagtagtgatatcgtaaatgtaaacgtcggaggcttgagcgcgactgacagcatggttgtcagagcccataacgattgaatgagaagtactggccgaattgaaagtgcgtccagcaacttctatcgaccttgataatcgagctggagactgacattctttccgaggcatagctactcgttgagaaccgatgatgccttcaaaggtggacgggacggtgattgttggttttgcgacatcttcctcggaactcgagtcatccgagtgatcgacaagatcctcaatagctgactctgctgagtcgtcaatttctagatactgttcttcttcctccgaggtggtctgtttgcccttgtcatgcttgtccccagcgtaagttgctccctcctcgcctttctgtcgatcggcaagccaagagaacatatcgttcctggaactatgaattatgggatcagcaggcagatcagactgcatggaacgcctttggctcgataagccaacgacgaaacgtactcacaccggcaaattcagacagtgccttcgcactgcaatagttgaagtgcaggtgatcgtagtatcaacagttcctacaacatacaatacgaaaggattcaaaatgaacgagacggactcgacgaataaagcgacaacaaacgcgcaatgatgttgtcgaaatgtcgatttacgtaaacggtatttctaggggggaacccatcggtcgtcatcaagccacctctgatcctcgccaccagcggacgaacttgaatttcatcttgtctttccatttcatcttcgttgcaacttgcccagattcacaatgtcctcgcctccacgatacaccgaagagccaaatctacgaccagctccttcaaaggcctatggcacaacccccgcsgacactgctgccacgcaaccccttctcgcagctcaggcgtctactaatgcccaacgcgcagccgaggaaggttggcgggacgacgaggataatgtgtcggacaactacaagctcggtgtctctgtctctgactgcgatactgaaatccgaatgctctttatccgcaaagtctactctatcctcttgattcaattgctcgccacggcaggagtgtcaattcttctctccttgccgtcggccaaggactttacccataccaacccgtggatcatgtggatcccactgattggtagctttaccagcttgttctttgtctactggaagaggcaccaacacccggcgaatttgatcttgttgggtttgttcactttgttcgaagcgacgatgattgggttggctgtgagttactatgagagccgaattgtgagtagatgagttttcttcttcatctcctattagtcgctgaccatccatcaataggtaattcaagcgctgttcatcactcttggcgtcttcattggtcttacactcttcaccttccaaaccaaagtacgtcttcctttcttctttcccatcccttcactaatttctctacttcttctttgcagtacgacttttcctccttcgcacccatcctcttcattggcatctggggtctccttaccacttacctcatccagatcttcctcccattcaatgccaccgtcgacctcggtattgcctgtttctcgaccctcttgttctctggtttcgtgttatatgacacacagcagattatgaagaggttaagtgtggatgaggcaattgcgggagcgttgacgctttacttggactttttgaacttgttcttgagcatcttgaggatagtgagtgctgtcaacaatgattgtgggaatttggaagctgaatcattctgttaccttagcttaacaactcgaacgaccgttaaataattgtctaatacccagatcatcccttttaacaataataaacatgttgatcttgtcaaaactacggtgtcgtaactagtaatgtatctatgtatctgttgctaaaaatacattctgtcctgcacaaatcatgatcaatcaaaaatcattcatatcataatcgcataaaaaccctaatagaacagtattgagcaaaaaaaaataatcgtggggggaaacaggtattgacaagagaaatttatatggcaaataacaacaagttggacataagaagcagtatcggtcacgcggagaagtgatgaagggaatatgagggctatggtgtgatggtgtgatggtggaagggatagaagaagaaaaggttcgggagaaagagctcgtgaggaaacatgaaagcgtatagcagattggccggctagggaccttatttacaaaaataaaataaaatagtaatggagatgagattcgcagctaaaaataatccaaaagagagaaaactccgtgttatcgaggtaagatgagaccaagaccccaagagaaaaaaaacggaaaagttaaagagttgatttggctactccaaaagaagtttccaatctcttccctctctctccgccatctctttcaccatcccccttccaaacgctaccacatgcgccacgggcgcacacatccccatctcaatcggccacgcaaacctcgccggcctgtccggatcgatctccctcgccgctcccagattatccccgggggcaggcaaagcttggtccgcgagctcactgtggatcgcgttcccgtacgaggtcgggaagtagtgccgtaaagtgcggagggtgagatggaaacgcgagatgtggaggtactgggtcgcatcggaagattggcggaacgagttgaagatgagcgggaggaggtcgggtgggagggaggaggaggtggaggaggatggggagtgggcag

SEQ ID NO: 71 - DNA, 3041 bp, Cryptococcus neoformans
attctgacgttcggaccaatcatcgttctcttgccgatgtaaactgttcacaaattagtagcgaacgggcgcaagtgtgatgtcatgcgcttacttgggcagacatcaacgaatgtacaatcagctgcgatgaagttctcgccttcaaaatgcaaattgaagccctatcatggtaatttcaatgggaaatcttatcataaaacttatataactcacatattcgcagaaaaatcgttgagtgattgatacattttcgcctatgttggcaaactccttccaaagctccatgcgcttctcatgatcaggtgttctcgtaatttcatctagtttgatagcaccacgattgcgaagacggtcaaggtatttgtcaagggcgaggtagggtttggtggagatcatcaaagacaactgggtagggtcttcaccttcctcgggaggtggaataagcttgttggtaaggtgaggagcaggagcagggggcatggtgaagagcgactagttgtctccgtaagtggattaatggatggctatacaagatggaaagaagaaagcagagatgtagaagggaataaaaaaggatgactggtagtccgattgtattattatatagtctattgtcgtattgtttatacgtactcttctttcggcttggcgcttcagcggataagcgcgacgctcgtcatcacagagtcaagcgttgatacgggacacttgcagtcaaagttcagcttaacagcctgcgcaattcgagcgatacatctacttcgctatgcattgccatgctgaccagttgcacttatataagcatcatgttcgccagacagtccgtacttcttccttcaccttgacacccatttgagatttgagctgtaaaaacagcaagaatttgcttccgtccaatatgtcacctcttacacctaagaccgcccctgcattggccgacaacgtccttgagtaagtaccccttctccatcaatcggctcctgccctagccctaacgatgcctcagtttgttctctctcaaggggtaagctttcaggcttcatatcgcaatttcctttcttaccaaggctaccagtaaagtcgctgtcgtgactggtgcctctgtcggtatcggtctagctgccgctactgccttcgctgaggccggcgccaatgtcgttctgctctatgcaagaagcaagcatactgaaaagaccgcttccgatctagctgctcgaacgggggtcaaagtcaaggcctatcaactcgacggtgagtgggatctctctctatctttctggctggggtaatcagtcgacgtatgactgacaacctcctgttgttaacagtgcgggactatgacgccactcagcggttggttgaaaatgtcgtgaaagagcttggcaggctggatatctgggtaagcatactttggatacggaatacagaacatatcctgataagttcttcaggtagctaatgccggtattccccaagacgacactatcctcgatggcaaccggaaacactgggaggacatcattgccgtcaactacaccgctgttgtatatcaagctcaaatcgttggaaaggcatttaagaagcaggggaacggctcgttcatcattacagcatctgctgccggtatcgccaacatccgacctactgaccaaggcgtttacaactctagtaaagctgcagtgatcgctctggcccgttcgcttgctcaggaattcaaggatttcgccagggtcaactctgtgtctcgtgagtaaacttcgttatccattggtctaggcctataccaactgtgtattctagctggctatatgggtgatgcacaaggcgcgccggagtctgagattaccaatgccttgactcgtcaggtcctcaaccggacaggggagtacagagagcttgctggtgcctatctttaccttgcttccgatgcttcgaccttctgcaccggcacagatttgtaagtaccaccagtgtaaccatcttctctcatcgtgctgaccaagttgtaaggattgtcgacggtggctatcactgctaagcgtaaattgaggttgaaaaacgctataaataatattacaaagcatgtatgttgttcgcgcccgcatttattccacgcagagaatgagatcagacaaggctacatgtccctgcgagcgcgaatacatttaggctcatttcttgtcctttctgttcctgctattttcagttgcgactcaggattcattgataaatcaaataactctatttgataaatcaagtaactctaagctctacccttttctcatcattcaaagatgtgggccaccagcccttcgtcttcttgacatggtgctgagctgtccyccgtgagagcgaacgcgagcacgcatcaagtaaatttatatcaagatacattccccaaagtatttccaaagcgatatgtcaaatgatatccccttctttcttaacttttccagtgcttactccaggctccactcccaagaccttatataatgggctcaggagcatgttagagcgattgcttgcctctttttgatctacaacatggacggctagacgagtagttgttatcagtctcagttcaccggaagaatcatcacgccactcactttcctcggacacactcggggtgagccagcgaccacaagtcttccaattgatcggtttctccggaagccgcctgtttcaagatacgtcacataatcttccctgacctggtcttaggcagatctgaaacaatacagattttcttcggcgccgcaaaagggcctaggacggaacgtacttgagacgcgagctctttgtgaagggtgaatggagaacccttgccggtatcagaggccgacttcagatttacaaaggcgcgaacggcttgtttgaccagtgattccatctagtaccaacgacaacaagtctcaacgacaccggggtaccattccgagcataagccaagaagactgcggcggctttccatgtcataggaaagctacgggctggtaagtacaagagcaaatgactgacaacaaggcaacacgcca

SEQ ID NO: 72 - DNA, 2994 bp, Cryptococcus neoformans
agcagcagcgggtttctcctcggccttttcaccctcaaccttagccttcttagcaagcttcttcttctgagctttgctcaaagcggcatcctccttagcgggtgactcaagctcttcagccttgcgtttttgagcaggcttggcttcggggacaggctttttgtccgcggcaggcagggccttcttagtcttgggagtgggttcatcgggaatttcagtaatcttgctgtcacaattataagcattaatcacgagccaaccataattgacttacgcgacagcagcctcctcctcagagtcaagctcaaggtcgtcatcagagccgtaaagctcagagtagtcatcctcgccatcgaaatcagagtcagactcgtcgtcagagtcctcgtcttgttggatgtagttgcccataaggtgaacaacgctgccccttctatcaacagtaattcgtgggaagtaaagtgaggtacgtacttgtcaccagtgacttcaaacacaacaacctcaccacggacaaaagtaaggttgagagaagcttgttcggtctaaacacagtcagcgttaaatacagggcgcttaagaggtaatagtttcaccttgccggcagtaagggagcagagaacgtttgtctcctccaactcatcttcgaagtcgctctcgtcctcgtcctcttcctcactgtcctcttcctctaccttctcggccttcttacccttcttttgctttacctcctcgacttccatctctccgtcatcctcttcagaaaggatctcttcatcctcatcctcatcgctccattcgtcgtcgctctccaacattgactgagagatggggttgtgggtaaccttaacgacagagcgaccatccttagagcggagctcctcaccgagagcagcgttggtgatctggaaatcacgtcggacgtaagtgggatattgttgaccagggagaagggtcaagctctaaaaacaagtcagctatgatttttgtttaaagatcgatgacttacccaaagattcatagcaagaggcattttgttgatttctgttttgtgatggaaagagaagagacgatgaaaaggtgtgttagcgttgaaatatttctgggatgccgccagaaaaacaatcaccgctctcaactttttaaaactgaaggacagccacgtggccaaagtggaggggccggaaatagcgggataagggatgtgtggcaaacggggggagggatgacgcgctgtcattcactcctggcctctgcaggacacttggcaggaaggaacaaggaaggaggaaagaaagataaaccaggatacaagaatagacgaaacactttagcccatcaagctgactcaaccattatggtaagtcccctcacctgtccgtccttctccagcttatcatacttcacgaacaagtcaaacaccctccgtccttacctcaacgccgtccgcgcaaccctcactgccgcacttaccctgtccaacttctcatctcaagtagttgaacggcacaataagcccgaagtagagtgcggcacctcgccagaggttgtcctccatccgttgatcatctcgaggaatgagagcgaaagggtgctcatagagcccagtgtcaactcaatcaggctcagtatcgcaattaaacaagcagatgagattgagaagattctgtgtcacaagtttaccagattcatgatgatgagagcagaaggtttcgttattctcagaagaaagcccttacctgtaagcactcgttgaggcgagctggcgagctatcagcctgttaacaccctggcagggctacgacatctcgtttttgataaccaatttccattctgaatcaatgctcaagcacaagcttgtcgatttcatcattcaatttatggaagacgtggataaggaaattagtgagatgaagctttccctcaacgccagggcgcgaattgtcgcagagagttacctttctacggtaggtttatcatcttcatctcgatagatactgattgggcaatacagtttgcgtgaggaagaaatcatactagattataccaacatttgtatgggatgtattgtaacaattttacattgcatgctgtctaaaaattgaaccacaagcgtcaaaatatgccaaaatgattatcgccttctctcaatcctcaccaccagatcttgcccaagtcttgcaatctccccgataattgcctctttattaatttccacgagctcggcctacacattaggtcgatgatcagcatcatcaatatcagagaaacgaatatgacttacttcggactttacaggcataccgttccaacctaagaatgatttcaaacccctcgcgccatcccttgcaagattccaaacgccgcccactgcatcgcctccgtgacggtcaacaaagaacatgaggctgtccccgtaaatctttttcagatcgcggacgaacaaagcggctggatcaaagtcgatcctcataccatcgctttcttctgaggatgaagtgaggttgcggtatttgaggtgaggctcccataaagaagggtcaggcaggatggattgagcggacgtcgagagaaatttgggagatagatggataatgatgtcgtaatgctccaaaggagtgatgaacagtgcctttaacagattagtgccgcacgtaaattacaacactgatgtactaaccgtgacatctagactccccttttcgatactatctttgacggccctcacagtagctcttgccaatgctcccacgcgtaccgccacagccttgccaattccttttgtccacctcatcccttccacatcctgctctgtgcatacgacccacgcatggacattcccttcgttaccttcagtgcccttctccttggcacggagatgctcaaacaatttaagtgcctcctctttgagttcggcagggaacctcacgcgcccggacgcggaagctgaagttggagaagaggcactgacgataggaatgagcaagggctcag

SEQ ID NO: 73 - DNA, 3268 bp, Cryptococcus neoformans
tgtagactcctctttttcatttattgtctactgcaggagtaaattgattctcaaagacatgatcgaaatgcgaaagggtacaatttttactgtcagagacattcagccacccatggccaattgttgcatcgatgactgaccactactaaataaaaacgaattaatacattaacaatttgaatcctaaccgacggcttttaatgtcaagaagggtaaccgcgtaatgttgcaatggtcagtggaggggatgcctacttgttgtccttccacacaagtaaagaggaatgggtcacgagggtcgcagctgggcaataaacgctttggcatttctgacgacgaactttgtcacaatcaaacaggtgatcctttgcgacacgatgattatgtagtatgctttgattcagttctgtcgataagcttttatattgtgtcaatgactcgagttgcccaagagtaacatatttgtacatctcacgttctcttcttatagttggtaacttgaactgttgcgctaatttacatcaggcagacttttgacaatggagctttccgacatcgagaacccttccaacggtcctcagccattaaagtcgttgaccgagctaccaaagagattgtctggcaaaggcatgctcccgccaaagaacttttttttaaaaaactttctaccccatggctgttccggaccggaactgatcttgttgcttatagatgtaggaaaccctacgccttgcatccctcttgtagtccttgttagctgctccgttctatcccatttggcgctttcgaacgagcggatgacgcagagaaaggaaaaagaaaaaaaaagkcctgaaatgagaactcaaagaccagcacgccgacgcgtccagcgtgggaatctgggaagttaacattccaacgcaacttctgctgtccagcgagatcacaaaccataaactcgctctgctctaacctcacgtcatattttcacctccaagtcagacacaaaagaccgacaatgttctcctccgagatagcgcgtatgaggaaattgggcgttcagggggtaagttctcacgctcaaggctccagtgtatgttatcttgctgataagtttatcccttatactctctctctcctcgctctcgctttgtgtgtctatgtgtgtgtggtgctctcctctcctctcttgccatcggcttgtctttgcaatggatgaacggggggaaaaatagatgcttttccaagcactcaacctcttaacggtagtagcctctgggcttatgatgtggaaaggtctctgtctgtttacgaattccgaaagtcccatcgtcgttgtcctctcgtacgtctcctcatcattctcgcgctttcatttttaaagggtgggtgggctgatacagaggaaaatgtggtgtattatatgatgtaggggatcgatggaaccagcattttacaggggtgatatcctgtttctcataaaccctacggatgtaccgtatgaagttggggatatcactgtttacaaagtgtatgtctctgttttcttctccttttggtcgttctcgagtggtgagctgataggacgtaaaatctggtgatgtagccctggaagtgaaataccgattgtccatcgagtgatagaatcgcacaccacgttagtttttcccttttttccttttacacaaaccatcttacaacctcctcccccctttctcccggcaaaaaaacagaaacacaacccaactcctcctcacaaaaggcgataacaacccgggagacgatgtcgtgctctacaacggtcttcaatggattgagcgtcggcatattatcggtaaagttcgagggtgagtgacttggctcattctctcatatacatccactatccgctatcacctagccactgcttttccatgctctcgtgaaccacccgttgtaccccttctttctgccttggaaatgtggtgtgatatgatggggacgaggaccaggatgaagagggaaaataagctaaccaaaaggcctgataccaggttcctcccatatgtcggctacgtaacgattgccatggtgagtccaactgtcctccaccctctctattccaatcacttcaccctctaccagggccagacgtaaaatagctaatcatggttttcattttggcatcgtaacgaaaatatagaacgattacccgcaactcaagtatgcgctgttgggtaccatcggcttagtcatgctcgtccagcaggagcaatagcagagcttgagtctgatagatggacatgaggggatttgtatcatatatgcattatatgtttttggggtttctttcaggcggaaggtctatgcacgtgcaacgtttattgggccaaagccgagggggagaatatccataaaagttgttgtatgcgaagtggtaattcacgaaaacttcgttgggtgacggacaacgcgtttggtattgttgtccgatctcaacggtgtcaaacgctttcgacgtgtcgatattcttgttttttggttttattttgggagatacaccttttcatcttatcatttacattttacgttacatatccatactatctcatttcgcgccggattggaccgagaagagtatccatatctctacgaaagagggaaaaaggaatcgacgactagcgatcactcagtgaccaacgccgctaccaattcagcgaccagctcatatatcagctaccagcccaaacccccaagtacctaccgatctaccatgccaaggtcagccccacctttcaattccctatcgcgagattgtgaacgtgagaaaacaaaggaaaaacaagagctgatcagcgcggcgggcctgggtgaacagtgcgacagaccaaacgttggaaaaccagaatgaggaagagttgaattctctgcacagtaaaatcagatctcttcggtcggtacgtctttttcctgcgtgtcgtagagtgcagggcacaaaaaggcgattggctgatgtttgggattgtgcaaaatgtaggtgacgatcgatatcctagacgatgcgaatcgtcagaatgatcaggtgagttggttttgtttggtgtatgcatttgctggatgctgacttgatatatgtccagctcgacagaactgtatgtttcttggctcttcttattaatggacaagaatctaacccccggtctaacccccgatctcttcactattatttaaaaaaaaaacagaccaacacattctcctcattcgcctcgtccctrttrtccacctcgcgccaccactctcgctccgt

SEQ ID NO: 74 - DNA, 3203 bp, Cryptococcus neoformans
atgctaattcacacgaggggttcataattaattaaacttcctttcacgacgccgctgtatctatgactgtattaatagtacattacatctatcagattaccttataagagaacagccgagtgacaccagtaccctaatggaataaattgagattacacactgtcgtgacacgtgcaaccaaggtgtgccaaaaaaaaaaaactgcgtcctcccaactttgaagcccttctttccttcttgaagaactgctcttgttataaatgatagcttttatttagctccacgctctgcatgaaaagagaagagaagacatccttattatagacgaacattccaccaccactacttcctcttcttgtgttataggtgcgtgttatttaggtcttacctggcggctatgtccgcattaataactactactcgtaaataataaataaagaagacagaagacatcctcggctataatactagtagacttagactgattgatacgcctgatagagtgcgatcaattattaaacccacacaagatccatctttccttgcaaacgagaaaccttcttcaactttcatcggtcaaccataaccaaagtggaagaatcaacgaaaatggccccagcacccacacagactcacgctccggattcacaaggctacaattcagatgccgccgcacaagctcaagcggcagagatgagcgtcattctttgtactgctggatgtaagtatcgctcatagcttataaatctatgtggacatgagaagatgggtaactgagtgagaggtgggtgctgaccgggctacatacagatgatcataccataagattctgggaagcgtggagtggtatttgctatcgacaaataacactctcaccacaatgggtccgttcatcttttttcgcagatcgctagatgtatagctgctgagagatagatgcagaaacaagtgaacaggttagctatcagtccgaataaggcgtatgtagccgctgctggaaatggtactgtccggtaagttggcatgtcatttcacctcgagctgttttagctgatgccggttaggatatgggatattcagtcattatcgaacactcctgtacgccagaacatcatggaatgtatatgactgacgaacttatcttgcagatagcaacccttgaaggccataccgggaatgtagttgctctagcatacagcgctttagggaaatggattgtcacgggtagcgaagacggaacagtcaaggtgtgggacacacggtatatcactctgatcccttgctccatgtgataatatagctgatggattcatcctggtacaggacggctcaaactcaacgtatatacctacatgattgccctgtcaacgacgttgtaatccacccgaatcaaggagaattgataagctgtgatcagtcaggatcagtcaagatatgggacttggcggagaacacatgtacacacgaacttgtgagacacgttcccgttgttcatatcacaaacagatactgacaaaggataggtaccggatgaagatgtacctatcagaagcgttagtatatcatcggacggaaatactctcgtagctgccaatgacggcgtgcgtctcatcttccgttctcacattcgagtccaacaactgactcttgattgaacaggggatggtttacgtttggcgtatcattccagtgccgaatgccaacgctaatctcgtccctgtcaccagtttccgagcccatacaaagtacatcactcgttgtcttctcagccccgacaccaagtaagcatttttccttttcaatctgaatctactaatgcggtcctatttagataccttgcgacatgttcagcagatcatactgtcaagatttggtcaacggcgggaatagactatactcttgaaaagactttgacaggccaccaaagatgggtctgggatgcggcgtttagcgcggactccgcgtatctcgtgactggtaagccttcgatctgccaaaccgctatggagagagctgacaaagtgcttaagcctcgagcgatcatgcagctaggctatgggatttgagccttggggagactgtgaggcaatacgatgggcatcatcggtcagttgtcgttactcactcaaacgttgatagtatgactgattggtaatttagagcggcagtgtgctgtgccttgaacgatattaaccttgcgtgaagcactgcttcgctacttgtaacaactcttgggcccttttttgtatttcgcattcttttggaaaatggtgtgatgtgggggtacagatcgtaacagacttcgttgaggggaagtcatacaatcaatgcattaaaagtaaagaaatgaacgattgaaaacttgtattcgaagctacagacaacggactccctcgcttgctttatcgtaattcttccaaaataatatgtctatgtcccattcattcgtgctctattctttttcttaattatagtcttaacccaagattctcctcaagtccttcttctgttccggggtcaatcgggtggggaagacaacattccacttgacaacaagatctccgctcttcttcactgaactggcctttgagacaggcataccttcgccttgaatacgcgtttcttgtccaggttggacgatttgctggataaggtcaacattggtaatcgtgaacaaaatgatgcgaacttacaccttccggtaaggaaacttgtatcctccttccatcgagttgctcaacctccttagtgatggcaccgccaccatcgggaccaagaagggcttgggaaagggtgatgttgagcttgacgacgagatcatcgtctactcgttcaaatcggttgtgtggcttctcttcaactacaaaggcgacagttctgaagaaagcaacgttagcatccgtcaaaacgataaggcgatcaaacgtactgagactgtccatattcatcctcgttacccgcaccagcaaacttgatcttggtgcccttcttccatcccgccttgtatgcaacttccaaaatcttctcggcctgtccgccgctctgtaaatgcctggtgattttcagcctcttggtgccgcccttgtacaattcctcaagagtgagtgcaagaggcttaatgatttctcccggaggagggggagcggaagaagagggctcatcaccaaaaccaccgggcatgccgcccataccacccataccgc

SEQ ID NO: 75 - DNA, 3130 bp, Cryptococcus neoformans
ttctaaatccactcccaatctaccatctctttccaccacggcgtcagctccggcggctaaccatatccgctctgctccctccggcctatctgcacctataaacgggcttaagggaccgttagtgagaacagcacctgcaacaccacctgatgggtgcccgcagtcaaagagacggcgagcgacgatttcgagtccgttgacaaaaaagtcaggggttgcaatgggaagcgtggctttagctcctgcgccagctagcgctgaggttggggaaggggcaaagacaggagtggccgtaggagcaggaccaggagcaggggtgccgaaaccgacccacacgacagtgacagcagcgcagaagagagcaacgagggctagttttggaggtttgccagtgaaacctgcgagcgggtgaggggtatagttggagttggctttcgacgtgtttttcatcagggcgagggtgaagggagattatgctcgcggacgtcggaatataaaaacttggttgttactcgtaggggaggtatctgtttccagtctcccacaccgccaatgtaaaggtgtagtacatatatatagctattctccttgaagaatgaatgaacaatttacgtacagtttttttatggtccgtatagccaagggaaaaggagacacagaaaaagccccccaagacgaagaatcactagctcgaccgaaaaccgccacatccctgcaaagtctcggccctgtttagccacagttcacaggaatcacattacataatcatcagctcatttagagttggttgaaaacacggttgtaatggtcctaatgaatttcccaatcaagtaaacatgaggttaataaaaataaataaataacatacaccattcctcaccaccgccacaacatctacccatgttcgttttgaatcatacatccacctttttcctcttcagccctttcttttcccctccaacgctcccagaggacacagccacaaccctcctagccaaccatgcagacaatcaagtgtgtcgtagtcggagacggtgccgttggaaagtaagtcctcgtcattccgcatgagcctctcgccggtacactgcaactcacacgatccataggacctgcttgctcatctcgtacactaccaataagttcccatccgagtatgttcctaccgtctttgacaactgtatgtctttctctttcgacgtattagtaatcgtccgctgacttgtatgtgcctgaagacgccgtcagtgtaactatcggtgacgacccatacactctgggtctctttgatactgccggtcaagaagattatgaccgtctccgtcctctctcatacccccaaactgatgtcttcctcgtttgcttctctgtaacatctcccgcgtctttcgaaaacgtccgcgaaaaatggttccccgaaatcgcccaccattgccccggcgttcccgcacttattgtcggtacccaggtggatttgagggacgaccctgctcagacggagaagttgggaaggcagaggatgaagccgattacacaggacatgggagaaaggttggcgagagagttgggagccgtgaagtatgtggaatgttcggcgttgactcagagaggattgaagaacgtttttgacgaggtgagttttgaattgggctgaaggaaggcccgctggttgtaagcggagaggaaccagagagtgatgccaatggaaagggagttatatctcccggtgcccatctagaaggtgctccattccgcgcatcagcttcgtttgcttctttgaatctcggctgcccataacacacatggaaaaggatcagcggctgatgtttttatctcgtaggccatcgtggcggcattagaaccccctatggcgaccaagaaaaagtctaaaaagtgtctcattctttaaagacaccccttctttttggcttccctttcgcccattatctctatctcattcttcgtctatcattcgcttttcatttctgccatcacttccttcttgatccaagatacccaacattcctcatcccttgtcaaatatcagcttgcaatatttttcagaatttgaactttactttgcctcgcccctcgctgttctcaaactcatgtcacattatcgtgttctaaacttcccctactcgataaactcaaacatccgaaactgatttccactctgtatcccatcccatatttcgacttaatctatcgcttattcaaattactccatctcttttactctgcctttcgagcatattcactccctaaccctcgatgaaccgatcaatacaacattcctccattttttcagactctaccaccacgtaaaccaccgaagcaaaccgatgagaaatcaacgaatcaaccaaaattaactgtggaacatgagggattgttagtggaatggaaactgttggcaatgacatagaatggggtttgtgttcgaaacgggtagaacttgccgaggttgaagcttggcgggtctggagaaagttgaaaatgatttcggattgtctgagaataagagagaaattgggttggtcgactgatgtgcagcgaaatgaaatggggatgaggggggagggatggagatggtgttttctttgattattgagagagggaggtaggagaggaagtggacatgagagaaggaagacggggcgaagagttgcaaggggccgttatacctatcttacacagattctccctttccgtctttacttttttcctcctagtttatctgcttttattcctcttccattcatatacgtataccccgagatttatatacagatctttatataaaccccctgtgaattgatgcttgatgttttggtttttttcactgcgtttccatcttctgcatttagagtggttcttatcctgtttccttcgtcctttgcttcgccttcagatattatccatcggttgtgagggaatcgggcatccatgggacgttgtgctatgtcaatcaaagaatgagacaaatatacctgccacgatcattcttcaattagcaacaaagcagaataaagtgacagacaaaagatcgaagtttttctttttctttcttccacggacgactttctgtttctatgcctaccctgcgtgcttgctcttactttcagat

SEQ ID NO: 76 - DNA, 3114 bp, Cryptococcus neoformans
taccctctcaagggcttcgcgtggtgcattgcaagcggtgccagatggtagacttggcgcatagtcggcctgtgagcgatgaatcgtgatgcttggagtagcgaaaggtattgccgatggtttcctgattgtaatttctagatgagattgagtgggatcccccagatagcgactcttcagaagatgttgtcccagttcgtggttcagcgattcgatagttccgtaagccgagttgctcacaaactgtcaccacgttttgttagtgatggaagataattgagcacaagtgctgctagcacaacttacgtcgtatatttcatctgcaaatcccttgtgtccccaaacattccagtcgcctcctctgaccttgacatccaactccagcctctgtttctcttttctctcatgctcatgtagtcccacaatacacactaccttcaagtcccggattgtacaactcctgccggtttcttcgccatttttggcataggacgccttgtacacagcttctagagcatgtagcagtgcctttggaaggcctagacggatatctacgctctggacatcgtcaaaccctagcgggatggcactgacagcgcgcatcagctcccatggtccgctccataccttttcggcatcattcgcaagggcatataccgctttggatactgaagagtaatttactccaaggcctgccatggagtcccctgcggcggtggcagagacagagttggggacgaggtgaattgtgagggagagaagggctggacagggaggggacggggtgaggtgaaaggcggacggacctaggccgtgtggcaggtgaagtgtgagagatgagatggttatcgtatccgggggcatgcttgaagagttatgcaagcggttgtggttcaaaataatgtactgcagattcccagatcggtgtcgaagaaagcgaaataataataatgtaagaatgacctccaccgcgctgctcgactgctattgattactacgcatgtcggtactggttcgtccgtccgttccgggtctctgctcatcttcttctctcccgctttaatacaagaatcattcagcatgttgagtgagtcggcccacagagcaatgccactgtatcgtatccgtctgctcacaactcacagtcgtcggtcttaccggcggcatcgcttccggtacgtctctccaattcggctgctcttggccttccggtctcacacagctgatctctcaaaggcaaatcaaccgtctccaaactgctctctgaaagacatcatcttccgattatagatgctgatctcattgctcgcgaggtcattgagcctggcacatccggttactccctcgttgtctcacactttggccctgaccgcatcttgcaggaagacggagtatcgctcgatagaggagctataggtgatatcatctttcatgatcctgaggaaagaaagtggttgaatggggtcgtgcacccgagggtgaagaaggaaatggtcaaacggatcataagatattggctaaatggggaatggtgtgtgatcgtcgatgtgccgctattgattgaagcgggtatgtggaagtgggtgggggatactgtcgtggtatatgtgtatgttcttgatggcgcgccaaggcttacatggaaaccatttctaaccgggtgtctgtgtagcaatgagcgtctccagctgtcgcgcctcctcggtcgccaatctaatcctcctttgacccaatcccaagcttcaagccgaattgcatctcagttaccactrtcggccaagctttcctacgccacgtctgtcattgacaattccggttcattttcagacctgaacgaccaggtcgataggacggttgccaagtggaaggcacagcaaggcggagattccggttggtggtggagggtttgctggttagtaccgcccgtggggctagcagctggtgcattgagcttgctagctgtttggaggaagggcaaaaaagacaggaggagagggagaggagaggtctcaaggagggacaattccgagcaagcatcagaaaggatagagctcatggaactgaaggggggaagacggagaactgcgagtgggagtgtcacggacgaagaataaatgttgcattatggtagccaagttaaaatgcttgcattaatgcagtatgaaatgctgcccggcattttacgaatcataatgtcgcacagtggtggtgtcgcttcgtaaatgttgcatggctgatatcaaacagccccatatcgtacaaacagccaaaatcatactggtggtagaaagtccacgactaagatcaaacgcccctacaaggcacaatatactctatcgttgaagacatgtatatatgctagattaacattacaacttccgacaagacaacgcatcccactattacccagacactcaatcgagctttcctcccaaaccttgcactaatgcctgcaccatgttccttcttattgacagcccttcacggtacctgcacgagatccagccgccggcaccacgcgaatgagccgcacggaccaccaactctgctgccatcttgccagtattgatcctattttccccgtcagcgtcgcctccgggatctagagtcgccttgagagcgtgccatgcatcttcgagggtaaggttttcagcatcgctccgaggattggcttccgtgtgcgtgccaccgaacgaacaaccgaatgactgacagagacgcgtggcaaagaccaaaaggccgggatcattgacgacatgagaatctgagacatggcagcagctcttgagacgggtgagaaggtcgagttgagaaggagatggggcatggggaggattggtcaagggtggagaaatgggagaaggtttattaacaccggagccattggcgctgctgtcgccattatgatccgcggatgagaacatgctgaacatgccgccaaagttgggtgtagcagaagtggtgttgttcttgtagagagaattgtcaatgttgttggtgaaatcagcgaactgtgtatcgggagacacggggaggttgaagggcatggggagctggtaattgaatggggcgggagagacatcggcgggagagttgaaaagagcaggaacgttc

SEQ ID NO: 77 - DNA, 3227 bp, Cryptococcus neoformans
  misc_feature (3059)..(3059): n=g, a, t or c
gtaaatgtccattcacgacaaagtggatgggggaacgagcgagaagatgaggcaggatgggcgagagttgaggagtagatgtgagtcggatcggatcaaggacaacaaccagggcatcagtcgagagaagagttgaaatgaccggttccgtctcaaggtttcgaactatagattcttagctaatactcatagctggataaaataaacccactgttgacttcgacaacatcgtaccccgtagcttgaagccatgaagaggacagagacaatgactgcggttcgcggttgagtcgctcaccttgactaacatattatgagttgtagaattccttatcaaacacaatccacacacctgatttcaaaaacatcaatgtttgcatcctgatgtctgctgacgagtgcttgtctggtggtggccgagtctgccagaggatcttgaaggagagctgagacaacatctcggggagcagcagcggtatcgccaaccacttgattgcatgtgtcagccattacagataaccaaaaagaaatatgatcgctcacctgctattcttcccctgcgcttgacagccaaatcctccatggacctcttgactctcttcgcccatgagccatctcctccaatttcgttttccaacaggacaatgagctcctgaagtacaggaagaatggttgtggctccctctaccggcgttgctctcttcgaggctgcgatgaccggtaccggatccgcgtcaggccttgcagttacagtggaggcataagttcttgctggtaatagaaaggctagcctgtaaagtggccgttgtgtgcgatgggcggctgctatgagtgtccgcctgcgtgttgatgatcttaccacaaaagctgcgtggcttgcgagggacatggcttccgcgtggaaatatatgagtagagctacttcttggctacctcactactaatctcggggggaaagaggagagtgaaatattatgtaataactgatttacgtaagtgtatgtacgcgtctggtgtctgacgcctggcgcaacaagtcaacaagcacaaataataaagacagtcgctgacttctacccactatatctccaccgcagtccctatacaccttcatatacgccactcttatcgtatttaatcacgctctctcaccatatacccccctaactaccaaaagcgtcttgtctatcttgccctagtcgcccattcgacagccacgctcggtccttctccacagtacaaagaccccagccacaccagaagataatccagccactcaagccaaactccattcatttatatttcaatttacaacttcagtttaaacctactttcagtacctcagcagatatggccgatcaaggatacatgtcgtctggttctggcagtggccgtgcttctggtggagaggggagtgacagaaactcgtgcgcatcaaaacttgaactctgaagttactgagtgtactaacgcaggtattatgtgcagaattgttctcaaagtaggcatggttggtgattcgcaaattggcaagacatcattaatggtcaaatacgtcgaaggcagctttgagtgagtgcagcggctttattacacagtgtctaacctgtgcaattcagcgaggattatatacaaacactgggtgtcaactttatggaaaaggccatcagcatacgaaatacagagatcaccttctcagtaagcatatacttgcctctttatctttcgttctcggactgacgaaccacagatatgggatttgggtggtcaaagggaattcgtgtcaatgctccctcttgtctccaatgatgcggtggccattctattcatgtttgatcttacacggaaatcaaccctcaatagcgtcaaagagtggtatcgacaagcacgtggatttaacaagacagctataccagtgttaatcggaacaaaatacgatcagtttgcgtctttcccaagagcagagcaagaggaaattaccagacaggcgaagaggttctcaaaggctatgcacgctccactcgtatgtagataatatcccacttttgacgggttacttgctgacgatgagttggtagattttttgttccacttcacactctattaatgtccagaagatcttcaaaattgttttagcaaaggctttcgatcttaaggcatgttgatttccgtattcttcgggaagggtattaacttttcattcgcagtgtgtcattcccgaaattgacgccgttggtgaacctattttactctatgtcgatgtttagtcatccacgtctgagatgtcaacgattccactatcatatagggcacaggcgaatagtgaagaggaaacagagagaccgaggacagcctctatctcttttaattcaagtagatacggaccacatagcttttacgagggttgcaacgtcttgtcatgccaatctctttatcgcctaacgacgaaccatgcacgcatcactaccggccaatcgcgtatagtttcaccaacatccttttcaatgtgctttactagttatatctacttcaatacgagtaccatcacatatacagtcagcatcattaccgtgatggcgggtttatttctagtgtgctgttgttgtaatcaaatagcatgtcggccaaggccgtgtcgaggcctcgacctccattttcactttaacgttgagtgacaaatgatcaaaagatgatccgctgatggcaaagcgatgtgtcgcaaacatggacagacaactgcaagatggacaatatactccacacccttatatgtcttgcacacatgtagctaacaaaaaacactcttatatagcaccgcctagtagcctaactgattatcagagtacacaaacacacctttgcaccttctgagaactattgaagcgccccagaatggcaaatcaccaccctctcttgtctgccgtgccacaaccatcacccaccacatacggcgcctctctatcgctacagaccagagccaaaaatcaactcagcatgagctcaaacacaaacgcatcccccttaaagaagtccaaatctackatcccgatgcctggggntagaccgaaaaggttatcgactacttcaagtttggtgaagagaggttcgataatgatgatgggggaattcggtggcgatgggtcgggagatgaagtaatgaaatgtgctgcaccatctgtatgcgctgaccacttggtgtagaatgctggattgaaaaggatgaacga

SEQ ID NO: 78 - DNA, 3229 bp, Cryptococcus neoformans
gcagtcaacaaacgtaccagcttctgatttcgcatatacgacgcccagctcgtccgctgcggttgacaaatagtagctccttgcatcacctaaacttagctataacattgaatctttcagcgcggtcgctcccgtgagattcaaagattgagaaaaactcaccaccttcgccttaacaatatcgcctaatctgaaacattcacccattttcaccttgtctctttctgttaacctaatgtccgcaattcgaatcaggcccgtgaaatcttctgaagattcgggaaggggacgatcgctcaaagttgtaagagtcatatgtgcctgttgaggtgtcaatctagaaatctgagatttgcatgagtgatatttcacagtcgtagtcaggcggggacacttacaacgccgatcacgatggagtctacatcgactgtaccgacggtttcctccctccctataacgctgacaacctgcatagaatctatcagcactatacagtacacgacaacggatcttgaacatggctcacagcaccgtctctccgtggtcttcccacaacactagccaagatttgaccgttgcgctcataacaaccttttccgcatttcggtaggggcggggtgataagttgggccggtaagggttgaccgggcagaagcaacgatggtgatgacataaccgacgattgtgggaccgaattaacgaatggataacgtctattaggagacagaacgatgaaaggctggaattgacgaaatcaatgcaaggtgagtgctcgagtgggtcgccgtctttcaaaaacagagggaagcctccacctctccgtgcggatcgggacaccccggtggatgtaccctcaaaactaggcatccgagaagtcaggcgtgcctaacaatcgtacttcgacggtgacgaagcaacgcgcgttccgaggcgaatcccattcgtgcaaagagctgtattctcaatcagtagacatctttcctcacttaattcactcataatgtctcgctcttacgaccgaggtaagtaggggccaagcagggaataaggctacatctctctctggcatcctgtcgagctctaaactcagaaacatcgctgacagtgttcctttagctcttactgtcttttctcctgacggacatgtaagtttgttaacgtgtctgcgatcccagaaggttccgctgatagaacatatagcttttccaagtagaatacgctcttgaagccgtgcgacgaggaacatgcgccgtcagttatcttcaatctcccactgtaaaccaacaactaacccctggcgatttcaggttggtgtccgtggtaaatcatgtgtggtcctcggtgtggagaagaaatcaactcttcaacttcaagatcctcgaacggtccgaaaggttgccatgctggatgatcatgtttgcgtggcttttgctggtaggtcgggttgttttcaaaaccctggtttaataattaatgacgtctgtaggtcttactgcggatggtcgtatcttgattgacaaggcgagaattgagtgtcaatcacaccgactgactgtagaggaccccgtcagcattgaatacatcaccaagcacatcgctggtattcaacaggtgcgctgtttggttttgtttcgcacatctcgtctgattagattccatagcgatacactcaatcaggtggtgtccgaccattcggtatatccgctttgattgtcgggtttgacccacatgacactattccccgactgtactctaccgaaccaagcggtatctactctgcctggaaagcttgttctatcggaagagcatccaagactgtcagggaattcttagagaagaactatgtggaagaccttgagagagaacaggcaattaaattaacagtgaagagtctgttagaagttgtgcaaactggtgcgaagaacattgagattactgtgatggagtcatatggtgttgttaaagtgagtatttattcgaagcgaacttagctggactaagctgatatgataataggcccttgagcaatctgatatcgaaaaaattgtcgctgagattgacgctgagaaggaagctgaggccgaacgtaaacgtcaacgtctggctgccacacaagcagggcaagcatctatggccatgggttcttccgtgccttctggtacagagacaccggccggccgccctcaagaacatgcttcagcccctgggggtgacagtggggtgcaatagatagttgatgtatatgtaggctggggggtatagcggaattatgcatgatgtagaatatggatgtctattgtgcagatcgacgaggcaagactgagtagggtctacgcaaaccaagacgacttatcaagtctgcaggcatgcagtagacagggtcaatatctcgtagatctgggtagcccaggagagagaggccggcaactccaaagatggtatggaagacgtcgacccaatcccccggcctgtctcctatgcctccgtcatcaagatcctataaatgtcaacatttgataaataaatgatgggctctcttacctgggcgctcaatatgaagttaattaatttatccgcgttgacccagtggattttgccgattatggataatgaggcgagacaccaccaagaataacatacctacgacaatcagtcagtgtctcgttggtagaatggtgtgacttacgtcctcgagcttctctggccttccgttaagacctccattaggtagctgtctttccgacaaccacgctcctaacaaatctcggtccacgaggtccagtcgatccaggatggttagtgctgctgtgcagacccaaacttgtcctgaatggctctctgtgcccggactaaggccgaatcctccatcgaagttcatgcactttcgaatattttcggtgatgccttctatttgttcgtctgtaaggcttgaaagacgaccgaggagggaaaggcaggagagcagaatataagaaaaacgagtgtctgactctccccatttgtcgccagatacggagccgtcgggattaacaagtttgagaaggactgcacatgaacttaggaatagccaacatgaaaagaagttataaaacatacaagaaatgatacgctcaatatccgcccgatcaagagcgtcttccatgagcaaaacctggattcccgaaagcgtggccaagatgtgaccatcgtgaccaggatgcggtccaaaggtacctgaccgatgtcagct

SEQ ID NO: 79 - DNA, 2596 bp, Cryptococcus neoformans
gtcttcttcggatctctccacctttttttcctccaccattcggccgccggccataacaagacatacagcaagcatataactcgacccagacgaccagtaaacctgctagacccatggcccaccccttcaccctcctcgtcacagtcggatctacccttttcccgtccctcacctcccacgtcctcttaccgacgttcctctcccttcttcaatctctcggcgttcagcgacttgtcgttcagtacggacgggcagagctcaagctgcaggatgatgtcaaacaaacgctcaacatagattcacaaggcgatgggataggggtatggagcgataatgatggtgacagggttagggacgagaagcaaaacgggatggtagtggaagtgatgaggtttacgaacgactttgaggggttagtgggaaagtccgatgcggtgatcagtcatgcaggtatgcatctttctccagaattgaattaagatgtgaatttaactaaaggtgaatttccaaggttctggatctatccttaccgtgcttcgtcgagcacccccgatacctctacttgtcgtgcccaatcgaagtcttatggatgatcaccagtcagagctggctgatgcgctttacaaagatggttacgtcatggttgcttccgtagagtaagttatacacctgctgaatctttgcagtgtagagctgaatgaggcatcgtggtagggaccttgaagagaaagtgcagccgttcttgaagatatggcccagtcaagcgaagttgtttccagagacgcggccagttcacgcaccgatccaggcagaagtcggccagcttgctgttgggggagctgggggggacagtgcttcgagcatcgcggtcgccgagggcgtaaaccttcaggtcgtagtcagcgaaggctaaatggagtcatcagagcaaagggatctcataaggtaagcactttttcgaaagggtttgggtggaagtgcaaacgtggggcaacatcgcatgatggccattgaatgcatacaattgaggagaatgacaggtcagtactgcatctctcgaccgcgcatctttaggtgcgtactgatactttcccgcccagctccaagacaagatccatcatctcgagaagtctacctccacctccgtctccaacaccatctcctccgtcacctctgccctctctccctcttcctccatcaagcctccccgaatggtcctcattggccctcctggtgctggtaagggtacacaagcgcccaacatctccagcaagtactgcatctgccacctcgctactggtgacatgttgagggagcaggtcgccagacaaaccgagttgggcaaggctgctaagcagattatggaccagggcggtttggtttccgatgagattatggtcggcatgatcaagcaggagttggagaagaacgccgagtgcaagaacgggtgagttgggtctcttctctcatgtcatcctgatggagcggttgtggatgttaaaccttggcgcgtgggtttgatgggatttggaatgaggttgtactagcttggttatgacggaagtggcatcgctggtgcggaaacagcaatgttcaagccaatacccgtcattttcaagcctgcagcgacaatccattctctcttccgccctcctttggttcctgctgctttccattccacaccatagtcggacattcaacgtgtctcaccgcgttaactcgtctattcctctcctttccatttcccattatctcatcccttgccttcaacactgttcatgcgctgactatctaccaaacaagcttcatcctcgacggtttcccccgtaccgttccccaggcttccaagctcgatgccatgcttgccgagcgcaaacaagctatcgaccacgctatcgagctcaagatccccgacgtcttgttgatctcccgaattactggtcgattggtccaccccgcgagcggtaggagttaccacaaggaatgtacgtctacctttccttcaatcgccatgcacttttctgacccgtcccctacctcttacagtcaacccccctaagaagcccatgaccgacgacattaccggcgagcccctcatccaacgttccgacgacaacgtcggtaccctcaggaagcgattggacacttatcacgcccagactggccctgttgttgactactacaagggtacaggtgtttggacccctgtcgatgccgctcagagccccaagttggtctgggctagcatcagcagtattttggaaagcaagaagaactaaggaatgggatgaaaagttgaattatgaaagtggagaaagatgagggtggaagggtacagaatggttcagaatggactggagtagaaggtatagaagctggacggtttttgggaaccaaaaacgggcagaatgcattttgcatgggcaacgaaatcacgatcggtctctcgagattcgtgacatcgttgaataagtaaaacgtgaaacctcatccgacttctttgacgtgtctcaaaaccttgggccactgtagctcataaacgtttacacgctttccatgctttttccatctcaaatttgcatgttccgacgttcat

SEQ ID NO: 80 - DNA, 3051 bp, Cryptococcus neoformans
tttaccttccaacataatggttgcaatacgattgctatagccatgacctaaacatctgcagaagaggtcaacacattttgttgacgcttctattggcttgaacggggagcaagcggctcgtgcaccatcatctgcttgggctaagaaacgcatctgaactatcgaatctcttatctgcccagtggccagtgactacctctattaactttccttccatctttgagtgcatatgatgttcgtttcataacagtgtgcaaacgacgcgacccctgcgctggccgctgatcggtcaaaagtccatgctcagtaatgtaaatctatccttacaacatggtaaatacacttaatgcccatcacctcatgtctataacgctctgcaaattgcactaaacaggcttgggaagcttgttgactgtctcgagattatatagcacattacgcgaatagttggagaagagttgagacgtgatgtgaatggctccagcagagtcaaggtattccttgcgagtcgcgtcagcttaacgtgtcatacgacaaacttttgaccatggcgccaaggcatggccagtaaacatactttgaggcagtgatttaattcgataatcgcttcgtttgacttgtcctagacgaagcagtcagcggaagtatggatgcatcttccgaatggtgccaacgtacgacattttttataattcgctctagcagtacagcctgctctgcttcgtgtgggttttccattgctttcgtataaattcggaagaggaatggcgtttgttgttgtttataggagctcgttaaggggtgcggaacgaaatgcggagatattttgagagtccgaggatcgtaccactgttgtttttgctggaatttgccgcgtcgtcgcctggcgtcgttccactttttttttttttgtgtccgattcaccccgacgtcctttataaaccgcccatcttcccgcaccctctccccccccccatccgcccctcgcactccacccaacatggccgctgcagccgcctttgacctgctcgacaagtacatccccggcgcctcagattctctgaccattgtcaatgccaccaccgcgcaaaacaccctctatccaggtgtcgactttgccgccctcaactggctcgagagattatgggcatcctactacgtctgggtcggcaaccccatcattgccaccggcttgatgagctttttgctccacgaagtgcgttggcgaaatcgcactgaccgttggcgaatacacactgaccgcctgtagattgtctattttggacggtgtatcccttggctcatcatcgatgctatgccctacttccaaaagtggaagcttcagcctgtacgtcggattcacattacaagctgtggccgttgctcatcatcatgcagaacaagcacgtctctcgcgcgcaaatcctcaaatgcaccaaggtcgttcttctcactcacttcacctgtgaagctccccttatcctcgccttccaccctatctgttgcttgttcggaatgaagacttacgaaatacctttttcatctatcggtctcatggctgcgcaaatcgccttcttcttcgtctttgaggacactttccattactgggctcacagggctttgcactatggtcctttgtacaagcacattcacaagctccaccacgagttctctgctcctattggtatcgtgagttactcgcatctttttcatctcttgagtcctccgcttaatattgtataggccgccgaatatgcccatcctcttgaagttttgatcctcgcgcaaggaacgatctctggaccattcttgtacgctgtattcaggaatgaccttcacatcctcaccgtctacgtttggatcactcttcgtctttggcaagcagtcgacgctcattctggctacgacttcccttggtctctccgacacttcctccccttctgggccggtgccgaccaccacgatttccaccatgccactttcacttcatgcttctctaccagtttcaggtggtgggactactactttggcactgatgtcaaggtaagtgataccgtctttttttttttcgacttggcggatggacgaatggcatgctaatgttgtctgcgcagtaccacgcttacaaggctcgtgttgctgctgccggtgtcaaggaacgtgcagctgttgaaaagcgcgagatggaaaagctcgaaaaggagggtatcattgaggagcgcgctgcagcgtcgcacagcaagcgggggaagaaggagtagagtggagacgcattttttctatagatcgtagatgtaagcatgctgttgtggcactcatggacgatatatctacctatattttgatacatacttgcgatggtgcgagatggaatctgtctcactcttttccttgaaagtgaatctgtgtgggtgtaataaagcgcatggggtggggttagtgagctggctatcatgttatgggtttacctactaaacattggcacgctttcgattatattttatctatgcttaaaatttaacattcatgatacgctgtagtatcaaaaatgtagaaaaggcccgtgtgtcaaacaaggaaactgctgatcacgatattatcatagtatcacgagcacggctctctcagccatgaaggtcatagtggtagctgctgcatcattatatcaagcatcattggtacccttggtgatatatagtaattatttgggtagtatgccatcatggccggcaatcatgaccatcttcacaaagtctggaatttttgcacagagaaggttggttagataatataaacatatataccagtaaacaatataaaatgctatgtatgaaggatcatgatggaagtttggcccacggcgtgaccctattcgaaagtactggccttggagtaggctacaactatatagatttactcttcaaacgcgaatgccccggcacctgccatcccttcctcacgccccatcattcccatccctctgactacttccattttcctcgaatgccacccgacgttacttcccactcttcctgaagcttcactcagctt

SEQ ID NO: 81 - DNA, 3147 bp, Cryptococcus neoformans
tccgaatccctgttttccgaataattggaaaatttggttagcacagaccccgtcaattccatattcagacgaggaaggggggaagagggagggggatatgaattaaaattgggaacgcactaaaggcacatccgacatgttgtacaccaccacaccctgatgttcgggtgtatcctccgttatccttcccaaatgcgctttggcgacgtggttaccgtagaggaaaggaagttctccagaaggcttaatccagacctaaagggttaaaccagaatcacacaggtcttttcgtcagttccagttccagtaacactcaatactctacaccaaatcctgaccccaccagcccgggactcaagccgtatcgagagacaagggaagctggacgagggataatagataagggaaagagggattggaatagagatggtagatggaaatagagacgcaccttgtactttgcgtacttggcgagatagtccaaacacattataccaagcttgaatttgccagtttttgagaatttaccgaaacatgtaccgagagaaacgagattaggtcgggcgacagaggtggccaagtggagcatgggaagggggagatagtacactctacggccattctttcatgttagtcctttccaggcaacaggagtccagctagaaagaacatacctgtctttgtggagacggaagcagtactcgtcatcctcatccctgtcgatgaggtgaacgaggttctttccgatgtagtttgcgagcttttcgaacacagcctttgtctcttcctctgttaagggcctcattgtaggatgtgtttgtatagagacaactcgaaaagtcagaaaataaccgcccaatcatcagaaatcttcaagacctccacctgtcagtttacgtaatatttccatctcaccatcgacgcgcggtctccgcccaggtgtcatcttcgctttctactgcttcttacttctgcactcgtcacttctgcttgccccaccatgttcagaaactcgtacgactcggataacactaccttctccccccagggaaagctttttcaagtagagtacgctctcgaagccgtcaaacagggttcagcagccatcggcctcaggtccaacacccacgccgtcttgcttactctcaaggtgtgttgctctctcgtggggtcgtggcagctacaatgaagggaacgcttacaaggagcaatgatgtagcgatcaactggcgagcttgcgacatatcagaagaagctcatcaggattgacgatcacgttggtgtcgccattgctggtttgaccagcgatgctcgtgtcttgaggtatgtctttaacattttttcttcttagaagacgacatgctctcttttaaattatcagggttgctaactgcctgtaatatagcaattatatgcgacaaaaggctatgcaatctaggatgacatacggtcgcgccacgcctgtcgctcgtctcgtccaaagtatcgccgaccgcgctcaaacaaacactcaagagtatgggcgaagaccgtatggagttggattccttgttatcggaaaggacgtaggttgaacccttcatctcgccttctgatttcctttctattttttcttttcttttcgaacgccgagctaactcacacatgtcatgtcataacaggaaaccggccctcacctctttgaattctccccagccggcaccgcttttgaatactatgcccactccatcggtgcccgctctcaatcggcaaagacataccttgaaaaaaactatcatctgttccccaacgcctcacttgaagagttgatcaaccatggtctttcggctttgcatgatacccttcaacaggacaaacatctctcctctttgaatacttctatagccattatcggtcctgccgagggacaaggagtggaggatgtgagcaaatcagcagcggcacagagaggtggatttagggtgtgggagaatgaaggtgtggaagggattttgagaggatggaggaggagtaggggggagccagaggaggggccagaggctgaaggcgagtctcaagctgaggcttcagctgagggccagaatgaaggtggggcgggacagcaagagggacagctcccggcggaggacgtgacgatgcaagagtgagggagtaagcagcaaaccggttagattaatggagaatgcagatcgtggcatccgtcctctgggatggttccttcttttgtagataatcacgacggaaagatagtcaaggtgcaccagaatcccaaagccaaagattggagaaaggcatcctaaaacccaagactgttaaaagaaatcgtgtaaacccctaaaagacatctaagagtctaaaatgcaaaaacgttccatgcaagagcaaggaaatgataaaataagtcaacgtatcattcacaacacttttttaaaattatttttatgttattattcatttcaattcctcttttatgtttacgcgtcaggacatgacgtcactcacttgacttgttcagcggggcgagaagtcgttagtttacgatattcatcttctcccgatgttctccaagtgtactcttgattttttcatggtttaatcacgcactacctttacacgtcaaacagccaccatatgatacggcccagatcactccctcttcggtatccaaaccgctccttacctctcttccgattccgcaaccacatttcccgttccattcttaccgattcatccactgctttgcccacttcttcgtcatcagctcctcgaagcacggcatcattctacatctccaacgtcttccctattcagctgggaagattggatttcaggcccagtattgcttcttttcttagagaagaagcgcttctcgaacatctgcatgccattgcaaacgacgttaaagtccatgggttccaagttgaaaactgggaagtcagcaggaaagatgggggtgtgttcttacatttttcctatatcgctccaacagaggagcaggcttcgaaggaagaagagaaggtagatgaggagaaagctgccaggatcggtgtggagtcgacgccctcgtcctacacacaaaaccagcctggtcggttattcatatctcctctagaggaatcagcccagaaacatggaggatggcccagc

SEQ ID NO: 82 - DNA, 3035 bp, Cryptococcus neoformans
gaagcacacaatcactaaccttaatacgtagccatccaaaacggtaccatgactctccgagagcgagattctaccagccaacttatcggtcctattgaggacgtcatcagcgtcgttgaccagcttgtcaagggtgttctcgactgggagggtgccagccagaagttggaggcttacagcggtgtgcaggatgtggatgcttaagaattgtaaagcagggcggtggaaggaggttcttggtagggattagatgggtctaattatgcataggcggtctgctattagtcgtacatggctctaacaatccagattgtcttcttgatttgctggtcactgatcagatacggaatttacatcaactcttcattagtgttacgggggtcatgagtgcgctacaatgtaaaagcatagaggtcgtttccccaaccaccggagagtggcatggagttggctgttttttgtatgatcgcgtagtactactcgactagctaccagtaatgaaggctaggtgcgtccgcgtgccggcagctataataagataatttaatagcgattggcgatcaatcatatactcactgcatctgaattgccattgccatccatcgactttgcatgaagtacagtccatctggattctcacatatatgcatggattatggattaccggttctctcaatgtgctgtctatagtccaataaactgttcgttccggttgcgccgcggtgatttgttgattcaagcgagtcaatttcactcatctcggttcgttatttatatctgtccgatcctcataagccaccggcagcagctctgataatccaccatatctttcatcttgtctacatcgcatctgcctcaagatccctctatacccaacttacttgcatcaagcacgaacaacaaccgactacaatgggctacactctcgctgttctcggtatgtcgcgctttccctcgtttagcggaacatgagctgacgctctttctaggatgcggtaccatgggcatcgccatcctctctggtgtcatctcttccctcgaaacccgcgcttctcttcctcgcaaccctaacgcctcttccgaacctccttccggtatctccacccctaccgcctcccaatttcttgatgccccagaagcttcccttcctagcactttcatcgctaccgtcggacgcgaggagaccggccgcaagctcagacgcactttggccgacatgggctctatcgggaaacaagtccaggtccgcgctggtcaagggaacgtcaagaccgtggacgaggccgatgtcatcttggtgtgttccaagcctcagattgcgaggtcgatcttggaggaggaaggtatgagcaaggcattggagggaaagctactcatttccatctgtgcgggtgtgaccatctcccaactgaagagctgggtgcccgagagcacccgggtggtgcgagctatgccaaacactccttgtaagatcggagaaggcatgactatcgtgacccccctgtctgacgctctttctcgaacacttatcctcaacatctttacttcttgtggcagatgtcgattcctcgacgagaagcactttgacgcttgtaccgcccttgcgggctctggtcctgcgtttgtggctttggtgttggaggctatggccgatggtggtgtgatgatgggtttgcccaggtctgaagctttggaactagctgctcagagtgagtattgggtagaagtcatgtgtaacctggattggtatgctgatccatgattgtagccatgcaaggaaccggaagaatggctcttcaaacaggtttgcaccctgcccaattgaaggacagtgtcactagtaagccccattctcattcttcccattcatgcaccatgttctaatcaagccttcagctcccggtggatgcaccattgccggtttgttgacacttgaagacggccgggtgcgatcaacgatggccagagctatccaagtcgccactaaccagtaagttttatctattctctcttttctccggaaatctgcagctaacggatttcaaagtgcttccggcctcggacaagacaagaagtaaagaaagcaaaggctttagagaacggtggtggtaggactacgaagcgggcaaaagtgtgatacattgcgggcccatcgatatcatatgatagagttattcatgtaggcatcatattggctattctctggaccccttgtgttgacaggcccaccatattgcccggttattgcaatcaagtgatcaacctctgccactttcttttctattagtagtttgcggtggttcctttataagtcctcaatttgattgaaatttgattgaggaattaggaacgggggacttttttaaagtgatgacgtttacactttccgcaacgactttccgaattccgtcggccatcgattcgttgattgcgcgatggcgataatcgaaaagagaactatactccatattcctttgttcaacaggaattcaacttgtggaaaaccagcaagtcatgtccacagaagaaacagcaagacctcttaagccatctgtccaagctacagagctccctaaggaagcttctctcgcctctgtacgttctatctataccttgtcattgacccgcttaacgccctgcctctagctcccgtccgaatcttatcctgaaatccaccaaggcgcttccctgctcctcgctctccgcctccaagaccgccaatgacgataccgacgagctttgtgtcgtatgtgtacgatgtatcgagaagaccgccagtggggatacacagatctatcgaaatgatcagcttggaggacaatgtcagttacagggcttgcttacagtggaatgctacaatgttccaaaccaaaccagcaagctgtaatgcagataaagtcagtcacgatactgcaacttatcagatatttgacttaccataattggaacgccaaacatcaacaagccccgccgaccaaccttgtcaaccaaggtcataccgacgagaacgaagaacgcgtttgtcccagcaggaa

SEQ ID NO: 83 - DNA, 3154 bp, Cryptococcus neoformans
agatgcagaagacggataggaatgagcagagaaattatcagggatgaggggctacgggggtagcattagttgctgctcggcggtgacttttgtgattgtaaacgaacgtacgataacctgatcgatttcttcgtcggcactgacgctaggcatcctcacatccaaagtttcgccagcaccttcagtgccaaccttactttcaggcagccccggagcgacagtcacttgttctggaggaactgtgtccgggttcacagccgaggttctctgcgagatcacttggggtccggggccagtaacggagacccctggtgcgacgttggggtcaacctccgcatccttggatgaagtcccggtctttggggcgtcagacaacttgccagaccgagaaagtgaggtagtggaagaaatggagcggaccgaggacgggattggagggacaggcggcagaagagatgaggtctctgcagactcgagacgggaaaccaaagtggctctggaagcaggcagagttagatactagccagccggatgccatacatgcaaagtcggccaggccaaccctgcatagcagatctgtactcacttgttaccttgttgggaaaggccacgtttcttcagctcggccttgagagtgaccacagtctccgtcttccactttgtctgggaggtgaggaggacagcggacgcgagagtcctggctggtggtgtggcaggggaggggcgggaaggggttgcggccctgaggaggcctgaggagagccttcgtctgatcattgcggggagatgggataacagattgcagtgacgttgggaagagcgttatgtaccggtggagcggagcggttgtttgtccaggacgcgccggatcgggacagttcggcgatacgtcacgtgacgcggctattgtggcgggctgcgaccgattacgtattacgtcaaccccccaagctgccatcataatagagccgcccagacgatacgatttacaccgcacaccatgcgctccctcccctccaccctcgtacaccgcctcttctccgtcgccacctccctcctgctcttcctcctcgcgctcggacccatcccacaccatgtcgctttcgtcatggatggcaacagacgatacgcgagagagctcggtcagcaagtagagagtggccatgctgaaggtttcaatgccctcagaagagtgagctgccgctactcgcagctccgtacctactaatcgtacatgcaagactctcgagatatgcctacgattgagaataagagcagtgtcgatatacgcctttgctatagacaacttcagcaggtcagaaaaggaagtcggtgctctgatgaatctcgccaagcagcgtcttgcagagctgtgtgaacatgggtgcgcatgtctcagtctacagccttttatttaccagtgataacgcgatttatccttgtaagagacctgctggaagagtatggcgtcaagatacgctttataggccagcttgatatgctgccacctgatgtgctccaagccgtccgcgacatggaggctatgacccaggataacaaaaagtgagccttttgttgttctggaaatctacagctgataagttactctgcagtggcgtattgaatgtatgctgtccgtacgcttctcgggatgagatcaccactgcgatgaaggaaagcgttcggcgggcatatgagggagagcttgctccgaggtgaataaaacccggctgtccagtgatcggttaacgaggatgctaataacgcttaaagtgatatcacagctaaggatgtgttcgattcgctgggagtgtctaaagcaatcaacactgtggacaagagtctgttcgtcaatcccgaagagccagaaaaacttgatatactcgtccgaacatcagatgtcaaaagactaagtgatttcatgatgtggcaggtgagttcattttccagaaaatatggacaaataccgactgagtatcgataggcttcagacgatacccagctgcactttgtcaaaacctactggccagagtttggattatcagatatgttacccattcttcttggatggcaacaaaaggcatggatgcggaaacttggttggtgttgaacgcgagtgtcgagtggtattgtgtgatgcatcttacgatctaaagactctataacgaattaatcgcaactaccatcttccggcccgtctttccatctcacgtccaaatttttgatatcacatccaaatttctctttccccaatttttcattaacctcgttatgcctctcgcagagccatttcatcaaactctctctcccactgacatcgggcggatgtcggcgcatatccttttggaagtccgtggcacaccacgagcagggataaagcaaagacagtgaagagaggagattaagcatactggactgggtctgtgggggtgcgttgattggataataagcagcggtagtatgcagaaaagtccatgtagagcgcccaagggctgcggtgtcaggtggacaatttgaccggtctggcgttcggtctaacggtgcgttggtaggagcttttgaggcgcctgcaccagacagcatgctgccgaatcccgccataccgactgctgccccggacccagaaacattcttcttctcagcatcctctccaccactggcagccttcttcttgactttgatcttggcccaatcttgccacgagttgcagactttacatggtttgccatcagggccgatgatgaggcccggcggtaaatcggggtgtgtctctttagtggttttgaggggttgcgcggggatgtctgtcgtcatgggtagcaatgggagaagatgaattgaaagtggacggttagatattgcttggtaatgaatactaacgtatagatttataaagagtggtggacctgcaagaggtgattaattaatcgctaaccgaggagtcgcggggggcttttcggtgctctggacaaacaaaacagatatgtactactaatttatcgatataaacatcacaacacctcgggcattctttcttcgttccttccttcctcccattcacagataaggatgcccacattctgccaatgcttccacaaccgctagagcaacgcccctcaattctccctgtctctccctgctcaccgtcgctctc

SEQ ID NO: 84 - DNA, 3149 bp, Cryptococcus neoformans
aagagttgtggtaagaatccatatgtatcgcaagtctagtaactgccatcagttactgctctcatcctgcatcgatcaacgaaacacacctgttccattccttatcctccctgctgttcttcttgaccatcgtattgtctataggctcgctagcggttgcgattacactggcagctggagattgaatgacagatgtgtttaccgagctcattgacggcctaatagaagaaaaggggctgtattgcgagacgacggtggcaaatatgagaacgctgataagagcgatgacgatcacggatgcgaatgtgactgaaccgttgtaattatgatgggtgattcttttgctattcctgctgtaagaaggtcgttggttcgtgcgttggaagggcataaaagttgctgaattataagaaaccgtacttattacttggcattccatcatcctttttaacttttatggagtgagcaacaaacctgcgtgcattatctcgcgggggatctgcctcggtaatcttcgatgaacggttctggaactgtttgtcagccacataatagccttcttacagccatccatttaaggataattgaaaaggccagaccaccctccaccgaccgccgggcccgtacgcgtgggccgccgggacaacgtgatcgccgatgccggacggcgtttgcaggccgtgagggctgcggtcttctccgacaacggcaagggccaagggattgagcctgattctttgccacgtggagcaagtgagactgataaagcacgtctcttcctggggggcgatggccgtgcgtcaccactcatcgtgggtcactgctcacacgtcgggccatcgatattacttcatcccagcttgtaaatataggcaataccgagaagtatccatattgagaatcagaatgatccttttagaagtaagttgctgaatgctcacacatttcataaagatattaattcagaacacgctatagtcgcacaacactatcatcaacgatgtcctttctgaccgtttcgagaggtgcgcatctcattgcatgtctccagcatcctgatcgaactgttatgctgattgtatagtaggccctctcgagcagatatccagttcgtagactacgacaatgtccgattccacctgtccaccccgtcatccaagactcagcttcttctctccatgggtatccaatgctggcctgaccttgtcaagtatggtgcccgtgaacatctccaaaacgagtaccaaggctatttcctcgctgaggctgatacagagcctgagtacgatgtcagtttgttgattgatttggaaagattgccggagagcccgggtacgtggcgtccacttgcttgatgacacctggtcgagatgctgatgggtagctttcaccagaggagcgagctgcccttatctccaaaattgcccatctcaagtccaccgcaatgtcctctcctttttttgccgcttttgcagaacaagcgtctcttcaagcatcttacaaggagcctgccggtgcccagcaagcagacttgcaaccatccgaggtcaagggagatttgaagattgtgaagtaccgcgaagaagaagccatcttcatccaagccagccacgatcgagtgactatcatattctctacggtatttaaggaggagacagaccgagtatatggaagagtgttcttgcaggtatgtcggaaagatataataaaggagataagcatttaatccgcttccaggaattcgtggatgctcgaaggctgcacagtcttcaaaatgctcctcaagtcatgtactctaaccgcgagcctcctctcgaaatccgacacctccctggactcaagaacggcgaagattggggctatgtcactttcggtacatatatttactgcttctttatgacgtgtctaacccagtcatatagtcctcttccctcgtcactttgcaaatccatcccaagctcttgcgactatcaaccgtatccagctcttccgcgattacttgcactaccacatcaagtgctccaaggcatacatgcactctcgaatgagatacagggttgctgaattcctcaaggttcttaatcgagcgaagcctgagattgctagtgagaagaagaccgctagcggtaggacgtttaggtcacgttagaaaagagaaaagaagtgttgtataccagaccttgtcataacgttaggaaaatgtgttatgaaggatattgcaagccgtgaaggaagagcaatgtcgtgaaggctgcttatacccatttctgaatccaatgccatctagattacaatttggagcagtatgtgagcactaccactttagttgtatagcgctcttttcacaaaggcatcgtgaagaaatgacagattacattaaattacagatcgttcgtatacagatcttgaaccatagaagtattcgagtagtcattacgaatgtaaagtcatttgtggtcgaaatcagccctaaatagacctttccgtcggtgattcctcttgtttgtacatctctgctttctccgccccgtgtctttcgtcatccatccacatttctcccgtcccttttgaatgaaggatcagaggatccgacggaaaatatgatacgtatcgtgataatcattggatgaattcatctcctgctggttgggttgtgcacggagattaagtatcactccggaaaatcacaaacatgtttgaacgccactgcgccgaacgccgtaacgccgcatgtttgcgacttatttcttttgtcacccttaaagtcggcgagcgccgccgcatctctcgaccaacatggagcttgttacgcagcaaacatcgtccactctatcctccttctttcattctcatcttcaccttctctttcatccttccctcaccactaccacatcccctttcctcccctatccccttcctgtgtagcgcttattcccttatcgcctcctcactcgccactaccctactccattcactcgttcagacggccacttgcgaaagggacaaacatcccatatctccctccatcctcgcctctattcaatcaactggacgtctagcgactaccttagtcctggtctagtatccctgtgtcgatcccaacttataaattactctttaatcataatcggtgacagcctgtctttggc

SEQ ID NO: 85 - DNA, 3125 bp, Cryptococcus neoformans
atttcgagcacattgcgaaggatgacatcggaatgtgctgggtctaatggtggtaacacaaccggagcagcaggaaatgaagtgggggcaggagtatgattcggtggagcgagcaattcttcttcgtcgtctaaatactctacgggaggtagcccatgaggcgcaggggaactagccggtgcagcatactggctggggccggaaaacgacctaggggtgtgtgcggacggtacagtctcagatagcactggagcacgggaaccagcccgtttagcccgtttgtcgcggggagttttagcagggctctcgtggacctttccgtcgtggctcttcgttctgcgaattgaaggtgggctcaaaactgttgttgatgcatacaaccgggatggaccagcgacaggttgttcaggttggtcagctaaacgccttttaggcggaccagcgacgggctgtgcaggtcgttcagctgaaaaaacttccgatggaccagcagttgaaggagatccgtgcactctgtgcgcctgagcgtgcgaagagacgttgcgatgcggcggcggtgcttgtctcgcagacggacgagggatcgttggatgggcgtcttcccgtctcactctcttcgctggccgacgggcatcttgttcgctgtccgagtcgtctatgattataggagcatcctttctcccgcgtacaaccggtgggtgttcgagtgcttggattgaagcgtccgagcccgagtcgttgctgttgtcgggattcctttgcttgtgtttggtggtgccggctgtatgcaggatgtcagaatgcgagacagtcggcggccgcatctgtatggcgggagtacggggagagggagaattatagggtgagatggaagtgactgatgcggcggccggcgccaaacaaagaacatgaatgatgatgatcaacaaataaatagaccgatccggacacctgcattttacgtaagatttctttctgggtcaacgcgacagcgtctgtcatgtccaacgaagcctctttatgcaacagactctatatacgctcacttttctctatcacagcccaagatgtttatgacaaggtaagcacacacgctgaccagacacagctaacggctcccagatcagagtacgaccggggtgtcaacaccttctccccagaagtgagttcgtccacagttcgtcatctttccgtcactgacgcttcatgcagggtcgattattccaaggtgcgctataaacggcgtgggacaactagcagagaatgctgactcaactattagtcgagtatgctatggaagcgatcaaggtaaatatgcctcgagtctttccaacattcatttctaatccataatcttagcttggttccacaacagttggtatcaccactccccacggcaccgtgctcgccgttgagaaacgtgtcccctctcccctcctcgaatcctcctccatcgaaaaaatcatggaaatcgactctcacatcggttgtgccatgtcaggtctcacagccgacgcccgaacaatggttgagcacgctcgagtcacaagccagatgcacgcgttcacctacgacgagcccattggtgtggagagctgtacccaggcggtttgcgatttggcgctgaggtttggtgaaagtgtggaggacgatgatgcgttgatggtaagcactattctttccatattctgaaccagactttttaactttccatagtctcgaccgtttggtgttgcgcttcttattgccggtatagatgagaagggtcctcaactgttggtctgccccaaatatccctgctggcagcatactgacccccttcccttagctaccacaccgacccctccggtacatttgtccgctatgaagccaaggctatcggctccggttccgaagccgcccaacaaggtctccaagatgcttatcacaagcaaatgaccctcgccgaagcgcaatctttggcgttgaaggtgctcaagcaggtcatggaggagaagctcgacgagagcaatgttcaacttgcgcaagtcacaaaggaaaagggattcgagattctgggagagcaagcattgaagggcgtcattgagactcttgcctagaagaagtaaatgtagaatatgcatgactataacgataatatgcctccttatccctcttgatcctcactctggcttgaacaactttagacttttccattcccatttggctgctctttcccatacacctcccataccctttcttcatcacctcttctgtcatttctgctgctcccggatctctcagctcgaccatgacaccaatctctcccttgttcccttctccatccactttaaattcaactcttttccattctaaccacactccggtccatcctcctgaccctttccggctcggttccccgagacaactgaccaattgcctacctgtcgtggtaggcgtaaacgtaatgaaaggcggtctcgctatgctttccggcggttctgtcgatttgaatttaggatcccgagggggaagcgtcagggtggtagatgtaaaatggatagtcacctctggtggaggcgcgtacacagtcaccgtcctccctggtttgagggccggtgggttgggatcgcaattgaagatatccaccgaatctaaccccttttctggtaagaaacatagactcaagcctaggtcatagtagttgtgatagatcgcgtccgggtaggatttgatatccggcgtggacggtgtggaggaagtggcaaggtaggagatgaattttggtatttgcggagcggatgggggcaagttgaacagaggtgtaagagagggtgggtcaagggttggcatgtgggcggaattttgtaagcacagaaggtttggtgcgctcggtaaaaggaatgaagagtgaaagtagtaatgatgaggtatatggattaaaacgaacagaataaaaaaaactcaaaagcggacgacggtcgtcatgacagccgacgcgaacatgctacaaaaggacaaacgcgtcaagccaaaattcaaccatcgttttactacaggaggcgagccgttacaggtatcatcacggataatatgcagggtatacactatacttgagtataaaaggctatctaacgacaagaaga

SEQ ID NO: 86 - DNA, 3062 bp, Cryptococcus neoformans
aatcgatggttatggggataagcatctcgggccgttcggcttctttttgcaattcatcttctgacctgttgaaaagagaaaaagaaaaacaggttcttgtcaaccacgattcctgagtatttctcctgggagaaaagggacgcacttgtaaacatgcttggtcacacctgcaacctggctcctcaccctatctccaggggtcctatcgcccaaccacgtccatcccctatccaattcctccattttccgtctcaatttccccgccctcatggccgcttgatgttcaagcccacccacaactaacggcgccgcgctttccttccgactccctcctccggcagcgcgccttcgccgtgaaccgtaatctacatcatccggatcagaagccgcttccccaaaatcatcctcctcttccgaaaaatcttcatcatctgacgccttttcggcatagttcaccacccttccccttctacttgatccgagtcctgccccagttgctgctgaagcggccgtcatgcgtctagaggagggaaagggagcgggcgagtcgaatcgcggggtgctcgttccactgcctgaaaatctaccatatcctggcgtactgacgcccccgccaaaaggcatctccctatccaactctgccaagaacgctttcctctcctttggcccgcccgatacgcgctcaggttgtatcagcccggtcactccggtcctcaaccttgacggataagtcgtgtaaagcgcttgggtagtgggttgagtagacagcgatgggtcagttgtcttttggcctggtggagggaggaagaagggacatggtccgggagggtatgtctgaggatgttggtatacggctgcttgatgggagaggactggcactggggccggagatggagctgggcgtgtcgaggtataagaagtccggtttgtgtaggagttttggatggacggggtggatacccgtgtacgcgttgggtacgccatttcgtagacgggagagatggagaaaaagacgaaagatgccatagatgtgcttgaaccgagagcaattgtcgattaccctgattacgtgggggcttaattaaaatacaggtatgtttgttagcgggtggagttattgagaatctccgtgttacataagctttcccggctcattccaatcatccatccgtctccgccgtcggcttcgtcctcagcttcttgctttatagacgaactcgctgtcgatttcactactctttcactatcgcctatacaacatgtttacaggtctcgtaagcccatatcactctcatattattcacgtaaatgctcatctcctccgcagatagaacatacatctaccatctccgccatctccccttccacctccacctccggcttcacacttactctctcctcctctgcgcccattcttacagactgtcatatcggcgattccatctgtgtcaatggcgcctgccttaccgtcactgagttcgactctgattctttccaggttgggctcgcacccgagacgctgaggcgcacgaatttggggcaagtaaaagtgggtgacaaggttaattgtgagagggcgatggctgggcatacgaggtttggtgggcatatggttcaggtgagtaacccattccttttactttcaatgggaatggaacagctgaacagaacgcgggggagtatagggccatgtagacggtacagcgaccatcatctcgaaaatccccgatggtgactctatccggtacactttccaactccccgccaccaccacgcttctcccattcatcatcgaaaaggggtacatcaccatcgacggtgcgtcactcaccatcacccacgtcaacgacgcccaacggtcttttggtatcatgctcatcgcgcatagtcaagcaaagttgacgttgacagacaagaaagaaggggatacggtcaatatcgaagtggattgtgtgggcaagtatgttttgggaagtgtggagagaatagaggggattgtggagaagatcgtggagagaaagttgaaggaaaaaggattataaaattacttttatgcaggtagatccatgcaaacacatctgctactcttctatcaaaaactctttgatctcatccttcatctccctcctccccatctggcgtctcttcacaccttcattcacccaaacaggtaacaatacaggctcgtcaccattcacagtcaaacccgccgtttgggcctttgcctttgccttggatacaaccgtcggaggagtcaatgttgtcaaacatgaataacataacaatggcgcaagcgcctcggtctcgccatgctgaggctgttgttgcttgctgatcgccgtgggttccgttttagtcgacaaaaaagtcaacgctgtacgggacttccattctagcgccgagggatccacaggcctatagacataaatcagcagcttgttcttcttctgtccccccacccccaacttccccggctgatatcacttacatttggcaaacaggacaataaggcctatcctcctccttgccaggaaagaccaatttcgctcctgttctattgatagtcgataccgtcgcgggatggctagctcccagtcccgcgataaaattctccgtcaacatctccaaactcttcacccctcctttcgtcttcccagccgcagggggtggacctgcagaatcccagtgccgagcattgtatgtgaatgaagaaagggagcggagatggcaatagatggctgcttcttttgccgtcaaatccgacatcggtttcagccatgtaaacccaatattctctttattttctccttccgcttctgcttccgcagaggtgatgaggtgctcgagagaagataaagccggttcggcacggacagctgccaattcaagagggagttgccaccccctgcccaatgctgtaccgctgatcaacctctctgcctgccttgtcgacgtttcccccataagcacatgggagatatgaggcaaggtgtgggcgacggtggttaacagggaagagaggatgtgggagaggagctgtgggcgggaagagggagggagag

SEQ ID NO: 87 - DNA, 2421 bp, Cryptococcus neoformans
aagaatggcttgatgcgaaaagggagatggaaatgggttaatgctactattcgtttttgaatgagaaaaaggaaaaaaaaaaagggaaaagaaatatgcacagtccgtatgtcaggaagaaaatcatcacaaagctaatagttacaagacacatttctctttttgattgttcgtttatttcgtcgattttaatgtatcggccgtggatgagctcgaaaggcgggaatggacggaaagtgcctcttgttgagcatgtgccaactcggcatagctgcggttagagggggttaggacctggtgtggagaaggtgaggagtgctcaagatattgattgtggcattctctgaccttgatacgcgttctgcagcttcgaattgaccaaagagtctttgtcactccttctaaccgcaagcttgacgtcaatgtcgttcagtcaaactatcacatcgagcttacaccatccgacgtgggtatgtacgacagagtagtcattcaagatattttgaaggagattgcacaaactcagcaagtcgatttgaatgcaaaacagaggttcaagggtcagtctttgtcctgatggataaattcgcatcgtagctgaccgcaatcacagtggtcatcattaacgaggcggatgctcttactcgagacgcccaagcagcattacgacgaaccatggaaaagtatatgaccaatatgagacttatcctctgcgccaatagcacaagcaaaatcatcgctcctattagaagtcgatgtttgcttatgcgagtggctgcccctacagatgacgaagtaaggcctctttaaactcctaagaatcagttttttactctgagaatagatgtcaacagtcctcaattacgtcgccaagaaagaacgattcatgcttccatcttctgccaacaatgccatccttgaaacatcgcaaggcaatcttcgaaaagctttacttgtttttgaggccatgcggatgcaacaccccgacctgtctggtgatgtcgaggttgccaaacccgattgggagacttattgtggaaaggtcgcggatgcgatcttgcaggagcaaacggcgcaaaaattgttagatatccgggcgaagatttacgagttgctaagccactgtataccgccaacagttgttatgaaggtatgcgaactgctgagaggtcaggagacaagctgacattcgggcttagaccatctcagagaggctagttgagaaggtggatgacacattaaaaccgcaaattgtgcactggaccgcttactacgtgagtccattcagttattcttgctcaaatagaacctgattgtgtgtttcataggaacttcgaatgcgaatgggatcaaaaaagatattccacatcgaggcatttattgccaaggttatgactgtttacaagcaatacacactgtaggatttttcctatagtcgccatttattcgcatactgacagattttgcagtatgggcttcaccgaagactttgaataaactataaaccagtcgttacagttcatgtcagatgtatttctatgatgacatctattgaaacacatgtttttttcattgctcagacgcatctgctaacaccgccaaatcgccaaagctgttcatgaccaaatcgggcacaacttcgttggggttttctccaaacacttgttcatacttagtaacaccgcccatgacaaggagggttcggatcttgctgttacggccgaaagcaatgtcagtagcgaggttgtcgccgaccatcagagctcgagaaggatcaaacatgtggctaaacgtgcgtcgtaagttttctgtggtaagactcaagaatcggagcaacttactgagcaagaatggcgtccatcatcatcttgttgggcttgccaattacaagaggcttcctcttagacgcgttaacgataggaatagacaatgaaccagagcctgtaagatcaatgagctgaaagaatgacacgcaagcacaaacgagtaccgaccagggaagacatcaccgtgggtagggaatgtggggtcggtgttggtgaggatgagcttgcactctggattacggaggtaagtcatggcctttgcaagtttttggtaatctgggggtcatcgccatcagtttcattcctctccacaccgcaacctgaggttgtcacaacttacttatccaagagtcgaaaccacataagacggcaccgatggaatcatcggccttgaagacagtaaagtcgataggagctttgaactctcggtccacaggatcctataacaactcgttagttacctcgtttcaggctttgaaaggtcatgacatacagaaccaccgcagtgagcgataccgcactggtcgagttcctcttccaatccttcttcaccaaagacgtagaccttcttatccttggggaaattcaagacttc

SEQ ID NO: 88 - DNA, 3224 bp, Cryptococcus neoformans
tcatgacccttaatcccacaccatccacactttttcacttctccacctttcttcttcttatgcttctttccacctttcccccctttttcaccattatcctgttgtcgtcgcccccccttttccatcttgactgctgcattaatttgcgcatcgcggaggtcttgacgagatcggatgtcgatttcttcgttgaagagactgcagagctcggcccaggtctgggtagagcgaccacgaagactggttcgaagaatggtttgaagatctctgggaagagagaggaggaatttctctcgacggtcccagtcggccacgtcgaggccgatagacttgccctcagaaagtagagcgaaaaaggcgtcgaagtgtgcttgcatctcctgggaggtggcattctcacgcagagtgagggtgtctagacgccgggagatatcgcccttttgagcgtcgttgccgacactgaagagcgaacaaataagcttgtacatatcatgagcggaccacaaaccgtcgatctctcccgcaatagcctgagagaccgagaggattatggcggccctggccttggactcacggctttgccattcgtcccacttgataagctgcttttcgttgagttccttctcgccactggcgtcgaagccagagggaggatttgcgccggcgtactcccccggagggcggtgactttccccttcaaggcgatagggttccttctcaaatccttcgaggacgcgtcgagcacctcgttcggagagataagcgagaatagcacggcgccaggcgatgaagttcctgttgccgatgagcttggggatagatgagatggaggtcgagtattgttcgtctggcatgctgacggattggactaactaggtgtcgaaacctgttgtggtcctggcgagtgtttaggagctataggacattccgatacggattgaacgctcgagtatagtcgttatgtgcgcttcacgactcttaatctgtcagaaattggtagatgaaatgttgcagaaagggatctagccactacgatatccatatatctggtgacgtggaaggctttggaatcttctatctaatgtgggtgaattatctaaactacgttcacttccgattgattttagttccgaagcgtgacctccggccatatccgctgcttctgcatgaaatgtttttgagaagacgtcgaaagtggaaattcctgcaatattcattttcaggtcataacttaatatcaaaaatcgaggacacagctcaatttcgaacatgacaacgccttccaaatcttcgaacaagcggtttcgcgacaacgaatcagaagtagacgagacgggctctcaaatcgagaaacaagtcaatgccacagcttccacttcgacttcgaggcctgccttatcttcccacgagtctgaaggctcgtctgttatgaagactaagaaaaagaaaaaggctcaaacccctggtattgtgttcatctcgagagtgcctcctggtatgactccgcagaagataaggcatttgatggggcgttggggagatattgggaaagtgtatgcgcaacggcgagatggtaagcttccaattcggcccttgcatttccgactgactacgttgctgtagctcctggcggttataacccaaactcggcaaatcagaagaaacaaaagcatgccagcgccaactttactgaagcctgggtagagtttttggataagtccgtggcgaagacggtagcttcgatgttgaatgcgcaagtaattggtggtaagaaaggcgataggtaggtactaacaccgtatttcaaggagttggtctgatatgtactgtttagatggagagatgatatctggaccatgagatacttgagtggattcaaatgggagatgctcggtgaacaaatcggttagtctaatctcgccaaactattggtatacacgactgacgcatacgcgtagcatacgaaaggcaagctcaccaggctcgccttcgaactgagatcactcgggccaagacggagcagaacgagtacctcaagaacgttgagctggcccgtactctggagaaacgtaaagcaaagaaggctgctgccggtggaccttcggagagtgcaccaaaccaggatgctcactccaggagttataaacagaggaacgttgtggagaaacccaaaactctggagggccagggaatggacggggtcttgaataacatctttggatagaagggaggagttggatctaggtattaataggttgtatgtactctaacttcgtttttgacaactagactttctaggtaatatttattacacgttctctcctttcgcttgaccaccaaacgctcgctcatagcttaccctcacatcgaacattttggcaccttacgccgtccacacatgtttcatccaaccccagacacttttcacccgcggagcttcactgactctccatccggataccttgccgtttacatgccttcatgaagcataggtaagaaattatgatggatacggcctctactaggacagtggtaccgctacaataatggagggtttacattgagagttaccaaacagggaaactcggaattgtatgataacttgcacggagtcgcggatccggaccgtaaggctatcagacttctcttcacccaagtaggctatttatttacagcgctaagaattatgtctgacgtttgttgaggtcgtaaacgaagcgatcactcgcgatgcgtcccgagtcctgttatctgatggcaggctatggcttgtttgccgccgcttggttgatactttcactgatgatgttaaacccaaacgatgcttcatattttagccttctcctttattagggcaacaatgggatcaatgttgatacaccttctgatgcccccgattcgcctcaggttctgactgaattgcccttaggcctctggtgcgccttatcattcaatgatcctcggcccaacagcgaacaatcgcctcccaagcaacctgctagcccagatccgcgtagtagtagtagcgcaggagaggataggtcttaatcaaagaagattgcaagttaagggggaattggtgcatgctggtaacaaagtctatcgactcggtcttatatatcttgtctattctcgtccgtccagcgaagctcgcactacgaacacaacgaatctacgtacatgtttacgtacagcggactcagtccaccttactcgtctcctaa

SEQ ID NO: 89 - DNA, 3227 bp, Cryptococcus neoformans
gactcttctcagacgcagcagctgctcttggagtgtccaagttcgatatcgccatcaatacggtcggtaaggttcttaaaaagcctatcgttgaaacaacagagcaaggattcgacgacatgttcctagtcaactcaaagtgtgccttcttttttatcaagcatgcggccaagaatctcaacgaggggggcacgattatatcactcgtgacttcactccttggagcatttgcgcctggttattcaacttatcaaggcagtaaagctcctgtagagtggttcactaagtcggctgccaaggagtaagtcaggagagctccattgatatactagaactgacatttatatattataggcttcagcctaagaatattagggtcaactgtgtggctccggggccaatggacactcccttcttttacgggcaagagactgaagatgccgttgctttccataaaagccaggcgctcacaggacggctcacagatattaaagatattgcaccattggtggagttcctttgcaaggataagtggattaccggacaagtcatcttctgtaagtcgatttatgagatgacaaggaacttcgttgctgacattttgcacgtcccagcaaatggaggttacacgactcgctgatcaccagataagatgaagaaagacctaagacatttttggaaatgtttcaggtagtcatgtctaagtttagcgctttcccagttcgagaaagatgcaggtgaaattgaatgtggctagcggaagctcggtcttcaggccttttacgatgtttgaaagtaatgtttggaaggctatggctgtatcaaagtgtcccttatagagagttagctgagtccctttattgttttcatgtataaccatgttcgtgaggtcttcttcgacggttcgacctcgaaccctctctcatatattacgtaacatgcgcgtctcggcctttcgacgtgtcgaagccgaatcccacagcgtcggctcgctgcgaggatgggtgttttggtttcattgctctctcgttcggttgttcaaatgagtattgcacctctcaggccttccatgtccgaatcctacgccataaacatgccctcagtcgcagctcaaaccgccccatctcgtacgtattctccgaatcactgctggtcagctctttctgacactcctgcgattgaccagctaccgataagtactctgtcattttacctacatataatgaaagaaagaaccttcctgtaattgtttggctcctggccaaaacgtttgaaactgagtgcgcactattgtcctactagtaatttgatggggaaaagaaaggctcacattgcggggcacagcggaatcaactgggaaattgtcattgtcgacgatgccagtccggatgggacccaagaaattgccaagcagcttgctggaatttacggagaggacaagattgtgagtttttcacgccttttgaatcaaccgcaaagatagactgatattatattgataggtcttgaaaccccgtgcgggtaagcttggtctcgggtaagttctgcttctactaacaaagtcgaatactgatgagagcaggacggcgtatgtccatgggttgaattattgcactggcaactttgtcattatcatggatgccgatttctcacatcatgtatggtttcccttgagcgaaaaaccgcgtgatacatgcttatattgctgcagcccaaattcatccccgaattcatcaagtaagcctcaaaagtgtttttttttcgtaaataaaccactatagctgacgttgctaggcttcaaaaactccacaacctcgacattgtcacggggactcgatattcctctcatccgtctcctaaacctactgcctcctctctttctatcgggcttggtcctggtggggtctacggatgggatctcaagcgtaaactcgtgtcccgcggagccaactacctggcagataccgtcctcacccccggcgttagtgatttgactggcagtttccgtctgtatcgcctgcacgtcatcaaagacatcatctctagatgcacgagcaagggttacgttttccagatggagattatcgttcgagcgcgggctttgggttacactgtgggagaggttccgatcacctttgtggacagaatttatggggagagtaagctgagcgggaatgagattgtcggatatgccaagggtgttgcaagtctatggtggagtgtgtaaaagagaaagggtggaagaagacgcaagcaagggtggggtgttgtatgatatgaatgtacaggttactgcatctacatgtgatcagatataattaggacaaatttgtacaatcttggggcggacatggactaacgaaattaagatttattcactgctacaacaggggactttcgggtaccctttccaattccttcccctcgttcgcacctgctgcgcccttgtccctttccccgcttgtcatcgcccccgctatttgggatgtcccggcattacttgggcctgcgccaggaccgacgccggcgccggcgcctctccaactccaccgactctcataactctcccaactcccttttctcctcactgctcgcacactggcatctctgtcggctcttcctccttccccgcgctctccacttaccccccttaagcccccacgaagagacactgagaccgaaggcgcgtagagtgagaggtgacccatagtctggatagaagggggatattcggctgcagatcggtcacgatctctttcacgctcaacgccacctgcaacagagagcggggtggacgacggctcagcccatgttagaacgcttggggaagctattacgcttgatggcccattatctctgctccttgtacctcctgcgccaggggtgtgagacgatgcgaagttggatgatgcaagcgtcaacgtggaagcgttggggtctgggggggatgatggatgtggattgtgtccgggatgagggtttgtatgtttcggggcttgaagtaaccctagggctggttgtggagggcttgcgggcgatgtagaagtaggagacgtcggagatacaggcgtgctcgcttcggaggtatggatattcggaatgctttccccaccacccgtttgggtcaacgaatgttgagaagcagatctatgagaggcgttgggatgcgacccttgggcaatatgagcgattccaggaccagagtcgaatgatatgcacgttgtggg

SEQ ID NO: 90 - DNA, 3104 bp, Cryptococcus neoformans
tcaactgcaagaaaaattcgcttactcgttcattgatttaaacccgactgcagtagcagaagcatctggtgattcttggttagaagctgatgaagcagtggccgagctcgggattgggaacagcccggaatctactaattcagatctgacaacagacagattatgtggttcaccatcctttcaaacgacacaggcataagcatccggaccttgatgccactgctttcttgacacgttcagtgcgctaacactcacctcagccatagcgtcgatctgaactctgttgcccattttccctactctgaccctaaaattcatagcactttgatcatgccggtactggaatgagtaggaatcttcacctcgactgttccacccttcggcaagtcgtccaatgggcggttgtgaattgtcctcctgctcgaccgctgtaacttcagacatggcatcatcgttatcgccaccagaccttggttgttctaacttggagttatcatctactggctgaggcgcaggcgagattaggcggaattgaaggscggtatggattgcgtgtaccaaggccgcaatggcgtcggtggagagcggcaagggcgatgttgttccctgaggtagtaacgttggaagaaggcccaaaaggctagcagcatttagaggatctgacatgtttgagactttaagtgaagatggaaaacggaaatatagttgcgaaagacaatagaggtagccggcggcgtgcagtatcatatgtcatgaccataggtagtagtgaggggggtttagagggtggaggttacgtaaatggggtgcacatttaatttcgtgtgtcactcgcgtcagcgttctggacggagctcttactgaactcgacaaggtgtatccaaaagtaccatctcgaattcatcttcaatcttcaattcaattcctatcaacatgcccggcttaacaacggcacaggtgagcttataattgccgaatgcgaattgaatgagcaatattgatgcgsaaatatcataggtcacagaacttagcggcgtcaatgtgtacgtcaaccacatcgttcactagataatttgaacaccagactaacttatgatgttctagcgttatacaccctttagttcttctgtctgtggttgatcacgctgcccgagtgcccttgtcgaagaacaagcgagtgctgggtgtgctgttaggacaagataatgggacttccatcaacgttgcgaacaggtcagtcatgagctgaatcaggttctaatgggtcggagagacattaaacaggagctgacaaaacgatgacctttactaacagttttgcgattccatttgaagaagatgagcgtgatcccaagacattcttcttagatttggattatgttgaggaaatgtggagaatgttcagaaaagtcaacggtaggtctatcctcattatcctcgtgcggatcggatggctcatatcaccgaaagccaaggagcgccctataggattctaccacactggtccccgtcttcgctcatccgacctcgagatcactgaactcttcaaacgtttctgccctcgacctgttatggtcattgttgatgttcgaacttctggtggccgaggtgacactggtatccccactgacgcctactttgcagttgaagagatcaaggatgacgggactgccactcaacgaacatttacccatgtctcaacctctatagaagccgaagaagccgaagagattggtgtggaacatcttttgagagacatctcctcttcgtcatccgccccgtcatcttctttactcaccacgcaatccctttctacccgtgtcgcgtcccaactccaatcacttcgtggtctgcacgctcgtctgcatgaaattggagagtacctcgaagcggtacgtagcgggaagatgccaattaaccaccaggtggtgtatcagttgcaggagataattggtctcttgcctcaacttggaggagatgtggagctgggtaaggcattcaggatgggcgtgaatgatcagagtttagtagtgttcttgagctcgatgatcaggacggtgttggctttgcatgatcttagtacgttccctgccgttcgctctgattttaattctccttattaatgatcccgttactcagttgaaaaccgcatccaaaacgctcaacaagatatcgaagacgccaagtctcctgctgaaaaggccaacgaagctcgagctgaagcagccggtatcaaggcagaggatgtggccaaggcgaagaaggacgcggaagaagaggagaaagagaagaagaagaagtagagtgaatagaccacgttttatctggcgctcaagggtgtatggccggaggtgatgcggactgtaatgttttcaagacgtttttccaatgcattgtaccgtacaaagtgcaatttgcgaggccctacgactacagatcgtgattatgttacattttgtaccttcttcatacacggactgccatctgctgctgatgtgagtggatgtcatatgctatgtttcaatttccatgctattgcaaaggttcacaactgaataaccattagacatcattcttcagctacagctgatgctggaatatgcttacctagaggacaacttgttgagagaaatatacacgtccgtcccgtacccgtccatagagatcaatctgagatcgccaccaaagaatctagcgtactgtgcggtagttagcatatcagccttgagagtaatcttggaaaaagtatgtaccagccttgcgaggggaagcccgtagctaccgaggagtcattgtcagttattgtgttgatgggcaagagcacaaaaagggcaacgtacccgaaaccagccatgggggctttgaaatctgactgttcaatggtcgcttctaaaccttcgtcactcattgtagtatagaggtacctgctccagatcagtcgacctgactctttgcctccacatggacagtaaatagattccgactcacgtccagatcatgggaatcgcactcctgggaatccccccaccttcatccgaaatcttgatggtgatatcctccctaccctcaactacaactaccttgatcggggggaaagcttcctc

SEQ ID NO: 91 - DNA, 3283 bp, Cryptococcus neoformans
taccatttcttaatatagctgggtcatcagttaattctaccaacatttgcaagggtgaaacccactcaagggccttgtccgttacatctgcaagtaccacctacaaccacaggtcaaccacgaatagctctgaagcaggctcgaatacccactttaagaccattctgggctccaacttgggcaattccagcacccataagcccggcaccaaagaccgtgagctcctcaactttgcgagtagctgaagtggtggagagatgccgctggacggttgagagtctgtaggtagctgcgcgctgagaagacattgcacttcggagcacaggtgtgatcatatttgtatgaaactttatggaatgagtcaaagaaatattttccttagaaggcagacagcgagtatgcagctttcgaagctcttcatatccctccgccagtgacgaggccatttacctcgcgagagtgccgctcttccgcttaacaactgggccggtatttaatacgtaattcatggtggctacgcaccgtgggaaatgcttgtttatcttgggcggagatgcccgacgtccgttatccgtaatcaccgcattaaaagcatttgcctgtttgccgatcggatcggtgcccaggtgatccgataaggtcgcacttgtctccacgcctacaaacgaacttcaaacgaaagagcagggaacgctaaataatcgtaatcgtttactctgctctcattcctcgcttcatctcccacagcacatatatataggggatctcctgtagctcaaataccacttccattgccaattacatctcatttcagctcatacgactaaactccatccaaacctagcacgcacttaaaacgataacacccatcagcaatgtctcatcctggttacctctccgctgctcgatacggtagataaagactccgatggggccagtagggtctgctaattccatttcataggtaaggaccttgtaaaggtcgcacgagtcgtccgtgatggtgagcaacaccatatcgttgagtacaccctccgaggtgagttacatgtcgtgcggaattcacgaatgaaacgcgaactgaggttatggtagtcctccttgaaggcgagattgagacctcttacacagaggccgacaactcctgcgtcgttgctaccgacactggtaagtcacaaagcacgcagcgcgaagttgcggtgacgagaagctgacttataactgtcgtttatagtgaagaacacttgcaacagtacataattcttgtttaccccacaggtcttcccccaacaccttgtgctgacaggatctgacagtctttgccaaaacctccccttacgtccttgatgcccctgtctttgccctccatcttggtttgcactttgtcaccaaatacaagcacatccataagtgttttgtggacataattggccttaagtggagccgcatctctgtaagtagagtccaagtgattaggtttctgaatcgatactgacaaaattcaggtcgacggcaagcctcacaagtggtccttcatacgagacggtgacgaaaaggcgattgttgaatgcgttgtggatggcactgccggccccgacgctgccaccgcgaacgtgaaaattggtatcaaggatcttcttggtgagtaacgagaagcatgacttcagcacgtgtaattaacgtgtaatggcttagttttaaagacgagcggatcagctttcgaaaacttccaccgagatgagaataccactcttgctggtaagtgactgcagggctgtgaatatgactgcagggctgtgaatataatacacaaggctaataattctgcagatgttgcagaccgtattttctctacatccgtctctctccaatgctctatttcccttcctcctaatacccctctcaccatcgacaaccttgggtctattgccaaggaactcgatttccctaagatgaaggagcttatcctcaaggatgtcctcgacacttttgctaccgacgaaagcgctagtgttcaagctactctttacctcactctccagaagattttggcttcatgccctgccgtcaaggacgcttctatgcagttacccaacaagcactacatgtaagtgctttcatattatcaagttcaaatcagttggcgctgacatttgcaatagacctgtcaaccttagtgcttttggcttggacaataaattgggttacgaaggtggtgctgaggtcttctaccctgctgccgatcccagcggttacatcacggccactgtcaccaggaaataagaaataaggtcctgtatcgtatagatgtgcaaatgtagagttgaactgttgtttttgggatttgctggcatatagccgggtttatgagtccatagctgtgttcgcattgtttgaaatagacaattccaatgggtatagatagatagattatatcatcaaaaatatatctttccagaatgataagacagtcgatcaacgtgccatgtcgatgagtagctccgaaacaaaatacaggctcagtggataagagtaaaagatggtttactaaactgccagatgtctcgatcaaataatcgacttgggcattggcgacgaagaggccgcggtgtataccatcataaacttggcctttaataaaataagtaaataagtaaagtacataaaaatctcacgttttcccagttgtattaggacagatgcccgagcggttaaggggacggtctcaagtggaaaacactttccctaattagggttgaaatccgttgcgtaagcgcgtgagttcgaatctcactctgttcattttttttgcatttttgggccatcagttgatggcggatgtagagttttcggccaagagtcgcggtcaaaaacaacgcgacggcggacgcagactcttaattagtttgtacgtatcatcgtcgtacgtttgtggggatctgcgtgtcgcattgtcattctcatatctctcgttttatttacttaaactgaaatcagtattctttcttctgtgatacagcgtcaacctttctacttggcagcaggcgaatcaaatctctggaagcatgtcctctcgaaaatggtatagtgagtacttggccttcttatcctccactccaccggtttgtttttctagcttcaaaaggctgacagctacggttgccactatcttttcccgtctattttcaacccatacgatctgatggaaccgtcgtactgaacctatgacccggggattcaattgttgcctcgggaactgatcgtcagacttggaagcccagac

SEQ ID NO: 92 - DNA, 3085 bp, Cryptococcus neoformans
atagagcggttctgggtagtaagctcaataatagacaacaaacggttcccagggttacggtgcgagtggtatgttccgcaggaagtttgtggtctccggacgagaagtcaaaatgattaccagaatacagtggatatatgtagctgaaagatacttttatgcgttatggaagcgcttgcccgacatgtaccgtatacaacagttagggctctctatatcagcattcgctgcatttactgtcatacttactcgcagacatcacgagtatcagatcagcatgcaaagataggcatccctgagttattcagcgcataccaccttggatcttctgacttaccataccgagtcgtacagcgcggtaaaagcagaagaaaacggaagaagatgacaagcatcttctagaattaagaatgaacaagagttatcatcaacggggcaagaaagcaacgaacgcgtcgatagccgaaggggccgaaagaacgaagatgacttaacggcagtaaccgctttgccacgattcggagttttttacagcgaaacgccgggccaatacgggtgccacttccgaggtgttccgatatctccgcgccgtgctgccgttggcactttggaccctggaccagtcgccccgtggtccccttcccaccctttttattcctatctctttctttctttttctttttacttcacttcaccgctcttttcattctccctgtacgaggtcgaaacgaggttgacgaagtaagtcttacttccccttttccctgcaaacggatggcggcattggatgagagtactaggtaaaaaagaatgcgcgtgtttaacaccgtgttttacgaggaaagaagaacaggaaaaaaaattggatcgtgtataggacgtccgacgtccttattcgacattgaaactcgagctccttttgttccggcgacctttcatcaccctttgcgcagacttcccattctttttaccaaggcgctgacctttcgtcttagtaaaaatgtctgaagttgcccgaaagcccaaggacgccaaggcgttcctcactgacttcctcatgggtggtgtctctgccgctgtctctaagactgctgctgcccccattgagcgtattaagctcttggtccaaaaccaggacgagatgtaagtggacctggttaattcagatctaaggaccctgctgaccctctgccaggatcaagcagggccgtcttgctaccccttacaagggtgtcggcgactgcttcgccaggacctacaaggacgagggtcttgcctctctctggcgaggtaacaccgccaacgtcatccgatacttccctactcaggctcttaacttcgccttcaaggactacttcaagtccatgttcggcttcaagaagtctgagggttactggaagtggttcgccggtaacatcgcttccgtatgttttcccttcattgagaggcgtcaacgctaataaaggatttagggtggtgccgctggtgcttcttctcttctcttcgtctactctctcgactacgcccgtacccgtctcgccaacgacaacaagtccgccaagaagggtggttctcgtcagttcaacggtttggtcgatgtctacaagaagaccctcgcttccgacggtatcgccggtctttaccgaggtttcgtcccctctgtcgtcggtatcattgtctaccgaggtctctacttcggtctctgtaagcataaacttaaatctcttgtcaatgatatctaatttgccacttagatgactccattaagcctgttattctcgtcggccctctcgagggtaacttccttgcttccttcttgctcggttggactgtcaccacctccgctggtcttgcatcttaccctctcgacaccatccgtcgacgaatgatgatgacttccggtggtaccgtccactacaagtccatgttcgacgccggttctcagatcgttgccaaggagggtatgaagtctctcttcaagggtgccggtgccaacatcctccgtggtgttgctggtgctggtgtcttgtctctctacgacaaggcccaggagctcatgttcggcaaggtctactctgtgagtgaattgtttcatctctattgcgtaccgctgacgattgtcaaagggtggttctggataaacgaccggttaaaccgagaatgcatacaatcctccttgatttcacctcgcacgtacagaacatacattcctttgaaaccatttccatttgcattcgtacagtctactatacattccgctttgatcatactcatgtctttgatgtctctaagtcttggttttcgttgtggtgctttagtagcagtatgggatgcattggtcttggcaaatctgacctgtacccggatcaaaagactgatgaagttggcgaaagtgcgacattgggattattagatttgccatgatgcgcaggtcgatgtcaacggtcggtggaggctgctcgcaaatcggaatcaaaacaacagccagagagcgagaatatccgcttattcaccgatgtgtcttcattcagtcctccgagtcgattggtgactgcacttacaaaatcctacaaactatacataaaatattctctccgatccagcatctcacaaacatggcattttacttgtaacaggccttgcgaccttccaacttcctcaagcaaattgtgatccagcaacctccgcgggcaacagcatcgacttaggttctctctactaccatcgggcccagggatgacgggagcctcatctgcagcccaagttagcgtcagaaacaactatgacgaattcgaatttgaggagaacttcgatcgtgaggaattggagaaggcaatgggtgaggcggaacgtcgatatggagctcagtctgagagcttagtgagacgtaccgatggcatgattgctgggcagccagcagagtctccatttataatcagagacattgaggacattgtctcagaccaaggtgacgatggctctttaatctctcaacgcacgataactcccttggtatatgctgaacacgcagagcaaattgagtcgggagaagcggatgattctcttgccccattctttcagttca

SEQ ID NO: 93 - DNA, 3125 bp, Cryptococcus neoformans
gcacatttggactcgccagttgttttgagacacaagtttcagacagtggcgcggtatgaaaggaagaaaacctgcagagaatcgcgctgactcggagactttcccttcattaatatcctgcatccttttcgacaaacctctataccatcgtaaactctattgttcgtcattcgcccgcccgtgggacgttcccgttctcaaaccgcgaacagtcagtctacttgctttttcacatattcaacgaacttgtacgccctcataaagcgtatatctctacttcctgattcccgcccacctatcgcatcttacgaccggtctcaacaagcaaattaatattcaggtgagtgttgctcgtgttgttgtcaggagttgtgaacgtgcagagcaaatgggggctagtgatctttcggtgtatccttgatcaggaggctgtgcgtatgctgggattcggatcttcccaaaccccatcacagatctcgcggaaggtcatcgccctcacaatgtcttttggcatgattctttggccaatgtcagacagtcgtcaggcatgtggacgagatcatggagtgtgccgggagttagcatatgtggcatatccggaatacgacgctgactcgtgattttatcgtcgtactccaatctcttaaacaccaatttgctgcatcgaccttttttaccaatcaaattcgtcctgttccttgtcatccgtccccaatgatttacacctttcattcttcactgctttgtttcactccgattctcataatccccaacacatcttcatgtccctcaacgacgtcgctcaaccatcatacgcacctacgcttcattcaacatcatacattatctgtcaaccctgattaacgtcggccatgttctttattgaatctttctctcaaatatatcattaacttgtctcgccatcgttcgaacaatctcatttccacaacacaataacatctgtccatttgtccggtgacacattacgtgcattatcccaatgacaatcgtgacatcatatcgcagaatgacttccatggaccttcgagtgggaggaaagtacaggattggcaagaagattggcagtggttcattcggttagtcagctttcaatttgcatcgaaaagaacgctcatgtcattgcaggtgatatctaccttggtgtcaatatcgtttccggcgaagaggtcgctatcaaacttgagtctgtcaaggccaagcacccccagctcgaatacgagtccaaggtgtacaagactcttgcaggtggtgttggtatccctttcgtcaggtggtatggaactgaatgcgactacaacgccatggtgcttgatttgttgggcccctcccttgaggatttattcaacttctgcaaccgcaaactcagcctcaagactgttcttttgctagccgatcagcttatctctcgagttgagtatattcactctcgtaactttattcatcgagatatcaaacccgacaatttcttgatgggtgttggaaagcgtggaaaccaagtgaatgtgattgacttcggattggctaagaaataccgagaccccaagacacacctgcacatcccttacagggagaacaagaatcttactggtactgcgcgatacacttctatcaacacccatttgggtgtagagcaatctcgtcgagatgatcttgagtcattgggctatgtcttgatggtaagtaatgtgcatccggagattgttcctggctaatatctcattagtacttcctccgtggccaacttccttggcagggtctgaaggctgctaccaagaagcagaagtatgaccgcatcatggagaagagtgagtagagtgcacaatatgtcttctagcgctgattatcgtctgcagaaatgactactcctaccgaagtcctgtgtcgaggtttcccccatgaatttgccatctatctcaactactgccgctctcttcgattcgacgacaagccggactattcttatctccgcaagcttttccgtgacttgtttattcgggagggatttcagtatgactacgtctttgactggtctttgcagccgggggtgaagagctctggtgccactggtgaggacggattgcagggtaagcagaatcacttttgaaatgcgaaaaggtctctgatgattacgtagcgcaggataaccaacgacaactcaggagtcagactaaagccagggacaccggtggttggtaaataagcgaattgaaaacgacggtggatgtttaatgaaggacgaggaggaaacgacaaatggttcggcgcgccaagattatcgggagatgagcaagtcgaagggattccatccttcatccttcttagacttgtcttctcttaacttgctccaagtcgttggtgaatcgcatctcaacaataacgataactgccatatcactccttaaccccttttcccagtcgggatccgtttatctatatgattctttagtaattttaatttttttctttctcttcgtagccggtcagccggatcttttattttcctgcctcttcctcgcctttggtcgggcaatcctcgaccgaggctccaagtcatctatccagcattcaagatctcatcatcaaggatggaactcgtcctaattcacaagcgacaacagtggctgtggtgcccacttctctcatatcccttttcgcaacgccttttgtccaagggttgcactcgctgtatattattccctctcccctctcaccaactgcccaatcgacattttccttcgcaccagccgaccttccgtttcctcgtatgctccgccttctcattatctgtgatcctccaacaagaggatctggaggagaggtttgagcgcgagagggcgccgagttgtaagagttcgtctgtcggttagagatggttgaattatgtgtggatgttatgcaaattcataaaacttgtaccatgcgcatgatggttgttgtctgtttgatgatgccgctgactggtgtgataaataaaagataatccgtaagaaagggtgaaaagagtatacatgcacttgcagagtttcacacacgatgccaatgacttgaccttcccaaaagaatttgaaacgcagaaatagacaatcggacttgatgataaatgt

SEQ ID NO: 94 - DNA, 2376 bp, Cryptococcus neoformans
attggtcccagtagcgttaagtcctctctgcctaccgttaccgcttgtggatcgtcgatcttgtcttctgtctttatcggatgagttgagagaaagattggcgaattctgaaggggaaggcgcaggactagacgacgtggtggcgtttcggccagcgctgccttgggcagaagcactagatgtgtctgaagcggcaggggcggcctcggcaccaaaaatccgctcccttgctagccggtattcttccgccctctcctccatactctttcccttcttctccccatttgctccattaccgggggaattagagccagaagaggccgagttgggagtacggcgtaaaagttgaacagtaggtgttggaagcgcttgaggggctatgatagtcgtagatggggtgcgagcgtttctgcaattacattttgcagattagatatgagtttctcaattttcaatgtataacagcgtacgcggagtcccaaatttgacggttcgtcgttggtctatcacctctgaaccagtcatcttcgtcttcattcacatcccctgttcctttgtttgcttgtgcgagtccagtcgcacttccataagaggcgccagcattctgcgaggaagaaattgcggtggatgatacgttcgggccatgaccgacaggactcgccaccttgggttgcctgaccaattttttgggtaggatcacctcttgctgtttcccaaaaaccctatcagcgagaggaaacgagaatggagtaaagaaaagcgcacagtgtcaatctcccagtcatcttgttccactgattgttgctgattaggagtcattcctccatgcctgggtctgctgttgtgcgtgggccagtatgattgctaatttcctgcagaggcaagcttttgaagactcgtctctggggagaaatgctcaaagagcgacttgttattaaccatttgtgacaaagtcctgacgtggaagaataattcatcacgtgacctattcgctcttcgcatgcaaaaagttcaagagcggccaacggaaaatacacgatatttcatctttcgtctctttgactcttaccggtataccaatacaaaagaccccatcactatgagacaaaagagagccaagacgtacaagagggtaatgaccctttacacccagacttttggatttaggcagcccttccagatcttgggtgagcaatgcttttgatcttattttcggtatactaatgtgaggcactagtttcccaggatttgctgctggaaggagccaagtcagaattgaatatgcctaagcagtttgtcaccgtcattcagggcgagtgcaagccaagtaagtcctagacaaccatgtactaccattaaaccaaaagctgattctgttcgcccatcaacagtgataacgcagtgctgtatggaggcgctttataagcttgggaaacccgtacagaggacaacagatcttgccaagacgtttgaaagacgaaaatgtaatcaccgaacagcactagaaccggatgagtgtttgaaggacgttatcggtgagtcttctctctatcccaaaccatcgttgtaatgagcttacagccagatgcaggagctacaaacaaacaccgatatatcctcggcacccaatccaccactcttctcaccgctatggaccgtatccccggcttacccgtcatccactttaacccgcgcggcgtcctcgtcctttccccaccatcgactgccactatccgagagaagaataaagtagaggaagaaagacgtttggagggagtcaaggtccttgaaggtgttgttgatggaggaaacgtggttggtgcggatcttgcgcctgtgtcgggtggacctgcagagaaaaggagtagaaaggtgaagggaccgaacccgttgagtgtgaagaagaagaagactccaggccaggataaggaaggggagagtaagaagaggagaagggttgaggaagaggaagtgaaggaggatgagaatgaagtgaatgcggaggggaaaagaaagagaaaaaggaagaagaagaagactgcggttggtgaggccattgaagagttgaatgctacgaatgccgatcggacggagaaggcggttgtttctgatgatagtgatggcagtgaagaagaatagagttttataacttgttgtatatgtacaatcccgtttcggactgatcagacttcttttgcggttgcagtcgttaccgcgtatgaatagccctcatcggaaaaagccccccaagtcgtgcgatatcggtaaactggcccaggaacggggatgttgtgcctggcttatcatttgttgatttcccatttcacctccaatttcccatttcattgcacgattattcgttttttccttgcaccg

SEQ ID NO: 95 - DNA, 3030 bp, Cryptococcus neoformans
tgttttccaaaagcagaatcttagtcttgccctgcctcttctcatgattctcttgtgtggggtagtcaggaggaaggaaggcggtcaattgtcgggcaataccgtggaaagcaccagaggcatttctgaggtagctagttgaaggggaggtagagaaagagaaggaggaattgcgaggagaagtgccagtgggcggagaatggggagcgaaagaagagacgggaatgccacgggtgttggcagggatagggatgctaaatgaaagataagatgttagtagattgatcgaccccacttggtacgcgacatcctttggggtgataagatatggatatgggaatgtgatgacgctgcaagaggaagtggggcgagatgggacttacttgttgggggggtcggaggcggagacggactgtcttctgtttctgtctgggatagggatggacattgtgctgctgtgtttttgttgtggttgtaaaagcgcaagcgagtcgacccggcttatatatatctacgatggaaaataaagactcgagccgcaggaaaattcggaacgtctctactcggatcgagcacgcaaaaaaacaaataattattccagctatctcacgtgggagtcacgtggatcgagcgacggaagagtttattggccttccttcttcattctgtcttgcttcttctcttcttttccatgctatgtgctgtgcttatgcagctttcaaagtcaagtgtgacagagatgcatcaggagctgaagccatttttcattgttatggttgactgtctctgttgtcagcttcagttatttgtacgacagctacaatttcatcacactcctgtagtgcagtgcgtgtcagcctgatacgaaaagcaactgaatatttaagtttacggattacgtacgcttcccgcgcgagattcacgtggcgagtggaggcaaagatattttgcattcaactctttccaccgtacatctctgtatctataggccgtacccaaaatggagtttctgccgctgcgcaccctcccagcgccgccacgacaacaatcaacaacaaatcctcattccagacactttcactcttttcgacaccccctcttcatcaaacacccggccgccatcacccatatccatttttgcccaacaaaaccacatcggtatgccgtgacatcttccacaagagtgttgatctatgcaccgaagaccggaaaggtggtaaagactatcactaggttcaaggacactgctcgaagcggagagtttaggaaagatggtaaattagtagttgctggtggagacgatggtgttgttcaggtcttcgacgtgaacagtcgagcaatcttaagaacgatgaaagagcataaccagtgagtcgcatttgataaataagtttttcatttctcatgatgtgtagacccgtccgagtcacccatttctccccgcatcttccccaagtgctctccgcttccgacgatactacagtaaagctctgggacttgtccacacaagcatgtctctccaccttttcgtcccacaccgactatgttagatcatcaattttctccccttccgacccttccctgatactctctgcatcttatgattccactattcggctacacgacgtccgactgccagaagacgaggctaatgtcattactatgcgacatggtggtgctcccgtggaggatatcttggcgttccccagtggaggtgtggctgtcagcgtcggtggacctatattgagagtttgggatcttgcaatggcaggcaagtgcgtgcgagcattgtccaatcaccaaaagaccgttacctcagttgcctttgatggtacaaagggacgagtcttgaccggcggtctcgacaacatggtcaaggtctacgacgttgaagactggaaggttgttcacaccatgcgttaccccgcacccgtcttatctctcgcggtttcccctgatgacacccacatcgcagctggtatgactgacggtaccctttccgttcgtcggcgagatcccaaagcttctgagctcggcgcgtcttcagcgcaggaaacagctatcaagggtggcgcatatgaatactttgcagatatggaggcgatcttcgggacagggcacatcaaggctaaggggaaagatttaggacctgtggttgggccggcagacgaatttagggtggagacaagacggcaaaagaggctgagggactttgacaaatatttgaaatcattcaaatactctgccgctcttgacgcaggattacacaagaatgtcaagcccaccactacattcgctttgatccaggagttggttcaccgtgatgctcttcggatagccctttccgggcgagacgatgttacacttgaacctattctcaactttttggccaagaacgtcacagaccctcgattcggtgagatggcggcgcaggtcgtcggtgtcatcattggtgagtctttcaactttcctttcgttttgctataccttttccgacattgttaaccatctaactcgtagatatctacacaccaatcctcggccaatcgcctattctcgatgaaatgctcggcaagattcagacacgggttgagagggagttgagtttccagagagagttgatgaagttaagaggggcactggatatgacattgtcacaggccgctttagggagagtcgaggcttagggggggacatggagcatgaggataagggttatagcagatgtgcatgcacatgtaatcttggtgtaacatggcgaagatatggacctccatcggttgtcattattagctgctcgtttccatgggtcccccattactgcataacctaacagcacaccaagtcatacgacgagcacgcatgatggaaggccgataagcctatatctgttggagagaagcacttactgtccggttacaatattttgctatgtagcgtagctgtgtgcatgctgtccattcatcaatgaagaccagacaatcaaatttgtcagcataaagccacaaaggtttttcgtaccaccaagcc

SEQ ID NO: 96 - DNA, 3114 bp, Cryptococcus neoformans
gcattggagcagcaggtcggcggatgcgcgacgagaggaataggacggctcgtcataataaataaccggcgcggtttatccaagatcagccggaaacgtgttgccacagtgcagactatccacgtggctcgtacaaaaaggccggcggacaccgacatctctgagtggatctttctaattgactactgatttgcaccagttaatcacttcctccagtagcaccattatgtcctttttcattcgcctccaagatcgtcctcatctattctcaatgccaacaacgctgtttcccttcctgtcttgcctgtcgaactcatttgcactatcatttagcatgatgttcagccgtctcacaaaccagggctagctgctcttgcacgaagccgcaaaagtctttacgcagacaccctatggcacgaaaattcatcgcccttcctcaagctcgcacggtcattctgtttgacgagattgcggttgtaccgacaaaggaagcctctgattttatcaataactggatctttggtatactatctatctcttgcgcctcggaatgcacatgtctttagcatgtgaaggactggtgtagagagcacccatattgaggaaaatgtgatcttgcagatgcgtatgaatatcaattctcgattctctattccactcggttttcgcgacatttccagcatcgaccgatcaagtttacaaaggaggctattatggaatacgactgtgcgctgtcctgtttgcagtgggattgtataaaatgacgggcctccaaaactactggagaaagatacgttgagggtggcttgagggctcggtggataaatagtgcgcgctcgcgtctcgttcgtttcttccgttgtcttctcaatagtctaacttgcatgaatggcaaattatccagtcactgcccgttgttgatgataacaatgcgtttacggaatccgccatcttacatatacgaaccacaattacagattgttgacgagtgaaaagttgaatggcctgtttttgcagtggtgactctcgacaaaggccgacagctcgatacgcacaaagaactggcgcagaaacacaggcgcgagaaaatactcccgacgcggtgaaagaggtgccacaagcagccccttgcaatttcccgccatttcgcacccaaactccggcaaagtggcgatcgccgcttttcttcccccgaagcgttctctgcccagtcgcaacagtttcccaagtttcacctcatctttctcttctcttcttctcaaccttcaaccaaaaaaacaacccccagggtatcaccttaacagctcgcaagatgtctgcctctcaaatcattagcaagcgcagaaagttcgtcgccgacggtgttttccaggccgagctcaacgacttcttcacccgagagctcgctgaggagggttacgccggctgtgaggtccgtgttacccacgcccgtaccgagatcatcatcagggccacccacacccaggaagtcctcggtgacaagggtcgacgaattagggagctcaaggctttgatcgagaagaggttcaagttccccgagaacgctctcgagctctacgccgagaaggtccagtaccgaggtctctccgccamtgctcaggccgagtccctcaggtacaagctcctcggtggtcttgctatgcgacggtgagtattctgaacagttgttcgtcttttggatgtccgctgatgatatgtgatcagagcttgttacggtgtcctccgattcgtcatggagtctggcgccaagggttgtgaggttgtcgtttccggcaagctccgtgctgctcgtgccaagtctatgaagttcactgagggcttcatggtccactctggtcagcccgctcgtgactttattgactacgccgtccgacacgttctcctccgacagggtgtgctcggtatcaaggtcaagatgtaagctcttcaggcagaatcaggaggggaatgtaggagctgacaagagggacagtatgaagccttccgaccccgccggccgacagggtcccgccaagaacctccccgacgatgtccagatcaccgagtatgtttattattcagtacacagacgtagaaccttgttcttttgctgaccaacacaatttagacccaaggccgagggtgtcatcgagatccgatccgaccacaagaacccccctgtccaggctatcccccctgccgccgcccccgctcccgaggctcaggctgccgaggctcagtactagatggacggtttttaggtggtaggagatgcatgtggatgagatctttccgattttcggtttttgtatgataggccttatggatcgcttttcaacgattcgcaagagtatggttaattcgtggggttttttctagatgatttgtaagttggcgacggcaagggataaagcgtacagcggaagcgcagagtggtgaacttgggcggaggtggatcatacctatgaggaggtttagcagggaaggcattgcattcgggcggtcgaaacgtgaaatgtggtgaaagatgaggggagcgaaggctgttgttccatgattgtcacgaggtgtagcaagggtgtccgtgtgcacttgcagtaaaacgagcaagtgatgtggtgggggcgcaagcttcgcattcgacatccatccagctcacgcataaactgattccgagtcattggcgatcttccaaataaaagctttttttaatgttcatctcccgtctactcaaaacgggcatcaacatttcaatacatcccgctgtcccgagcaaagtattaggctcaacaagtacatgtcgcataaagggaaacatcaaagtcactctgtaagatatgaataaagggttacgccacatgcaagaaattattagagaaacttgataaaacatgcctcctgcttctgaaacgactctaccctctctcttcctctcgctctctgtatctcctttgcgtcacccttgtttccgattctaaactcgccttgtcttccgacctctgatttctgcccactgtcctctgcattattagtgctgtttgttgaattacggcttaatactacccaattcaaaggccttgtcgttagccgctttctcaccacaaacaactgcca

SEQ ID NO: 97 - DNA, 3160 bp, Cryptococcus neoformans
cattttttatcaaagtgtcgaactctttgtcgtctagatcctcattgcctctctcattctcagttgccttcttgccttcactcttcccgtccttcttaggtttcctatggcacccagagtcaaaagtggaccctgtcttgtagtggggatcaggatggatatctgtaatgtgcaggaaccgtcctttcaaagctgagaaggtgaaaaacatgtatgagcaagtcagaaggttttcgagagtgagaaaagctcacgtcgttttttgtttatcctgacattttgtaactcagaatgatctagctgaggaactgatccactcaggggcacctgctcggttgatgatatggctgcttctgagctggcgatggagagagccaacgcaaaaagacttgcgagcagtggagagcgcattgcgattaaggggcgaggcagaggcagtacgtataagaagacctgctgcgagaagtgtgaagagaagtgcggggagagtatggacagtcgcgtgagtgagtactcggcagccgcagaacacgccagggtgggatcgatcgatgaatctattatttttacactcgagcaccagcgacaaacgtgcaatcaaaaagaccgcaaaacgtcatatcagctgccaggaacagatcccgaactatattgaaaggcttgcagattttaagtttgtgttaggcgccgtgtcatggtcaaacgtttaggcgcgagagatgacctccactcttccaggtatagcggatgtgaattttgtactccacagaaatcgcattttaattagtggccgaaaagagatatagaagtacgtatatccgccatcagccaatcagtggaattatatatcccccttctccccccctcgtattctctttctcatccactgcatccctctacaaacaactcgtaaacgcccaacggccaattgccaaagtgtccgacacaactttttcattgaatcttgtctcagttctccttgggctgcttaacattcacaatggtatgtctacggtttgactgacagtccggtacttatgcagtggaacaacagctccgacgacaaaccagagagaggagagaatatatcttcaagaaatcccaagagtctcaggagagagcgatctacgaacggaaacagaagatcaaagacttgttggctcaggggaaacctctccctacagaattgcggaatgaggtgagagagcttggagggaaggatttagtgcttgatgaagctcagcaaggtgagtggaatgtgtcgaaataggcctcgtggtatagagggtggacaagggcattgtgaagatttgaggctgtctcgaggcataattttgattgacggtgctgataacgatggtcttgcagatcctcgatctcacatcgacgacgaatatgctaaagtcggcacgtacgaccctaaaattgtcattacaacctctcgttccccctcttctcgtcttcttcagttctccaaagtaagttctcgcagtgtttcagctggttttacgtacacttgctaaaagtgttttaggaactccgactggttttccccaactcctaccgtctcaacagaggtaacaccgtcgtcaaagacctcgtctccgcatgtaatgctcaaggtgtaacagacctcgtcgtcgtccatgaacatcgtggtgtccccgacgctctcattgtctcccatctcccccatggtcctactctctccatgacgcttcacaacgttacccttcgacatgatgtcagctccaactcaagtacagtgtcagagcagtaccctcatctgatctttgatggcttctctacaaagttaggtgaaagagtgaccgggatcttgaaggcgctgtttccggtgcctaaggacgatgcgaagagggtgatgactttcaagaacgaaaacgattttatttctttcaggcaccatgtatttgccaatactggtcacaaggatgttcagcttgcagaggttggtcctcggtttgaagctaagcgtgagtcctgccttaaagtccattttaagacgatataagctgatgattcatttgcagcgtttgaaattcgtcagggcactgtcgatcaaaccgaggcagatgttgagtggctccttcgaccttacttgcgtacagcgaagaaacgcaaccaattctaaatgtttgattgatttggtggactttgggcagaaagagacgtgtttcagggcagtttcgagccttatttatctgttgtataatctcaaaccagttgattcagtgatgcactttccttctagagtacatgtaataaaaaggaaaagtaagaagactgcatcctagtttcataatacccaagaaaatatggtaattgtagatccgagagagattaaagcttcgctttggctcccctgctattcgcaccctgccttcgttcccattctttgatggctacacttttgatttccttcttcatggttttaccattcacgtttttcgcttttgaaggtacgatcagccctattaccctttatcttccacctgaattatgcactcacgcagactcccttcccaaatcattaccatggcaggcacggcatgtttcggcagtttacttctgacatgtcccaagatactttcttccgtcacctttacccctcttgcctttgcagattcacgaagcgtgactgcagcacccacaacttccccaaggatcggatgtggaagggcgattgctgcgacttcgtcaatatgcggatgagaggtaagggcgttttccacgtccactgatgcgatctggggtccatttgaatcattagctaatttctatttaaatggtaatgctgtactcacgttctcgccgccgcggataatgagatccttcactggcttgcatgttaatattgatattattgctcgtgaaagtacgtgcttacagcgatctttgatgaacaagaacccttcttcatcgagatatccagcatcacctgtatccaaccagccctcctcatcaattgcttgcttcgtggcctctacacgataaaacaatttaacaacatgccttctgaaattatcccaaacttacgctcattcccgtaataacatttcatgacctgagcgcctttgatcagaataagtccttgctggcccgtgggcaatgcttttcgagtatcggggtttacaatgcg

SEQ ID NO: 98 - DNA, 3146 bp, Cryptococcus neoformans
aacctgtcagtcgggcgctcagtgaattccgctctctttcagtggctttttcagcttcctcaagataggttgaagttcctttttcatgcttcactcgtgaaggagttgagggcctagtctcctgagaagctatatgcagatggggatcatcggctagagcatagggacgatcatcccaagtcgctggtgaaggtctgtcgccttgagggagaaagttggggaggacctcgttctcctcaccttcagcagcttccccctgaccaaaatccccatctgagttgtctcccgccatgtatttgaagaggtcgaacagttgagcagcacatggcgtgcctgatcgctggaccgcttctgatggagagaaccaccgcatccgtaaaaatgagggaaaagtgtcgagctctgagctgactccgatagcggcgacgatagatgggttagacaagatgaaattatcgaagcgccttaggagactgtatgtgctcgagtccgaacacagggacggattgtctaatttggaagattagacggaggatagtgaaggttggagtgaggatagcagggtaggcggcaaataatgggttctgtgggatgtttcgttatatgggcttgaataagcatgtgtaatggctgtacatttataggcaaatcctcgatcgcctcgataagcctaagcttgtgaaagcgtcgtcgtgcctggctgacgtccccccgggctgggctcgggcgccgtcccccctcgcatattaatccatctataaataaataacgttgaagatcattgataaggatatgattacgtaatcatcggtaaatattattttcaacatgaagctctgttacacttcgtcttgcactcctccgtcgttgtccttgttgttgtcctcacacaaattcctcgctcaattatcgttaaaagctcagctgccgatttatttgaccaaccggcttccctagattcctcctctcagcacatttcatcaactccgcctttcccataatgcagcccggcccttcgaaggatatcttgcggttcaccggccacaggcaccttcggcagcgcattcttctttccatcctttccggcaaatctatgcggattgatggtatacgctcagatgatgtccacgtcggtctcagagactatgaagtcaaccttctaagactggtagagaaggtcactaatggaagcacgattgagatatctgtcacaggtaaggccacattattagtctttcgctgacccttaggkacttctttcattcttcatcctggattactacctgggggtagtttcaatcacagctgccacattggtcggtcaataggatattaccttgaagtactgctcccccttgctcctttttgtaagaagccgttcaacatcacactgtatggcgtcactggtgaagagggacgtgacatgactgtaagttctaagggcttatagaagtgctgatatagataaggttgatatgattcggactgtcacacttccacatttacatctttttggaatttcagacggactcgaactacagattaaaaagagaggatccgctccccttggcggtggccagatttttttcaaatgccctgtcgtccggcagytgaatacyttacatttcgttgataaaggcaaaatcaaaaagattcgaggagtctcgtaagtctgccttccttgtacctttttctaacgatgcagttactccactcgtgtttctccacaatttgcaaatcgcatggtggaatctgcacgatcagtgttgaacagatatgttcccgacgtrtatctctacacagatgtttataaaggagatgactccggaaagtgagttctccatttcatgtacatgagcttatcaacagatctcctggctatggcttaaccctggttacgcaaagtacaacttctgctgtacatgctgcagaatctctctcagttgcaggagaagttacaactcctgaagatgttgctttatttgccagccgtcttcttttagaagaacttagccgtgggggttgcatcgatagcaaacaccagtggctcgtggcgctgctcatggccctcgggaaagaagatgtcagcaagtgcctgttcggtagtttgacaccgtatacgtatgtgaactttagaaactattgagctgaccccattagtgttcagtttttccgtgacatgttcactttctttgggactaaatacaaaatttcagaggagtcttctggggaggtattggttagctgtattggcattgggtatagcaacgtcaacaagtctatggcgtaaggcatggcctcgatgattactttatagaatatgtaaatcaacttctcgagttggcatatgttggttaactacaccagagataaattgccaacagaaaatcagacttctagccagatacatttgtcctatctccctgagacgaatgacgtttaaaattagaagactacgagtatcgttgacaatgtttgcgaaagatcataacctatacaacacatgcctgggcggcagaaaaatcacctttcattcaccttcccttcctggaggatgaccatggtggacgaccttgaggggatttggaatgagtaataggtagtccagcttacaagctgtgactcagggggagttcctttttgaagtcgctggcgctgtgatgaccatggggcgatgatacaagagagcgccgcacttccctgtagtaagaaatggaaatatatcgcgtacatactgtaatacggagcacatacgtcgtaccttttcatcaatcatctatcatacaggggaggcacctatggtaggtgaactatatgcggcgttaccactgcacccctcacaagaagctctttattacggggcataatcaaccaagaaatgagcaatcgacgatgagcatctttattatttacatacattttcagtctgaaaaatccctaataaaatgataatgcacgcaataattgagagaaacacgtcatgataaaaaccgccgcgctgcctccaccatcctcctgctgctgatgctgccgaggtgaatgagaacatttatttaattcggaataatagcagttcggtcgttatttatcatcgagtcgggtcgtcgcggatgatacggcatgccgcaatcggagaagatgaaatt

SEQ ID NO: 99 - DNA, 3314 bp, Cryptococcus neoformans
ctagtaccctctgtttacttgaagtaaatttacgcgagagagcttctactgcttcctccgacgtagtcggtgtcgccggcacaggaggcgatgtttcacggcaataactggggtgttgagaggtattcgcacacgcaaatggagtcaggccccacgagatgcttgcagagacgaactcggctatcgatcccaacgatcccctttttctgtggctgcctgcactggctcgtaaatccccctctctgtctctttcacttgccttttccctctcagaccgaccgctcgaggagccctgtccctcggaacatatgctgcccatatcttcgaaaggagggaagtacgagacagagtcagtggccggcagacgcgacggcgagacggtggagacggcgggcgagccagtcctggcggacgggcgcgacggccgcgagcggagagacgagtgccgcgagaggggcgctgagatgggacgcggtgagccggcggggcggggcggcatggcggagagggaggaggcgtggcggtgggctggcttgaagggatggcgcggggaagtcatggcgggcggaggagggcgtggcgaattttatcttttgtttgtcctctgatgcgattgcgtactaccaaaggacgtgttgacgccgtggaccgcgtctggactgccgggtgacgtaacccgcgacgtgcgacgacaaacagcttccccatcagatcccgctcctggcgcacctaacactcgcgcgcgcctaccatccacagcgaaatcaaaccagccgcgttcattggcggcgcggtccgctgtatccggcgagagtcgggccatagctccgttgattcagtggtggtggcacctgcaatataggatccccatatctttcatttagagctctcggtgaaagccatactggtccatcaatagtgtattgaccaccgtttacccgcccaaccgtttttcaaaatatctttcccactcaggttcacgacccgtctcttacgcacaatgccctccccggccgtagaccttctcaagcaaaagacagcaagcctgccgaatgcccctatcagcgtcgtcgctgccaacaccgtgaagtatcttcctgaacagtagtgctttttcgtactaaaagtgtctcctctagtttgtccctcctactcagcctgtgacggctggaaaccagctgcctacctctgtccctctccctgtcctgcctgcagttgaagctgccaaacgtttggcagcatatgccgctgtggaccgacacatcgcacacgagcacaaggtaagtcatttttgtgtttactctgcaaccggcagttacttgactgcgcacaacaacaggtcattggtatcggatcaggatccactgtcccctacgtcgtggacagaatacttgctcaagggtttgaagccaataaagaccgggttttccttcctaccggcttccagtccaaagagcttatcgttaaagctggcttgactttgggcgacgtggatcaatatgctcgaatcgacgtgaccattgacggtgccgatgagtgagctacttttcaattgctttgaagcaaggtgatcgtgcaggatgaatgcacgattgagcaagtcgacattgatttgctgacttttgtacagggtcgacaacgagctcaactccatcaagggcggcggcgcttgtcagcttcgtgaaaaggtcctcgcagaggctgctgatacgtggatcatcgtggccgactaccgcaagaactctgaagttctcggcacatctgttcgtgcattcctctcttgtctcgaagaccaaactaacgccatgtcacttttctccctttgatatttattcattcgttttccgatgacccctattgaattgattgcctccccgtaaaagtggactaaaggaattcccatcgaagtcgtcccctttgcgtacgccaaagtcctcaccaacctcgcccacatgggctccccacatgttcttcccaacggtcagcctggtcttagcttgcgtatgggtaagatgaaggctggacctgtggtcagcgataatggaaactttatcattgatgctcccttcgctgaggaattgatgcgacagcctgaagaggtacgtgcttccctttggtctttttttttttcttccttgcctcctggacatacagttgacaagaaacatttccgccttgttgtttcttactttagctgttgcacaagatcaaaatgttgaccggtgtcgtcgaagtcggacttttctgtggcatggccaaggctgcgtactttggtaacgaggtgcgtcatttttttacgtacatcaaacagtagcctatcataggtcgttctcactgttttgaaaagacgaaagaagctaatgtcagacccggggtgaatctaggatggctccgttacaatccgttctgatgacggtaccatttctcagctgtaaaaagtcccccaaagtctatcatgttatttcatatggtatattatatggtgttcaacgatgaatagagaagagtcagcgcactcataaacaatggtacaacgcctagtcttgctttagaactgctgcccaggggttaattgcaaggctatcgccgtgtatctatcgactctttgctcgtccgcccattggattgaccatgatgccacttgttggatgcaagatacaaggatatcgctggcacatattattgtagcaggacgagtcatttgtttgcaatgccccatctaagcgttatgcggatagggaaaaaaagagtagttttcgtcttacttaaactggtatacttttgcctgttcgaatgaaactatataacgaactatgcatacaacaaacaaggatgctctattaatgtgatcgtttacgaaaagtcgatcttccccgatgaacaattgagacgctcccccctttctgctctcccgtctaccgcctttttggcattttcccatcctcatcatagtctacgccgcagtccaatgtttcatgcttggtcaacctctcggtcgagcacgctttcaatttcgagcatcacgtcacgcttgacgttatcgcttaccatacctgtgtcaaatgacaagtcattagtcaatggtgcacgaaggatttgataaccgtggacctgcagtaaaaggtgcatggtgatgtagaataggaagaaacgaaaaaagggggagaggggagaggaataagctcaccagctgcactctcgctgatttgtttgacaaggttttcgaggtttggtacatcctgagctcgagctttttctgcttgtacacaccgcgtccggcggggacatgggtatattgaaaaaagttgcgtttc

SEQ ID NO: 100 - DNA, 3120 bp, Cryptococcus neoformans
gatggatctcgaatggaagatgattttaagcgttctagcgctgtttgtaagcccatgtgatgatagatgcgcatccgtttatgaactcacgccaaggaatcctctgtccacgccgcctcgagaagcttgtagagtcgatcagatgcaatgccaggagccagatcaaaaaacaaatcaaccagcggggagtctgtagttttgtgagccagcgcacctttctcggtcaaggtgtcgggtatatttttgagtgcctctatgaaagggtgggagctggtgccaggaacttctgccgactgagtgaaagggggctgtgaccgagtgggaatgagttgatcaatagcttgaccaggtggtaagtcaagcaaccctaagaaggctgatggcaatgcccatttactaagctgaggtacttcggattctgctagcatgtctcgtgtgaatcaatggatatatggaaagaggaggcgaagacgcaaactgccagcagataaccacagttcgaaagtgtgagaagagaaatcggaaaagctggctgatgataatcacgtttgcaagaagaaaaacgatacttgaggttactgcagggcggagagagtgagtaatgatgcggaagaccaagcaatcaatgaggacagaacaggcctgcgtacaaaagatcaccgcatcgaaggaatgacaagctcaagatacaaacatattatggcttaagatgtaaatgcgacgtagttacgtttcgatgggccgcgtagcgtatcagtcaattgaaatatcgattcaacctgcctttcgaggcgcgcggtcaaatcccattccttgatctactttttgtattatttattttttgccactgaattttctctacaccgacgtggggctccgcacatggctacaagtaaatcttgaaaaattgtgaagcgacctgttctcacagggtgtttgtcttgcattctgcgttgtatttcaccatttacctgcttcctgacatattatattcgtcaatatgtccatgctaaggaccatgtgagtacatcctcaagaagcagtatcgtcaaagagcatgctaactttcgtttaccatcagcaagcctaaaaacgctcgtgtcaagcgtgctttggagaagagagagcctcagattgtagaaaatgacaagacagctatctttgtccgcggtcaaaactcaagtgacaaagttcgaaatgtcatgaaggatcttgtaagtgttttcctacttgtcgatatcttcgcttttcattgattgtctgttccattgcagtactctctcaagagacctcatgccatcaacttttcccgaaagaacgacatccatccctttgacgacgcctcctctcttgagttttttgccggaaaaaatgatgcgagtctgtttgtaactggccttcacagcaagaagcgcccgcacaacctggtgttctctcgaatgttcgacggtcgtgtgttggatcaaattgagcttggtgttgaagggttcaaggccatgtctgaatttcctgtaagtgtctttacagttcgtcgcatttcaacgctcacaacgtttgctgcagactcttaaatcttctctcggtgtgaaaccaatgatggtcttccattctgacctattcgacacccaccccacctatcagcagctcaaatctcagctccttgacttgtataacggtcaccccatcaccgaagcgccattgcttaccactttggaacatgtcatctctattactgctggacccgtgtctgacacgactcctcttcctcaagttcacttccgggtctacactgttaagctcatcccttctggtactcgtgtgccccgaatccagcttacggagatgggtccttcaatcgactttgttgtcagaagactccaagaacctgatgaagaaatgatgaaagcagctcttaagaggcccaagattgccaagagcgatgttgagaagggtctgggaaagaagaggaagaatatcgagactgacgaaatgggagataaggttggcagaatacacataggcaagcaggatctggcaaagatgcagggtagaaagatgaaggggctgaaggtcagggatgggaagaagaggaagacatctggggccgacggcatggatgaggactagatttctgttgtaactatttatgcatagcttatattcgagttttgttatgtgctcgtgttatctggctaaaagttttgcatgaaactaagcacgaaagtgtcagagtatctctgtacaagacttttttgcagcttactacgtagctgaattgaatacgtaaacaccggttagttgtagcaagagcttccggcgactgggatgatacaacgaatcgctagtgcacaacgaacaaaagcgagctccgttttttgtcagttacttagtaaacttatagattgtcttatatcctcgccgccgtcgcatataatggatgagtcttcaaagcaccaatatagggatccccaagtcgatgaagaggaggaagaggaggatctgtccgaccttgacagtgagatgatccccgctaccgatgcgcttatggcatttgctaacaatactacaacagatgtcctcgaatcattccaaaattctcgcccgtctgcttctacccttcagagagacgcgtcattacctttctgcaacacaacccagaccgtcaactccaccaccgggggaggatgacgaagatttcgaagcctctttgatgcaaggaatggaatcactcttgcgtcaactagcaggtgatcatcctccgggagttatgcctgacataggaggcgacggtagctcaaagccgactgatcctaggatgggtagttccgggtcagtagagccatcgccactatcgaaagaggcagaagaagcggcctggcaaaatgctgtggatacgttactgtcgggcgaaggacttgctgcgttaggcttggacgagggcaagtcttctaggagtaaggagaaagcctcatccgaacactcattgaatggcacagctccgaaaccttcttatgaagacacacttcgtaaaactcttgaatccctcaagtctgctggtcgaaatagcggtgccaggtcctcggcggctaaggacgggcaaaacgatattgcttcgctctt

SEQ ID NO: 101 - DNA, 2611 bp, Cryptococcus neoformans
actctcttctcttccttcttctctttctttccttttttttccccaaagaaaggtgcatgaacaccactgctgtccgtcgactgtcctctaccctctcgcacctttacaaaaacatccccaagatggcttaccagactaggatcattggcgtgagtttcgactcttttgttccacaaccttttttctttcattctttctttttccttggctccgagcaactttggtttttgcgactttggactttttgatgtgataagatggcagagctgacgtttggatggatggataatgaataggccgccaatacccttggttagtagctctttacacctgtttctcattctctgcgaatcatgaacctatcggcatcttgacccattaaaacacactctggatcgacaaattgagtattttatactgacgttctctccaacagagcaccgtgtctacatcgagcaggaaggcaaaatcgtctcccccttccagtacgttcttttcccctttttccctcctttctgtgcactagccaagtccaacgagttgattctggggtaactagcgacattcctctctttgccgacgagtccaagactatcctcaacagtacgtctcgttcatttatttttaggtaaatcattaacctcttgactctcaatctgtagtggttgtcgaggttccccgatggaccaacgccaagatggagatctccaaggaggagactttcaaccccatcaagcaggacattaagaagggcaagctccgatacgtccgcaactgtttcccccaccacggtacgtcggtttttttttcttttgtcgtcttgccatcgactggttacgctgactgttgcacgaaccgatgcaggttacatctggaactacggtgccttcccccagacttgggaggacccgaacgtcaagcacgccgagaccggggccaacggtgacaacgaccctctcgacgtctgtgagatcggcgaagccgtcgcgtacactggccaagtcaagcaggtcaaggtgctcggtatcatggcgctcctcgacgaaggcgagactgactggaaagtcctcgtcgtcgacgtcaacgacccgcttgctcctcgtctgaacgatatcgaggatgtggagcgacacctccccggactgatccgtgcgaccaacgagtggttcaggatctacaaaatccctgacggcaagcccgagaacgtcttcgcgttctctggtgaggccaagagcaagaagtatgcggtggagattattcacgagtgccatgaggcttggaggaagcttgtgcacggtgagactgccgccagcactgacgcttacaacttggccatgtaagttccaacccccctttctggtccgagtgctaatccgaaccacgataaaatagcaccaacaccaccgtcaagggttccaaggggttcgtctccaccaatgacgcggcttacgcctctgtccccgccgactctcgcaagcccgctggccccatagacccttccagtacgtccatcctttcttttaagactgaaaacccgaacacgcatacgaatgcgagctaactcgtttaatagtcgacaagagcttcttcatctcctccgcctctgcttaaacgtcgccagtcgactataaaggatgaaggatagagagacmagagaggaattgaaaataaaaaataaaaaaaagtgtccttcataaggttggaagaaaaccacgatgcattcctgtcagccctgttactatttcatttctcccatggcccgtttgacctcggctcgaaatatttgcagtactgatccggcttgtatttcgccacgcgtcttccagatcaatcggtaagcggcagttcgagctcttgatggacctctttgatagtccggttggtcatgagcgcgtactttgtaagatcgaaatagacccttgtcaatgttgtctcggtatgaagaggtgtgcatcataaattttaaacgtacacgtccgataagcgcttgggtgccgtctttgatctcgttgtatgtatgcaagcgctggatatgtttctggacaatcgtcttcgggtccttgtctctatattacatcgtggtgagctgcgaatcttgggatggaagcaaggggagaagatgggacaaaacgagtcggggaggaaggcgggcggcgacgtacccgagctggagacgaagcgcctcagcctctgcgcgtagagcgcggagtttctggtcgtgcaggatcgagttgtggactgtgaatggtgtatctttgggtctgtggatggggtttcccctgcccttgtttgaagtgggcgtggacatgcttggttgagcgcaggaggaggaggaaggaagaaatcacaaatcaggcgcggtcggcctccacctggcgacagacgtcatccaccgccacctccatcgttcctatctcttgctcaccgctgcatccccccccgccgccatgtgccacgacaagccccccacgcagaaacaagcacgggacgcacaggccgccgacgcgcccctcgcctgggagacgatcccgctgcctcccgcccatgtcctctcccaccgtacgccccccccccctccccccctytggctaatgagtacgacagtgacaga

SEQ ID NO: 102 - DNA, 3264 bp, Cryptococcus neoformans
tctccgggcctagggagtccatcgatgagatgttggatatctttcgatcttcttatgatgtcggcgacaaaggtttcaatagcagctgaaatttgtccattagctcatcaatcatactgagcgagtacctaggacccctcccatcgtccactttgtttgacgtgagcaccacccaatccaccaatcttccgatcctctgcctttccaaatgtttcaaaacccatcacacacctttatactccactcggttagctgcattcggggttgatagggtcgtggggatagatatggaagtttgttcgaactgggtgcgtttggtgatatattcgattgacgttgaagtgatcgttaatagctaggaatattgagggcagaccaggtcagccactggtggcacttgaataatcaggcggaagggagcttacatctaggatggcatcctgcagctgagtgatcatgtcctgtaatatgatattggttactttgcatgaaaaacaaggatacttgggatacacaccatgtcagtggataactcttcgtggagcatcgctggcgaacygagtgtatagggccaagggacattgacgttcccagtcgtgcttatcaagacaatgtggacatgcgactggagcaaattagtgggrgtgaggtatggggataggctggaatgtacgagttgtaaatacagaagaagtgaaagaacygaaagagaaaacgagccgactcctgttccaagtcgcgatggatttgttgttgttattactgtcgttgtccttcgtttacatctccattcagggtaatcactttcttctcgtctcttataaccagcgaattgtctgtttctacaacactcaatgtccacatcaacagagatatacggctccctacattccatactcagccctgctctcatcccacggcatcgatcgtcatccgaaatctcagatggcctcaagaggatacgcagaataattttgacggagggtataccagaagtcgtatgttttactctgtcaacaatattgcagggatatgctcactacgatgtttagcctggtcgccctccacttcgtccgagaatatggaagctcttgctcaaagtggacaacctccaggcagaagattatctacgctgggtgtccatgggcccttcttctgatagccacaaaagtcagtctatactcgttttcaagctattatgtccacgatacaggagcggttgaccattcagacagtcaaaaacgatacattccggacactggcgacagatactcaattcaagggcaaagtcaaagaggacatgttgattaggttgttggaagcttttgtctggaagattacctgcacgcatgcttacacctgcacattgaagaaggtgctgattggaactgtagccgcggagacagaagatgaatcccagccattcaaatacgtacaagggatgaacgtcctctctgctcctttcctgttcaccatgccctctcagctcgaggcttttcaatgtttctcaacattcatcgaggacggttgtccactctatgtacaaccatctttgaaaggtgtccacaaaggtcttactgtacgttactatatctgctcctagtaggtataaagcgaaagatttgtgagctgattaaaaagtagctgttggataagtgtttagaggtagttgacccagagctatatgatagattagcgagcaagaacctcaaagcagagatttatgctttcccatgtacgtcctctcttatgtcttttacaagctatgactatcagcgactgaccactatcatctttttagctgtcatgacactctgcgcctgtacgccgcccttggaagaagtccttcgcctatgggagtacgtcccttttatatccttctcctcatctcaaatcccaactttttaaatacgtatctatgctgatggcttattcgggattcagtttcctcttggcatttggcttgcatctcaacatactctgtgttatcgcccaattattgcttatacgtcaagacttgatggatacgccctcgtacgtctctcaccacttcacttatttcctcctcttcatgccaaatatgcggcgttactcagttaacgaatgatgaaataatcaaccagaccgatgaaaatccttcgaacatttcccccgctagaggcacggcccgtcatcggcgtgaccgttgccctcgtgaaagatatcccggaggagctgtaccgagaactagtagctcatcctttctcctgttaaatgggagctaatggacgacaaagagagccccgatggaccgagcgacttgaacggaatgtgtgggttgaggggaaatattacttgctctaggacataattgtgttttttatactttttgtgacgaacgcctatcaacgatgtaacgacatgacgacccccaatactttttcaaacctggtttacagtactgcatatcatacatctaaatctaaaaaagatagtaatcgctacaactttctctcctttaaagcctaaagcccctcccatccccatgtccgtctcccaaccatatgcccacattcctctctatgtttccctcccatccctccccttccatcaaccttctcaccctccgctcccctccttgcaggaccttcacaatctgggatggtacaaaaaacacacggcgccccgaccccttcttgtctatctttgtaaagctgggcatccgcgagagcttcccggtacggattgaggtaggagcggtcagaaggggaggaagggacgacttcaattaggccagaggtgagattgaacggccccggtttcccatgttcagtctcgtcattctcttcttcgccttcattattacgacgggaaatggtttcggaaggaagagggaaacggaagaggcggatgtcggtgggcggtttcggaagtactttggcagcagcagcagaagaggaagacgaagaggttttacccttcccccttccctttgcagcgttacttccgcctgtaccagtagtagagtttgaaccgcttccattcttccctcgctccttcaccacccactcctccgccttccttttccctcgatcatatttatctgccaaatgggtcgcccatcccaatatcctctcgagaccttccatccacccggcatgaaattgatcttcccactgtgcgaccttgttcgccggtaaggtatgcgcttcaccaccaatacagatggttttcagggtcggtaatggtgggagaaccatgtaaagcttgtcctgaggggggagg

SEQ ID NO: 103 - DNA, 3200 bp, Cryptococcus neoformans
tatattatacgtaagttcctggaccgggcaccaatataaagagaatctcgcttactctttgctccttcaaatcttcgctccatccatccctaatcttgcccatctcctcatagaatggtctcaagaacttaagaggcttggggacggaagtcattgaactggtagatgtcctgatcaatgttctaagtgactcaagagcgggctgataaagcccagagtccggttcctgtacgctggttaacaatcgaacctttgctacagcgctgagaggcgacatacccgtaatcgctggacaagcatctccagctcagccttgagctgcaggtcttcctcactctacgaacacctagtcagcaatctgcgtatccttgactctagtcctgacatctaaacgcaccatctcaggcccttcgtctttactctcatctctagccttgcctttgtcaccggtgtgtttgggtttgtcgtcctccttgggttcgggatctttagcggggactgcgatatcaaaagtgggtctttctccttcggtcatggtggtagatgcgagattagagagtaatgaagaggaagaaaaatataaagaagacggcaaaccgttgtaagctaaagaaggatcgagtgaatgacggcgaacaacgaactcatccaagacgcgcgtccagcctataagccacgtgggcggacttaaaaggggtgtggcacggatcactagaagtgaaatatatgagtagttcaaaaagccaattaatattgtcaagggcttgtgttgcagtggtagcattctagacttcgaggtcgtgaactggagtttatctagcggtcgcgggttcaaatcccgtcgagccttgactttttggttttgttgatcctttgctccgatcacgtgacgttctgcaaaagttgcttctctcgctgctgctgtccttttcgaattcctacaacctttctacctttttcttctttaaatctttctctagaaatttagaccttctcgagtatgcctaaggccacttcccagactttcagagctcagcctgcatccgccgctcaacgacctaagaaaggcggcgagtcctctgccgccgcggccgctggaggaggtgcacgaaaccatcttttcgacactgctaagttcggccaacacattttgaccaatcctctcgtcgctcaagggtaagtctagtcctgtatatattgggatttatattggaagcgaaggcttatttttccttagcattgttgataaggcaaacctcaagcctacggatgtcgtcctcgaggttggtcccggtaccggtaatttgactgttaggatattgccggcgtgcaggaaggttgtagctgtggaaatggaccctcgaatggcggctgaagtacagaagcgtgttcttggaaagtgagcatcccgttttcgtcgcgcatctgagagctccggctaatgtcgtgtcaaaggccagagcaaaagaagctcgagttgatagttggtgattttgttaaggccgacttgccatactttgatgtcctcatctccaacactccttatcaggtatacctacatcccttctcaaatcttcacttaatataagctcacttcacactgtagatttcttcacctctcgtcttcaagctcctttcccaacgtcccatcccacgttgtgccgttctcatgttccagcgtgaattcgcccttcgtctggttgccacaccgaacaccaagctatggggtcgtctcgctgccaatgtgcaactctacgcccgagtcgaacacgtcatgaaagtcggtaaaggtaacttccgaccgccacctcaagtcgaatcttctgttgtgaggattatgccaagagatcctcctccgcctgtcaaatttgaggagtttgacgggttgaatagaatcattttcagtagggcgaataagaccttgcgggctggattcaaggcaaagggtgtggttgaattattggagaagaattacaggacctggtgtgcggagcagggagcggtgagtatcaaaaagatggtttatttggtctcacgcttttgctaataacatgtactttacttatagatcattgaagataatttcgacatccgggagaaggttgaatccatcttagtcgaaactggtttcgcggacagccgagcggcgaagatggacgtcgacgaccttttgaagtacgttttgcgttccctcatttgaggtttcactgctttccttatattcatacttacacatcaacatttccaggctattggccgctttcaacgtcgagggaatgtaagtttcgcctcctttgtgtacctggaaagctgtgctgattgaactctctaagacattttgcctagattcagctccaaatcttcgcttgctcttgggcttttagttcgaactgttgtactcatactacctctcccacaatgtatatcattgcagcgctcacaaccaggctcttcaatgttctgactttatctgcgaaatcggttgtcacttcatcttgggacattgtactccttcatgaccaacatctcttttactgggatccgaggcgcatagactcatgattagcagcacactttcaatgtagttcatccagccgtgcgaagaaaaaaggatgtgtagttgtataaaaaatgaataaaactaaggacatagataaaatgtcgaatgaccaagaaaatcaacgtgggggtcgacagtttctccggaaaggattgacacttcgtaccaaacagatatagagaaaagacgtagtacggataatggacactggtaccacccgcgttaatgtgataggatcgttatgcacagaaagattaccggaacttgagtaaaaaggaaaagaaacgatataatgcgagagaaggataaaaaaagggaaagttccatatgggaatgcagagtaaccatgattgtggttcaaagggcgaaagcatggggtgtagaggcgcccgcattggcggaacgcaggggcgcaatgataaggttgaaaatatgactgttggatacgaaagtcactcgatcttttaaatggtcagacagaggataatcggtgttgatacagtttataggagtatctttttctgtatttgaatttcttcttaaatccagtctaccatggcatgagtccgttagctcctctgtccaaagcctcacatcaactcccaatactcaccattacatccctattgctgctcatcct

SEQ ID NO: 104 - DNA, 3252 bp, Cryptococcus neoformans
gaccgtctgtcgtttgcttttcccgttactttcggcgacacggcgatcaggaatcagcaagaaggtaaagacgtcataagatgatgatggtaacctgcagcgcgctgatagtattaattatgatgagataagattcagtgttgcccaccgctttccctgttcaacaattattattgttcttttttatcgtcattagcttcggccattgcgtcgacatgtattgaccgaggtaccaaattcgttatcaaagaagacgaggtggtccataataagggacaaaaagaagacggaagcccgcggaggcccagttgggccccagacctgagtagtcgccgaccatattggcgcttcttggcattctgtcttcggcgcactcggcaaccgttcattgttggcgaactagaggctgttcctgcgatcatgtctgtgcgctatgatgctaatgtggggtgcgccctttggccattacgcaatcagcagcatccccggcagaagcgctgagggcgaggaacggcgaagcggcgaaggatgccaagaataaagttcagggctgatgcctttatttcccaaacggacgctgcggatatgtccgattgcagatgttgttgtggtttgtgggagatggttataaaaaggcgccaaagcagccagatctccgtctccgatctccatctctgttgccactttgctacttaacatcgccgctcgaacaccaatgtctgccccagcccccgaccacaacaagccatccatggacggcacaacgatcaacttcaacaacagcgccaagggccacaacgaaccgcttcccgtggccgaggagaacaacgagctcgaccgctatgtcacagacgacttgcccaggcagccgaggatggctgccaagccccaaattccagacgctatcatggtaaatttagcttgctctgctggcactccacgggagatgctaatcacagccgatctaatgtaggccgttcagcccttgaggaagaacgagatgcaaccctcttatgctcaagaccttggtaccggcactattgatgtaagcttctcacatctcgcgcgttctacgccatactcaccacgctcacagcacggatgctatggctccatgatgaacgtgcttggtgaatgcatcggtgctttgggtatgatcccttgctgcccttgccccaacccgttcaacaacatctctcagggtgccgtcggtttggtctcccggtttggtcagttctacaaggtgagttacgtcccattgtaaccagtccaatgcttatttcggctgcagtctgtcgatccaggtttggtcaaggtcaatgtctgcactgaggatgtcagagttgttggtgagtaaaccagtttagggctagtttgaggcagaagtgatggcaagctgacaactctttcagatgttaagatccaactcacttccgttccccgtcagaccgtccaaactaaagacaatgtttctgttgaagttgacagcgtaatctgctggcacggtaagttgggtctcgatcgcccaatatcatcgctgcttgacgtgtaaactgacctggttgctgtagtcatctccccttaccgagccgcatttggaatcaacgacgtgaggtctgctttggtggagcgtgcccgtaagtgaaatgcgaggaaattgaattgtatctgactttctcatgcagaaactacccttcgtcaggtagtcggtggaagagtatgtttttatatattctgttattttatttgccagtcaatcggcgctgacgtcctgttttaggtccttcaaagtgtaatctccgaccgggagggtcttgctcatgaagttgccgagatcgtaggtattctcctcccgtaacctcgttcagatgctcatttcttattcagatcgaagctaccgccgagaagtggggtgtcgccatcgaatctatccttctcaaggacatcaatttctccgtcgaattgcagcaatctctttctagtgctgccactcagaagaggattggtgaatccaaggttatcgctgccagagccgaggttgatgccgccaagttgatgaggcaagctgccgacgtgagtacccgaagctgtggtaaacatcgctgacttgtgattcaatagattcttgcatcgccagctgctatgcagatccgtcaactcgaagctctccagaacatggctcgatcatctggcagcaaggttgtctttggtatgttattctgatctcgtctcatgatatttgcaattgctgatgtctttcgatagtccctatgaacctcggaacaatgggtgcagccggtatgaacgacgttgcacaccaaatcgccgcctctggtcacgacgagcatgcagatcatgggccaagtactgcaaccaacgctggtattatcagctctatggccaacgtctaacccatgggaagaagagaatctgactaatatcatctaatgggatcaactgtggatataattcgagctttgccgttttgtcaagctcaaaagtgtattatataggcacgtaagagtaaaatagtgacatgaatgtatttaatgcagaatctgcgactattctgctctgctcttggcaatgattagaagacaaacgtttaaacgtgaatagagtacgtagcagaaggcagatgagagaaggaatgcggaaatcatggtttacgtaaatggcggcatagctcagttgggagagcgcacgactgaagttcatcgagaatcaaatcgtgcggtccctggttcgatcccgggtggcgccaacatttttgtctttttcgacttcctttcaaattctgagaagacaaaccatcacaaacgaaaaggggtgtaaggctgcatgccgtataatcttgaggaaagaaggactatacacactgccttggcccttgaatttatgtttagccgctttcatggattgaaagcagattttgtccgattgctccacaaatgagctggcatcccgtaaagctagaaaccgattttcatttttcttgaacagtggccacaggtataaaagaaacatgtcaggtacagatgtagtatgcggatacatggcccaaaaatgctaataaagatgtcgtacaatttacttgcgcttcctggcaagctccttctcaaacctagcctttttggccttgccgctcgtagagccagtgccgctgaccctcttcttccctcgctccaaagcatctcccctctggccaaacttgcccgaaacaccatcccagactcccttgtctcctctgtc

SEQ ID NO: 105 - DNA, 3151 bp, Cryptococcus neoformans
cagataattggctaccctctggaaagcaatgagaccctctatatcaaggcctcctttagacgacttgagctgatcaaccttgccgtcgagattgatcaagagttgtgtgacaatgtcagggggtaaagaagagggtttaggaggggtgacggcgtccaaagttggcatgtttatgagcgttctgctgactgagtgaaagatatgtgagttattaagagagagatgcagtaatgtggagatgaaagaaacagctttcgtggctggtaatactgctacaatcagtatttttatattctggctactatttgtggaacttttatttgaaaccactttcatcatcatcctcatcgtcacagatgggggggcaggctgcaggctcgaacctcagaacttggatggagtcagtggatgactcgcactacgtcacaggtctgcgtggccgctcgccgacgcggctcttctttttttgaattattttgattgttcattaaaataaattattacatgatttttcggattcctaaaaaaaaatatatacacctatcgagtgataaataaaataaataaataaaacagatacataaattatttctgatccagggacgatgttcgccggctaccttattgttctctcgctgctgatccctctgttcgttgacagcgttgctgattgttgatcgtctattattttcttacgcatctgtatcattggcattacttacgcccttgttaacattgtcgttcgtctgttctgatcctcaattatccactgctcattttttcttaatttccctcaccacggcaccagtttggttcattcactgtcgactgtagcacctgcaacgaagtggacgttatggtaagcaaactacatgccgctatgtagatccaataagaaacatttcaaactaactcgatttgggtcacgtttaggtaacatcgacctacatccctatgtctcagaggcagtcctgggctgatatcaagcccattattcaagatgatgggcctaatcctgttgtccccatcatgtattccgaagaatgtaagagttcttgctggccattattttagcagtagcagactgacacaatatcttttagacaaagatgcaatggattatttccgtgctatcgccgcgaaggaggaaaagtctgaacgtgctctagaactgacagaggtcattgtcagaatgaatccagcacattatactgtttggtaattgcctgagcaccgttttcctaaattgcactgacatggtatatgcaggcaataccgtttctctttgttaacgtctctgaacaagtctctcgaggacgaacttcgactcatgaacgagttcgctgtccagaaccttaaaagctatcaagtctggtgggttggccgcggaccaatgctctcgatgaaattaaaacattaacgtcgttaatgataggcatcatcgtcttctccttttagatcgcatttcccctcaagatcccgtctctgagattgagtatattcatgagtcccttctgcctgatcccaaaaattaccacacctgggcatatctccattggctatattctcatttttcgatccttggtcgtatatctgaagcccagtgggaatctgagcttgattggtgtaacgaaatgttaagggttgatggtaggaacaacagtgcttggggatggcgatggtatctaagggtgtctagacctggagctgaaacctccagccacaacctacaggacgagcttatgtgagtcattcatgttagcaggttcaaaggttgacattgtgacgaagttatatcttgaagtcaattcacttcattccccacaacgtatctgcatggaattatctccggggttttctcaagcacttctcattgccacttacgcccattcttccagctattttaccatacaccgcctccaagccgaacaccgatatggaaactgtcggcacatttcattttcctgtgccttcggatccactgcccgaggatactccgttgcctgtccctctggctctcgaatatctcgcagactctttcatcgaacaaaatagactcgacgacgctgctgaagtgtttgagaagcttagctccaagtatgacaagatgagggccggatactgggaattcagacgaagggaatgtgttgaagaataacaagactgagttatccgtgtatttgtggtatgcataacatgttcaacttgactaggttccaaattgcgatatgtaaatctggtccaatttaacctgatttatgaaataataccaacaggccgtggacgggtcgtggacagtgttttatgagcgcgcatgtttttacatatattacaacatttaatggtcatctatctgagtttccatggcgagcctttacccccaggcttgagtattactgtcctggttatcagcacattaagatatgagatgactgggtccgtccgcacctgtaatttactatcagatgcccttctgtaccaaacgatttatacaggcttccaacagtgtcatcgggagctggtgcaaaggcagcgttgatatatgtaaactgatgaacccgtatagtcagcacaaggtgttccgtgcccctccccactttagttttcctctgaacttaatgaaaaagcattaacttagggctggcttaccaaggaatcttctttcttcatacccaactgttgccgcagaaacatgatcactgcttggaacttatgccctgcggtggccttgaatacattgttcttcataatcggcgctgaaccaatcgatttgaagcgcacaacaactatacaaacagagtcagcggtacgaccgatggggaaaataactcagaaatcattgatgaaccccggtccatccctcggcatcggcttgaccagcgcaacacgacttgcctttcgtaggatccttcttcttgtattcctccaaagccaacactgtggttcgatcatacaatatgttttctatggcttcaattcagtatagagaactacttttgtgggatgtttgaagaagacgagtttgttcgatgttgagattcaggtatgatgttgactaggggttgagactttcgggtacgtacctgctggttgcgcctgggcaggtgaaagacggtctaaagggggtgttgttgtggccatgctgttggct

SEQ ID NO: 106 - DNA, 3188 bp, Cryptococcus neoformans
tggattgggagcgagggcttaccatcaacagcgatatcttgggtagcagccgccaagatgagagatccaaagactgccgttaaaaacttgacgtcgacagtttcctgcatcacctctttcagttttctcgccctcccctgtatttatttttgagaagaaaagaccaggactcacaacgttcagccactcttcgatcttaccaccgataacccacatacccaagcctaccagtccctgtacaggcacgatccaactctttcttctaccccactttttcacgaaccacgcatcgacaataggagaccagaggagtttgagagagtatggccacgtggagagggcgaatattgcgagctgagagtaggagaggtgggatttgaggaggaacgggagggtaccgaaagtgaggccgagaggaataccctggagactggatgcatggttcagttgtgggtcttcattccaagggtgcatagcttacaggtctatagccatgttagtttgtactgatcgtgacaaaggaattcggcttacatagcaagacgagcagcgcaaacgcttctttgtcacgacgtgtagtcagtccggtactgtattcttcttccacgggggctttctccagcctcgtctccttttccttgcctttcccgcgccgcctggctggagacggtcctggactatcgtcatcgactctgcgtagcaggcccttctcttcaagctcggtgatatcctctacgtttcgtggacggacggtattgttctcgcgatgtatcatgctatcccgtgcggtggtggttgcggtgtgtgcgcgtttgctggggtctctcactgtcatctgcggttactggaggcggcgaggcggcgagcttcaaggcaatggcaggggcagcgagtgatcggcggtcaacaaaagtctactgtgagtgattacataaaaccaccgccagtgacacgtatgctgtaaacgcgacgcgacgtggaggcggcgctgtccgccccaatgccacatcactgttccagcgcgacgacgacgatcgcgaccacgtgcgagatctgctcccgaactactagcgcgcagtccagccagaacctaaatccacccttccgacccaacgccgtttgcttttccatcgcttccccttttacccataactcacaaccacccccacaaaatatgtccgcccctcagcccgcctctgccaccatcttcccccccggcgtcacccccttcgcccagcgaaggctccccaagaccatctgcatgtttgacgtcgatggcaccctttctctcgcccgtcagagcgcgacccccgagatgtttgctaccctccgcaaactccgtgagagctgcgccatcgcctttgtgggtggctccgacctcaccaagatcctggagcaggtcggcggggaccaagggctgagcaattttgactatgggtttgcagagaatgggttgatcgcgtacaagttgggccagcagctcgagtcggcgagttttatcaagcatgtaggagaggaggagtataagaagcttgtcaattggattttgaggtatctctccgaagtggacattcccatcaagcggtgagtcttttttcctgtcgttctatacatgtctgttcccacgatagatgctaatgaggcacgggcacagaggcacgtttgtcgaatttcgaaacggtatgatcaacgtctcccctatcggcagaaacgcatccatccaggagcgaatcgattttgaaaagtatgacaaggagcatggtattcggggagacatggtcgccaagctcgagcgagagtttttgcatcttggattgacttttgcgattggcggtcagattagttttgacattttccccaagggtagggttgcttttgtatttaaaggaaggctttgtgattgctaaacgttttcgatttaggctgggacaagacatattcgcttaggcatatcgagggtgaaggctttgaagagattcactttttcggcgacaaggcgagtcaccttctaaccccagccctgtaattcccacaccttttatactaacatatcgtgtatgaacagacctacaagggcggtaatgattatgagatcttttccgacccccgaactatcggccacaccgtcaccagccccgagcatactatgcagctcctcgacgagttgtttttgacgactgctccttgaaaggcgtgaaacgtttgcttttggcatgtggatgagaggtagcgcagagcggtggcagttcggctaaggtgcggttcgtttgttttggatttttggcttggcttggctgggaaaaggcaatgggatctctcatctcgcggtcgcattttgttctcatctttcagttttttcttaaatagagaatggaaaaccggaaaatatctgttatgatgatttatttcgcatcattacaatcttgttacatgcaacaacagtctcgtacataccttgtaggcctctattcctcgctttgggcatttttgtgtcggtagtgtttttgagctacagttggctgttcgaggagattttctgttgcttcttgcggcgagcgatcgatggcggcgatatccgatctcgacggcctttattttttatttttttctttcgaacggagtctttttttttaaaacgtcatacgcgtcttacgtcgtgtctcaatcagcagttgaagatggccgtcgtgggtcgtggggtacttttttatcttttgtttatcccgatccacatgatgaagatcgggacgttgaaatcgcaaaaagagcatcagggtcaaatgtataagatgcaaaaccccgacgaagaagcggaaccgacaacataaacgcataagcataaatgcaatataccatggcttttagcgacaatgagaacaacatcgacaatgacaacgacaatgacaatgacaatggcagggcgacaccagagtcggagttgaatgagctttcggatggagagtacgaaagggaacggttggagaatatcaagtaagagccggactatggtaaaagtggtaacggaaagtgctaacaagttggtattgctatagacaccgagatgcacttttatcctcccttggactcgatgttccgaagaagccgcatcacctttatccgcagcagcagcaacagcagccacagatggagggctcggctgggcaattagcagagaagactcggatgtc

SEQ ID NO: 107 - DNA, 3113 bp, Cryptococcus neoformans
ggctagaggaatggctgctacaggaggatagcggcggaaatggggggctgggagataatcgggcagatatagtgcccagtgaagaagaagtagctgctttcaggagaatgtttgcagaaaggaatcagagagtcacagcatagaaaattgatgctatacatatacgtctgacaactgacagtacttcagtcgcggtcttataaggccaaagcgatatatctgaagcaaatttaagcgatgtacacccttgcaaagattgttacttaccccgcgatcatggcaacccctccaaggggtgtcacgggccccagctgtttaaatctatctcttccaaggactaacgcgaatatgcttcctgagaatgcaactgctccacccacaatcatcccagctgcaaacttgtatctcctagtagcactgccgacagcgaagcccgggtggaaagatatggctaaaagtgcgagaccattgtagatgaggtaagaagaagctgtagaaaatgaggagatctgtctctcagtaacgggcggggagaggttgcgtagaccgtgagagccgaaggcgccagacgagatgccgatggcagctgggtggacggcgttagcatacagtaatggcctagtacaactgaggtgcatgtaagaccgtgggagaaatggacatacttaggagagcacctgaacgaaaaatgacgggggcggtcatgtgtgtttatgaagcagttcttgtatgagatagagaagtatcgatagaagttacgtagtgcttgtagaaaggtcgagtccacttacgtaacaccaagttctcgggctcagtctttcttcccatctgctcttcgtgccgtccgccactcatccatctgctactctacacccaacccttcttcttccgtcatggcccttccctcatccctccatgtacatccccatttcaatgcagaagaagctgcccacgtagtcactggatttgtctcgagtgagcctggttaatacaccatcccatgctttgctttcttgcttacatacctctcttgtatcatacaggtctagaaaacctccccggtgaagtcaccttcttgcttgaagagatccgtgagaaagatgttcgtataagccgtgagttgtttatctctcaacgtcatttctccgctgaacaaagtttagaatatgtacaacgtataaactcccgacacatgtcattgacaaagactgccaagaccctcgcatctcttcctccttcaaatgcgacttttcccttgcctatacctcctggggcattattgccgagtagtcatctgtcccaaaaagaagcgcaatcgcttgctaaaatacaaaatgaatgggctcaggttctcactctgcaagatgagaaagtgaagcttgctgaacgacttgagcgaatagtcttacgtgcaaaagaacgggcaaagcatcaatgggtcaaggtcggtggtatggaaattgaagaggtagaaaagtggagtggaacgggagaactgggcaatggtgaggttgtccttccacccggtggattgggcagtggaatagatggccgaccggccaagaaacgtaaaccgaatattccgtcactatctgtgaaccacacgaaacaggcaatacatcccagcatctcgatgccccctcccccgcccccctcaagaccatcattatccgcgagatcatcacattccaacgtcccttccacttctcacactcacacgtcttcccttgggcagcatggttctcgttccagacgagtgtcagttgcttccgacgaggatgcggacggggagcctgatgaaggagatacggatatggttgatgcggccgatgcggaaggagagacggatgaaactctctattgtatctgtcgacagaagagctatggcgaaatgattgggtgtgactgcgacaagtgcccgtatgaatgggtaggttgtattttcaagaccgttcgcctgatggaattattatgtttgctaatgttgaaatagtttcacgtcaaatgtgtcaacatcagtggaccattgccagacacatggtactgtcccgactgtgtcgccaggtatggtttctcaaatgacaagggcaacaaaaaagcacgcaaaaagtaatagcgagatggttgcttttgttaggatgtacgtaataataggtgttgtagtatgtatattttgttcacaactactgaatactttcttgtcatgtgcattgttaaacgtctgtttatcttgatcaagcgcgcttcgttgctgctagcctgtgatctgttggttgtttcgtttctctccctgagaaacctactacgcctatggcgaagtcaataacgttgtggtaaatctttgcctgccacttctttcaatatttaataacagattcctgacattggatagccatatcaagatacatcgagtgcataagtgagccacaaaagttcagactgccaggaggcaagaaggggtcttgcattcattgttgctcgcgtttatatactttcgctctacaattgagcctagaattagcaattggtttttaggcctcagttcataagacaacagatctcagtatccagtcgcctcccgcaggtcctgtcgcgcccaaggcttcaactatcctaacatgatggtaattttgtcacttttctcctttctcgttcgttacagtttgattgttgttactagcctgtttgtattacgttatcagtcaatgatagtgggcatccccgccattcagcaacgaggccaacttataattaaataaacttaagtaatctgccatcagttgcctgcctgcaagcagccgcgctttaattatcgatatttacttttccattttgtgccacactcgacgtgttgccagtgtcaaaaagtgccgcacaaaactccgaccagacgtcttttgcggttaaggaatttgtggtcaaggggcacatcgaaaaacctaagtcaactgtcctcttttctcttttaccagcctcaacaccgcaaaacacatcgccaaaatgggtgcgtcttgttctgcactacagcttgaatccagagggaatatcttggaggaccacgggccgatgtggcgagatggtgtagacgaatggtggtggataggtgtggtgtt

SEQ ID NO: 108 - DNA, 2550 bp, Cryptococcus neoformans
  misc_feature (688)..(688): n=g, a, t or c
gcgcgtatgaaggcacgacacaaacaaacagtgatataagaatgccacatcatacataaaattctccgtctggacaatgtgggacgaagcgtctgaagaagtccaaatccgcaatgcgctgccagcggccgccggtcgattcaacactcttcggacactccctgtcggacagatgtatccgacgcacttcagacgcaaaattacaaattattgccgaacagtctcttaaattattcgttctcctgactggccgtgacgctgcatctttcggccatcgtccgcaccttacgtattgggataggttgcttacgtatttagtaacactattcggccgtcctgctgcgttctcccatctgcgtatttctcgtttcaatccatgggtattatcgttgttaccagttaccttctcattgcgctattgaacgaaagtgtaattctgtaactatgatagctacacaaagaccatttcctatcccatcccctgtccctctcgcaccatcatctaccgtcctgccgaccacagtaccggaaaatgcgcctgaacattgccccgtacgttcgttaagtcccatttcctagacgccgctgatgtctattttctaccgcagggggttgaatcttcgcaggctggtaaggcagatgcttgtgaaggctgtcccaaccaatctgtctgtgcagaaggacccanagggcctgaccctgatttgccacttatccgagagcggatgagctctgtaagacggaaaatattggtgctttcagggaaaggtggcgtggggaaaagcacatttactgcaggtttgtcttgggcccttgcagcggatgaagagtgccaagtgagaattctctattacttcgacaggtccatggctgatacgacactaggcgggaataatggacattgacatctgtgggccatcgatccctttgcttatgggattagaatcttcaaccatccacacctcggcctctggatggtctcccgcttatgcacttgacaacttagctgtcatgtcgatcgggtttttacttccttcctcgtctgatgccgtcatctggcgtgggccgaaaaaaaatgggcttattaagcaattcctgaaggatgttgagtggggtgatttagactacatggttgttgacacgccccctggaacaagcgacgaacatctgtcgattgtgcagtacttgaaggaggcaggtatcgatggcgctgtacttgtaacgacaccgcaagaagtggcactgcaagatgtgagaaaggaaattgatttctgcaagaaagtcgggattcccattctgggactggtggagaatatgtctggttttgtttgtcccaattgcaagaatgagagccaaatatttgcccccacgacgggtggggcggaggcgatgggcaaagagctcggaatagaattactgggaaaagtgccactggaccctagaattgggatgacttgtgaccaagggatgagctttttggatgaatatccagagagtccagccactatggcttatttagacattgtgcaaagaataagagagattcttgacgatgagtagaggactattattctacaatgtagtggtcttaatgttgtatgtatgcatccctttatcctattcgctttcgtcatgtgcccctctctcagcctcgattgcaccttcatcaactcccacttcttcgtcatcgattgcttccccttgcccttcagccatattgtcgccaccatgtattcgtctgagttcttcatttgcccatgtagggtcagcaacctggcttttagcttcatcacgatggtcaatgtccgcctggctaggcaatctgaagcccacgcgactcttatcccatctgtcggattgtccatcgacctcgtcatgtggctgatgagttagcgatacccacccttcattgaaacctaccttcgttctggtctttctcaaaagggttcggaaattaatttctttataatagacaccttttctcttcttagtagctggctcattatcattctcttcgccttcttggaaggaaacaagaatctctttcttgggtgctgatgtagagacaacttcgtatgtacgtatgcggtcataatagacattctgataatggtcaggaaaaatagtaatctgagcaattaacttacggaaaaaatatgatcaatctctggatcgttgggattttcctcattcaaccgcattatcttctccaaaggctcttcatccacggcgcgtccataagcctcgtccagcttaggaaggtcttcctcctggggaagataaaattccatcatctgctgatcatcttggacgatagggcgcagaatagatttggaaagacgaggggaagacgcgcccgccgcgggattctacaagcgagcatgagctttgaaatgtcgacttttcttctgcttcctattgtatctcgcggcggtgaatctaaactcacaattgctgtcgctgcagaaggtcgctcagggaatcgaagaagaatgtagttgtttggccatgcttcatcatctggcaagacgtcgtaactctgtaatatgg

SEQ ID NO: 109 - DNA, 3159 bp, Cryptococcus neoformans
ccataggaaaggaatagaaggcgacgaggggtggacaagaaggacatgcggaagctcagatttctgctctcgccgtaagctttcggcgagtatacctgatttgtcaatacctacctcccccaaaaaaccttgcacatcagactgaatgtctccctgaactcttaacttcttgaccctctcgggcaccaaccccttcgcgtattccactagcgcacccctcttcctttcaccattgtattccttagcagctcccttccccgccttggggaaaccttttatagttggatatccttgaacaccatattcagcgcaaagcccacgattggacgcatcgtcacagtcaacagcatagaatgggatcagaggcgaaagtgattgggccgcagcagtgtattcgggtccgagatttttacagtgcccacaccacggtgccacaaaggcgaccatctgttcaatgattagcgacatatgtttaatgcttacaaagacgcaccgccgcatgttcactggccatgacggacttgaatgtcttggagtcgagatggagaacaggctggccatacatgcctgcataggcagagaacggcaacagcgcagctgttattactgcagaccaggcaatcttcatagccggtgctgatgactagatggctatgcactgttgtgaaagtacagaatggtttacttatagaagccaactattgttgctggggatatatctattgacaccgagtgaacgcgtccgaagaaagggcttattagccgcatctgatgacgtggaactggtaataaacccatttacgtaaatgcaagtacagccacaaaacccgtatctcggcattattgtcggcgaaactgctttcgatgcgctcgcggacggtgcccaattttcaaggtgtatcaaatcatcgtgactcttctgtgcacttcaaaacaaaaaacccgacacaatgcccttcgtcaaggtccagaagaacgacgcctacgtgagcgacatcgcatgctggaggactatcgacggaaactgactgtgagaattagttctctaggtaccaggttaagccccgaaggaggagacagggtaagaccgactaccaggcgaggaggggtctcgtctcccaggccaagaacaagtacgcttcccccaaggtgcgtttttttttcaagtgctaggagaggcaaggccaatagattgacaatttctacagtacaggcttgtcgttcgtatcaccaacaagcaggtgatctgccagatcgtctacgccaagctccaggtatgttacttcgaatcttgtaaggaaagggtttatgattcatgtctaatgcccgcctagggtgacgttgtcttcgcccacgctacctccaaggagctcccccgatacggcatcaagcacggtctcaccaactggaccgcctgttacgctaccggtctcctcgttgcccgacgagctctcaccaagcttggccttgccgacaagtacgagggtgttgttgagcccactggtgagctccagctcattgagcccctcggtgacgacgagccccgtcccttcaagtgctacctcgatgtcggtctccgacgcacttccactggtgcccgtgtcttcggtgccatgaagggtgcctctgacggtggtatcttcatcccccacagcgagaagcgattccctggttacgaccccgagtccaaggagctcgacgccgaggtccttcagaagtacattgtcggtggccacgttgccgagtacatggagtctcttgaggaggaagacgacgagcggtaagtattttgttttgtttttgtgatcaatatctgatgaaccccacagattcaagaagcagttctcttcttaccttgccgacggtgttggatctgacgacattgaggagatgtacactaacgcctacgaggctatccgtgaagaccccaccttcaagcccaccgagaaggacgtcgccaagtggaaggccgagtctctcaagtacaagactttcaagctcaccaaggagcagaagcaggagcgtgtccaggccaagattgccgcttacaaggctggcaagctcgatgtcgaggaggacgaggagtaatctcatggcgtctgaagggtttatgcattcaggcatttgggataacccgttattatggacaaatgttgtaacatcacgctttttgtttcatatgctgattgttaaaagcattgtgttgcaaaactgcttaatggcctcgaagtttacctgattaacttgctctcgtcctataatgatagtttgtccttgaccactctgtccatctaaacgtcatctgcccgtgcatcgttttcctcgtttcgtacggaacaacctccggctgccgttcactgtgtgatgccctctaactgcacggaacaggtgaattggtgctggactctaattcctccattcattagcgtgtttttaccatcatttagagaaggtgccatacgacaggattgctacgcaggcgtgccttacagataacaactaagagccagtgcttagataaatcttcaagccttaggggggtatatgacagcagcgggttcaaagtactacagataattaggtaattttaagcacgatttctcccaattcactactgcacctgattctcaatgtccttctgtagtattactcgtacagttcgaaatgtcaacgtttcaccgtatggtcaggatccacgacatcttaatagaaaatctttgccttcatctttttccgtccgctttcttcgttctccaagaacgaacgacgaaccttcaaccaacctgtggttacattagtgtggtgaccaagtcacgtgatattcggcaaggtgatatataagaccgcgtcacaacactcgtccccgccgccgccccgccttcatctcgaaaacacaaacgaaagcctctcgcttcgtcttccttcctgggcaccacttcctcaaagctcacgatggcctccgaggacgagaccctttcttcgctgggttcgcttggtcttggccgtatcctcgcctccgcaggtatcgacccatcatccattggctcttttctcggtgactcagcacaatcgtccaaagaactcacacaggttgaattggacgaagatgatgccaagtttgaagatgacatatccgatggtgagttgcctgaggaagga

SEQ ID NO: 110 - DNA, 3164 bp, Cryptococcus neoformans
atgaaggtgggaaaaggcgtcgtaggcccccttggtgagaaaaatggaaatttaggtcgtgggtttttttatatggttcactttcacttgtgaagtgcggatctgcaagtgaagtggacttgcgctatgtgcgaaaaaaaaagaagagaaaggagcagaaagagctgaaaggagctggaaggtggcgagttcccaaagaaagaaaagaagcttcgggtggtaataaagaactgatcaaagatcagagaccaaaatcatcagagatcgaagatccggcagacggcgatgcgcgcggcgtgtggtgcagcgttgcggacgagatgacgaacggcgaggagtgggcaacgaaggccgatgcgaaaggcggcgaggaagcaggaggggatgatggaaacgacggggtaggtagggtggggttaggaaagccaatgtggtgactgacagggtgatttgccaagcggggtattacgggaagcaatatgggatcaagagccggagacggagaggagggtggagggagtcgtgggcggttattattatacgacggaagcaaaagtcacgcacagacgtgagcgagatgcatacggcggcgtcgccgtgcgttgtgtatataattgatgctcgtaataacgtggtagcggctgcagcgagaacattgcttgtagcgcacacgttttgatgggcgatcgttgatgggagaaattccaatccacacagccgcaagccacagcgacggcggcgtgcacgataagggtcaccacgggcctgatgtgcctggccctgggctaatcgatataatcccctaaatgggctgcggaattaaatgaatgtgctgccacattatccgccacgaaactccgcgaatcaccgagaccttggtcgcgggcaggaatgcaacttggtcggccaaacggaaaattgagatttcttcctctatccttcaagactctctcgcctttgcgctttaacccaacttacccccaaaaacacatacatcaaaatggctgagcgaggtggtttcggacgtggtcgtggcggtgccggtggccgaggcaggaggggtccccgacgaggcggtaagaaggaggaggacaaggaatggtcagttgcaacgcgtcatttggatggatgagccaaagggatggaagggctaaaacgaaacgtagggtccccgttaccaagctcggtcgattggtgaaggacggcaagatcaagtccatggaggagatctacctcttctctctccccgtcaaggagttccagatcattgaccttttccttcctgccctcaaggacgaggttatgaagatcatgcccgtccagaagcagacttctgccggtcagaggaccaggttcaaggctttcgttgccgttggtgactttgacggtcacgttggtctcggtatcaagtgcgccaaggaggttgctaccgccatccgaggtgccatcatttctgccaagctctccatcgttcccgtccgaaggggttactggggttctcacattgctgagcctcacaccgttccctgcaaggtctctggcaagagcggttccgttatgtgccgattgatccctgcccgtacgtactcgtctatgagctcgatgcccttggtaaattggctgacatttttgttagcccgaggtaccggtatcgttgccgcccctgcttccaagcgaatgctccagatggctggtatccaggactgttacagtgcgttgtatccctctcccagcctgtacttttcgctaacgatcccatagcccagtctaagggttgcactgccacccagggtaacttcttgaaggctaccatggctgccctcgccaagacctaccagttccagtcccccgacctctggaacgttatcgctcctggtcttactccttacgacgagcactcttcctggttggctatcgccgccaagaaggccgccaactactaaattgttgttggaatttagggttttatctagcgggatgcgatttggtcctttgctgcgtctttgaggatttcagtttctttcgtcttgttgtgccggtgcagttgcagaagtgtgattctaaggcatttaagtggaaatgcgcatacgaatgttcataccgaaaccgaacgtcgggtattgaacatggccgtatcgaacgctccttcctcttccgttactaactatggatttgccgtcgtcgcatacatttgtccatttgaatcagtctgttccatggagctgcaataggcggtggtcatgttcgatcatcttttgagattttgtacagtctgatcagagtcatattccatgccttaccttccgtacttgcctgcattgtgaatcgagtaagaacagccgtaccacaggcttcataccatgtgtctgctgcttcgagttgtgcttcttcgtagtaccgacagatctgcttccgccacgaagcgtaaaagcggatccgaagaaagtggtgacgaactcggttgttgatcgagttgacatttatgccgctacatttgttcattttggtccaccaagagtgtgctatccttggtctcccctactaatcaattcttctccattccactgccattccccgcccatcccctactcccgacatgcccaaagaagctaaactcccttccaccacccctccccccgctctcttccctcaaatcctccctctcctcatctcccgcctcaccacatcgcctgtcaacctccaaatcctcccagttatcgaaaccgccctccacattcaacgctgtgtcactcttgaacccatgccaggtgtctctgcctcaagcttgatcccacttcaaaaattacttgaactctccacctcccatcccgccgcggtccgggtacctgccatcattgatgctatcctcgcccaccctatccattcgcccgtcatctctcagatcatttccaacgtcttcaacgagtcaccggacagtatcgaaatttggcgaattgacgtgctgcccgagttgatcaatcagactaaagccggtggtcagaaggacgttgtgcttgcagtcaaattgatgctcggtatgattcgcgcacatgacgaactcatcggtctcactcttgaagtatcagaggaagttcttcgcggtctgagcatggcatactcaaaattgggagaagatgaccgtaaaactcggactggggtgtctg

SEQ ID NO: 111 - DNA, 3112 bp, Cryptococcus neoformans
gaagcgtggtatgttgaatttccagtaatttgaagtaacaaacctgacacaatgtatagagaagttgacccttaaaatgcaaggaggaattgatattgatcaaaaccctttcgccatccaggatgacaacgacggtactgtcctccaagctagagggtatgartacactgcctatggcgttgacggtcatcgctgggtagcaccaaatataaggaggggagacatgtctactaaagatgtaatyccccccctggaaggctttgatcctsttatctctgatcagctctctgatgcttcttttcagycatggctcaatcagaaaattggcccagtagatcttactagggacgatatgggtgggaatagattcatttcttgtgtgaatgagactatgggttacctttcttcttacatccctaatttcaaggaacgcttgttctattatatgtaaggtatacaggggaaggtttcctaatattgtgtttattgtgtagtatggttcatcccattctctagacttagattactctcctacgtttatttacagttccattagaacaactcaggcatagtgaacggacaaaaatgtggtgttgatgcgacacaaacaaagatttgatcgagaaaaagaggcctgtgctgaaaaaaattcgtgcaaaaacgtcgcaaaaatacaggaataatatttgtccgatcgacctgccataattattgtacaattatattaagtaatcaggtgcttaacggtcatccacggtcgtttgtgacttttgaatgaggagcaacgggatgcatccatggaacagcggcggacgtgcaacagatatacgataacaagaacgaagcaggagcaaaaagaaaaaagaagagtctatcggaggcagttccaggcaccgaattagtcgacagccgcaagtcacgtaagcgactggacgagcattcaaataataaatacgtcgatctccattttgttttgataattgagacagtcaattccaccatgctcaaggacattgtagaacgaacatcttcccctgcagaggctccgaaagccccggcacctagctctaccggcttccccgtcgccgttcatcgctctcagcgaccatctgcgtttgcacgagcccgaagggcacaacaagctttgaaagaagaaggaaagcaggagataggctatggaaaggctgtagataccgtcccaactgtacaggctgcaggaccttcatctgcttcaagcatgacagaatgggaagaggtaaagagacaagtgcaaggagataattcaaagagagtacagaatatgagtcagcaagagcgagaacaggagatcgaggaacttagggagagactaggcgacaagactttggatcttttgaggaaaagggctgaggctcgtcagtcaaagcgcaatcttctagatgtccccaaaagcgaactgtcatctatcgacttggagcagcctttcaatgcaaataacacacagaagattttgcaggatgtctcagaggagaatacaaggcgggtcgacttaatgagcttcgaagaaagggagcaagagacggaggagctaagggaaaggtttggagataagatcatggaagctttgagaagaagggccgaggtaaagttaacagaagggaagagcaacgtcgtggaacgctcagtgaagcccgatgtccctgcttcatcgagtacgtctgtttatatcatataattctctttgaaagcttaacctgtggcaggtatattatcgaactcccaggacgacgacacgaacctcgacattcttaaagccaaatacttccctacccttccctcagagccatcgaaacttgagtggctgcaacccatatctgcgccttcaagcgacaagtcgattaggtttgacctttctggaaaagtactttctgccaaagatacagcatctcttcccacccatctgggcttacatcatcatggagaatcacccgacttagctggctatactttccaggatatattatatctctgtcgatcaacagtaccgagtcagcgtawaaccatgatgggtgtactcagccggatcctaggaagattacacaatggggaattggaccaagctgtccagactgagtgcgatgaaacgcaggttgtccagaaagctatcgaacttggcgtagaagtgcttgctggtttgacaagaggagcaggtgtgatccgagcaagcgtggagctcctgtttgaagcattatgcggcccttcatgggtattrcctgacgattccatcaatgccgacaatatctaccaaccatttatccagccacttataacggcccagagcgacccaactgggattgcttccataccatttgaagatgtacttcctcgcctcactgagctactttccatacrtgatgctcttcccataatgaccaccaaccagttgctgctcattcttcgacgcgctactcttttgtcaagcgacctttgcgaaaccatctgtcccattgtaccggccattctcaagcatcacgtcacccaaagatcttggccaccaaaaggcgataaccgaccgaatgtggaaggattggctcttttgagggacatcacggcaagctcacgggcttgtgcggaagaccttctgagtcagagagtttatgagtctactctcaaattcgttatatctgccacttggagcgaagggaatgacgtcaacaagcaagaggttgctcatagcctggcgttggaagttttgcgaatttacgccattcttggaaggtacggcttatcagcttcgatcgttgcgtctagctctgaagtatggcgtctctttgggaagtgggtccagcagcgttccgcctctgagaccataccgccgttggaaagtagtcttgtcaaggcctactttgaccttctcaagatttgggtcacatgtgccatagacccgcatagaacaactcctgagcatgacattacctgggctcaggttgtggcactcgagtggattgatgaggctgtatcttccgtcaagcaactgttgggtcggttagaacgattggaagaggtggcgtctgcgctaaatatgttggtcagttgggcaacaggcgccaaggtcaatgggataaagagcggt

SEQ ID NO: 112 - DNA, 3336 bp, Cryptococcus neoformans
aagtcttttcacatcgttgtaactgtagagataaacgagtgatgagtaatgagcagtagcaatcgaattcggggtgactgcaattacagagcacagcacaaatgtacacacggttaggactgacccaccactcgctgaaagatgaacgaaatgaaataaatatccacggtgacgacgacaaacaactaccgacgtgcgacttatttaataaatatataacaacaataagcgcggtggtcgccgcccccctccaccatacggcatgacgtggcatatatgacggagcgtttggatgatgatgacagtgatgattccgttgctcgtcggcgggtccgatgccttcttgactgaattcagagtgttcatacgtagaaacagtagttgttcctcctctctccaaactggataactccatttccgccaatgtcaacgtcactcgaaaccccctcagggacctccgctggcccttcaattgttgccagcgggctcccccctctagctgatttagtacgagcagggagcaaacgaactcgagtcgtgtacggtgcggagacttcagcggtggaagacgatggtctcgcaagggcgtaagtatgatctctttttcaagcacctacccagctaattcgtatggtaaatttcagaaacaaaattaagctggccacgaaactggcgattgagtacaaggacgttcaaacattaccacctatcttacaagctcagcaaaccggtccagccggacccaagcgaccaacacagccatccattgccgcttccgctaccgctggtcccaacgtcaagctcattggcggacccgaggctgagaaagcgttagtctaacatatcgtatcttttcctagcgacactttactgattccgcaataggtcctcatccacccctcaagctgttgccgagcctcgctcattagtgaagttcagacatcaagaaggatttgccgctgagggtggccaggctacttccagattgtcgcaagctttgatgaggaagaaggaagccagagaagtcaagcccgaatatcaccccgagtgtgagagcccttatcttctctttttcttttttagaagcactcatctgacaacttgacagggaagcttacacgagttatttctggccatatgggatgggtgcgcgccgttgcaatggatccaggaagtcaatggtttgccaccggtgctggtgatcgtgttatcaaggtacgtcgatcattaatacatctcctatattggtacctaatcctggctggaagatatgggatcttgcttcgggagaactcaaactgtcattaactggacatatctctaccatccgagggttagcagtatcagatcgtcacccgtatttgttttcttgcgcggaagacaagatggtcaagtgctgggatcttgagaccaacaaggtcatccggcactatcatggtcacttttccggcgtctattccctttcgtaagcttcaaattttactctctcaaacaaatgattaattttatttcctcatagagtccatcctacgttagacgtactagtcaccggtggtcgagatgcgagcgttagagtgagtgcttgtagtctcgtcttttggccatggctaaagcatcattccaggtatgggacatgcgtacgcgagccaacatcttcacactcactggccatacgagtactgtgggcgatgtcaagactcaggactctgatccgcaaatcatatccggtagtatggatagcaccgttaggttcgtttattctttaaaaaccctctcctcttgctgtttcactgagtacatgctacaggctatgggatcttgcggctggcaaatgcatgaacactctcactcaccacaagaagtctgttcgtgcccttgcgatccatccgacggagtacagctttgctagtgctagctcaggtggcaacaatatcaaaaaatggaaatgcccagagggcatctttgtcaacaactttgtcggtcatgaggccatcatcaatacactgagtatcaactcggagaatgtcttgttttctggaggtaagttatgttttttaccatgggggccgtctcttgactattatcagcggacaacggtactctcacattatgggattacaagactggtttgcctttccaacacctcaaggatattccccaacctggttcactcgatgccgaagcggtgagcccttcagatattctgactcctgctcttgtgcttatctgttctacgtttttagggagtgttctgttctacatttgacaaaacgggcacgcgtctcattacaggtggagcagataagacaatcaaggtgtattccgagcaggcatagatgtgaaaatggagtgacaagtgttccagtccacgagatgcattgtataattattcaggagactttttacaccgacaactcggcagtcttgacgttctttaaggcctcctcgtaaggtttgagagcgggttcaacccactccttgaggaaaccatccacctgttcaggagccctaccaacaaaagttctgggatcaaggagggcatccaactggccccaaatgggcttgaagtattcgtccttcttgactctgtcaataagatcattctctccgccttcctccttgacaacagcaccggcctgatgggaaaggactcggattttttcatgacactcttgcctatcaccaccggctttaacgatagccatgatgatgttttcagtggccatgaatgggagctcctgcgagattcgacgaccaatgactcgggggtaaacgacgagaccctcagagatgttctgcaaagtagtgaggaggatgtcggcggtgaggaaagcctcgggaatggtgacacgtctgttggcactgccgtagagcatcagcaatcatcctcaagtacctggacctcaaactcacctgtcatccaaagtacgctcaagccactggacggaagaggtcatgagagtattttggtagatgaccataagatgtcgtgcaagggaacacgctcgttcacatcgcatagggtttcgctatatgacggcatcagcttgtttgaggagatcaattacatgaaaaagtatcggcaaaccttataggccatagcagagctgccaatttggtccttttcgaaaggctcttcaatttccttcaagttcgcgagcaatcggactattagaagctatcagaaagtgtttgcgaagagcgaacattggcagaagctcactgtcagtggcgatcttgtgcacagtcgcgccaaagctggaaagagggccaaggacatcggcgtcgatctttcgagagtaagtctgaccagtgacgggataggcgtaagggaag

SEQ ID NO: 113 - DNA, 3394 bp, Cryptococcus neoformans
gggtagtcttccagcggcgatggcctcatatgctgtcggctcggtattcttcccccattgcacatgctatttcccttccatgcatcatcagagtccagaacagaacaataagctaaaatcataatcctaacgaatgtgaagcaacaaaagccatgtccacttctgttgcaactgtgagcacagactgtcactgccgtatcacaaagctgcatgtccccttctacctcgtatcctcacgtgctttgcggcgcttctccctacctcgacccctcttcggccatgaagaacaataaagcattttactactgctagccatcgatgacattcttaaactctacggagacgattaatttttggaccttacttacagcatgtatgatgcacgtatgatgcacgtaggaagaacttattacagcaaccgtcgacgaccggtcaaccagacatgtcccatgctgctgttgcttgctggacgtcgtagcaatgactagtagtggtggagtcgcatgacggggagcatgtgggtcattagtgattctgagtgaactgaaatgagtcatcacgccttcattaaattgatatggcaaagggtccctcgtacaatgataatttaaaggtcctcgaatcgaacatacgtaaatatgacttccattattacaggtcaaagccaaaatctcgtaaaatgaacgacttttttccacatatatcgacgacaagtaatgatttttatcggcgccagtcagacctgttcgttctgcattcactggttatttgtcggccttttcagccgctatattcatggacaggatcttcgacatagcatggtaatctctcagtgcgatcacagtctctcagaaaatgccggcccacgctgcataragctgatgaagggggttttgtgaaaaagcatgagatcagaaaaagaggacggccccgcacattgccgacagcggacggaataagtcactactgataacagcggccagctttatcaactgcgatcatgaaacgtattcatcagtggaacaccatcacaagctatataaaatataccaggtacagcatacgcctcttttcctccttcagcctgcttacaatttcctcaggtaaacgttacaagtctactatcagtaccacccctgctcatcccgactttcgcagctcctcttcctcatgtctcttcgcatcctcaccggctcgcaagttgacagcatattagctagactcccactcgacccagcattagagtcccaagccaatgtcttccgagctctcacccgtcaagcgaaaggcgtgaccaacattcaacaaggtgcagcctcaattcaacgcctcacaggctgacggttaactcggacaagttttccatgcttttcatgctttctcgagcgcctactggggcctctggacagactggagggggtgggaaggagcaaaccacaacagcatgtaaaatcgtctctgtgccatccggtagctctgccgaaggtctcccagcaagtaccatcatcatggacgaggtatccggaaaagccaaagccctcatcaatgctcgaaagctaactgccttgcgcaatgcatgtggtgggtatatattacacgtaaccaagcatgttcacgattgtcagccgctgatacttgcatttctaggctcagctgtattcttgtccctctttccagccgtaacgacaaaacatcttcttctttttggctccggagctcaatgtgtatcccacgcacttctttttcttcgtcttcatcccttttcycaagtgacatttgtcgtccgctcaataaaycaaagatcccaatcctcagcctctgcgatccaatcgcaattcccagcagccagagtctctctctcagtacattcctctccttccgatgagctgtctcagctggtggcgacggccgatgtcatagtcaccgcgacttcctcccttacaccactcttcgactcctcacctacttgtcccaagcctggtgctagggtgattatgatcgggtcgtacaagccggagatgcacgaggtagatcaggctttgatgaagcgggcagccaaagtcgtcgttgattccagaaaagcttgcgagagagaagctggtgagattatcgatgctggaattaaggtagctggaggagctggattagtcgaattgggcgaattattagaagaggccggcttgccaggtgctgtcaaagacagcggagatacctttgaaaaagaggtcatcatcttcaaatcagtgggtaataatcaatactgcatattatgatatattaaatgccaatctcttataggttggtcttggtattcaagatgtcgccatctcaaaagttgtattggagcaagccgaaatcaacaacatcgggacagtcatcgaggattatgattaggtagacttggagtcgcgcgactgatgtcatgtatgcttcaatcaagctgcattgrtgtacatgttcagtctgtttctggcatcatttgtcactttataactgaccattgttgtcggtcgatgcatgctgcgtcgagtctgacggacggatgcagcttcggtccgtccaattatttagacttacatcatgcctccacctccaccttgagaattcaagtcgtctcgctgacgacgcgttacgtatgactgtttccatgatcgatggatcatctcacctgtcgtcgatatcactgttgtcttctgtagtttttaatcggactggacacttatagctctttccaacagttaactcatccttctcttcataaatatacataaaatttgcgaaagatatgtcaagtttcagcgttcacaaagcggctttggaaggttagtactctttgcctcttgtttggctatcatcttcaaaaaggtttgtttaactttcatcataggtcagataggtcttgcgagatcattattgaatgacgatcctaaacttattaactcgaaggacgaagtacgttctggctggctcgagaggtgacatatgctgaccttgcgttattcccgcctcgccccactatcttgtccttgtgctcgcgctctctttgatgccttcaattcgaatttacccacaggatggccgtactccgctccactgggcagcgtcaacttcaaacctttctgtcctccaactgttgctcaattaccatcctgacttggaagcgagagatactatgggatggacggcgttgatgattgcctgttggttcattcggctttcataaactagcgggaagctgggtttattcaaaagtccccttgttaatgcccatttttagctgcggcggggcatcctgaaatagtcagagagctgataggtgcgggtgccaaagtcgatgcagtgaatgagaagggtcaaacggccctgtgagtttgtcctctgtgtctgaaatcag

SEQ ID NO: 114 - DNA, 3237 bp, Cryptococcus neoformans
ttaaaagtaagtcatgaatagcaagtgccgtccatttgttgacttaccgcattgatactcatgattcgtttcaagcccccagtagtcgtagtcttctcctcccataatacccatcggacgcctggatttcctagtgctagcgtttcaacaacctttttcaattggctcattaaaagcgtgctacttgtcgccgccagctcttctcttctaacggggatggtacgaaagatctcgcgaactacaactgtagtaccttggccgcctgcaatatgcctatcaggattggggccttcgaatagtgttttcgaatgtctgagaattttggtataaactggaaacgaagctctgcgtgtagtaatatctagaagggaaagtgaagctatagatgctaaggctgtggcaatgttcagtattcattagggctttatacagatcaacttaccttctccacggaatccgtaagatcctactggccccaatcctccctcgtgtatttctttactcgtcctaaacctctttcctatctttgctagcccattcttgctgataccggtgccgttatcctccactctcagagtttcattccctttggccaagttcacatagcattcgattttggtagcttcagcatccaaagaattttgaagtagctcagagaaaatctgggcgaggctggggaggatgatggaagagcggagagttgtggatgtggggcgaggcaatggtaatatatttggcatcttgctacttctagcagcgcgcagagatccaaaaggaactcatgggtactggtctagttgtggtataccttgtattttgatctgaatggaatattatgattaagagaaaggttctttcttgacaaaagcaatactgatagggtggatgacctccacttttggttgcctcggctcgtccgtcataaccaacgaacatatccttcgttgagcgccatcatctgatacatctcttcattcccataactgacgatccggccaccatgtccctagccgccacctcgcagcctcttaataagtccttgcatatcaagtatatccaagatcttgacaaggtgtgtcgccctcgttcggggctaaccattcttacatatcttccccacatacaatgctgatcaactctctcaatgacagaaaaaggacttggcctactatataacctctcatcttcggctcaacgggatctactggggactcactgccttatatatgctagggcagccagaagcgcttgaccgggaaggtgtcattgagtatgtgctgtcctgctgggacgatgagactggtacgttggtcatttcaacaagtcgaagtattatatagctgacatcggtcaggtacctttggaccgcatcctggtcacgatggtcacatcttggccacgctttcgggaatccaggttttgctcatggaagacgctcttgatcgggcggatattgagcgtatcatttcttgtatgttttataacttcttttcatgttggctattcctaagttcatgtgcagtccttctcaaacttgttaatcccgacggctccgtatctggcgacaaatggggagagtcagacactcgtttttcttatattctgctctcctgcctttccctcctcggtcgtctttcaagccttacagacgaacaaatagaaggcatcaccgaaaatattcgaaagtgcatgaacttcgatggaggattcggccttagtccgggcacagagagccattcaggacaagtttgggtctgcacagcagcactaaccatcctggatcgactggacctcgtggaccgagatttgttaggagcgtggttgtcggaaagacagctacctaatggaggtcttaacggaaggccagagaagctcgaggacgtaagtcacaccattctaccaacgagacactgactgattgtcgtaggtatgttattcttggtggtgtctcgcctcattatccataatcggcaaaatccactgggtcaacgcggataaattaattaacttcatattgagcgcccaggtaagagagcccatcatttatttatcaaatgttgacatttataggatcttgatgacggaggcataggagacaggccgggggattgggtcgacgtcttccataccatctttggagttgccggcctctctctcctgggctacccagatctacgagatattgaccctgtctactgcatgcctgcagacttgataagtcgtcttggtttgcgtagaccctactcagtcttgcctcgtcgatctgcacaatagacatccatattctacatcatgcataattccgctataccccccagcctacatatacatcaactatctattgcaccccactgtcacccccaggggctgaagcatgttcttgagggcggccggccggtgtctctgtaccagaaggcacggaagaacccatggccatagatgcttgccctgcttgtgtggcagccagacgttgacgtttacgttcggcctcagcttccttctcagcgtcaatctcagcgacaattttttcgatatcagattgctcaagggcctattatcatatcagcttagtccagctaagttcgcttcgaataaatactcactttaacaacaccatatgactccatcacagtaatctcaatgttcttcgcaccagtttgcacaacttctaacagactcttcactgttaatttaattgcctgttctctctcaaggtcttccacatagttcttctctaagaattccctgacagtcttggatgctcttccgatagaacaagctttccaggcagagtagataccgcttggttcggtagagtacagtcggggaatagtgtcatgtgggtcaaacccgacaatcaaagcggatataccgaatggtcggacaccacctgattgagtgtatcgctatggaatctaatcagacgagatgtgcgaaacaaaaccaaacagcgcacctgttgaataccagcgatgtgcttggtgatgtattcaatgctgacggggtcctctacagtcagtcggtgtgattgacactcaattctcgccttgtcaatcaagatacgaccatccgcagtaagacctacagacgtcattaattattaaaccagggttttgaaaacaacccgacctaccagcaaaagccacgcaaacatgatcatccagcatggcaacctttcggaccgttcgaggatcttgaagttgaagagttgatttcttctccacaccgaggaccaca

SEQ ID NO: 115 - DNA, 3286 bp, Cryptococcus neoformans
gtaccagtgatgacttacaacgttacaggcaggacaagaacgtacgtggtagcaattagctaatactcgtcattaattaacgggagtataggctacaaatcgctggctcccatctactttagaaactcaaacgccgctgtaattgtttacgacattacccaagtcagtgacgtactgccatttttatctttgcgtcttatactaatatccttattctcctacgtagccgcctgaggtatgttacaggctattatgtgtccgtttttcccttgttgatcatgttaactcgtttgtagacatcctttgaaaaggccaagtcttgggtgcgggaactccaacgtcaggctgacccgtcaatcgtgattatgcttgtcggaaacaagacagatatggaatctcagcggaaaacttctcgtgagattggtgaacagtatgccaaagaagaaggattgctgtttgcagaagctagtgcaaagaccggggaaggagtcgaggaactttttatggagatcggttcgtcattcatttcttcacactgacatcaagcactaaacctatcctcttgcagctaaaaagcttcctcttgccccaccgccgccgagagggcaagttgctggtggtaaaggtgttcaagtatccggacaggaagactctgccactccttcagcttgtacatgttaaatttcgtgcacgacgtgccttatagagtgctttttctttacgtatcaggctttgagcagtaatacatatttgtgttgatattttaatgtatggatatacatatgcggtcgtgcatgggtcgttctacgattcttgaccttcgttgcatgttgttgtcttcagactacaagttttcagggtcgagcggcgccaaatcgaagtccgtcacaatttcagatttctcgagtctcaaaaggagaatcaaaagcttcacttcgattcttcttgacctcgagcttttatttctctcattttcccacaccgcacaaaactattcaagatgtcagacaccccttcctcagacacccctcccaaacgacgtgctgccgataccaccgccgttcctcctcaaaaatcttccaaaatgtccgcgacagctcctcccttcaatcctactcgccctttaacgaaaaaacctgctgcttcattccacgatatcgcccaggaattcaagcccaaagtcaaaactgaggaagtagaggacgctatggaggtggataaggaagcggagggttctgcgagggttacaaagcctctgcctggtgggaagagaaacgtacagagggcggactttgtacccgtccaggcttctgtgcctaagtctactgaggacaaggagaataccagaagattgattgttgtgctttcacaagtgagatttagggtttcaggatgaatgttttacaactgatcgctaacgacgtgctgtttaggcttgcctcgaagcatacaagatttcgtctggctcggcaggcaagagctctgcaaaagaagcaaagtacgctttattgaactgtgacgaccatcagggaatcttggccaagacaggtagagatattgccgatgctcgacctgacatcacacatcaagtaaggcaattttttgctcattcatcaacatcttgacgcttacacgcatttcagtgccttttgacccttcttgactctcctctcaacaaagccggcctcttgcaggtgtatatccatacggcaaagggtgtattgatcgaggtgaaccctagtgttaggataccgcgaaccttcaagcgtttttctgggttgatgggtgaattctaagcgctctacgctatttcaagaatacagaactaatgcccgtttcacagttcaattgcttcacaaactttccataaggggtgttaacggtagcgagaagcttttgagagttatcaagaaccctatcactgatcaccttcctaccaactgcatcaaacttagtgggtgaaatcaaagtcgacctcgacaaaagctttgctgacgtttgtgatagccctttccgccgatgccccaactgttcgattgtccaagtaccttaatactcttcctgagtcccattctgtctgtgtcttcgttggtgccatggctagagggtcagtttcatgatcggtgccgacagctcagtgttaatctatcttgcagagcggacaactttgcagaccaatttgttgaccaaaaggtctcaatcagcgattacagtctttcggcgtctgtggcatgtgggaagttctgctgtgcgatggtaagctctgctgttacttcatcactttgagggcgaaagattaacgtgttctgtaggaggagatttgggacattgtctaaaaaccggagatgcaaataagagccacatcccaaatagggcctcaacgcaattttgggttgtagagtttagagaagcggagacatttttctgaagataatgactgatatcggcataacactcatctgtatgcgtcttgtttgtaaatttatatgcattgaaattttgatatgactccccttgtgattgtctgttcacattgaagagtacgaaccgaaattgagagcattgctgtgtacgtgattggtggttggacgatggatgaacgaccatcatgcagagtgttgctctatgccagcggacatcatatgcaacgtgcctccaccagtcgcgaagtcgaccactttttttattaacttcgttctacgtacgtatgagtaacgttcttcgcgcatgcatctttttgcatcttcttgcatatcaacacttctggaaattttgtccttttgaaaaattgttggtgatccttgctatttgctatctgcaacgtatgggttgaccagtaggactgtcccttctaaatcgcttgcttccataatcgtcattcgttactcgccaatccgtccgacagtgctgctgccgcagatcattagaactcctcacggtcactaaatcctatcatactttcgaccaagttcatatggcattgagcattcctgctacgatctgtaactattgtgctccatatcataatcccctttaatcggtgaaacaaaggcaatacttcagcaatgggtgttagaggtctgcaaacttttgttcgagagaaccgtggatcattatgccgttctgttctcttacccgagagagatccgcaaggatctcagagaggtagtataccactcatagtagatgcatgggggtgagcgtgctattactttgcaatgatagactgctgactgtgaccagtgtaatattcaaattatatcttgacagtttaccatgggcgtcc

SEQ ID NO: 116 - DNA, 3527 bp, Cryptococcus neoformans
gccgagaggggggcgagggcggatcggagcttgaggatggacatggtgatgattctggatgagtggtgagtggggagagttggagagcgagggagatgtatatgcagccaaggtgatagggcagaagccgactgtacccggcgttaaaaaaaaccccgagggaggcaactgcaatccgactctctccgcgaggcatactcagcctgcctgtttgagcctccggctatcctatcgcccgccagttcatgcatggtcctctcaaacagtcatggtcaatggatggtgggctgttcccttgaaccgacattatatgcatgtccattggatgcatgggcctctcaaaagcacaaaactacagtcactcgctgtcgtcgaaggccgcacctcgcgcgtctgactctggctcgggacttttattacgtccgcttcgttcttccgtgctccttacttttcgtaatacactccgaatcttgcaagaaatgcaaatacttcgagccacaaaaacttggacctcccttccgtatatacaatgacgaatttaggtcttgatggacaactaataacaaggccgtcaagtgttccgaatacttttgatgatacgattacgatacgccgtgataaaatagataatatttcgtatattaaagttgatagaagaggggatgcctgctctgcttcttgactgtaacagtcttgatatggctctcaaacaactactgatagcaatttttgtacttgcttacgaagtaccgaaatcgatttcgtacccagagatcagcactatgggcccgcttatatgccatctgcagtagcccagggatgcagcgcgtggagtaatgttgcgtggaaggataaagagcagctggtggtaaagatggacaatgataataagtgacacagttctggttatcaaatgttgattcacattaacagataatgtttacgttgttaccgtggggtgcaatgacggccggcgaagtcatgaaaagccaaaagaaaaatgcagagtagaaaagtcaaacaggcgagcgcatcgaatccgagcagtgagcagaaggaggagcaacagcaatcacgatggaagcaaatgatgacactttcaacgaactgcgtgagatgcaaaaaaaaacaaaggtggaggtggaatgtcagggcgtccaagtggaggcacggtaggagcgaaatggtcggcgataattcacactggtccaaactccgactatgaatccgcgccacaccccgctgccttttcttgacatcttccatacaaacagcctaatgccgaaatgccggacgcgctcgctctcttgcccaccagccagccggcggattcaccgaaaagactcctcacatcctcccaacttgtttctttcatccatcaagcttcggccttttctccccaaccactttccgataccgaaacttcctcctacaccaaggacggaacaggacaagaaccgactttttaacggaaggattcttcaaaaacccaaccaaaaagattgatcaagatggccgctatccaggctcttcctactgaggtgcagaagattgcgaacgagggaactgtcaagctttttggcaagtgggagtctgaggggtgagtggtatttccatctcatggagaataacaggattggccaaaggggaagcagagcttgagatctttgagcgagagactgagaagcgaggagaatgagcaagctgcacggttgaggaatgggaaggtcgggaatacgcagaatgacgactaacgctgtactgcagtgtcgaggttaaggacatctctctccaggactacatcaacgttaaccacgctgtctacgtccgtgagtaacacatctcgtttttgtgtcaaatgtccaatctgacaaataactggcagcccacactgctggccgatacgccaagaagcagttcgccaagggccgtatgcccattgtcgagcgactcgtcaacgcgtgagttggttttgcaagaatggggatcgaaaggaatgtggctgattgggatctggtattagtctcatgatgaacggccgaaacaacggtaagaagatcatggccgtccgaatcgtccaacacgctttcgagatcatccacctcgtcaccgagcagaaccccatccaggtcctcggtaagttctcggtgtgtgaagtagcttgaggccagtggctaatcgtcattacagttgacgctatcatcaacactggtccccgagaagactctacccgaattggttctcagggtaccgtccgtcgacaggctgtcgacgtttctcctttgaggcgagtcaaccaggctatctctctcttgaccattggtgtaagttatcataccctgtgcttagtcaatccgccgccgccactgacaatttcttccagacccgagagtccgccttccacaactccaagtccgtctccgagtgtctcgccgacgagcttgtcaacgccgccaagggctcttccaactcttacgccattaagaagaaggacgagcttgagcgtgtcgccaagtctaaccgataattttcgccagtataccaatttttatatggttttgtggagattgttggcgcttggtcgttggatgaggttggggagtattgtaggagggcctgtggatggaataggctttattctggcttttggctcgctggcatctgcatcaattcagaacacgttcaggcgtctatgcgcataagggatgctgactgcatgacgatactgatggtttccgacactgacctgaagggcctttggtgaattagctgccttcgctggccaacattgtaaattgatctacattcgcattctgcaagtacctgtagcggtgcactcaacgtttggcgtggcatccagtcaaggaaggcccattgtcacgatagcgtcaacctatatcaaagaaactccttgcttgacagcacttgactctgagagtgtggctgtcattaaaaatcgtcctgaagaattatcacacaggaggatgacttataggattacttggcaaaggttcatataagtccacaagaggctcgcggcaattatcactaccctgtcaaccttttgtgcaatcttcatcgaccagttgtcctccactaatatgacatcatataatgtttccttcaggtcgtcactttttttcatgaaatcgaatccatgctaatcacatcatagacaatacaaatatcaccaacaaaatggcgtcaagttactgtttacaactcaatcttcttcgttatttctggccttcagtgacgagacgtcgcccgtgtatgtacaggtacaagcactgcatcagaaatgcgattttttgcgcataattcccattgacttctttcgataattcattttattaggactgaggctcccggggccaagtagactcttcggattcaggggactcgtcgtcggacttgaagggctcacagaagccgtagaactcatagggtttgaataaagaggcgcctggaggatattcggatcatttttctcgttcatcatgtctgctttttgaggctgatgaatc

SEQ ID NO: 117 - DNA, 2869 bp, Cryptococcus neoformans
gctgtatggtacgactgcttgcagttatggtctgtgcaataactcacgtagaacacgggtctaatcatcataccatgatacttctttaaactttgttcataagctttggtaaaactggcagaaagctcttcgtccttgttctcaaggttgattttcaagcccaaagaggtgaatttgagaccacgaagcaaccacatcaaggcatcggtcgcgactcggtccttggccttggggatattggctttttcagaagcgaggagggactcaagggtggcggcagaagcggggtctttggcgaggtacgctcggattttctaaatgtggatcaaatgaaataaggtgaggtgtgtctggtatactaaaggcaaaggaggagcgtacggcaatgttaccggttaagtcgttttgcacaacagcgaaagcggggttaccaaagaggtctatggaacccagttaacgcctacagcatgcagcccacagattaggagcgcttactgaagatcttgactaaaccctccgcagcctcgaggaactcggcagtatcgacaccccgctcggtgatggtaacgtctgtaaaagactatgccgtgtgagctgaagcccattcaggaaatcgcatgcagttacctttgtgatggtctcgaagaactgttgttcactcattgtgtatagccaaataaatgtaatgacaggaaatgatagagttgagtccactcgggatcatctccatccacgaccccacaaaggagcgcgtcattggcattacgtaattactctctctcgcactcgcgtcgtccctcacagtcatcatcgtcgctcttgtctgcactttctcattttctttattttgctctatatctgtccaagatggccatctcaaacgtaagcttccacggcggacggaggacaccatatccagcgctgacataacgcagcaccccgccctctggaaacagcccgctccagcaaactctgctttcaacgactacaacacctttcccctcggacaaacgcagcgccacaacacttcttcccaccatggtcccatgtcccacacccaacaacctcttgtcaccggtacttctgttctcggcatcaagtttgacaagggcgtgatgattgcggctgataacctcggttcatacggttctcttgcgaggtttagagatatccagcgtcttcatcctctggggaaacatacccttttgggtgtggcgggcgacatgtctgattatcagtggttgaaaagggagctcgatggactcttgtatgtccatctgtggaaaacggcgtaagatgtgatgctgacagaattatgtagacgagaggaatctgctctctccctgaccgattcccacccatcgctttctccttccaatatttacactcttctctccaatctcttctacgctcgtcgaagcaaagttgaccccatctggaacgccgtcctcgtcggtggttgggacgacaccaaaaaagaaagtttcctcgcatatgtcgatttgcttggtacaacttattctgcgcccacactcgcgacgggctttggagcccatctcgcgcaaccgctattgagggaagcatatgaagcaaaggcggggattgatggcaaggggccattgttgacgcaggaggaggcggagaaattgattgatgattgtatgaaggtgttgttctacagggatgcgagaagtatcaacaaggtcagtttatatctcttatgattgaaaacatttgtctgataagaggaaatagtaccaagtcgctactatcacagatgaaggtgtcaagatcagtgactctagatcagctcctacagaatggaagtttgcagagggtttgagagggtacggggcgcagacccagtagaagtgtgaggagactcaatagaagtctaggatggtgtttgtaatgcatatatgacgaacggaaagagggaactcgctccgcatggtgccactctgtcgtaccagacaatgggactttatgcttagttacgccaagcataccatggccctaattgacctcccataaagcctatttattgctgcagtgcataaagatatgtatatgcatacacaaaaaatacacaacaatctacataacactatggcccacatcgcatctctctcaccgccctaacctctgctcaacctttacccaagctctcatcgccccatcccactcgtccctactcaaaacctcttctgccggccggtccgggatagatatgctgtgtccgattttacgcacgaatggaagagcagaagtacgaagggcagtaatgaggggtgtcaggtggtgaaggaatgggattggggttggatgttggctgctccagttggtttagtatcacatattcgattaaagcagaatataacggaaaatggggaggaagagaacgtactaaatttcggtgatacgtaaagcccagaagggatacccccacaattctggtgctcggcggggtagtaaagcgctatagaatggcggtggagaaagttgatgaaggattaacaaatcagggtagtttgtaaaatgcaaatgctctattatatttcataaccttgaatacctgcttctgtctgtttcatgttaaaaaagacagactcacgcctcatgtcctcatcaaccctcttcacggtaatatcctccaaaggtacttgctcttctgcataactccttgtcaaagatgcgatggcgggtgcagagctggagggtggtaaaaggtgaattgtcatttcccttccttttcctcctggccagacagtgatactcgttacaccagcaccgacaataaactcagaagacggacgtcttgtgtgtgtcggggagatgactggttcccttcgttctcgcctttcattgg

SEQ ID NO: 118 - DNA, 3269 bp, Cryptococcus neoformans
ctcccgacgctctggcctccaacctattgatggatacagaggatgggaaaggacggggatgtccccaacggaggacagttgtttgtgtataagcttgctttgtgtgttgttgtccaataccggttgtgtagctccattagctggcagcgagtagaaagcgtcatcgacttacacttcttacttgtatgagatggccgctacttgttaacataacaacaaattattagtgtggtgtgtgtagtctgcagcttgtaaatacttaataattgtcagatttctttttgagcgtttctttgctcacccgaggggcctgtttcagggattttagggggcaacctctagactaaattcccatggtctgcgcatcatagcgcttggaaacttgtttgcaaggtgcgaatagcagacagctagacatacagtctatcgcacccatggatcgacatgcaagatttgatgtctagaaaccctacttacatatgatggcttgctttttgagatgagcagatcttcgaggcggacgacggcacccctcctttttccttacttttcacaagccagtgaccggtatccagatcgcttctattacgtatatatttcttagctatcaagagccccttttagtattacaactctcatcaaagggaacgatgatatatggttttgatgagttgtcgtccgtagttctgattaatattgatgttgtcggacaacatctcaatcgagattctggaccgttgctgacggtcgtcgacacgaagagtgagtggttaatgtgagacatgagcggggggacccgttactcacaacgatccatagcatcaccttataatcgattttaacgatgattgactttcgttatctaccgcttcgttgcctctacgtataataagcctttgtgtacgttgtacgggctacgtacgagcagtcactcccgacattttctgccacattgataaacgcgtcgcgccgacgcgattatttgggatttggcggatttatgtcaggcaccgacgcgcgaacatcacagcagtcgacttcatcgtgtccgtcgcgactattgactcgtacggtcaacaatattttacgtctttcattcactatcgagcgtctcctctagccaagtagaccttcaacatagatcataatgacagcaacaatcgacgaccaggaaaagaaccaacgatctaacccggaccacggtgtgtgactaaatgtcgtgctttcttgcattgcgctaacatgtctgtcagaggaatatcagtacctcgatctcattaggcgaatcattaacgtaggagaggttcggccagaccgtaccggtacaggaactgttgctctctttgctcctccttctttccgcttttccctcgccgacaacacccttcctcttctgacgacgaaacgcgtcttccttcgcggtgtcattgccgagcttttgtggttcgtttctggctgtaccgacgccaaaatgctctctagccagggtgtagggatctgggatggtaatggaagcaaagaattcctggagaaggtcggacttggccacagaagggaaggtgatctgggacctgtatacgggttccagtggagacattttggtgccgagtacactgatgccgacggagactacaagggcaaaggagtcgaccaattgcaaagggtaatcgacactatcaagaacaacccaactgacagacggattatcttatcggcttggaacccaaagggtcagtaattttgccaactccctgtgaaattctctgcttaaaatatatagatcttcccctgatggctcttccgccctgccacatgttctgccaattcttcgtctcacttcctcctgctgattcaccgggttccaagccaaaactttcttgcttgatgtatcagaggtcttgtgacttaggccttggtgtcccattcaacattgcgtcttacgcactgctaacccatatgattgccctcattaccgacaccgaaccgcatgagtttattttacaaatgggagatgcgcatgtgtacaggggatcatgttgagccattgaagacgcaactgggaagggagcctagagaattccccaagttaaaatgggctaggagcaaggaagaaattggagacatcgatggtttcaaggttgaggactttgtggttgagggatacaagccatgggggaaaatcgacatgaagatgtctgtaagtacagatatttatcagactatccctgtaactaatgatggcaatgtcaggcttaaatcaagcccctagatccattacctttcattgcggcatgttttgctttctagatgttgttcagattctatgcactggtatcataatcacaagtaatgctgtacaacaatttattgctacaaatatgaaaatccttcgcgcggaatcattttctaagcgtgactcttggaggtggcagcattgatgatgtcctctcggccgcgtatgtcttcatcctttgtgatttgtcattgtcgtcagttcacagtttcaacctgacaggtggtctagtgcttacagctgtctaatagtggacactatgtccacagcctgtctttggttctctgcttcaaattcatatctcttctgggcaccatctctccatacgtttatcttgaaaccgcctcctcgccctgtaagtttacatgcagctactaaggatatgtggaaggaggtcgttttcatagaatcgaagaatgcgcgggactcggagggcatgatctaactacggtatcagaaagcggacacgtgaagtatacaaaaaataaactcacatgaatatagtctccgtcaatcgccagtacacgctcgtgtcggccaatagcaatcttgcgttgcactgtgtatttctaaagatagatcaggcctaatgagcaccgagagttccataactgtcacaacactcactttatatgtctgcgtgaagtctgaaagaccaggaccaaatctttgtattggtgcaagctccgactgcctcttgaagatggaagctgtagccagccgtcgcctttagttgatttcaattatcgactttgtgaacttacctgatggatcccctccccgtcggtcttcgatccttaagccgtgctccatcgcccattgtcttcttactaacgcaagatccgtctgaactcccaaactcgcaacagttctgtcaagcggtaaagccaacgtcagatcagccaagcacagtacccaatccgtagcaggcatctgcaaacgctttttcttgcagagaacctcggtaagatctgct

SEQ ID NO: 119 - DNA, 3376 bp, Cryptococcus neoformans
gggaatagccgcgactgccgagggacctgtatcaatacctgaagtaatcaagcgataagtcagtagatgagggttgccatacatgattatttctgactcggtgccacaaggccacagaacattatctatataatggaggacatgtagcagtttcttctgtatgctgactgcattatacgagggatgagtcttgctatagataagcattgtcggatcatagacggttattgtatatcgtgaaacgtcaaggcaaggggcgatcaaggcatcggttcatatttagtgacgcgttcgttgcataatgctactacgataaacaggccaggtcgaaatgatttaaaatctgtgttgactgatctcaatgagagtttttcgagttctctgttgcaagatatggggtatggactattatctaggatctctactgtttctccgccatagatataggaggtgagacgaacgaccaagtgacccaacaatctgcgtctgtatttatattacgtaaccttgttcactggtcggagccttgtaacttctaatcttgcatagtaccattgctgtcgcgcaaagaagtattgtcttcattcattcatttgctgggatcgcacggcctgactcatcagatcagagccgcagccacacaaaggtttacttgctgagcttcaaagtccgttgctagtcatcgtaagagttatagcactcgtttgggcggcctatgaaagcgtaaggtgtgagttcgttgtttctgtgttcgctctcgcttagttatgatctacatcttccttctagatgacagttgacaataaatcttgaatatagcattatatcgtcatatttgtgaatctcctcgacaacttataacatggatttggccagtcaagaaaacagccaacgtgctaacagatgtaagctgtcgacaagacgagtgtggtcgtataatgcctaaccagattccatcaaggggacaagggtataaaaatcggtgaaggaactttcgccaatgtttataaaggtgagtgccataaagtgcatatgtggctagcttatcgttgacactcactcgtttacaggcacagagaaagcgactggcagaaaaggtgatcgtgatgccttatatgcctcacagcttgaactaacaataattaagttgctatcaagaagattaaagtaggagaaatgaaacatggactagatatgacagctttacgagaagtgaaatttcttcaagagttaaaacacccaaatattatctctgtacgtttgaacatggtcaacatgattatggcacgatatacatgaccatgctcatccgacccagttactagacgttttctcagtcaagcaaaacatcaatctggtgctggaattccttgatacagatttggaagcggttatccgggacaaggccctgattttccaaaatgcggatatcaaaagctggatggcaatgtccttaaggggattggaatacattcataggaatggagtgcttcaccgggtgagttatggatcactgtcattttgggaccacttcgccagttgttgactcgcggaatcaggatttgaagccgaacaacttattgatcgccgctaacggtgaactcaaaattgcggatttcggtcttgctagagaatttggagacgccggaaacaaaatgacctgtcaggttatcacccggtatgttttctttgatagttatttcttgatactatctaacgtggccccagatggtaccgtcctccagagctcctctttggttctcggtactactctcctacagtcgatatatggtcgatgggaactatttttgttgagctcattctacgagtgccgttccttgctggcgagaccgacatagatcaattaaagaagactttccatgccatggggacacctaccgagcaggattggcctgtgagtctacctctgtctatcactttcctatcagttaaacactttccgtagggatatacaaaacttcccgactaccatgaagttggatcattccctaaaaatccttggtggaacatgatatcatccataggaagagaaggccaagatcttgctcgagaacttttgagatttgatccagcccagagaccttctgcgaagaaagtgagttttgcttgtatgttggcacatggaggctaacggagatcaaggcacttttacattcatttttcacttcctatccaccacccacaccaccaatcgctcttcctaaacctttggctgaattgagaccccgagagctggcaccagatgaaactcaagggaaaccgttgttgacctctggagccggtcaaagtttgaaacgtaaagccgaatcgcctcgcacaagtcaaagtgtcccaagaaaacttatcttcacatagtttttatacttgtgtgatggagcccaacagatcaatgtggggccataaatatgctttaagttggtgggagactacgacttgaatgtatcattagattgtaaaagcatatataataattatataggtactagatgtaaagcctagagtctggaagtgtaatccttactgcatcagatcaattattagcttgtccatattatatgttgacggtctcgcagacgcagtcaccgttccatgtatacatgaatgcacgagaaaattgatgtactggtacactcaagataatgatgcgcagtgaattttagttcgggataatcgagttacctccacattattatttgggatttctctgcgttccgttcacgtccgccctctcttgaaatcttgctcacttcgcctgtcgtgcaagcttctactaatcatttctttactttacccttacccaaaatgcgtacaatcacagccacatctctgagacgaacccgcatcgcctcctcccgcctcattccctcgctttccgtcgctcccacttgccgacctgtcgctcttcctcattctcacatccaagcccgtccgttcttttccattttcaaaaaaaaaaacccggcacctgcagctcctcaggcacctcttctctcacaagacgatcttttccatcctctttccgaatcgccgtttccagctctccgtgaaaaggccgaccggataaaatcggtgtctttgtgtccgacttcgttcgaaaagcaccacgagcgtgtgagaccggcgtatgattgtcctgattgtggatggcctacacataaaaaccaagaaagatgggaagagggtaaagaggagcataaagagtactgtggaaggttgagagaggttaacgaggacgaacatgacttgaggagtggtagaccgatggttgagtttgagaacatgcctggttagtcttgtaatagcccattgatctgaataagctgatcaatatgtagaggagcaaccgtacgaatct

SEQ ID NO: 120 - DNA, 3275 bp, Cryptococcus neoformans
tcttctctctcgccttttctcgagcctcttctctcctctcctggtctcttttagccttcattgccggtgtcaaaggaatatcctcctcgcgcacacccactccaccaactgatgctccgcgaattcgaatacgcccatcagaaagtgtttcggtaataacgggcgatgcagcagggcggtatttaaactcttcggaatatctaagatttcaaggcaggctcgtcagttttcttgtccttgatagtgcgttaaacgctatgaacccaacttaccgactggcatagatcacctgtggcttcttgctcattcctcgtttaccgagatagatagaaagccaacccatcgcgataattgcaaggatcaaaaacatacgcttccaccaagcaggaggtggtcggttaaattcagcttggtatccgcgcagacgctcttggtactcttcatcctcgtcgccaaaaggatgattaggacgagggggaaaggtggtttgcgatgtagagggggaattcgacctagagacaggaggtgattgtgagggaatgggctgatatgagttgctagacatggtgcaggcaggttggctgataaaagaagtaaagcaaagcagtgagatttctccgacttcgcgtccttcagtgtgaaagcggtgtccaaggttgctgcaagttcgcgatctcaacgcgtcgcatatcgattagaaagttccagcatccctattaattacaagctgtcccatcatattacaaaagcaattagctcttcaaatacagaatggttaattaaaaacctaatgggagtagaacagatggtttgtttgtcccgatctcagtgcgttaaaaaaagactccattgtagttacgtaattattccacgcaatcatcagccacggcgcggtgctgtcatgatggccctattcattcatttattcgatgtcttctttccttcactcaagtcttgtcaatccaccatggtatgttccggagccatattacagtagcctatgtgcttatggcccctcatacagtccgctcaagcatcaaaacccgttcctgtggagactcagcatgaggacatgatcgttagtctagcctgtgccatgccttatatcctgtttctgaccaattactctcatcagcacgatgcacagcttgactattatggaaagcgacttgccacatgctcctctgacaggactatccgaatttttaacgttatcaagggagaagcaaagggtgaacctgtgatccttaaagggtatattgtgttgatttccctctggcttggtatgctgatgaattattgccataggcacaccgccgccgtctggcaagtctcatgggcccacccttccttcgggtcaatacttgcatcttgttcttacgacgggagggttttcatctggaaggaagttggacaggggcaaggcaagggaagcggtggagagctgcaagacggctgggagagaatcaaggaacacacattgcataccgcgagcggtaagtccaaactgacggaggataggctaattctgtagtaaactcgatcgcttgggctccttatgacttgggaccaattcttgcttgtgcttctagcgatggcaaggtctccgttctcagcttccaaagtatatcagttcccgcagcagttgagtcttatcgctaattaccctcaaagacgatggatctatagaggtcaacatcttccctgcccacggcaccggtgccaacgccatctcctgggctcccagcgtcctctctaccgtttcaggcgtaagccgctcccaacagccatccaactctctcgctcctcaaaagcgatttgttaccgccggctctgacaacctcatccgaatctggggatttgatgaagagcagaaaaaatggaccgaagaggagaccatcaagggtcacgaagactgggtcagggatgtcgcttgggcgccgaacattggtttgccggggatgtacatcgcgtctgcttctcaggtaattaattattctgaatgtggagaatatttggtcactcacgcaactttactcaggaccgaaccgtgcttatccactcccgcccatccccctcctcttcctggacatccgctcctctcctccccagccttccccaatctcaggaccctcatttccccgatgccgtctggcgtgttagctggtcactcgccggaaacgttctcgccgtcagctgcggtgatggtaaggtcagcttgtggaaggaaggtgttggaaagggatgggagtgcgtcagtgatttctcgagctagattgatcaatacgatgtagctttaaacgatcaaagaatgtaatgatggctgcatgtgttgcagaagcccagcagattgtaaggagacatacagtgcatgcatttggaggtcagataacaacagatctatagacaaatgaccccggtccataggaatgggacgcaggagttgtttgtagaagcaaggattgtttacttgtggtataaagcagaatagggtgcgaagatgataaaaaaggcattctccagcccttgcaaggataccctatataatagttcttttccgtctctgccataatcgcagaacgattctatgacatccatgatcctggccataacttctacaataaaatgcagggcctcgtccgatcccctcaactagatcgtcagaaagcgacccgtcaatactgggtaaggcagaccatcatccatgggatgatgccggttgttgtggttcttttttgcatgctgttgcaacctatattgacttttagcgaagtactataacagtaacgaatggagatgaacgaatgcccaaaagtccccgagtttgcagcgagctttttcccccgatgcatggaacagtcaacaaaattcagtcatatcacgactagtaagtagtaggctcgacaacacaagcccctcgacgtagaccgacctcctcggacctcgtccttgtcggagaccgaacgatgtccatcgagggcttgtgtcgagcctagtaccatatcacatcatgatctactcaaggcccaaaacatgggtgacgtcatcgatggttattcgctcgctgtttcttatgccgaccgctgccggcgttgagtcgcacttagttagtgtatgcgctacgatgaatgctttcggtcttttgactcgaagagaaataaacagttcagccgtctattcagatgtctgaagcctaatccttttaggatccatacagatacacttcgtgatttgccgtccttaaacattcggtattgaattgcgcccagatacgc

SEQ ID NO: 121 - DNA, 3223 bp, Cryptococcus neoformans
tgccgcacctaggcgcccattctcaacgagtttgatgacttgtttggtggtgtctggacgaatgttgctgggaggacgacgagcgggtggctgttctggccaggggatatgcgggaactgctgaaggaaggttgacggcctgaggggctgttctggagcgagcgcctgggtgaggccgacctttggaagggcgagaaatgccagcagtgtagagtccgagggctgtgcaatgtaggcaagagcacaacgctcagcggcatccatgaagtcggtaactaggttgttgggcagaggcgcgttctcgagccctgctggggcagttgggttggtatgactactctcctcctccccacgatgctcctcctccggcgctgtcatgtttagctccctaactcgcgtgctaccttcctcggcagatctcggaacggattccggagctctccgggtcccttccagcgtgtcaacagtctcggcatcaacctgggcgacctccagcacctcctcggcttcagacaatggttcgagactggcaacaacttcagcaggctgaggggggcttgggcgttctggggaaggcgaaggaacgatgggtgaagctgcagtattggagggagggcagcgagatgtgtttgagtgtcaaactcgagcgcgaaatgaaagtgaatgtaggaggcttcgagctgcctgtattcggccggaagtctttccgaaaatcagatatagtcttgaccagctatgagatctccatatgaccgcaacttactcagtgattccctcaggcccgacattgccaattctttccctgcatattcagaatgtcaacacagctctgccagttcacacgagcacaaaccttgtagcctggaccgtctgtcggaagcttttggagacggctgtgacgtctacggaggggagggcgggaatctgtgcttggaagttgcggaatgcctgcattgtgaggtggttgtgggttgtttggggaatggattcttagagagagatgcgtgcgaagtcagacggatacggaacctcctcgccgcgtggaagtggacgggatcaaatcctccgcccagcagccaacgcgcgtccatctgcatggtaccatatccttttatcacctatacaactctcctcgtcacatataatcatacacatcacaatggcaaagctcgcagagaccccttccgtcggctttgacttctcaaactatgccagaaatcagttcttgggccagcgcctccagggcattccgaagggtaacactttctaactcctttcgtcattcacgctgaccagccattccccagcgacctccactggtacaaccatcgtcggtgtcatttacggtggagggagctcaggagaggagccaggcgtctgtcttggtgctgatacacgagccaccggtggacctatcgtcgcagacaaaaattgtgaaaaggtgggctgaattcatggtctgcactaggtggcagcctgttctgatgcaaggcatttgactcacaagttcattagatccattacttagcccctcacatcagatgctgtggtgctggtactgctgccgacacagagtacggcaattgcttccaacacggttctttagctaacgccatttagattcgtcactaatctcatatcttctaatctcgaggtaggtacatatcatgtggtgtacgactattcgattattcgcagatacttacattcaatgccagcttcatgcgctctctcaaggccgacaagcgcgcattgttacggctatgacaatgctcaaacagtatctctttcggtaaatctctcgtcttaattctgctgaggtctcacactgaacatcgtttaggtatcaaggccatgttggtgctcatcttgtgctcggcggtgttgatgccactggaccacacctttttactgtccacgcccacggctccacggacaagcttccttatgtcaccatgggtagtggtagtctcgccgccatggctgtgtttgagagcagtttcaaagaacatatgacggtaagctccgcaggatgaaagagaatgttcactcatcatagcaaagagacaagaagctatcgacctcgttgctagagcgatccgatcaggtgttttcaatgacctgggttctggttccaatgtagatgtcgccgtgatcacaaagaatggaactgaaatgctcagaaactaccagacccccgtacgtccattttgattgatgcaggccctttgtgctaatgacgagtagaatgaacgaggcctgaaatcgcgcaactacaaattccgccgtggaaccactgcttggacaaaagagtctgtgcgcagtctaatcgtcacagaggaagttaagtcaacaacaggcgctggcaaggcccagggggcggccgaggctgttccagttgctgttggcgcgggtccaggcggagcagaagggatggatatcgatggttagaagtccgttgtgtctagaaggctctcgttccgaaggagcatgtatgactgtacaaagtgcctcgatcctatagacatcttacttcatacactgtacaataagaaggtgccgaacattgggtgattgatatccaataaaaagatgcacccatctgccacacagctgaacgacagtaacgaaggacaacagtcggtagttagtattacatgatagagctcataatcgtgactttcgccgtgacagacatctgattcatgtacggcactcacagcaagtatatccaagttgtggccatgcttgcatcgtcggtgaaaagggaaagctgaacagaaaatgtagtcacgcagtagtatcatcatcatctgattgatagaggacgtaaataaataatggcgtagtctcgacagggcagtggtcggaatcaaatcgaactaattacgtaagagtctgcattgctttatagccgaaactttcctgctttcgatctttttctattcgttcttcactttacattcgttcactcttgctcgaaaaatacattgagttagttgtctttgtcatccatgaatgtgcattgcttattctgctgtaggctatgatggctttcaagagtgagtacgaaagacggatagtttctaataacaatatactgacgatccaaaagtgattatcatccctgttttcggagtgtaagctattgattccaaggtacttatcataattatgtcgataataggtcggaactcatcccatttgtaggagtcgagaggga

SEQ ID NO: 122 - DNA, 3419 bp, Cryptococcus neoformans
aaactcaccccctagcagtttctgctgccaacggtcagtgctgacaataggaggcatgagtggcaaccgagaacagcagaaatgtgatgggaacgatgtttgccgttacgaatacagtgaatggaacagccaattgaggatgctgaatgtatctctaggacaaggatgagacgaagacggctataagaggaagacgaagatgcaatgcggttgcgacggctaatgagtaagtactatgatgggaatagctgagcgatcggactcgtcacatcgcgcgataagcagatgaccgggtcacgtgactcttgcctgcctgccgccacacatcccacgccgtcgtcttagctcgagcgcacgcagtggacgaagaggattaatataggattagaggactaaaccatattatgtgccaccacgataactctgcccgctgatgggtgtttttttgcatctgtaacgtgatatgtacaagtacagtatcaagcatggggctgcggagtacaaacggaaacccgaatgatcctgcccttgcaccgtagtatttggacgcaacaaaaataaatcggttgtgattgtaggtaaggatgattgatcttgtcctatgggcaaaagataagcgcgatcgtgatctaagcatgctctaatataatcaatgcctccgtaaataagccattcttactatgctgcatgccgaaatcagagtagcagaaagcaaaacgacatggcaagtgccaagtcagcgcgtttgaaaatatcgactcacagatgcctcatcgcatgctccacttctaaccacaaatggggatggagcaatatattcctcctgacttactcttgcgagtgcgtcggagtggggtatggaccgttggatgtcaagagctgcattttaaggcatttggaaggtggtggaagtggaagtgccacattgagtttgggcgcggaattatggagagtaggacgcggcgttatgtggtgctgagtgcccgttggtttccgagggatgcgattcgctggtggtcgtcgtatttgctcagagaatcgctcttcaatatacactttcctttccccaactccccatcccccaccacccgcccccatgtactccctcaacaggcttcccaggagctccgcattcaaaaactccgccaatctccttaggcgaaacgccagcaccacttctgctggcggtgtcaatgttgtcggtttcgaaaacaagggccctgctgccacttccagcttgaccgtcgccatcaaagctggttcccgatacgagactacccccggtgtcgcccatgttttgaagagctttgcctacaaggtgggtttcttgggaatttgcgttggatctcgctgattgcgatgtaggccactgcttctgcatcagctttgagaacagctagggaggcggagctgtacggtggtgtcttgtctgctgctcttactagggaacaccttttgctttctgccgagttccttcgtggcgatgagtgagttttacagtaagaagagatgaaggcatccactaaacattaacagagaacacttcctcaacgtcctcgcttccgttctttcctcgtctcaattctaccaacacgagctcaatgagctcgttatccctgtcgttgaggcggagaccatctctgcccaggctactccttctgccatcgccctcgaccttgcccattcccttgctttccgacgaggtctcggtaactctctctacgccaacaagaactaccccgtctccattgacgacgtgaagacttttggtgaagccgctttcgccaagtccaacattgccgtcatcggtactggtatctccactgaggtcctcgccaagtccgttggcaacgctttcggcactggtactagctccagctctaagctctctactcccaaggccgcctattacggtggtgagacccgggtgcctctcgacatccatgctcctgctactgccgcccctaccatggttattgccttcggcacctccgctcccccttctgccgacctcaaggtccttaagcaccttctcggtggtgagacctccgttaaatggactcctggtgcttctcctctggctcaagccgccgacaagatccccggtgcttccgccaaggctttcctccttccttactctgacgcctctctgttcggtgttgttctttctgcccccacaagtgccgaaaccaaggctttggctcaggaagttgccagcatcgtcaagggcgccggcgagttcaaggaggaggaggtgaagagggccgttgccaaggccacctttgaggacgccgctagcaccgaaaccttgtccggtttcgtcgccgctgctggtcctgctgccctcattggttccgttcccgaggcgcagtccttctctggtgtttctgcttcttccatctccaaggtgagtttataagggttatcggtatgcgatgagtatgctgaccgttttcaggctgccggcgagttgctcaagggaaagcccaccgttgtcagcatcggtaatatctctgtccttccttatgggtgcgttcttcattcctaagattggacatgttgatgctaattttttttagcgacgaacttggtctttaagggattagagggattgcaaaactaatagtcatggcattttgggaatgatgaagtgcatatgattggcattatgttctctgaattcaaaacaagagttcaaattatgatcgagcgcgatagaatctgatagtcctttcctccactctgtaattggtcggctccgtatgagtctatgtctgccagttaatcggtctgctcacctttgtttgaccaacatcatgacgccttgcgatacaaatcctttgaccaattgcccttcaagaccgacatacaatccctcgataccttcttttctgataaatttccttatggtgctgaacatactctcttcttgattttccttgtcattttccttctctttgccggactggtacagtaccttgaccaagattaacgggtacaggggtatcgtggcaagagcattggataacgctcctaagaaaaatgttacaacccctggaggatgggcacgatgcctttcgggcaccagaattctgagtagaaacgagtgaatatataacgttaatgaaggtaacaatgttaaagggattgtaggaccaaaaccggagaatagccctctgattccgtcttccttgtttatcgccaagagggtctgcaaggctgaccgcttttcgtcttccccagattcgctgacctgttgtcgcacactgacggtcgatataggcagagtgatgcccttagatgtgactccagcaagaacaccaataatgagctcttcaagcggcgttcgttcggtactcgcagtatcagatgctttactggataaaccacctacacctgctggcgatggtgcggcttga

SEQ ID NO: 123 - DNA, 3365 bp, Cryptococcus neoformans
gcacgtcagctccaacacattccatcgtttatcgtatagtataacacaccagtcctccatggtcttctgataccaccctccaacaatctcaccattcttgacatcccatgctttggcattcttgtacatctcaccactctcagttttaacgggtcgctcaaaggtgaaaaggtaagagctcataggagagaattttagagcgacgatgttggcttgctgaagggttacaggagtcggtgatgaagaatgggaaggaatgatctcaacactgctcgcaaagtcagctgctggtcctgcacacaggtacagtaggaaacggaccaattgttcatggcataggcgagccattcgccattaggtgagtacgcatagcacttggagccaacagtttcactagaggtaaagcagttggtaagcatagacttggagacagttcttatatggcgaacgtacgcgggtattctgttggacacctcccaagcaggggcgtctgcaacgccagctgtcttctgtgctcggacttggtattatcagctgaccgtctcacacttgtcaaaaagccacggccctgaagaggcagagcatcactcacatgcgtactgggtgtctaccattgcgggttgtggaggatggaaggaaaggaagagaaggaaaagaagaagaagaaatcaacccgtgaaaacgaagaacgaacctggctggacccgctcgctggagccaatttaaggtccttaattacgtcaaagttatattacacaccactcaaaaagaaactctttacgtaaatgagataaaaagtgtggatgctgccgtcctgcaatcagaggctgtcaaaaagagacgaatttcaagaatgcttcacaaagttatctgaaaaccatcgtcaaattatttacctggacggagaggcctacaaaatgcaccaaataggaaactctatcaagctccttactggtgcgtatccttttcagctggttgaagcggcactgtagtttaggagatgccatcgttgttgagtgtggtactgataaatatgcgtggaaataggcaatgcccaccccaagttggcagaggctgtcgctgctcgactcggcatcaccctcaccccttgccacgtttcaaagttccgctcccttgaaacttcggttcagattcactcttccgtccgagatgaggacgtcttcatcatccaatctccttcgcctcccgacgtcaacgaccatcttatggagctgctcattatgatctccgcatgcaagaccgcttcagccaagagaatcactgctgtcattccttgttacccttatgcgaggcaagataagaaggacaaatcccgtgctcctatcacttccaagtgagtgaagcacctttttcatttctttctggcggggcatcgtttgcaaagacttgcacgttgctgatgccctttggctctatgttcaatcaaattacgactatgcccacgtctgtatcatcttcatttgtacaatccccaatgaaacatacaggcttgtcgccaacctcctcgccgttgccggtgccgaccacgtaatcaccatggatctccacgcctctcaaatccaaggtttcttcgacatccccgttgacaacctcttttccgagcctacaatgatgcagtacatcaagtctgaaattcccggatggagagatgctatcatcgttagtcctgatgctggtggtgccaagcggtaagtcttttgatcgaggattctgcgcaactccaaggagatcactgactagagggatcatagagctaccgccctcgccgaccaactgaacctcgactttgccctcatcaatcgtaaacgtcggcgggatcttgccgcctccatgtgcctccccaccgttccccctacccctaccggctccgactctggctctgtccactctcatgacatcgacgacgaatcaaacattgttgagaaaatggagttgcttgtcggtgatgtcaagggaaaggtggcaatcctcatcgatgatatgattgacactggtcacacagtcaggttggccgctggtgttctgagggagaatggtgccaaggaggtctacgctttggtcagccacggtaagtatttgcttcatattcactatcctcattgacagattcctcgttgacaatgcgtaaacaggccttctttctgataccaccatggagaacctctcagacctacctgtcaagaagctcatagtcaccaactctattgatcagaccaagcgagtcattgcttgcaacggtttactcgaaactctggatattgcccctgttattgctgagagtatcagacggacgcacaacggagagtctatctccgcacttttcaggccgcatgattcgttctaaaaacggtttatgtgatgagatagaagaaggggaaggacaatgagacggaaaactcgggaggagattgtctggtgtatgtatagatgtaggatatagcttggccttggcttggaaaggtttgcaatgtctggaatgaatgtcttttcttgcatgatgacatgaccaatgatacagaacatagacggaaggtttattactgatacaaaggttgctaactatcacaacttgagatcctcccattcctccgctaattcatatcaacaaaaaaattccttgccttacaccgcgcactcacttataccgagcatgcctctgatggccgcggcttcaacccctagcgacacagcgtactgaagcaacattaatgtattatcttgtttccatcttgtcatcaatatccatagcactggccacttttttttttggcaagccccggacgtaccagtccatgttacagctgcatccttgcagactttcaccgcctctctcttcttttgatacctaactggatcagcagctccgaaagcagccaactcggctttcagtttaatagaagtttgttcttcttgctggagtgcagccaaaagggtacggcgttcttcctacacatattaacgtgcaaatacgacggcgaaatttaggctcagtttgatacagctctcatcccagcaggacatgatgataaaagatggaaatggaagcgtacagtatcttcccggcccttttctgcctctaccaaccctgcttgtgtctcggaaatgccagcgtcaatcttttcgagctccttggtggctttgacaagtgcagtatttttctttcaacgagtgtcagacacgacatccggcggatacgttgataaggaaagcctgagatgattttgagcttactgtagcacctgcagcactcggaagggcccaaaagtctgatatccttggtcaggacgcaggtgattgaagaaggatgaaattcatctcacaattgccagtaccacttcatgacg

SEQ ID NO: 124 - DNA, 3180 bp, Cryptococcus neoformans
aaaatcgctcaatgtcttcatgcagggaatttaaagtcctatataacactgtatcctaaaatgtggtagtttcggacatagttcttgtcctggtggtatagaaattagaagattgctgagaggaagcacccccgatgtgctccagcagccaaccaaacgcttgcatactcagatgaagaagactgaacaaaaaaaaattcagccacttctgcattgcttggatatggaaccagatgtttactggcgtcaagtattacatgctgtccagtgtaataggtgcgctgctggcagtgtcaatcagcagattttatccgcagtctagtagactatcataattgtactgcagactggagtcagcttctactgcagtaacctcccacagttacttgctcaaccattaacatttcgcccagcaccgccatcagccggacaccttattatgcttatgcagacgactgtgagcctattctacaggactgatctcctgggtcaagaagccgtaataaacaaggacacgagcacgcggatgtagccgctgatatatcattatttgtgcggcggcgcgatcttgagctgggaccctgaacgaggtgttgatgtgggagctgggaagggcgacggctcacggcaatacagaacagagcatgcacgtttactcgtcactactccatcacacactgccatccacatatttacaccataccctgtatcgggcatcccctctacagccatctactgtactactctgtcctatcccgacaccagcgcctattgcccgtatatccaccgcatctacccgcacaccagtcatccacaagccattacgcaaccgtcattttaccatttactcttactagcccgacactatcccctgtgcgacccctcttctcactccaacaacgaagatccccgcccactcctcctccattatcctttgtgataccatacaattgcggcacgttaatttccacctacaatcccggccctcccacagatcttgatgtaccattcgatgcccgacagtcatgaccttcctgcgcaaagcatcgcttcgtccagccggcaaccttcttccattctcaatcgcgcagatcagcatgcctccgaagcagggccaagccgcagtgcttccacggacaaaggctatcatgccgatgttgtgaatcgtcccaaaggcgatcatctcggcgtgccaccatcctccgcctatgcacgtggtcctacctcgcccacctcagagctgtctccgttaagctgttctggtatgacgccgcatctagacatatgcaaataccccacacagcaacttctgcggctgcttgccggattattacaacacatcgcaggctctaatgatcaattacgggcagagcttgaggccgaggaggacgatgaaatggatgagcaacatgtggatgataatacggcaaatgtggactggagatcacgtcctcattctcgggcatcaggaagatcttatgttccttccggcacatcgtcaactgccgagctcttctccgaacccgcttcttcgactttgacctcaccggctctcacatctcggtcgtcctccgcagcatccaatcccacatcgtacccattatctcaattccccctctttactgcatccaaatcatctttatcgcacccatctgccctcttggcctttcatgctaggcatattccctccatttccatcgaagcatacttgttacgtatactcaagtattgtccggccacaaatgaagtgttcctaggtgtattggtgtatttcgacagaatgacgaaattgggaacaccggccggtattggtggcgagagctcgaaggttggaaagaagggaaagggtttcgcaatcgacagctacaacgtgcataggctggtcattgcaggagttaccgtcgcgagcaaattcttttctggtacgtactatccctgtctaacggatcgtactcatcgacaatcatagatgtattttacacaaactcaagatacgccaaagttggaggcttacccccgactgaactcaattccctggagcttcaattcttattacttaatgacttcagattacgcgtgtctgttgaggaaatgcagaggtatggcgacagactgttagcttatgccgaggaagcgggggaggatatcggaacagttggagtggagagaaggcggagtgatgcgagtgaatggggagaattcgagggtaggcataatgagcgagggtttgagggacggacatttagagagtcttctgggggaagagactcaagatcctctcgcccaacggtggaagaggccaattctgcattttcttcaaccccaacgcgcaacccggcgtctgcagcctcagcaaacgctcctctgccaaatccggtctccatcaaatacgccagtactcaacctccccttccccctaatcagtcttccacccccgtcactgttcccacctcgccgcggatagttcaatctaaaactcagcctcgtgaggcacagcaacctcaaacgcgagcccaaacgcaacctatgaaatcacatacctttcctgttggcagtagcgtgccatcagcgagcgccggctctcgcacaggcactggaggcggtgttgctaacgctggtaatggggctgacaccgtctcaggaggcatacgagattgggtgcgaggagatgatccgattgcagttgttgggggtaggatgacaagcccaatgagggattaggtggtgcaatgaaagtttttgcaggctttgaagagtgaaaatattgcgtttaagacgagaaaaaggagttgactgagtcggaagcgcatattcagtttagaatttacagttttgtttgggtcttgataatacatttcgttgtggcatttgatgttatttttcaatatttatatcatgtggcgatatagtaaatccacgcaccttcgccttaggttctttattatctttctcaaagcatcgtattaaggagtaactgaagtaaatcaaggtccttttgttaatcataacatgtctcgaacgcttcgtcattccattgagtgctctatctttgcataaataggcgtaaaaaagattgcatcgatatgcgattgatggtcgaatgaaggcatgccatgttttacgattaggacatttcgtacgcactttgtgctctaagccggtgtatgatacacagggtct

SEQ ID NO: 125 - DNA, 3295 bp, Cryptococcus neoformans
cacaaaggctacccattatgccgtgcggtattgcaatccaactacgagctcgtgacttatctccttcaaaaaggggcggacccaagtctgaaagattatatggcagtggagattgccgtttcaatgaaggatttgaaaatggtgaaactgcttattgagagagagcaaagcggattcggtacgactaggactggagatgaatcggaaagtcccaccaagaagatgaagctgggagacaggataacagtacctgccaagatggtggagtctgctatgaagaaagggacaaaggatatagttaattatcttgtatacgataaaagtgagtcctacgctcttttccgttatcgaccctcattcatgtccgtttacagaggtcattcctccactatcttccatcatggacttgggcaagccggatgccaaatcgaaagccaaaaccaaacaccagttcaacaagtcaaaaaagaggaaagccgggttccaatagagtcgtgcgaagataaagccgtagccatttataattatgttgtactttagttgatgaccttgatgaccgacatgatatcaaagcttattatgttcctgtcaacggtttgtttctgcaccattttgcacatgacagcgtatgtgaaggtcttgatttaacttgacgctttcgtaagcaattgtggcgtggcaaaagcgttgctgagaccagtgaaatataaagggccttggacaggatcttgaactgtttactgaagagcgccctgtgatttgaaatctccactaccttcatccaaagtgagaagcgagtcttctctcagacgactgaaagtacaacattacatgatgcacatgacaatcagaacggccttcgccgcttcatagatttgttgttttttgtggtttcttcgaatgaagctcgtcgagttacagcagccctcacgaaacgtcgaaattatcacaaatagttgcatctttgatccaagcttgtacaataatcaattgccaaaaaatggacgacaaagaactcgaaataccggtagaacattccacggctttcggtcagctcgtgacgggtcccccgggagcgggtaaatcgacctattgtcatggcttacatcaggcatgtttgcgcattgaaaagcacccggaaagacactgactattcttacccacagttccttacagccatcggtagaccagtgcatatcatcaacctcgatcctgcagtcccaaaccctccgtatccatgctctataaacatcacggaactcatcacactcgaaagtgttatggaggaatacaatctaggaccgaatggggcgatgctttattgtatagaattcttagaggccaatttcgactggctagtggagaggctggatgaggtcttggctgaagagggggggaatggatatgtggtgtttgatacgccgggtcaagcagagttatggacgaaccatgatagtttgaagaacgtggtcgaaaagttggtcaagatggactatagagtgagtaactccgaatatgtctaaaaccgcactacaaggtttgcaaatgaggctgatgcgttatgtagctagcggctgtgcatctcagcgacgcgcactacataacagatgcctcaaaattcatctctgtagttttgctagctcttcgggcgatgctgcaaatggaaatgccgcatttgaatgtgctcagcaaaatagatttgatatcaacttatggagagctccgtaagtcaccaagtcaaagtcaattcgtcacggtcgctgaattatctaaatagcgttcgacttgagctattacacagaagtccaagatctgtcatacttactgggcagtctggattcagaccctcgaacagcaaagtaccacaagttaaataaagcgttggtagagcttatagaaggcttttcattagtcggatttcaaaccctcgctgttgaggtaagccggtctcttctcgcgccaggggaaccaacgacatctggctcaccaagtacttcaggacaaagaatcaatgcttaatatcgtccgtcttgtcgataagatgacgggctacatatttattccgtctggcgacctcgaaggaaccaacgccatcaatacccaagctctgtttggtagtgccatgtcgtcggcgaagcttacaggaagagcaggcggggacgtaagagatgttcaggagagatggatggataacaaggaggcttgggatgaatgggagaagaaagaatggaagagagaagcagagataagagcccagatgggcactggaataccagaagggatgaaaggcggtgaagatgcggaaagtacaggtatatgaggcatgctttaggctgtaacactagtagagcgttcattttgtatactcgcatcatgtttgggatttgcgtactgcatactgcatatgcacatttagcataataacactgagctttatccgtccatatacatacggtagtcggcttatgtactaacgaatcttggttacgggcaacatttacaacggttgttacttgaatgtcgccggcctaccggctgctgcaattcgggcaaatccgaagatccttatctaagcatccggccttcatcaaattccacatgtccgcatgtgtatgattgtgtactatctggaaaatatggacttagttccatatctctcaagggaaccttccggtgaacgtgcttaatatttggaactcagtaaatctctgcataatactccagtactccaaaatcaatatcatgccctatctcgagcccccaacccgaccagcatccgcccgattcggcctgcccaactcaaagctcccatccgatattgacccttcctacttccttgtttacatccctggcgagcctgagaggaagcgtcctcaagaggttcttgacatcgagctgcacgatctgcgagatgaacttgataagcctgaaggggccggggaagtgcatgagcaagtatacaaaaggggtttcgcaattgccaagcatcagagtgagcttgtgaataaagtcggggagcttgatggggcacaagcatatctcgatgaaacatgcgagtgagctggatatcctggtgactgaatatttgcaacagaagacgctgatacacaaatgctgcaggttaatgaaaaagtatcttggatgctctaaagtagtccaatggaactccactgtgagacgagcaaatgaaaagcaagccaagactgtagaacgtcagcagggtcccgagaaaggttttgttcctacgaccaggattcaacctcccgctgcccatgctcatgttgatcaagatgaa

SEQ ID NO: 126 - DNA, 3401 bp, Cryptococcus neoformans
tataccaacctttcccttcttgcttactcatctctctcgyggtgacgatgtcgcttattcgttgcggaggctgggctgcagtgctcttcaccttctccacaatatcgtgtcgagcctatcccaaaatctagcaggccgaccgagcgcaggttcctttgaagatgtcaaagattctgctggatgcaaaagcgaaggaggaggagcgcacgctgatggggaaggtttttgagcctgctcaccttttrcacctccttccgtatcttgtcccccagaaactcctcccgcttcttcctcctccctatcattgtcccgagcatcttgaggacatcgcgcctaatgtcatcgaagctcaccagcttgcagtttctctcagttagcttggtgacatgctgtttatcggcgaggagcttggtagtcttgttgagcacctcgagatcttgcgagaagaggtatacatcgtccaaggtacgccagcgcttgggtattcgggccgagagattggcacaggaggtcgagggtaggccgcaaggcgatcaagaagaaggccctgacggtcgccctgtgagaattggaggatatggtccccacaaactaggccggagggatctccatacgtccatttgcatgttctcccagagtgttggggcaaagattttgacaccgtcgccatctccctcctgtctactcggttggcaactccaccaggagactttacacctggaaaaggaggagaaagtcgggttgcaagtgagtggacgagagggctctgtcgcacagtcggtgaatgaattcgccaactggggctcaatacgacaacacgagagaagaaaaggcgaagtgcaaggacagaatagacgagagaagcgagacgggatcaaattcacaagagaggtttgtgcgcgttcttagaggtagttcttcgctcgtacgaggtgacttctcaataacaaaatacattttttctttcaaaaccccaattttccctctataaccctccagaatgtcctcgctcaaccccgaaattgacggccattcctacaaccgcccggacgctggagctcagactcccgttgacgccaaggctgcgcgaagggcccgtttcgaaaaggtctttgaccagattgccgaggagcttttgacgtatgtcaagggtgagggtatgcccaaggatgctgtagagtggtaccaaaaggtgtgtagctacctagcgtcatgataggtcgagcaaatccttttgccagagaacacctaggtacaaagcagcttgtaaacaaaaactgacattgccataggtactttaccacaacactcccggtggtatgtctcagttttaaatttagtggcacaaaaatcacaattaacgttccgcaatataggcaagctcaaccgtggtatgtccgtcgtcgacactgtcgaaatcctcaagggccgagaactatctgaggaagaatacaccaatgccgctatccttggatggtgtgtagagctcgtaagtgaacatatgtctacttcagaaaataatcctgactcctgtgattagctccaagcttatttccttgtcgccgatgacattatggaccagagcgttacccgtcgaggacagccctgttggtaccgagtggtcagttgctttgctatctatatttgcaccaacggactcatagagctacccagcctaacgtcggtaacattgctattaacgacgctttcatgcttgaagccgccatctattacctcctcaagaaacacttcaggagccaaaagtactatgtcgacttgatggaactcttcctagagactaccttccaaactgagctcggccagttggtcgacctcattaccgcgcctgaagaccacgtcgacttgaacaaattctctctcgagaagtaaattaatatttctcccagtgatgtgccgattcgctgactttttggtcgcaggcaccacctcattgtcgtttacaagactgctttctactctttctacctccccgtcgctcttgccatgcacatggtaagcatgtctattatctggaagaaatatcagagtttacagcaaaaatcagtccggtgttgaggacaaggctgctttcgatctcgccctcaaaatccttctccccctcggcgagtacttccaggttcaggacgactatctcgattgctacggcaagcccgagcacattggcaagattggtactgatatcctcgtaagccaaaaccttctgggcacatatctagacagatccttaccttgtattgtaggacaacaagtgctcttggaacgtcaacaccgccctcgctcacgctacccctgaacagcgtaagatcctagtgagacgcttttgacaaatacttaccgacaatatatctttccatcaagtggaaaccattcagttggttgacagcctccttagcatcatccggactctcaaacactacgtatgctgtccccttggtcttgagatttgcgtctgtaccgagacgtatttgccggatgggtccgtacttgccaaagagatcgtacaagtcggcgccagtgatgttaaagttgctgaagatgaatcagaatcgatacaaagatatattcgcaagatgcttacaggttcttcacgctaaatgtttgtcagcaatggtagcatgaatataaaacaaaagtgactaacaaaagagctcgttgggctaaagagtcgtttggtcgttgcattttggaagagacgatctaacgttgtcaattgtcttgttcactgaaagtgcttgtggtcgattatctgggctcgctgcacgtaagccttgtttctagatctatgtttgtgattatatatatatgcagcgcagatagttgcctttctacatctctcgaacgcttgaggacactggaagctcgaatacagggagaaactcgacaaaatcgcgtttcaaataatattcttcaggcagacgaccgccggctttcaacaattcaattttaacgtatttccatatcaaaaaaaaatccaaaatggcctccgttgtcaccctccccatcaccctcaccgccacacccgcgggttactccaagccttccccttccaaggcttctgcccccaagcagctccccatctaccccgctgggccctccttcatctccgccgctcgtcgacagatccttcaacgatcttttgcagacgacgacaaggccattctcgaggctcgtgagcgtgaggccgaggagaaggccaacgcttctggcgatggtacccagtaccccggtttgggcgaagaggaagagtctcagactgtcttgtcttccgaccccaaggaatggaagaagcaggaccactatgccatcctcggtttgggacacttgaggtacactgccactgacgaccaaatcaaggttgctcgtaagtgactgtctcatgt

SEQ ID NO: 127 - DNA, 3450 bp, Cryptococcus neoformans
ggcgttattggtgcaattatcacgagggaagcatttacatgtataagtatattgggtgttctagtactatatgatcattgatatcataaaatattattttcatcaatcatgatccaacgctaaggtagaccttgccaaaccactgaccacgataatggtgtgagctttcatgtcagataagaagagccttcctacacgccaggatgccacgaaaatcaacatgtctaaccaattgccccatctacgcttttacgctacgctgtcaactattctctcattattactactactggttatttagttcttttcactgcagcttctttgccaccagcatgcaataattttctgagtcctcaccttgacggacttcctgtagtctgtagtaatagtaattctcttacagcactgctaattagcgcgtagaagggagccgatggcttgagggctactgcttggtttatggaagcatttgttcttcggcctttcgttgtcctttgacgtcttctgtccttctgtcgccttggccattcgcagtttaatgttatctgtcaccagttagtcatctttcatttccatggttagctaccttcccccctccggcatagttatgccatttgattatctaattatcggcgtctaattatttatttatttttttggcgaacgggggcggcttctgccgtcaaccgccgaatttccttttttggcaccgatatcccatatcattacccaatcgttcccttcgctttgctcatcttccctcattcctgccgcttataactcatgcattcctcatccatttccttctcctctcttctagaaaagcccagcaagtcagtaccacgggaagcattagctaatccgctataacccctaccaagcaatctgccgacgggaaagatataaaagccgtcctatcttcagcatctcctcacgatccatctctttttcaaccgacttgattcatcaagcaacaacggctttactgttcaagaactatatgttaaggaccacacttacacgtttcaacacttcatcaagtctaaccacactcaaagcaaacatgtccaccactgctgctatcaataccgccaccggcacttctcgaagtattaccaagactgtttacgctcacgaggtctctgaaggtgccggtgccactgtcaggaggtctatcggtactagggagcttcggaatcttactcctttcttgatgtgagtcactttcagctgttgaggtgcaagacttggaatttgggacatcgacaccaaggaatggagaccttacccaaactcacttgagggtatgcccggacaagtgatcgagattccgataggagtcaactatccagatccgagaaagactagccccttaatgactcattcgtaaacttgacccgatatttgtatactgacttcctctcacaggctcgatcattttaaagtccttcccggtgctggtttccccgatcaccctcaccgcggtatgcaaactgtcacttacttgttccgaggtatcttcaagcacgaggacttccttggatactctggaacgtaagtttttttctgtttgaagctatttctttgtaatattacctgctgacacgatcgctttagtttaacacccggagatgttcagtggatgacagccggtaagggtatcgcccacgccgagatgcctatatttgacccggacccaactaaggctgagcctgttgagggtatgcaactttggattgaccttccccagaaggagaagtacattgaaccagaataccaggaccgaaaggctgaagagtaagtctgaatgattaaattttatagtagtggttttgctgatatatgcgtagtattcctgttatccaccctaaagatggagtagaaatcactgttctttctggtgactctcacggtaccaacggctctgttactccggtcggcggtgcttggtacttgggtttcaaacttcagaagcccggggcgagcgtgtatcagcctcttcctgaaggttacaatgccttcatctatagtaagcctttttaatctcatcgtactgacctactactgacaaatactaaaacagtcgtgaagggaaagctgcaaatcggcgacgacaccaagactcatgacaagttcaacttgcttgttctttcttccaagcctggagagtctggcgtgacccttaccaggccagaagacgacactgatgctgaagaagcacattttgttgtcattgccggaaagcctctcgaccagcctattgttcaggtgagtcagtttctcatgtgtaagatgatgatgtgttgacagccctttttcagtatggccctttcgtcacctgcagtcaaagacaggctatggaagcaattatggactatcagacagggaagaatgggttcgagcgtgctgttggttggaagagcaagatcgccaaggatttcaggggttaagctgtttttggataactgataaatcagtctgtagattagtgaaatttgcattctcacatgtacctataatacctgcatacttttgaaccttggcatgatagcagaacgattatttccttgttatgcatcctcgacttcatctgtagcgagttgtccgcattcctccgacggccggccccagcagtcaattgtccgcgtctctctctcatctcaaatctcttctcgaattatcttccatctcccacttcctattcctcatcaacagtcgtctctctcaccttcaagcatgtcttccgatccacttcgagtacccactccaatgcctcaagaggacccatcaaaagaatcatcccggccttccctccgagctctcattggccaagttttgaccatcaccctcatcgacggtcgtatcatcaagggctattttacatgcgtcgacaagcagtgcaacgtcatcctcaatgaagctgaagagttccgcccccgtcccgcatcacttattgctaaagagcaggcgctcttggagggcaggcctattgagggcaagttggctgaggagtcagatgaggaaaaagtctggaaaaatagggaaaaatactggcctaagagcgagccttttggagggtatgctaccggatggggaggccggtcattgtcgatggtgtgtatgaaaaaagacgatattgcaaaaatcgaagtggaaaaggatgtttggaagtggatcggagggcaatggtgagtttctcttgcccgaaaatgtgctttaccaatcatacctgatactactctcgttgtagaggttcctccttagtccttccctcactccttcaaggtcgctgttcctgtagctgtggaacgtccaaggcaatgcatgtcggagctttcagtcgggttccgccatcataattcaatgcttcaactcccgcgtccgcgttcggccgcagtctaattgtaaatatgagaaggaagagactatgatctgggagagacgtctttc

SEQ ID NO: 128 - DNA, 3217 bp, Cryptococcus neoformans
  misc_feature (2531)..(2531): n=g, a, t or c
cccagaacatgatcctggtaccaagagcggtagacaataaaaacagtagatagtataaatagacgagttctcgtaaatctgaggtctgaaatggtccgagggctgaaggctttgagattagacatggactgcatatcctcaatctccagtcacaaggcagtctgtgtaaaagtatctcaggatggatgacagcttctccaagaaaacctggcaaaagtacatatgtagcattcaagtttgaccttggattttgtgactctggcagccaatcatgctctcaaaagtttttcatcatggaacatcaataggaaaagaaagatcttcgaaattgttatcgatctattgttactacataatatacttgcattgccagatagcatattagcttagtttatatataaatatttcagaatcgtttttttttccacaattcagctatatctggagcttcgccagacaggtcggattccagcttctatcaacatatacatgaaaatgcactagtatcactgtactaccactttgtatcatttactgcttcataccgaaaagatcctccgtcctgccaatttgtaatatgcagtaccgagaggaggagagaggtgtataaaattgttacccatcatattaattagtcaaagtaatggcctctagtagagagtggtcatgcgtatctgattgtctttcccttggggaagcatcttcatagcatctcgttcgttgtgtgtatactcgacggacatcactcaccacaacggctttggttccttacgttgctgtacgagtaatgttcgtcaccgtcggcatcggtccttcccggcgatcttttttgtcgcaattagtaacaaaatttataaccaactactcaaatcatacattcattcgtttactttttttaccctttagattacacccttcgcatattgctgtttagcatcgctcttccaggaactagcccgacagttaccaagaaagaattcaccaagagagagcaaaaagaatggccgcccaagcagcttcagcggcacaatcagacgatggtttcctcgatcaactcatcgcttccatgcccaaatccaccgtcccgcccgaatctggtgtgggccctgcagcgccgaagaaggaagtaacagttgaagactttgaaaagctgctcgactccactcccttgttcatgcgagagactccgaaagatggagacgataatcctgtcttggaagctttgaggagtttggttttcgagggtgaaggagatggtgagtctgtatacccggcaccatcttttgtcttgggtgtagagtgctaatgtatgtgctttttaattgatttatttatttcttgctttgatacagagatcgcaacgaactttaaaaatcacggcaatgagctccatgctcagaaatcatacggtgaagctatcaaggcctactctgaaggtatcgacgcccacccctcttctgcaactttgctcgttaccctttacaacaaccgggccgcatgtcatctcattctgaagaactaccgttcagctctcaaggataccagtgccgttattgcactctacaccgctggcaagattccccagccggacaaggcgctcgtaaaagctctgttcagggccgcacaatcgctagttcagctgagcagatggaaggaggggggtgatgttgtcgaaagaggaaaagaactcgcggagcaagtgaaggaggacacgaaagtttgggatacactagagaaagaagtcgtcaagggcaaaaagagagacgatgatcgggtggagaggataaggcgagacaatatgaccaagcttgcgttgcgcaaagcagtggaagatcggggtttaatagtcgtcgatacccctagcccaccggacaacccccaccctttgcatttcgacgaacaatctattcctaccatcaacgaagaagtcggttggaccccgccgcctccgcatacacccattgttttccctgtcttcttgctttacccaccatacggacaatcagatttcatcactcatttccatgaagatgccgcgtttgaagatcaactttcagccatgttccccgtttctccatcggcaccgcagataccatgggcggaatgggatgagaaacacgagtactatgtgcctaatttagctgtgtacgtggagaccaaagagaggagactgttaaaggtcggcaaggaattgacgttgagagaagtgttgggtaaagcgaggagagaagcaaaaggagatgttaagaaggatggtgtggtcttgagagatgggcttttgagttttgttgtgctcgtaaagggggctcaggagaaggcttggatagaagagttcaagcgacagagagacgaaaagcaataagtgtttagaaacacataacacaaagatgcatatgacaatctaatccgactcaaaccaatcccaaacttttgtacgatgattccatatctgaataggtccctccaccttgcgaatgattcctcctccttccttctcttgtaccgctctccaatagacaaactacagacanactactactttgtctttttggtctcttcctttgctccatctgcggtaccacatcctccaccataccttcattaacctgaccatattcgttgactcgtgaataatcgatacggtagatccatcgctgataaagaaggacgaggaagacgacatcgtctctgttcatacaaatgtcaataaattgattcctgtctgagatccataatgagataaaatgattgtacacgtaccggaagcaagccaatcgatggagccaaggcatcctgatgcagaatgcgaaaaagtcatcgaccacggttgacactaaattagatagacattagttctaaaacattttgttcaatgtcgacatgtgagcaacatacaagtcttgtacatcatggctttcatcctggaaacatgtattcagtcagcaaaatcaaataataataataatcataagaatgaatcaatggacggaaaggaaatggtaaggaaggaggaaaggaagaaaagaaaacgcacggcatgtgggccacactcttgagcttatagttgatgatcaactgcggaatgagctggacgaaaccaaacatgtagatggcttgggcaagggtagaaataatgaacgagtaccatcctcggtgggtcctatttttgttgaggagagaaattagaagggtctcacgtcagtcacttttctctttt

SEQ ID NO: 129 - DNA, 3306 bp, Cryptococcus neoformans
cgacttccagaagcgcaccggttcaggccatgttgactgtcataaatggcatgcattatggtgagcaaggctttaagggtgatgcttgcaagtgctcacatgttggtgtccgaggagccagcctgtgggaatgtgtgagcatgttggctgctggaagggtttgggcacttgccgtggctgtctgagatgctgaggaagttcgcttgcttccactcgaggggggcggtggggaccgggagctcgagagcggcgaaagggaggaggagggggaacctcattctgcttggtggcaagagaagcgcttactatgcagtgcgagtgtcgatcgtgctgtttgttgttcttgctgctgcgccagagggtggacttgctgctccgcttttcgcttctttttaccaccaaacatgtcgagcacaccatttacactcttcttccccttgcccactgacttgactcgggattcttcttcatccacgtcttctggctgttgttgtggtagactttgaccaccttctttgtccttgttcttcttatcgtttcccagctttttgctcagtcccgccaacccattaccgcctcttgaatcaccatattttctcggggcatcgatcagcggatgccctaaacccagtctgccgcctttttcttccttgagggcaagttcaaagtctgcctgtttatcagtctccgactttgtgacgccaaaatttggcgggatccagctcgcgatggaagaggtgaagagagatgcagaaaacgcaagtgcttctgttgtgggcgctggaagctgctggggtgctgtctggggcatacttgatatagatgtgaatgttgtctgtggatgtaaagtttatatgatgaaatggaattagaggtgccacagtaaatatttccgattttcgcccggtgacgctggctgttcgccgcgcaaacgaagaattctcaaatcaccatacaaatcatcttctctttccattccctatatccaaccaaaaaaacgatgtccatccccacagagaagcctgctgggccgagcgcattcacaccgtacctcgatgctgtcgccaacgtcttccaccccgtttccggccctgtcttgaacacttatgccaaattccacggctggaaggagaatatgggtttggtccagcccggtaccgtggaaaacttgaccagggatgcgcagcgtgagtttagggggaacagggagaaaaaaatggcccggaacggctgacaatggcggcagaggtgcaactcgccaactggatgtttgacggtgccagagcagatgtggctaaggtcatttctggtaatcccgccttccagttgacacattccttctctctcggatccaccacccggcccgctgcttacaactttggtgtcatctttgctaatgccaaggtgcgtcgagagacaaggggaaaaaggaagacgatggaaaactaatttgccgcagaccttcttacaaggtggtcttgacggtagcggctctttgaccatgcgtgccaaccaaacttggtccgcccgagacctctctaagatccaggctcaggttaccgacaaacccggccacaccatggttcagttcgaacatgaccacattggagaccactacaccttctcctggaaatccatcaaccccaacctccttgactttaccggtatccacatggcttccctccttcactccgtctctccccgactttctcttggtttcgagactgtgatccaatatcccgaacccgccatcctccagaccgcaacctcttacgtcgccaagctgacctccctgcccaaccccgttgcagcccttacccctaccgcccctggccttccttcccccttcgtccccagctggatagctaccggccatctccaacctgatggcaacgtccaagctacttactaccagaagctttccgacaaggttgacgttgcccttgacttccagaccatcctccgaccgcagtccatgttgggccctgccaagagggaggctctgacaactttggctgccaagtacgacttcagaatggctactttcaggggacagattgacagcgcgggcaaagttggcatgtacctcgaacagaggttcactcctgctttcgccttccttgttgccggagagattgaccacgccaaagtatgttttttttttttacttgktttctttttttccttatgaagacagctgacgcattgagcagaacgcctccaagtttggtgttggcattatgattgagtcctctacgatgacccaggaggagatgattgccgccggcatgttgacccctgtgtaaattgttaagargttcaggctcgagtgtgatgagacggaggacgtctagggaatgcggtggtatgacagctaaatctgttgaagggttttgaaggacgtagcatgtgaggagagaaagaaggataatgaaataggagggtaatgagcgggtgataatggttgtgtttcttagctctggtgaaaattgtgaaatctattagaggagaggagagagtgaggaagccgcgaaatcagttcaatttttgattaacagtttgggcttttacacattacctgtatcaacgcacgcatggatcacctttcaaggatcgtgatttgtacttgatagaaggattctggagaaagctggcagtgatgacatgatgacatgatgagctattacaactgattataagattgatacaacgtttgatttctagtcccagtcgacaatatcatcgtccaccaaataatcctcttccccttcgtcgtcttccacgccctcatcgtcccaaacactctctccaaggtgctcatgacctctcacatctcccaccccgttatcgcccgccatcgtagcctctagattctccccttcatcctcgcctagctctgccttcgctgtgagttcatcttgagttaatgagatgcaaaactgagttagaggggtatatggcggaagtactaaaggctgagcagagggagggaggagggggtctgtcgagaagtgacgttatttacagatgttgtgcgagggtacggaaagagacaaaacatacaattggagagagactgtattttaaccatcattggcaccatctcacacgccatcgctctcttgcctaccagcccgccccaggcagctgcctcacgattgttggctactgtgcctttcttctccaagtatcgtcccaccccttccaaagcaagctggttatctcgaccttgggcgaaggctttgaagaattgaggttttaatactttttgatgattacgagtaacaggtgaaggaagggcaaggt

SEQ ID NO: 130 - DNA, 3390 bp, Cryptococcus neoformans
agtcgtggggaatatgttgaaaggtagctggaggttggattaatgacttggaacgtccaactgagggaagtatacgcttgtagctttagatgctgaatatgtgcaagtagagtgcttgtgaaatatgactggatcaagtcgaaatggagttgatacaatgcagacaagtgaagtgtaacgtatgtatgtgtacgtcggtatcgtcacaccgaggacgcgctcagggagagactctggagaaaaggaaaataaatccaagttctcactctatgatggggcctgtgaagattacaattgcagtccaagagtacaattgtagccctaaatgatgtccatattatggctttccgcgtttcgtgtaaataggtttattatgtacgttaatatccagaaaggggtgccggttctgcacaacgaacgtcgtgcatcatcatcttctctagccatgtttttaggattattcctacgcacttcgactggatacttttctatgcatgtgaggtgctttcatgtatacaaaggactcaaccgattgatgtaaggatataacggagtaaaatgagccagcatcgacgaaagaagctagtggaagtatttagaaagcatggaaccgcctaaaacctataattttattgggggaacaaaaagcaaaaaaatgatgccacggctgtgagtcgaacacaggaccctttcatcatgtagaaacactacaagtgaaaaattataaccactaaactaccgaggcttgttgttgaaatgcatggcacctgaggtttgataacgtggacaattataggcagaagtgtgaaatagaaggtgacgctcgcgtgtcgcacactcgcaagtgtcaaggatttgccttctcgtcgtcatttcaatgctttgttgtacactttgtctgctacacaatcacagacattgatatcttctcgaaacattattagcgtatctccatctcaaccaacttgggacaccacacagctacaaaatcatatactagatggaaggactacaaaggctacttcaaggaggacgaggtatgggcatgggcggcgcagctggcggtcagactgtagtagcagacaagtgagttttttagctgactatagtatgcatcatgctgatattacgatgtactatagtggcgaaacagtgcatatttctgctctggcgttgttgaaggtgggcataaaaagtgcaagtgcccgtggagtgtcgctaatggtattgtctctgactaacagatgctcaaacatggtcgggcgggcgttccaatggaggttatgggtctgatgctaggcgaatttgtggatgattatacggtgggttcatttttcccgtttctcaagtctaagcttacgggttggcagatctcatgtgtcgatgttttcgccatgcctcagagtggtaccaccgtgactgtcgagtccgtggaccatgtcttccaaaccaaaatgctggacatgctgaaacagaccgggcggtacgtgtattcgtgtcttactgtcggcagatttcaatactaaaagattatcacgacgcaggcctgaaatggttgtcggctggtatcattctcatccaggtttcggctgttggttgtcgagcgttgatgtcaacactcagcaagtaaggcttattaagcttcggaatgatctgcgtgcgctgatcgatatgcttcttagtcattcgagcagcttcatcctcgagcagtggctgtcgttatcgaccctattcaatccgtacgaggaaaagtcgtcattgatgccttccgatcgatcaaccctgctgcgcttgctaccggacaggaatcacgacaaacgactagcaacattggccacttaaacaagcccagcatccaagcgttgattcacggtcttaacaggcattattatagtgagcatcacgctatcagaatttgtagtatatatctgacccttcattaggcttggcaattgattacaaaaagacagaagctgagcagggaatgttactgaatctgcataagcgtggctggactgaagggttgaagatgaaggactttgaggagatggagcaagggagccaaaaggccatcgaggtgagtcatcattagactcgctccatgcccagtgatgggagactgacgatcctcagaacatgctcaatcttgctgttgcctacaccaaatccgtacaagaggaatctactatgactgaggagcaattgaagacacggcatgtgggcaaattggatcccaagcgacatctgtcggaggcagctgagaaggctatggaagaccaagtgattcaaagtctagccatgggagttttggccgagttgtagatgtagatagctcaatatcatgctcgaaaacgacaataacaattcatacaacagctttgcagtcctgagtttcataagagtatatttacaaccagacgggcagagttctaactgcgacagtggccaagtgaggcaccgcaaaactgagcgatgaagagatacagaagcaactgtaaccattagaccaggagttccagcattcaagtcaacagtcactcacaaggccaacaacaccggatagggccataattcgcatgttcttccaccactgttgtctccgtactgatcgggctccacgcctaaaggcgtacgcttgtccggcaagggtatctgtcttgtccacgaggaggtccagacgctcgccgcgttggaggatagagtcgatattctgaaccatgatatccttgctgctcgggagttaagaaggtaacacaggacaacatatctataaactcacacattattgagatctgactgagcttggcggagaggatcagcgggtggggatgaggtatattggtgcatcaactgcgcggacggtcagccaccggatcatctagcgcagtcactatagagacccaacttactttggcaagctctggctcgaactcttccagagagtgagctcctgccgagactatgtcgtcgctttcatattgagcagtgaactgaaatcgatgatcagctccgaggaccctacgccgtgacatatactgaagacatactcttcgctccagatctgcaaggaacgcaaagggcatccttctaccaacagaatcatcggccattacgagatagatgacgccgtttgaggatacatagtgaatgaggcggtcttgccacacgtctaaacacatagaccattaagagtcagtgtgatgctcgtttgcctaggtaccccacaccaaactcacaagtaagtttggagttatttggaggtatctttgagaggatcgttatctgggcggctgaagggacatgagcggaatggcggatgaaagggaagagggaaaaacgcacctggcttgagctctgctgtcccggttgcatgttctgcaaggacggtgg

SEQ ID NO: 131 - DNA, 2829 bp, Cryptococcus neoformans
ctgttcgcggtagaccagggttcaactccctgatggagaattactttttatactttttccaggccttcgcatgatgtatatatcttcatcgcgaatgagattataaaagagcgcagattttcttgcgaacaaacgaagaaatatttttttttctcgaagaccgttaaaaatggaggtttcccacgatgtcggacgcggcttccaacgttgtctcgatctgatctgctgagcatatgttctcttccgacggattaatctgttatatttagctgcttcgttaataatggaacttgtgcttttaagaggctaatttacttcttcgttgctgtctttctcactgtccttctcgatctccttctcgatgcttcttgatcaacagccgatctcgaacttcagctataaaatatcatccctaccgaccgcggttggtaatgaagaactgttaccataataaaatggaagccgcagcagctgagcaccacgatgaggaattggcgtttcagcgagttattttccgaaatcggaaaaaaaattgctgctttgttttgctctcaaaaagctcttttgcccttacacaacttcctattggtatgctagagtcaataaaaagtacaaaaagtaattctccatcagggagttgaaccctggtctaccgcgaacaaaactggataaatccaatcattgagaagcggttatactaaccgttatactaatgaagacacttgttgaaatatttcgaaaggaaattaacatatgcaatttatgtaggtctcctgattcaccatttatcaaggaatgtaaaagatacggaagcagcttcttgtatgtagatgggaataggagaatgggataaacctcagtataagcgaacgaaggccaaaagtcagacatgctctcatacattcattgtcttacataacaccgacgctgcatgccctttacgtaactgacttgtggtgccatacatccacctcgcgtgctgcccatcgaaggaaaggaaatggattggattcaccttttcccatctcaactattctttcattactttttccccaccaccagaaaagaaaagatgtctaactcaccacccacgttcgaatcgtacctcgtcgttggtggatgcggatttctcggcagacatattgtcgagcagctcttgggtaggggagagacgcaggtctcggtgtttgacattgtccaaagacactttgattcgtgagttgttggccatctttcagagcgttgaataaagtgtgatgttgatgggatgggtagtaatgtcaacttttacattggggatttatcaaacccccaagacgtcgagaacgcgctcgccaaggtacgttcttccccctccccacgtttcccactcattacttctttccgcttctatgcgtgtgttaacatccatctatgaccgtatctagtctcaagcaacagtagtcatccatactgcttcccctacccacggtatgggccgtgcattgtacgagaaagtcaatgtcaccggtacccgtaccctcctcgacgccatcctctccccttcctccaccgtctccaagctcgtctacacttcttctggcggtgtaatctactctggcaaggaggatatctgcaatgccgacgagaggctggattatcctgctgtcccattggatgcgtataacgagacaaaggtcgctgctgaaaagatggtcttggaggctaacgggcaagaaaaaggaggtgaaggcggggccaagctgttgacctgtgcgatccgtccagcggggattttcggtccgggcgacagacagatgatctctggattctacagtgtcgtgaaaaacggccaaaccaaatggcagattggcgacaacaccaacttgggcgacttcacctacgttggcaacattgcccacgcccacctcctcgcggcagacaaactcgggtccgcctacccttaccacgcgctccgcgaacctctgcctgctatcaacatcacgctcggcgattatcgtatccccacttcggccgctcggcctctcgggccgaacgagcaccctacacaggcggatctgttggctgcacagcgctttgaaggcggttgggtggatgagaccgatttgaggccagtattgaggacaaagatggaccaattcagtgcggatgcgcaaagggacgaagatgagaaaggcgacgaggaagacgaggggatcccgatcgccgggcaagcgtatttcatcacgaacggtgaacctatttacttttgggatttcgcccggaccatctggcgtcagctgggtcacgttcccccttacaccatcgttctcattcaccaaatatcccccgtaattactgatataagttgaccatatcatcagcctgtcctgtagggtgtttgaattgctagataccgttgatgagatacggaaaatgtcaaacacccgtcgcgagaacgttgtggtctcgcatcagccgcaccggcccccgatttgggagctgaatcaggtgaagaaggggcagggaaatcgttctgaaactgggacatcgtctaggcgcctgatgcgatcggcggtgtgataagcgaaagaaagaaaaggaagaatgctaagaagaaggaaagggagaaagagaagaagaaggaaaagcaagctgcttctgcgaagtaccaggaagagccaatagaacaggatgaagaagaaggcgtgatccagatggcggtgaaggaagatgttgggtggcctgccgtcaaaggaatggcagaaacgctttcggaggctgtggaaggtgccctattcagccccagcgccgaatcagtcacaacgtacgaaaaacttacaactcccc

SEQ ID NO: 132 - DNA, 3506 bp, Cryptococcus neoformans
gtcgctcatctacgcatcatgtcatcagctacggtcacaagcagcccgggcagcgacgaagtaccttgtgagatcgctttgtgatagccgcgtcgatattggtgtaatagctgttaagtttgccgattgggtcaaggaccgtcgctcggaatggagcgtcctgttcaattccatcagacgttgcttgggatagtgtaaacaagatgcacttacgagctcacgaccaactccagcatcaagttcgtcgacagcagatttgtacgcatgaccagccatagcaccctgcgaaataagtgtcagtgaatatccgtagctgaactccggcatagcttacatcgctcgttcgatcggcagagtagaatagagcaacagtctcggcaattctagactgggatgaggccatggctgtttcctatcatcagcgcaacgctttgttggctgaggaagcgcacttacatcgcatggagtcaaggtaagtctttgcttctttttgaaggttcaaggtttccttctccatcctaagttgcttatcagccatccatgcccttcctttcgtgccaagaagctagtatcccgacgcacgtcttgtatcgcccttcttcctcggcaaactctcgatctatagttcgctcaacctgaccggtcttctgcataattgacgttcccgccctagtggcggccttcttaaatctgtaatatggttctcagtatcagtatgcgagaggctgatacgcagtgatgagcgtgggattgcgtggacgtaccctcccctgccaggttattagcttcgggcgactgcaactggagatcgaattgacttaccaagacatgattgggctactgcgctgaatataaggctagttaaaagttaatgttataatgcttgcaacagcgaaagtaaagtaaggagtgtacggttaagaacagtcctccacgtcggggctactcgttgcgggtgggcgacgacgtcgacggtgcagaccgaactaccgaagtgagtatgttacataatagaggctggccgggagaaaagccagaaaaaggcgtgagcagagaattgaagtcggcggtcgccgtaccgataggagctcgcgcgtcgtcgatgacctctcaacgtcaagcatatagggtgtcattcgagctcttactctcagactgtcctctccagaacctatatcacggacctcaacgtcaaccacagactatacgagtgaccgtccaacatgtctcgttcatcttacgatcggtgagtgtatcccagtacaccatccgagaactgcattgacgtcgatggtttagatatctcaccatcttctctcctgaaggaagggtgcgttgcaattcgctgtttgctgagcgtgttgcatagatttttggaaggctaacatgcgaattgattgctacactatagctttatcaagtcggtaagtgcttcgtaccgtccattgaattcgcatgttgcttacaattcgacagagtatgctttcaaggccatctcttcagccggtatcactgctgtggccataagaggcaaggacacctccgtggtcattacccaacggaaagtccctgtgcgtggaacatgttctggagaaaatgagcgcatgctaatatgacgattacaggacaagctcctcgacccggagaccatcacccacctgtttcaaatcacccctactattggatgtgtcgtgaccggcttgatcggtatgttgaacattagcaaaagaatgggatgggggggacaggagctgatattatgaggtagccgacgcgcgggcgcaagtgcagcgaacacgatcagaggctgctcagtttaggtataaatacggttatgagattactcccgaatctcgtaagccaggcagtgtacatcagagctgactctgttgctaatatgaatgtagtcgcgaagcgtatggctaacatcaaccaagtttacacccaacgagctggcatgcgacccctcggtatttgtgcgtcttgcgagtcttgttgctgggaatatcaactgaattgtccatgaagctatgattttgattggtcccgatgacgaaagaggacctcaactgtttaaacttgatcctgcgggatattttactggctacaaggccacttcttcaggacagaagcagactgaagccgccaactatgtatgtcgtttgctagtgtttcctctaaatttcctaatgcgatgtagctcgagaaacgatggaagactttggaagctgagaagaaggatttggatcgagcaggtgtgattgaggttagtggacattccttgaagtacctcctgccttctttactgattcagtcttgttattagatggctattgaatgtctctcgtcaatttgcgcaacggatttcaaggcgtctgaaattgaaattggtatttcctcattgtcaccggatgagaagcacattgaaggacaggatggaaggtttaggcagatggacgagcgggagagagatgagtggttgattagagttggagagaaggactagaaggttataaatggtcgcggctatgcatttgtatacaaactgctttgggggataaacatagtagtctccttcattcatgtgttgtattctcgcagaagataaatagcaattcctttcaaacatcgaaccttaccacacttgtttacgtatatgcacgaaggttgtgaacaactattatgctatacatccattaaagacccaacgctttgcagcaaccgatccatcaaagcatcatcctccagtcggatatgcatgctaattaagctgcaaatcggctgcatgggccaattccgaagaatggatttatcacgtcgccgggcgttcaacaggttcggaattgtccgcatcggctcattatttatattatggtcatcaaaagttgtcttctttcctcctccaagaacatctccgtttattcagactattgatacgtatcatcttcaaccgacgatctctgtaggaatcttgtaacagttagaatacgacgacatggcttcattgacaggattctctattcgtgcggcggtcggtgcattcgtaagttaactcgtcgcctaggtcatcatatggctgactctctctatcagtcttgcccaacatgcacctctcgcttcatccagccacggtccagctttttgcgatccatcagacaatattctactccccctccccctaaatttgctgcttcagcagttgcaggcggtgctaagcctcgagtaactgctgaagaagctcgtcgcgcggttgaggctgctcggcaaagaatgtacaaggagagggcaaacaagaatagaagtatcctgttatactctgctggtagtgtgagtaaataatttatccccaatgcttgtacacagcggcgtgtaaactgactcagcgtactgatcagctgttccttgccctcggtatcacctacgccgccgttcccctttaccgagctttctgctcagccactggtttcgctggcactcccatgaccgatacctcacgattcacccct

SEQ ID NO: 133 - DNA, 3360 bp, Cryptococcus neoformans
tcccatctctcttatctttatgacacgctcttagaacagaatcttatcagagtcattgaaccctattctgcagtcgaactgtcatggatagcttcagaagtggggcagagcctgcaagtcattgaagacaagtgagttattgttttcgttctctttttacaaagaccgacaattatttaacctatttttcatccaggttgagtcaaatgattttggaccaaaagttctgtggtattttgaatgaacgcatgggtactctcgaagttcatgatgattattcaaatgaggttagtcgttttcctaatatcacgaacaaagacagaaatgtgtgttgacatcgcattcttataggggatttgttcaatggcgttgggcactctgaagcatatcagcgacgttgtgaatggcctaaatgataaggttcgttcatctgaacatgttgcgtctagacagcaatagctgatttctcttatcgttgtcaggccgcgcagatggtttaatcaccacaagcactagaacgaacagggttaccagtaaaagcaaattgggcttgctatctacatccactagaccatttttataacatctagtggtcattcacatcatgtatgccattgacgaagtttcgacaaggtttagtcctgaagcaaagagagtacaagtcacgacccaagaagaaggtcgcgagctcttttactcttggaacaataaaatcgggcatataaaaaagcgactaatttagaaggtgctgctttccttcgtctgaaatatgtagaactgaaagagatacgaggaatttaacgaagatttacgaatgtggcttcgttctctttcctattagttacccttattatttaattattatctttttgccgccagggtggacacccccgctgaaggacgctatttatcaatcgccgtctcctattattatctactgcagcatgagttcgagcaaatcttgatatactctccctagcctagtaaataagaatacactatgtccgccacacagttgccagaaatcatggatgccatcttgttcaaacatccctacaaagttgcggtcgaacaggtcccgactcccaagttgcagaccgaaggagatgtcatcatcaaggttcatctcgctggactttgtggtacgttctattattatgaccaccagagggtggaactttaggtttgacaaatatttgctatgtaggctccgatctacacctttacagggctaaagaagatgctgggaaagactatactatgggacatgaggttgtgggaaccattgtccaaaagggcaaggaagtgaacagcttcaatgtgggggatattgtagctgtaccttttaccatctcatgcggtgagttgcatactttggctagctatgtatgcatgtcctaaccttgagccagggaaatgctattactgctcaacctcccacaccgcccgatgcacttcctcagccttgttcggtactccttcccttccgggttgccaggccacctatgttcgtgtccctcttgcggcatcttgtcttttactcaagcctccacaactgcctgaagagttgatgcttttgatggcagatatcttgcccacgggatacagtgcggcttggaacgcttggagacttcttgatcggggaggggagcgtggtggaaaaggagagaagaaggatatttgcgttgtggttgggtgtgggcctgtgagtctctgcattagcatttccaattgagtgttcagtcaagccaaatactcgacttaggtcggcctttgtgccataacttctgcgcaaacactcttttccaaagtctttgccgtcgatcctacgcctgcccgccgagagttggctatcaagcacggagctaccgctcttgttcctggcgaactgcaatcagccgtcatggctgccaccgaaggtcgtggtgctgatgccgttctggaggttgtgggcaatcaaggggccttcgatactgccttgagcattgttaggccttacggagccgtcagcagtgtgggggtgcatgccggggagctcaagattgatggtggtttgttgtatgacaagaagtgagttttatcatttaatgagggtgggcagatgacaggatgtagagttacggctgccgaacgaggaaaggtgaaacgtgagagaagggtgcataacatgcccatgctcatgttcttactcgtagcgtgaggcttcaatttggacgttgctctgttaggcacttttatccggcagctctagaagtgctcatgaacaaccaagagctcttcaagagctttattgagtataaggtcggtttcagtcaagctgaagaggtgagtgtccagccacgcaattatactgtagataacccccttcgccgctgcagtactatactctcttcgaacaaggcaagatatccaaaactgtgtttattccaggtcagtaatggcgcagactatcaggaaacatgaaagagatcttcagcgatagacatttgagtttcaaagcactttagttacaagtcgattcatggttacactcgtctcgcttatcgatgctccgcaaagtgtagtacaccggtcctttccctaacatggatttttggtggacgatggataccccctcagttattaatagctccttcttcccagatatagtctacttaaatggctcgcgcttgaaggaagtggtagaagtccatttattgttatgtcagttacaccgaacgaacgaagtgcgcttgttgcagtgtgcgttattggctggaggaagtcagtcacgccttttgatcccgtccatgtgtattggatctctctctaaattaccttttatcctctatacatctttcttcttcatgtacccatccgaacatgtcctctggaactccagctcctctcgaaatcacacccgcccttcttgcgggctttgagccagagcgaatcctctccgagtctacaatgaccggctcgacattcatcctcggtacactcactggacagcaagctattgttcatgtccagaagactgtagtggtaggaaaatatgcccaggaggccatcagtacacttgaaaatgtcaagcttctacttgaaaacgttcctgtgggtattcctgccaacttgtttccccatcaccaaatacagatgatcattcggcatgctgacgatacgcgacggcaatagtattactctgcccatgcgtggaccaagcsagatccgtccaaccccgattatgtcgtcaaggtcatctgccctgccacagcagatcatatcaaaaagtactccattcaggagcgttacgtcgttagggaaactgcagagatttatgaacaagtcgtaaagccttacattgaggagatgcctgtctct

SEQ ID NO: 134 - DNA, 2819 bp, Cryptococcus neoformans
tgtttctgtaaacaaaaaaaaatgaagaaacgctacctgctcctcatccacaagtgcagtacccgtttcgtcacagtatcctacacacatctccctttccttgttatctcctacatcttttcttccagtcctcatccttcctctctaacccaacatccatccctcttccttaccccaatcaaacattaggtgaccgtctgtcgagtcgtgccgaaagtagctgaagaaagagtaaaagtatggctgatagggaggtaattggatgggagggaggattagacacgttgattatctaatagttccatggcggatacagagtttcctcggatgacctgtcgtaaagacgttagctctctgttcgtatgccctcctgacggtgtcactctgcgccagctatcactcagaacctcacactccgaaggattgcggtattatttgtgataatccgccgtcccccttaagcatactactccggcctgaaaacctggctcatacatccatccaaccatccatccatccatccgcgcactggctttgttctcaggaatgatactcaccaccatgccacaaggcttcctttgtcctccaccaagctcctcaaacgcactgtccacgaccaagttcaagaacatgtcgtagcctctcagaacaccggagatctgacgaccgccttggaggtgaaggaagagacggcggtccatgaattctgcgcgcattaggccgtcagccgttatccctctgatggatggcttgacccacttttaagctctggttgggatgctctggacattgtgactcgtgagttgttttttttgtggatgtcgagatggatgttttcgttggaaaacgaagataagaagagcagtaggggaatcttctatgggagtatgtattacgtaatgacgcttgttgatgtgtcactccattctctctttccacggcggttccttgtactttcataatacacttttatttttgtacatatacatacccactggagatggctcccaaagacagaacatcagagtttcactccacactcaattctatcaagtcacgctcagccctcaccaccaacagggcaaagggcaaacagcaagatagagaggcgaaacagccgttgatatcgaatggtccaggtcagactggagcgaagagcgagttcgggaagatggcgggtggaatagcaaaagacattaatgcgacgacgttgaagctgcaaaaactggcacaatgtgagtacgagcggaacttgcattgatcgcgactctaacattcacctccagtggctaagcgcaaaacccttttcgacgaccgtcctgtcgaaatctctgaactaacctacatcatccgacaagatattgcttctttgaattcccaaattgcccaactccaagcatacatcaaatcttccaaggggggtaagggtggttccgccgcttcgggaagtaaggggaagggcaacggggggaaacaagaggaggagcataacagcaatgtggtgatgcttctgcagagcagattggcgaatatgggaatgggtttcaaagatgtgttggaattgaggacacagaatatgaaggccagtaaggatagaacagaacagtttatgcataccgcgcagggaagctcggtgctggctcctgctgagagtgagtcacttcttccctcttaccctctctccgctgatcatcgtttattagactcgcttctgttcaaccagccgggagatcgcaaaggaaaatcccgcgccaacacgcctactcccaaccccagctcctccctctctaacctaggttctaaaaggggagagaaggaaggacaggacttcctggctctggatattgatggggatagaggagagagcgggattggaatgggaggcgactatcagcagatgcagttggtcgagcagcaggtgggtttttttttcgttttcacttgagtcgtgtgagactccttcccatgcctgtgccatcaccccgcctacgaaatccacgcccgatcgctgcttcgtccactcgcttacactctctcgtttataggacacatacatacaatcccgctccaccgccatcgaatccatcgaatctaccattgccgaactcggcaacatcttttcccaactcgcaacaatggttgccgaacagcgcgagacagtccagcggatcgacgcagatacgacagatatcgccgcaaacgtctcgggtgcgcagagggagctgttaaagtattatgcgagcgtgagtagtaataggtggttgatgttgaagatttttggggttttgatcatctttgtaagtccatttgttcttttgctgttggcattctttgtcctcggaattctttgttctcggaagaggaagacgctgatggtgatttagttcttggtgtttatccttgtatcgtaatacctccctgtcaatatcattcatttacttttatcatctttgaagaaatcgtctaatcgttgtgttttggcccagatataccatgtatggacttttccctcttttcatttctgatttctctaccttttatcctcgggtatcgctatctacgtgcatggtaatcttgctgggtttccggagtctacagatcgtttctttctctcgcctcggcatactgagactaaagaactgatggacttatctcaacgagaagatgtaggtttgtggacggtggacggggaatactacgggattaaggggccatgaagctgcaatgaatagtgacgcctgaaaaaatcaacgcaacagaaagacagatgattcaggtacacagggataaattgaacgtcaaaaggaattattacgaac

SEQ ID NO: 135 - DNA, 3447 bp, Cryptococcus neoformans
cgatcgtgcttgtagattttggcgcggatacggtcgccagggtgagcaaatggtgtgatgatggcccatttcttctcgccggattggaataacgacagagattcgcctatcgtaaaagttagcgggttgattttatatatgaaaaaagagagataaaccccacccgaaacggtaaaagcaccggcagtcaattcgataaccacaaaactccccaactcgctcggtgcctcccattcacttccatccttcttagccaacaactcgtcgacatactctggtccgaggaaatcacgaacatcatgccacatgacatctgccggagagaatggttccggcaagggctttcttccctttcgcctgtctctctttgtttgtttcttgggctgctgctgaggctttgacggttccgcaaagagagcattgacgggagcctctgtgacgtgcgtaaagtctgcaggtagttcctgtttgaaacgctttgcgggaggcgagcggatggggctggtggtcattgtgaatgttctagtacgagctactatggatataagacgccttgggataagacttttcaacatttatctcgtcgcagcttgcaactttttgtaaacaaaccggccaatcccctccaagacgtttgtgaatttttggtggaggcggaaggttatttatatcttaattaaatattgattgaccttaattaatgccttaaccaggccgcgtcactctccgctgcacccaagtcgccatcttctctttccactgagatacacatatcttcttcctcagattgtcagtatatcctcaatactgctcaccaacaatgtcagccgaagcatcaacttctcagcaagtagtcgctcctcagggaatggccccggaaaagtaccaggcgatcaacgcttaccgtgatgtgagtcaagcaggtcattcgccgttcgtggagtactaacaccattgcagaaagtcaaggagcacagtcgattatctgagcagctcaagaatggtgtgtaaaatcacattgcccgaccatcgctaatgcgaagaaacagtccgtttaaacatccggactcttggaaacgactatgacaagacggaagacgacatcaaggcgcttcaaagtgtgggtcaaatcatcggtgaagtattgaaacagcttgacgatgaacgatgtatgtttaattttgcccacacaatctgacaccgacactaacccacccacagtcatcgtcaaggcatcttctgggccccgatacgtcgtctcctaccgacccactttacccgtccacaagctcaaacccaccacccgagtctccctcgacatgacaaccctaaccataatgcgtatcctcccccgtgaagtcgaccctatggtttacaacatgtctcttgaagatcccggatcggcttcttttgccggcatcggtggtttgggcgaacaagtgagagagttgagagaggttatcgagttgcctctgatgaatcccgaattgttcgaggtgcgatcatccctatctattttttttggcgggcaaaaggggcgatactgatttgatggcagcgagtgggtatcaacccgcccaagggtgtgttgctctacggtcctcctggtacaggaaagacactcctcgcaagagctgtagctgctactctgaataccaactttttaaaagttgtctcttcagccgtacgtctcccattcttgttaattgcttccccatcaccactaatgcatactgctaacccttccctccttttctcgtagattgtcgacaagtacattggtgaatcagcacgtcttatccgagaaatgtttgcctatgccagagaacacgagccatgtgtcatttttatggacgaaatcgatgctatcggagggaggaggttctcacaaggaacaagtgcggatcgagagatccaacgtacccttatggaagtgagtctagtattactccttctctttctacccgtcttctctaaccgctttcccccttagcttctcaaccaaatggacggttttgaatctcttggtcgcaccaaaatcattatggccaccaatcgtcccgacacgctcgaccccgccctcctccgtcccggccgtctcgatcgaaagattgagattccccttcctaacgagcaaggtcggttggagattttgaaaattcatgcgaaaaaggtgaacaagagtggggatattgattatgaggcaattgtgaaattgagtgatgggtttaatggtgctgatttgaggaatgtttgtaccgaagtaagtcgtctttttgctttcccctctctgttgtaagacaggaatttgacggattatttgcattttttttctctaggccggcatgtttgctatccgagatgatagggatgctgtggtccaagaagactttatgaaggctgtcaggaaactaaacgaggcaaagaaacacgagactactatgtgagtattagttatctgcatgctgacttattatcttgaatgctcatgtgatgttaaagggattatactgccatataagttggacctacggacatccatagaaaatttttggaaatgtggaaggtgacccaatgcgtgatgcattcatacatgtaatatcgactatcgactattgatatcgaaaacactggaggatactgcaacacgatactaagaacgacggagatgatggggttagcaatgtgaccaatatggccgtaaccatacagaataataaacatcacttccattttacttatacccacaccccatctccctttgcctggtaccctcggtacgcgtgatcaaacacttcttgaacgcttcccacctctcctccgtccatcgctctttgccttcttcttcccagaatgtttctaacgattgatcgaatttggttcgtctaggcacaacgtacctaaccattaccccgcccccgtctttaccgctaccgttcgatagatgataacaattccaagcgatacaaaaatgaagccacatgggtcggatgtattgtctggggccgacacgtccagagacgtcgagatcgtatatgattacgaatgtgttcgcgaacgccaggccttgatgtttagatgaaacaggagggatccggggtgaaggtgaggggaaagaagatgaagaaggcagggaaaagggttggaagaggagagagagtgtgtgagggaaggggatgatcgggataggcgcgaaaaggtcgaatgacagatgaatttttacttccatcactttgacctttgttgctgataccgagtccatcgctgcagagcacagcatatccactgcacaggaagttcccgtatccgtccaatcgtaggctccatgccgccggtagacgtctggtgagttcgtcagatcgaagcagaaggatacgtttcctaagttagggccgtctctggatccgaatcttatgtaagtgaaaaaggtcttgatgaatggtgtcc

SEQ ID NO: 136 - DNA, 3403 bp, Cryptococcus neoformans
tagggatctcggagtttccacagaggtacgtcacaggcggcaagcggatattccgcgttcaggtagacgatcagatgagcaatccaaattgacaacaggcggcgcttagtaaaaacggcctacggaagtggtgtgtggcgcgtggcggaaattaatgaagataaggtggcggtgccatgaaggcgggatgctgactagacagcttaccacatcagattgcaaacctcagggaatattggcagcttggctatcaagcgagggatgaagaggggaaacggaggaaacgctgctgcgggtatcatgatttttctcggctgaacagaggcgatattgcaaataccgcgatgagtagggaaaacatccccgaacaaagaggattctaagaaacttctgtgccgatgcataggtgtttttcgctaatcttgtgaattgggcgggccattttgatgctcggctgagttgatagaatgcatggcagcgtggacaaagaggaaaaagggaaataatgagaagaaatgtgtaatattgtggtgtgcatcggccgagaacgggaatgctgattgccggggtcggactgtgattacaaactcgccaatcgtgccacaccatctctaatggcgggggaaattttttgtaatgcaattgtaatgaaaagttgtaattagatctcgcttaccttatcaaaaaaagagaagactcgaacattcgccgtgccgccatcttccgacgccattcccccccgcttaaatacttcgccacttttccctttccttttctcgccttttaaatcaaaaacatctcatccaccatatccttctcaatcagaactgcccgctcagcccgtcgtatagccaccaccctatcacagcaccacaaacctaggcctacgtcgttcgtgcccattcgctcagcccatacatcagcttcccagccaccaaagaccccatctcttcgaggtatttctgccgtacccctttcagacaacaaagaagctagcaccatgtctcccatcgccaatggcaacccccacggcagctctttcagcgtcagggaacccgagaggaccggcgaggtaagcaagaagatgcactccaaggttgttatcatcggctctggtcccggtggtcacaccgccgccatctacttggcccgagccaacctcgagcctgtcctgtacgaggtaagcatccatgattgtttgggctgtatagatattgacgacatccgcagggaatgcttgccaacgggtgaggactatcgtccagtcacatcgcgtggtagccaaggctaacactttccttagtttcgctcctggcggtcaactcaccaccacgactgacgtcgagaacttccctggtttccccgagggtgttaccggtaccgaaatgatggacaagttccgagctcagaggtatgttatctgttctttgcaaatttaatccgataatcgggataatctgctgaccaacgtttgtcttatagtgagcgattcggtaccaagatcatcaccgagactgttgcgcgtgtcgacctctctgtccgacctttcaagtactggactgagggcgaggaggaggaacacgagttcatgaccgccgacacgtaagttttttttcgttcgacaatccccctatggttcgaaacgtgattgacgcatccaaacagtatcatcatggctaccggtgcttctgccaagcgtcttttccttcctggtgaggatacctattggcagtctggtatctctgcttgtgccgtttgcgacggtgccgtccccctcttcaggcaaaagcccctcgccgttatcggtggtggtgacagtgcggccgaggaagctacttgtgagtagcgtattttaaataattgtaaagggagaagacttacaagttatgtcagaccttaccaagtacggttctcacgtctatgtcctcgtcagaagggacgagctccgagcttccaagattatggctaagcgactcacttctcaccccaaggttaccgtcctttggaatgtaagttgcttctttcgtcgtcacgcgaaagatgtaaaggagctcataggaatatttagactgttgctactgaggccaagggcgacggtgaagtcctcacgtcacttaccatcaagaacaccaagactggtgagatcggagacctccccgtcaacggtctcttctatgccatcggccacgagcccgccacttccctcgtcaagtctcaagttgagcttgacagcgatggatacatcaagactgttcccggcacctcccagacttctgtccacggtgtcttcgccgccggtgacgtccaggacaagaagtacaggcaggctatcacatctgctggttccggttgcattgctgcccttgaagctgagaagctcatcagcgaggaggaggctgatgacgagagcctccagacacaagacgtgcatgtccctgccgagcactacttgggtactgacaaggagtaagaaggaaggttaaattttaattctgtttagtattgtgatatctcttagaaagtataaccagaatcatagaatgcatcaggatctgtatagcgacatacgagggttcgttttcgggaggaataaagggtggcttttagattccagacataatgtcttaaagagcagcatctgctgcagcgtccaagtccgctggaggcgggggagggggagcatcgctttccgcaggagcaggagcatcctcaggaggtgggggaggtggagctggacccaagaactcttcctgttgtacaagtcagcggtgatgaaatcaagaatagtcacatgatgctgtaagactcacctctggcacattggcaaccaaaatcgttcttcccgcaaactgtcttccaccaatggcgttcatagccttcttggtactttccacatccttgtacattacatacaccctaccaacacctgcctcatcatctgtcctcttattccgctccgctgtcgccgcagccgcctcggtggactcccacttcttggacttgggtacaggtctgggaatacggaccccctcaatttcaccatacttgctgcactcctcattgatatcttcgatgatatcgttgtaatcatcgtcattgtagagctcttccggagtaaccatattgagcaacagcatgacacgagaggagggagcgtcggcattgttttgcatgagatgggggactgataaaaaggaatgacattagctgacaatagaataaagcacgaagagctgggcttactggcttgactgaggtaggcggcagatcctggtatgggtgcgttaacaccggtgttccggccgacagccgcacgctgaacaacgaggttgcggtcaccaagagaaaagttatggagaccttggatagccatgtctgtaacctcaggatcaaggtactcggc

SEQ ID NO: 137 - DNA, 2536 bp, Cryptococcus neoformans
ccgctgtcgcctccaccacctcagctgctgaccgcacttctgctgtctctggtaccactggcggctccgcctcccgttctgtctctcaatctgcctccgcctctgcttcttcttcttcttcttccgatagctcttcctcaggtgcaggtatggtcgctcccgctgtgggtggtgtcctcgcctttgccggtgccgcccttgctctcctttaaagcggctttgaaacacgcatgtgtatgagcatagcatctaaaacccggcaagaccgactcttctctttatttacctttcgatacttcgattcatttgtttcatttttagggcacatgggcatttagtacaaatgtataaacttggttggcgatggcttctgtatatctcttccgtgtccttttctaaacgattcggatctcgatggttctctgtgtcagaatgattcatgggtacaagacctagtataataaattaacaccatccccacattgtccatctctccaaggcccttatcttcttccttgccataccaagcaacccccaataaatgcccatcgacctctcccttccttcccatcttaacgtcccttcctggcaactctttccaggtctgtactagctcgcttcccagaccaagcccccatacacacccttctttctgcccagcttctgtagccaggatatcgagtgctcttaatacggaaggaagttgaggagaacttatatggtaaacaggacgatcgcatctcctgatgacgttaagtatggcggtttagtgccgcaggatgatgtcgatgttttggctcggatccccacgggttgcggagcacctgtggggtctttccaccgagttttaacgggtaagaacaagagtccaccagggtttgaagggtctggtacgaagatcgattttttagaagtgtctgacctttccagcttttcccttgctcgtcgagacagctcctcgccaacagaaacgagatcctcctcgtagatcaaagagaagatgatatcttcaagaggatcagtagaaggcttgtaactatgttctaacgcagcctcaaggtctggtcgaacccttctcctaccgaaacgcccacaatccactttcctcctgttggacgtcctctggcccgtatgacagaaaaccttaatctacaaaaggctcttcttcgacgtatcgaagaagcaggtaaaggcatcgtcgacattcgtgaaaactccagagtaagggagatgcgtcttggcgaaggtggtcgttgggttggcttgcggatcggagatgaatgggtccggggatccctagtagttggagcagatggcccaaactccccagtcaggcatttctcggagattgaatcgtacggtcatggttacaacacccacgccgtggtcgctactctcaaccacgaccccgatcctctctaccccaacactaccgctttccagcgcttcctctctaccgggcccatagccttcctccctctttctgacacatcatctacaatggtatggtccactcttcccgaaaacgctgctgctctcaagaaactttctcatgatgcccttactcaaatggtcaacgctgctttcactctgcctgaagagacactttccagcttgtgcgaggccatgctgtctgctcagtctgaaggaacacctttgacagcgccccaaatcgtcactctcatcgctaccctccccacccctcttacatcctccgatcagcccatcatcccacctgccatcacatccatccaccccccttcggtagcttccttccctcttcgtatttctcacgcgacatcctacctcggagaacgtaccgctcttgtgggcgatgcggcacatacgatccatcccctggctggacaagggctgaacatgggtttggctgacgtcaagtgccttgcagaagtcctcgaagagaccagacgattgggaggcgatttgggtagtcttgaaggtacaaaaggttatcctaaagagcgatatcctttgaaccatttgatgttgagtgcgacggataagctacactacatctttcgagcgaggaacgggttggtcaactgggtgagaggtactggattcgatgtaatcaacgagttggggcctattaagcggattttaatgggcggtgcgggatccggagtcggacttggtggtgcttctgcgagaacagaaaaggaacgggaatttggaagagcgcgtgcggaagataaactgaagccggctggaggatggccgatggcggttgcgaatggcgttgaaggctggttcgccctcaagggggtgatgggtatggtcggcggcgtagttggagaagccgcaaggaacggacttcgaagagctgcggatgcgctggatggcaagagataagaagtattgtcatgaatatcacaaatcacatcatcatatttataccaaacaagcacgagcaattgaataaggcaggatatattattaatgcacagctatagaaaccgtaattgacatccactccatcatttagatctccgcccctgtaaatttatcatttaat

SEQ ID NO: 138 - DNA, 3239 bp, Cryptococcus neoformans
taccttgacgtttgcaaactccaagtcactgacgactcctcccctaaaccgttccttgcccaaccttggcttggctgacggcagcacgacttgtgccccaggctatatcctcatctgcattcaccacgacccattgtctcgttacacgctcgggatcaactttaccgcctttgtcggtctttgccccaccagcccggttaccaccagcaccgccgactgccccgcctttccctctcccacacccaaattcgccgaccatatgcgatgccacgtcatccagcgcttgctgcacactgtcatgcacgaccatctcgccaacatgacggattgtcacacctgggaatcactggtcaatgcggtatacgattactgcacgtggactatggaatgtatcctcctcggtaccgatgcaaatgttcgattcggggtttcttgttatccctttttgaaagagctcgaagaggcggcaaggacgctcaggagggatagtatgggcgagtgggatgacgtggtgcagattggggtggataggttgttggagacactaccttgcggtgaatggaccttgaccaagagaaggattgaaaaggaacgattgccagagtttccgaaagcccaaactcaagtcaaggccaagcgtgaggccagacgtccggcggcaccttcgatcccagctccagctgtcattcctgtccctgcacctgctccgcttattatcaagcgcaaaagatacagcagcctacgcatgctgatgggccgtgcggggtcggtggttggcaggcagaagatgcgggcaaaggcgtctgcggttatcgagaagggaaaggttggcttccacgacaggcaaacggtccagaggatggagccggtctcgtccatgtctggtcctgcgagcctgtcttgcgtgtgattgttcgtgggcggtgaggacagttagtcagtactttgaaagctgtgtatataccagaatgtgaatgcagtgtttccgtgcaagtggtcgatggggctcacgagttggtggccggcggcaaggacgagccacgtggagttcgcgtggggatcggaaacgggtccgcgttgttgttattctcgagattcttcgttgcgcaggatctggcgtgcagatacacctgaacgaggcagcgtacggcagagcaacgctgacatcccagccacatacaccatgtccgccatccgcactctcgcaaaccccgtcaccgcctgcttctccacctcgctctctccccgtgccgcattccaccgctttctccatgcgctctccgcctccatccgccgcctcgacctctcccgcgacccgagcaagaccttgaaccgcctcaagcagcacaggttcaccctggccaacacgctgccccgcgcgttcatgcttctatgtgcatcctacagtctctacatcatgaccaccccgcccttcccgctcaagcttgggatacccatcgcgtacgtcgccgctgtcatcttgccgatcacgtctcagtttgtctggcctgccacacccatctttgcatggctcatcactttcttctccgcccgtttcatcccttccgggcgccggccagaaatccacgtcgcccttcttccagctcttgaatccgtcctctacggcgccaacatttctgatctccagacaagatataccaacgctttccttgatgtggtcgcatggctgccctacggcgtgttccatttcactcttccattcgtcgtggctgttatcctttggtcgctgggacctaggggtgcggttcagttctggggcttggcctttgggtggatgaatttgctcggtgtagtctgtcagctcctgttccctgctgccgcgccttgtaagtatctattttactgtatcgctcaaacccacatacttaatataccgagcagggtacgaaatcattcacggtcttacccccgccgactattccatggccggstctcccggcggtctcatgcgtatcgaccgcgtcttccactcttcaggctataccaacgcattcggttccgctcctcttgtttttggtgccttcccctccctccattccggatgtgccgtcatggaagcgctcttcctttcccatttcttcccatctctcaagggtctgtattggggctacgtcggtgtcctctggtgggcgaccatgtacctctcccaccactacctcatcgacctcgtcggtggagcttgtctgagcgtcttggtgttttacttgtgcatgcctgaaggtttcaaggatgttgatcagattcagtgggaggcggtggaaggcgatgggtacgagatgattggcgggcccaggacgggcacgggtcctgatattgatttggatgaggagattagaaaattggaagaycaaggcgaagcgttgttcgagcaggcgataggggatgaagagtctcggatcgagacaaagggagagggaaacactggcgcgggcgggaatgtgagtgggaacgaaagtggggatagtgcagatagcggtaagaaaaagggaaaggggaagcaaactgccaaaaagccaaagatgaaggagccaagatcagtcagctggggagaaacaaaggtgatgggtgaaggagcacaggtggtttcagaagatagctcttaagaggtatctgttttaaaacagtagtatacccaacactttttcttgaccatatatcctaaactatgatcttaataatgcagaatagaaaaaaaccttgtccttctcacaggcgtcaacagatgaagtgaaaccagactagatcacgatacatcgtcgcagaaaataaataaataaatctagtaactccatcccaaacctcctggtacaggcctgttcgtccatcgactgataatccccatcgccctcgccctcctcacaagtttaccaacccgcctttgcgacttccaagtcaacccagtctctgcccgactttttatcttgcccatcgggttgacgaattcataggcgaaattagggttcatatcgtgcaccaagggattagtcttggtgatgtaaaacggatcaagcttgacggcaattttcttgggaggaccgaggagaggtggacggggaaaaggtcgggcagtggggaagatggattcttgggtaaatgcttgaggggcagcaaactagaagagttgagaaacccaaaacaggtcagcttttttgatgtccatgtgtaccttccaccagctataaacaatggggagaagagagatgggcaaaaaacgtact

SEQ ID NO: 139 - DNA, 3440 bp, Cryptococcus neoformans
aattgtcattcagtatgggctgtgagctgatatataatggaacggctcgaataacggagtcctttggcgttgtgccgtcgagcgtccgacaccaaagatttgcgaatcgtccaaccttcctcataatagcttattaagtcttactcaacaagtaattcacgtttccgaatcaacaagtttcgcatgccagccatgctcaatcacttaggccagccactacagctgaatgactgcatgcaaaattgtgagtcaattgattgatccgtctcttgcttttttcttcttttttgggtatgtaactacaacaaatataattgattttagtagtctttgccgtatgagagggagtataaactgaaaggaagaagaacgccgggaaaggtcgagagagtgaatgtggggaggccggggaggacgagggaagagtctagtcatgttatacagaacatccgtcatagcaactgtgttcatagcgctttcctttcattatctttttgaccttttttccctaacggcaaccttccctacacttttcttggacagaatcttacatatgttatcctcttataacgattatccactcaccagggccaccgcgcacctagtcatgaattaatcggccgccgggagcccgggagaatactatattacataagccaaatggccgtgacttttggagtaaggcgtgaagatctttcatccaggcgcgtgtaaccgcgtgtaagaattctccatgcctaactcagggcatggtggtggattgaggtggtgacgtttgagggcagccaccgcatcgcacatatcgacaatcgcgctcactatcgatacatatacaacgtagcaagaagcaatggacccctcactcccccttgtagttgataacggtacaggtgtaagtgttctggttcatcaagcctgggcctaggagctggcgtaaatgagcttgccctggggttgagcattggtggtcggtcagaatgggataagcgtccggccgggaatgatgagccgttgtgcgtggaatggtaagatgatgctgacagatatctagttcgtcaaatgtggctgggccggaagtaacttccccgattatggcaagtccgagcaccgaagagagatatatggcctgactgacgtttctttctccagtcttcccatctatcgttggccgccccatccttcgagccgaggagcgtctcggtacttctcaactgaaagatatcatgattggtgacgaggctgcagagaatcggtcttacctccaagtcactcaccctatggagcacggtgtcgttaagaactgggaagacatgcgacatctttgggattacacgttcaatgagaagatgcatatggaccctcgaggcaagaagatcttgttgacggagcctccaatgaaccccaaggcgaacaggcaaaagatgtgtgaggtaatgtttgaggagtatgggtttggaggtgtttacgttgccatccaggccgtcttgactttgtatgctcagggtgagtaagaatgttacatgctttgatgtcttcctcgctaaagtggtaaaataggtttacaaacaggtgttgttgttgactctggtgacggtgtgacccatattgtgcccgtgtacgacggtttcgccctaccacatttgacgcgccgtctcgacgtggcaggtcgggatgtgactcgatatctgatcaagcttttgcttatgcgaggatacgcatttgagcgcacagcagactttgagactgttagaggtatcaaggaggctttatgctttacgagttatgatctggaaatggacaagaagttggccgaggaaacgactgtcatggtagagaactataccgtgagtgaatcattgagttcgagggagtgtcctaagctgattcgatgatagctccctgatggaagagtaatcaaagttggttcagagaggtatgaagctccggaatgtatgttccagcctcatcttgtggatgtcgagcaacctggcgtggctggtaagtcgccgtttatcatttcctttatattttgctaacgtgtcgcagagctcctctttaacaccatccaacaagcggctgtcgacacacgtacagaactttacaagcacattgtactttctggtggctcatccatgtacccgggtttcccctcgcgtctcgaaaaagagatgaagcaattgtacttgacacgggtgttgggtaatgacacttctcgtctaaaggtgtgtccttgggttttacttgtagaatggtgtctaaagatgtatcgcagcactttaagatccgaattgaagatcctcctcgacgaaaacacatggtgttcctgggtggtgcagtgcttgccgatattatgaaggacaaggacgcgttctgggtaaccaaagaggagtgggaagagcaaggaatccgggcattggacaagctcggccgtggggattgatgaaagaaagacattctatatgggttgtactacggaatgaatttgaatggatgaaaaaggggctgagtgtgtattgctgccaaggtaaaatggcagcatcctaaagatgcggagagcggtcatagcgtccatgaccatgaagaaggtaatcatacgcataataacattaatgacatgtcggggtggacaattaaacacgtggactataccatcatcataataaggccacgtccgcgcgttgctttcgttgtcgcggatccacgtggcttctaccttactcatagtcgttgccatgtgcgatccacgtgtgtgcgacgcgagtgagcgaccggctccgtatccgtcactgctgtggaggcatagggagggagtgagcatgaacagcgtgcgtggtaatctgccaaccgccaagtctcactaatcaccaccgctgctccctttatatattccattccccgaccttcgactgtttcatttcggccgccgaagagggaacagggatgattcccgcagattcattccccgacgatcccctccagcttcctctcttcaactccaacttccccgtaccaccagccccactcccagctccagatgcccgccgcaaacagctacctagggcgcagtgcatccctcgggaggaagaaggatcccttcgcatacaggagcgacgatgttgagagtggcttcggaaacatggacatcatcgatcctggacagcaacaaccgcagcaaccaggctggggaagttacggttatgcgcaggctgggtacagagattcagttgtttcaccaagaagcggtggatatcaaaacatggttaatcaatcctctatgaatccacttcctgtcccatcccacaacctttcgcgcccgcctccagcagtgccggagcacccctcgcctaccaccaaagccgcgaacaacgcatacattccggcacgttcttccgatcccggtccttctgtcacagacagatccaattcgtactcccactctc

SEQ ID NO: 140 - DNA, 3315 bp, Cryptococcus neoformans
gatatcctatgtagcattaaattagcagcctaaactcattcgattcagtgactcacctttataacttaagagtctatgcatatccctgatgtgcaccaaatcctccttgtattttgacgtcacacacagcgtattcttccactcatgtatcaaatcgagaatcttgcccatcaccctcccaatcaccataggcggtcgttcggggaatctgcgtacgagttcattgagaaactctttggtgctaatctgaagatggatagggtagccgcagttcttgacgaggtaatcgaggacattgagcgccaagagcgcttcgttgggatttcgagaattgatatgtgggagaagcgcagtggtcgcttcgcgggcacttgtggagggttagtcaagggacgtggaagaggcgatgagacttgcctgttggcctttttacggttaatcagctctgcgagctcgatgttggcgatatcgttgggaacagggagagtggggtcgcatgtctgctctgtaggggcgtgagggggttgtcctgatctgtgtgcgttcctactcaccgacaagggcctggactggggagagggccgaccaggggcgggctgggatcattgtgggaggcggggagaggaagtgggatatgagggggagtaggcttgtatgggctgtagtgtctgctatggtggtgattagcgcgtggcttggggcgttagtggtgggagggatacttttgtttctagtgtggttctacaaattaaattatatagactcgctgagcttgaatcccacggcgccgagactgctgccacgcacggaccacccacgcccaacaacaacggatcgtcacaacccgcgcggccgaacacaagatctgcttacataatattcgccagtccacggaaccaaaatctgccactttgcggggtgtgcctctgcccaaccacaaggcagcgatttaactgtcctcttcagcactcgtctttgccctcacactcacccatccgccatgtccatcctccgtgtcggtacgttgcacctgcgctcggtctgcaaagctcacactacaatagctcccgcgctcagggcaaaggccgtccccagggctgttcccctcgtctcaaagcgcaacgccaacgacctctcaatcacctcccctcccaatccctctgcctccgttcgcccagctatcagatacgggcctcctaccggtggccggtcttcagactctggacgcaccgtcaccgtcttcggttctaccggtttcctcgccaggtatctcattcaaaaacttgccaggcagggaactcaggtcattgtgccttaccgtgatgaggatgaaaaacgtcgcttgaggccatgtggtgatttgggacagattgttcctcttgaatgggatgccaggattcctgagcaaacagcagaatgtgtcaagcatgctgatgttgtgtacaacttggtcggaagggattacgagactaggtgagtatcaacaacggtccatgactctgcagtacaactgatctgtatgtaggaactactcttatgacgacgtcaacgtcaaggttgctcagtccattgccgagatttctgccgacatgaacatccctcgtctcatccacgtctcccacatcaacgccaaccccgagtctccctccgaattttaccgcaccaagtacgctggtgagcgagccgtccgagatgccttccccgaggccaccattgtcaggccatctcaattatttgggcacgaagactggttgctcaacgccattgcccgtaagtatgccatcaaattaccatttgaatacagctaacattacctaggataccctattctctgcaagctgaacaatggcaacacgaagcttttccctgtccacgttgtcgacgttgcccaggcccttaacctcatgtttgatgcccccgtcacttccactgcctcgacctttgtccttcccggtcccgagctctacaactatgccgagctcgaaaggcttgtttctgccctcaccctccgacccatctcctccgcccctagcctccccaagcctgtcgccaaattccttgccaacctcgttaaccgtggtctttggtggcctaccatctctccagatgaggttgaaaggatgttcattgacgatgccggtgcggaagcattccaggttcactctcctggtcccgatggatggaacgctcctcccaggccgcagattgtcggtgttaacggtgagcccgtcaagagctgggccgatttggatatgcagcccgacaccatagccgagcacgctatcaagcctctgcgacgttaccgatcaacgtaagtcacgaaatgctgtgctatcaaacagcgatgctgactatttctctagtgttaactacgaccttcccgtggagacccacattatcaaggctcccaagcagtaccatgtccttccttagatcttttgatggacatgtataggattttaggttgcgcagatcgtcaaaagacatccatctgagcggcaacatcgcctccgaagaataaattttatgagagccggttataggatagtaatctgcttcaggtataattataatgagtgagaagtgatttgcctcgctgacttcaggtcattacatcacattactacaccagctcttgaattctcgtctccaaaagacgcgcaatattatcaaatattaacaatcttgtccaaatattattaaggttttccaaatattatcgggaattcaaatacgatcgtctatcaacatttggcacagatgtttactcttaacagcagcgcccctgagcagcataatcaaatcctccgccacaagtatccctgccgaacagcatgtagccgacagtctggcccaagaagataaatatcaagacgattacattgaagtacatcccgagcagcatactgaattgccaaggtcagcgaggcggaaacgagtttggaaagcggaaagggcggggtagacgtacacaaagaaagccgcggtgaactgactgccgtaaatgaaaccacgaaggatttggtgaggccaagacggaacatatctaaactctctcgtcagattattgtcttcaaattgttcgtctctgagacagaattcacttaccgcgcggcggcggttctgacgttcagaagaccaccttgcccaccatccttcccatactcagctacgctagacacttccccaccacaagaggttgcccccgcccttttcacaagccatcgatcaaattccctgcccaacctcctgatcaattcaatcaagacacagaggaaaaagataccgatgatgctaccggcgaacattcccttg

SEQ ID NO: 141 - DNA, 3396 bp, Cryptococcus neoformans
tcaaaagaagacaccaatacaacgcgccgacgctacccgcgtatatcgccgcgaaccactacaaggttactcttatcaggcaaaaggtcattttgtcgaaagtgaaagtgactcacagggtagaccttgttggcggtggggatgatggcggaatctaggaagatggcgaagagctcgacccaaatgtacatgtagaaaaacaggacaatttcttttcggccaacagcggtatatttggaacggacgtgaaggagcatgatggtcgccatgaccaacgcagcaatgtgcaggatgcatgttgctatcggtatctctggttagtacactgaaactaaaccttccgtagttgcccatcccgatcactcacccggctggaagataatctgactacccagttggacgtttcggctgtaacatgtcggagccatcccttgctgatcaccaagcatgggacaaaccactaaagcggcatgttcacatatataatcaaaggacccaaacttgaacgccgcgttatccgacatggttgaagtatacttattggagggtatgtaggatcagatggtgactgggtgaggttggggagggttggggatttggttggcgctcgcaagaggtgatggatagggacgcgattcgacgtgatctctgcgacgaagggagatttgagctgattcgggtatggtattgtggttggacagttggaggatacgcggtaatttgccgccgctagtccgtctaccgtctttgaggagggattaagaccgaaagaatagagcaggcggaaaatgtatttgattctatgaatagagtgaaaacacaaagggcamcaagggaaaggctgttcagaggaagacttacgtaattctaaaaagtaagagaaaacagtttacgtaaactgttattacgccgcgtcaccgctcgtaggattcatggtcgtccacaataagtgtgaaacagcaatttatatacgtacgattcacaactgtatttattgatcatggctgacgacagcgtgccccttccctaccccaacctcaaggttccgacttggtattatcaggtgcaacatgttgactacaagaaggacgaagcggagaagtctttctgggaggctgtcgagaaagatggtatgtcccacgtggacaggacttcgagctctctacatgaacaacctgctgatgacccgaacttctacgcgtagaaatggctccatatctcaagagcataaactctgacaagacggaacttatccagaagctggaagaaaagaacaagcagcaggtggaggagtatgatcgtaaattgaaagatgcggaagagaatgaaggggacagtgagatttcggagttgttgaggaataaggcgatgtattttgttaggataggggataaggtgggtttgcgtttggtagtttggtggggttgagtcgctgatcgagacgacttgtattgtaggagcgagcgctgccggctttggagattgcgattgaaaagacggcaggattgggagcaaaaatcgatcttgttttggccattgtgcgaattggattgttcttctctgacatccacctcgtcaccaccaacattacccgtgcaaacaagtaagcgcctttctttatgggagctatattttaactgatgtattctagtcttatcgactctggtggtgactgggaccgaagaaatcgattgaaagtgtatcgtgccctccgacatttgactatccgagagtttaaagaggctgccgagcttcttatcgactcattgtctacttttacagcagcagagttgatggagtatgacgagtttgtggcgttgaccattttggctgctggtgttggatgcgacagaaagggtatcaaggacaaggtaaatatgataattcctgatacaaaagcgcagctaacaaagatgaaggtcctcgcgagccccgaagttaacggtgccctccccaacatcccttcattagccagcttgacgaactctctctacaagagcaactattctgctttcttcatcgccctcgccgaagttgagcaacagtatcttctcaccatcccctatctcgtcccacatgcccgatattatgtccgcgagatgcggatcaaggcttactctcagcttctcgagtcatacaggagtctcacgatggaaaggttttgccgttcatttggcgttagcgagcagtatatggacaaggacttatcgaggtttattgcgagcggacgattggcgtgcacgattgataaagtgaacggggtgattactaccaacaagttggcgagccagaacaagacagcgatgtatgaacaggtgctcaagcagggcgatgtgctcttaagcggtgagtacttaattccttgttataaagtacgtatgctgacgatgatatagacattcagaagctgcacagagtggtaggatagaggacgtaatagcatacatatatgcatgtgttatgtagatatgcacagttacgttgttccgtcattgcagctgtcggcgttttgattggcggaaaggaaattgaaaacccgcgttggggagtgacgtcgcgtacccatttcatttttctttctatttcattcttctttttctccacaactctagatttctagaaaaaacatacatatcatgtccactcgtccaccgacctctcccgatgccgtcgatgctaacaagaaacagaagaccgtccaggtcaacagtgagtataaccacaattagcagggtcgcttttttatcagtcgctgatgttgccttacagagaaggtctgcttgatgtaagtatgattctcaacagaggagcggttgtgcaatggcgacgaggggtgagggcgggtgatcgagtcgtccgtctaggcacacgctaatctctttcctttcttcatcgatacagcgtccacgacggttggggtctctccacggaggagaagggtaacgccattttccacggtgacaccacccacatggatgctatccgcgacaagcacaactttgtcgagctcgaagctcacggtctcgctgtcggtttgaaggagggcttgatgggtaactctgaagttggacacttgaacattggtgccggccgaattgtttggcaggatatcgtcaagattgaccagtgtgagtattctacctgtgtcttttttgaaaggaagaacattgcgcgctaacatgtactagccatcaagaaggacgaattcaaggaccaacctgctatcgttgatgccatgaagcacgctaaggagacctccggtcgacttcatttgctcggtctcatttccgacggtggtgttcactctcacatccaacacttgttcgcccttctccgagtggccaagtcttacgggattgccaatgtctacatccacttcttcggtgatggtcggga

SEQ ID NO: 142 - DNA, 3371 bp, Cryptococcus neoformans
atattccgtcgtatccatacctttataagagtgtcgggacggagatcgaggtggactgtgagaagatgtttggtcatcagagctggtgctcgtgggagatgaagccatcctgcaggctatcagtccttctgagtatattttatcggaatacgaatggctggttgtgattctgagatgggagtcggattgacaagttgatttgttcagtagttgatctctatctgcggctgtccaccgatcgctcaacttccgagacgcgttcatgctcgtcgttcgcgtctggagcaatttgcttacgtcatcaatgcatatgacggtaacgtcggcagcggacacacctccaccggaaattttcggaggttcggggggttggcatcgagcggccctttgtctcgcccgccgttaatttatatggacctgctgtaatccgcgttgtaagcatttccactttctttttcttccttctgccttccgcatatctttgctacgctgctcagctccaccttcgcaacacaaagacagccactggaccctaggtcactcagccaaaatcaagttcacagatttcgccgcttctgacttctttgcgaacaccggtccgccgaaagaattaagcgtcacgcagaggtatattgtgagttgcattcattctagatcacaagctatgggggggtgaaagtctggtccgtccgaacaatcgggtccgtccgaacgattttcaattagggcgggaaaagatttagtacttggaattggaacgctttcgaccgttatgttatggctgtggcaaatgtgcgttgagctgaccaagccctgctatcgcttcattccacagacgcagaaagagttcatgccttcacccacgcaaagcccgaattatcgatatcatcaccccaccaaggagctggattttcatacccgataaatcaaaactgtaagtagtgttcactctgctttttcgtggtaacctgtttacgcttcataaggatcaacttgcaaaatggccaccgttaatatccgacgagatgtggacgacaagttctacgtatgttgttctttggtatctaatgagctaagacaactgattcatcgacttagcgttacaaaatgcccctcctccagatcaagattgaaggtcgaggcaacggtatcaagactgttgtgcccaatatggaagacattgcgcgagccttgaacaggccgcctacctacccgaccaaattctttggttttgaacttggtgcccaaacatccatggccaacgacaggtatatcgttaacggtgctcataccgctgaccgtttgcgagagctccttgacgttttcattgagaaatttgttctttgtccctcttgcaaaaaccccgaaaccgaaattgtcatcacaggcaggtcgggtcacgaggacatgcatcgtgactgcaaagcttgtggtcgtcaaaaccccattgatatgcgccacaagctttctgtctttatcatcaagaacccacccaagaagaaggacaagggtggcaagaagggcaagaagtctggtggtatgacggccgaagccaacctcggtgggccaatggtgtttgagaagacagaggatggtagtggtgaagatgatagttcccctgatgcgggcattgcgggtgtccctaccactggcaccgaaattgacgcggtgcttggacgtggcgaccccatcctcggtgaccctgatgccgctgaggcagcgtccaagaagctcgccaaacttgacgttaacggtggcggcgatgaagaagaggacgaggatgccgattcaccttatgcrgctttgggttcttggttggagaacaacaaagaagccgatgacgcctctatcatcgcgcagatcaaagatctcgggattgctggcaagcacaaggttttggtagagattggtcagcatctgttctcggatgacatctgtgacgagatcgccggtcgaactgcccttcttcaagctgtaaggcactttcgaacatgtcaacaaacgtatcagctaatgatttctctagcttgtgacgtctgagaagcatcaaaagtctctcttgggtggtatcgaacgcctcatcggtctatccccttctctcgagtctcttattgccgctggcaccacttccaagattctcatggtattgtaccaagctgatatcatcgaggaggacgttgttcagcagtggggtacccacgttagcaaaaagtacgtggacaaggacaagagcaagaaagtcagaaagaatgccgaagccttcctcaaggtaagttattttctgatctttacaaagcaaggtgaatattgacagagttcatttcagtggctcgaggaggctgaggacgagtctgacagcgatgaggagtgatcgtagattgtttctcgtcccaatcttatttcgttatcttgtgtatgcgtggcatgaatgttttgtaactgtttggaaagttccccatatgatcgatagcctgaatttatgcagcactacaatgacaacagagccttttataataaaatatgattttcctatccgtgctggaaaactacctatgatagggacaaatgcatagacgccagaactcggctatttggttcaggatgttgtggctacacaatattctccccccacccccctacccctgggctaccggaacaacagcaagtgctgatcgatcatgccaaattcagcctgatatccttgcttacaaactcttttgattctgcatgtccacccctggttctatcgtttctggcaagctttgcgttgcaggttgactctcgacagcatgatgctgtggcgaatgttctggtggtctctcagcttgcacgacctgggtagatgtttctttctgttcttccgaattgatggctgtgccgtccccgagagcctcttcggtcgtacgaccttgctcggccttgacaggcacactgtcattcttttcttccacctgattatgtatggcgtccgttccgctgacgtcctggttggcagccaacagagttttcattgctccaggggccttcaagtcactgtattgcagtttcccctcggtgaaaagatcgccacatgaattacacactggccccgtaaacgtcagtaaggctcatccattttttaacaaacatgaactccaatgacaccagacgtacatgttccttttccactcggtcctcttctccaaatcttaattccctctcttgcgcagccttcgcatattcctttttcaattcctcgcctttgcttttctttccttgctccttctcctccaccggctcttccgcgctttcccaaaagcgctttttgagcactggcctccacccgctcatcaagcgcttccaacgagacaggcatttcgaatcctaccgtt

SEQ ID NO: 143 - DNA, 3368 bp, Cryptococcus neoformans
atgtcaagcttttcgagggcatcacctagagtctttttttcctcttctgtcttgtttgatggtatggtggggagtacgcgaatggtatctacgagagagtgccagagctgcgtcatggctggttgtacgagtcgcatgttcggttcgggaaatgtggttgggtaatgttgagtgaagaggcgggcggtgacaaaatgaaatctaatcagcccaaatccacagaacgcacggatcataccagatcgcgcatcacccgacagccggtaatagtcaccaccagcgcacgcagagaagacttaccttcatggctatcgcctgtagaaagttttactgtactacctctggatctggacatgtttccaagtatgctccagtaaaataaacaaagggccgtctagatactttatgctcgtagtaaaagcgttggagaagttggaagactaggagtgagcctgggataccccgcgaccaagaacgatcgccaagggactttcaagggctcggaaagggtggcgtctggaagggacaataaaaataaacctctgacgactgttttcggggagagatgttagggatgtacacgaatacggtggtatcgaagaatatggattctctgttttgaatgcgacgtcaatgatcggaagagtaatgttgtggacacgagggcaaggcactaagttactgggggaatggtgtccggacacggcttcttacacttccttttccccgtcaccatctgtccctcgctctacagctcatctttctccacatctcctcaacagcgactatggtacaaccattcgtttcagctcccaagaaggatgcgaccaaacaggcatcgccgacattggctcttgacatctttctcgataaccagcaccagtcgtattttgaggagctctacaggtcagaggccgtttgtctatgtatactaaggtgacaaggattttatctggtcattagaagatttattaacagggtttagattactaccgccagtatgccgtcaaattattctccatgccttgtggtcccatcatccattacggacggtcgatgtcaagctgcttctccagatggatgtccatgctcctttagaagagtgagttgtttctcaaaatgtccaatacataacgctaatatcgcattattcagatgcgacgaggtcatgcgaccagctatagacaggaaggtcctccatccaatgcattataagaaacagagaatgcagtggtccttgaatgattctttcaagaagggcctgagaaatgccttgacaggattgtgagtctcgtcgcaatagttatatcaaaccaaggctaactcagcttcagaggaacatcaaattcgttcggtgtaccctttgaaagacatcaggcaactgaccttgatcttccctccgaggacgagctcgtggcgtatggcgaggatacgtttgagtctattctcaaatacatggtgtcttccggtctcggtacagaattctctggatccagaccacagcctgaggtcctccagctcttacataccagcggcctcatgacagactcgtgagtgctttccgagaagagtgcgtactgagctgaccatgtttgacagtgtcgatatgaacggaagaaatcccaatataaatcggctcacaatcacttccaaaggctttcaatttttgctcgagaagagacagactcagttgtgggagatactcatgtactacttgagtgccaaagaagtacgtccctatcaaaatgacaatgtactgataataaggcaaactctgaacggtcatccgaggtcttgtcaatgttcttctccctcggatgtatgcaactaggacaagactattccgcgtccaactccttccctggcgctcaagaagctctcgacgatctcgcccaatacggtttcatttacaaatcatcgcctgacagcgatcaattttggcccacccaccttgccacctctttgtgttccggcgacgcttccgccatccaatctcagagtgcagacgacaagcgtttcctaatattggaaaccaattacaaaatttacgcatatacttgtaagttggcgatatacctattattgcgcgcgatttcagcgattgtatctgaccatggagcagcaaacgagctcgagatcgctatccttaatctctttgtcgacattcgcattcgggtaccccaacctcgttgtaggaaaactcgaccgtcagcacggttaaagccgccatggaaaagggtatctcagcccgacagatcatcgcctatttgtccagtcatgcccatccacaaatgtacaactctcccccaccattattacatcccaccattgtcgatcaactttatttatgggatcgagagaggaatagattacagacggaagagagtgagtcggccatcattcaggtgcttttcaagacactaactaattgaccgcgacttagccgttatgtacgaattcttcagcaaagaactctttgacgatactgtcaatgaagccaaagcgaatgcggctctacagcatgccgctacatctcaaaaactattattcatcgagccacatacgaagcctgcgatcacagaattcgtcaaacaaagacagaacgtccttagagggggttattagacggctctcgatctcacggttaataaagcacagctgcaggtcgcaactcactgtatcatatcgcatatgcatcactgttgtaatagtgctaatttatgattgcttctagtgagctatccgtgctgcctgatacatgagaggactgaaaatagcgcttatagctaccagtgtgacttttgagacatgttaaaggacgtttatacgcgcgacccacccaccacgcatcgctcgtaccatccccaaccagtttacatatccgcttcctatccccaacggtatatatctcacctataatggctttcctccattaagtgcatacatcagcgagccgctgatatactttttttcgtcgactttcatccttatccaatctctctcaaaaactgctttccgattcaaatccccctttggtcaacttgtacgcgctttattgaagtatctcagaccagttaccgtttactcattagatgttgcatttatctagcagttcgttatatcggagttctgacaggaggaacgtcatcctcaatactgatcatacgaccggcatgcccagctccgttatcacagtacttacgactgcgctctggagaaacttacctttcagcccaacgtcgtgcctcaacgtttcagcagtcacgatggcgttgtcatcaagatacatccaaaggcagtatcgtttggctagcaagctgttttgggtctccacacttgccgagtaagccgtgttccaatttattccg

SEQ ID NO: 144 - DNA, 3416 bp, Cryptococcus neoformans
tacattcatgaagaggaattgaagggcacacgtctgcttccagcctttgtaatggatgaaataatgaggcccaaccgttcccagcagagtattcgattcatcccatacttcggcgagaattacctgaaaaccgacacttcagtatcgtccactagcgacacaagtttgaagacggtctgtcgctggatgcatgggatgcggctgaagggatgacttactcgagcctcgtaaagtaatgggccgtggtacgcaaggacgtactcatcaaccatgaattgcgggacagcgccggccatcttccacgatccttggcagcaatgaggataggctgagcgccgctgagggtatagcacgagatgagccagagctctatcagcacactctatccggtggagaagaggaaacggcatacagtcgatgctttgaggctagaagcgagaagctgtactttctgcagaggctcgacgactgtggggagagagaagatggaaggggcgtgggcaaagttctgcagtggagatgatgagcactgcgggcggaaatagctgtctccctaccttgctgatctctgcgtggcgggtccacggtgtgcactccaacattgttgtttgttcagcgggtaccagtctaatccctgcaaagtgggtccccaattaaattccgcattttccatcgcttcctcaataatacatccttatcccgtcgtcgctcttccttttcctgttccgtctcaaaaacactcgctttcgtttccatccatctctcagctatcccacactgtcgggacagaagacaagacggaaacaaggactctggctcattgcactcggttgaattgggacagcttagtgagttgccgcccttttacccttttgggacttgggtggcgaatggagcggataaggctgtcgataatcggaaagcgggagagcaagtaaactactaggaccacagatttgtgtttgcatggcatctggatcggatcgtcgttgcggtgctgatgcaccttggtttacggtttggagcagcctgcccggaaacatcatcgctgacacatgttttgcttgatctctttttttcgcttcgaccatatatctccatctttacagatcactgtatctcaatcgctcagataaattttatccggcatccgcgcgtccagtcctatattagccccaacaggccaactgaaggttgtttgaagctgctccacttgtttgaatcgaatatggttgctgtcgctggaccaaaggctcctggggtgggcatctcgtgaaacaaaagccgggttgacatattgctgatatcttaacctatagcccaggttcggtcagagtgtcgtgcccaatcttaacatcaaacaaatctgtccgaactgtaggaccgatcctcccaatattgttgaggagtatgccaagggtgatctagtgagtagaacgacagaaaaagcttcgtgaaggtggtctaacgcaggataggtttgtgccgactgtggaaccatcctaggtgaccgtatcgtcgatacgaggagcgaatgtaagtcagctttgatctttttctttttcatcttctgttttgtctcctactgactaactaacagggcgagtaagtataagccgcttgcagaatgtactcgcacgactaacttcattagacatttgcgggagacgagaatggggacgatccctcgcgtgtcggtgatgctggcaatcctcttctcggaagtaatcacctcgacacaatgatttctcacaaggacggtcgaaccggtatcgctcgagatctcaaccgcgcacaagcacgagccaacactctgtccaatggaatctatggtaaatcttctgtggcacaactatccgctgtcttctcccgtatcggagaaaagtgtgacgcgatgcagctccctcgcggtgtaagagaacgtgctcaacacgtttacaagattgtcgatgaggcgcgagcaatcaaggggaagaatgaacctgctgtcattgctgcctgcattgtttacgcttgcagagatgccaaggttcatcgtaccttccaagaagtatgcaaagccctcaaaatcagtaagaaggagctcggacaggtcttcaaccacgtcaagagtgttgttcagtcttccagtgctcagggttcgatggtgtctgtccacggatcaaacaatgcgcaagaatctgctgaaggtttattgggtcgttttgcaaactatctggatctgggcaacgccgtgttcaatgtgtctaagcatatcgcaggggaagccgttgcaaagagcgctatcgacggcaggagtcccgtgtcgatcgcagcaggtgtattgtacttcacatgtgtactgttggggaagagtaccaccgccaaggatatttctgcaatgggaggagtgtcagagtcaaccacgaagctgtgagtgcctttcggccttcatgtattgaggcacaagttgacccattatatagtatcaccaagatggtagcaagcaaacttgacgatgtcattcgccctgaatgggtaagtcatttgtactggtcagttttaccgtgctgcatgctcactgattatcatcagagaaccgagtatccggacggctatgccgcgcttgcccagctgggcaaagttagcgaatctaataagaactatcgaagtggcagtctcgccgcacagtcttgaaacttgtgtcaatgagttgctctcgggtccgtacatccaacggtgccatgcgtgtattatatacatctctgggtcacttagctgaaattggctgaagatttgattttaggcgtgcgagaatacgttttagcatgcactttctcactctttttcacgcgtttctgtaccaaaacctccaacgggcgttcgtcctgtttcccccatgattctctccctatatgtcttgctcccatcagttgctgttgtcagtgactaccagctctccccggcaaatgaataaactcactgcaactttggccggtattggcgacattccctctaacctctgatggcgcccgttgtcgtcaccatccggaagacagtcgcgagccttccaatgtacttcccctaatcacattccagatgaccaatatcctgctctcggtcatctaagargtgaatgccgtgcttcagcacggtttgatgatgaagacgaggttgataaacagttccggctcccgctacgacttgctccacctcctgtcgaatgtgccctccgtggtgaatatcttcctcgagaacatttcgaggccgaccggcaaattacatgacgctcgtattgaatgccgaagaaccaccccgcctttacgtacaacccgtcacagacgatgtggtgacatacttgctatcagatcggcaacaagaagaacctcggtgcggctgaaaacgaaaaagcctgaggctgagaaaaaacctgagta

SEQ ID NO: 145 - DNA, 3420 bp, Cryptococcus neoformans
gggaagactttgcttggacaggcgagctgccagcgacagaggttgaaggggtgcggagggtggaggctggggacgacttgagctgtgaagaccttggctgggacggtcttgggcctggcttgggtgcgccgaagaaggcagcgagggtggcctgcttagcgctgggcatgggtatgagcgcgatggaaaacgtgacgcgtcgtagacgccctgctaaaagaggagacttacggcttggaaggctccttggccatggtgcgtgaacgggagtagcggcgactaaatggaaggtttcggccgggagatggtgagacgataaagtagcgtgtagataatgattgtatggcagattgacgcgacgcaacttttaagcagaggggcggacacgtgctgaactggcagcgagaaatgtttcgacgtggaagaaacgtcggggcggggaggggaaggagggaaggaaggaaggaaggaaggagggaaggaaggaagaggagaacaagcgtgccagaagacagccgctgggcaagccatgcatgagaataccacctctgcagcccgacgcgtccctcctttgggcagcgctgggcaccaagcagacgcgtcgacatcatgactgcacaaacaccgcaggcgcacccgtcatttaacagttctttccggccgactctttatgccacatcatggtggagcccgccggccgacaatttctgattggctcaaaagctccgagaggatggaaaatgcaaaagtcacgtgacttttgcttttttgagcgtcggtgcctggtgtgccttgggaattaattttctgcacgcgacgcgatgttaactgacacgcttggttgacatcagctaagccctgacacggtccatcctccgccgtatataacctcctccgctctcctcatcttcttctcttcacattccactacactttgagtcttgcactttgcactcccactctactttcatacactctaccaacccttgatacatacacaatggctgccgtcgagaccccttccaaggttgctgcttctgcccttgcaaacattgacctcaacaccgccaagaaggcttccgagcccactctcctttccaagctccaagctgctgctcctaccaagcctgtcgtcgaggaggcccaggctgcccccgaggatgacgttgaggagtaccgtaagcgattcgtcggcgacctcgattgcgaggaaaaggacgagcccttgttgaaggagacgaatgcgaggtttgtcttgttccccatcaagtaccacgaggtgagtcttcaagcccttttacgcgttgacgcgtcgatggatgctaacattaggcgcagatctggcaaatgtacaagaaggctcaggcctctttctggactgctgaggagatcaaccttgcccctgatcttcacgactgggagaataagctcaacgacaatgagcgatactttattgagcacgtccttgccttcttcgctgctgtaagcatgttcttcttttacgcgtcgcgctgccactgactcgacgcttagtctgacggtatcgtcaacgagaaccttgttgagcgattctctgccgaggtccaggctgctgaggccaagtctttctacggtttccagatcatgatgtgagccagcttgttttcgttgccacgtacaacctcactgacatgacaacagggagaatatccacgccgagacctactctctccttatcgatacctatatcaaggacactgctcgacgaaacttcctctttgacgctattgacaccattccttgtatccgaaagaaggccgactgggctcttcgatggatctctgacaagcgatcttgtttcggtgagcgactcatcgctttcgctgccgtcgagggtatcttcttctctggttctttcgcctccatcttttggctcaagaagcgaggtctcatgcctggtctcaccttttctaatgagctcatctctcgtgacgagggtctccacaccgactttgcctgcctcctcttcacccatctccgaagacgccctcaccccgacactatcgccaggatcatcaaggaggccgtcaccattgagcaagagttcttgactggtgagtttgcccatgcagttgatttttgatcaccgctgactttttcatgtagacgctctccccgtatctcttatcggcatgaatgccaaactcatgtgccaatacattgagtttgttgccgaccgtcttcttgttgccatgggtaacgagaagatctggaactctaccaacccctttgactttatggagatgatctccctccaaggcaaggccaactttttcgagtctcgagtatctgcatactccaaatctggtgtcaaccaggccgtcggtgccgccgatcacaacgccatcaagaagggcttttctctcgacgaggacttctaaatgtgtggttgattggtttgggtatgctggacattggtgtattatttgagcttgattttaattttgttgtcacttttcaatttatagtaaagaagtcttgtaacactttgatgatctgagtcgtacggcgtggtgcgagcgagagcagtctggtgttttatagtatatagaatagcatggttgtggacgaaaagcattatgacatgcaagataatgacatgattcattataatgggcttataaagacgaggaataactagagactgaaaactgtatcagactgcgatcaatcagtaaagctattacaccaccggtgtaccgcaccatgtcggatctgcggctgatatggacttttgtgtggttgctctgtgtttcgaaattaatagtcagctgttcattgaagactcatattctcttacaatacataatcgacggtcgggttgatgtgcgggaagagttaatccttcaacggcagcttcttgctacggagaaggaagagcagttgagcaaaacttatatggaacattccgacctgcatgcaaggataaaaaatgcaacatcttagatgcccactcagcccataaagctactgccattgaataccatgcataatttctggtgtatcattttcaggctgacatggaaatcaaaaaaacatgctctggaaagagaagaaatgcctccacctcgccgggggatgtcgcctcctcgttccactttactggaatgaatgcttcaccaacaccacgtctctactcatccctagcactctaccaacatgtcagtcccccgcctgctcgtagttggagggaatggtttcctcggtgcgtatcgcgtataaacactttgggcaatgtcgtgcaaaactgacgtagctacttgcaggctctgccatctgtaaagctgccgtcggcaaaggctgggaagtcagctccatgaggtatggtattttcacgcatgtcgcatggcattttgatcttcttggcacttgtgactgact

SEQ ID NO: 146 - DNA, 3430 bp, Cryptococcus neoformans
gtaccgaacttgccatatttcatggttcagtgggattataaaggcgagaagggctacgggcatgtgattgaaggtatcaaagatagtggagcaggaggaggagaagacgaggaaggcgatgtgggtggagcaatgtccgagagcgagttcccaaggtaaatttgagtttgcaagcttatcagaattagtacattaacatggaaggctgactgggaaaaattagatactttgcccaagaagtcatcggcaacatcctggggctggaagctcgcaaatggagaagaccgaggaaaatggacgtggcgttgaataaagaaagggcacgaaagttggggacccttttccagccgtataattggactgtgggaaacggcgtttaaggacatgggaaggtttactagttcaaatcagcaccgaagacgcatatcgtctttcagtttgaaatcgaaaactagtttgtgctttgaagaaatgaagacaggcatagaaactggaaatttgcaaatgctccaagaagacgatcgtcatatatatgataccatatcatgctttcttcattttggagcggtaagagttattagtagcgagcgtcagcagcagcactactaaaattattgattgatccacgcctgctcgtgtgttgtgccaaattggttcaaagatgctgtagtgatatactgcagggaagacggacaaggaactaggcattcatgcgattcacagggccaacttgaacaaaatatggtggagaatcaacatgctgatgaagcaagaagaataaggagatggaaaagcatgaggagtgacggaagaccccatcaacggcagcaaataaacataaatagtactcgtagggaaaacgcgaggaaatcattcatattttatcgttactacgtacaaagtcaggatactattataccagctcattcatcagcaagtttctcttgtttgacataatctctttttatctgtataaccaccctccagttacagcaacagcatgtccgcccctgccacatctgaagctggaccttccagcaccaaccccccttccgtcgagggcaagaaacagcctgtcgtcatcctctgtattggcatggcgggatcggtgtgttttcgttctagcttttcctctttggtcccctccactaacagccttcattaaaatacagggcaaaacgaccctcatgcaacgacttaactcccacctccattccaagaatacccccccgtatattctcaatcttgaccctgccgtaacgcacatgccttactcagcgaacattgacatccgggatacggtcgattacaaagaagtcatgaagcagtacaagctcggccccaacggtggtatcttaacagcgttaaatctgtttaccacaaaatttgatcaggtattggggtatgtggagaagcgggcggagactgttgagtgagtgcatatgtcccaatcagttgagcctgtgaactgacagagacacagctatatccttgtggacaccccaggacagatcgaaatcttcacctggtccgcgtctggtgctatcataacggatgctattgcttcttctcttcccaccgtcgttgcctacattgtcgacacaccgcgaactgcgtcccccgttaccttcatgagtaacatgctttacgcttgttctatactttacaaaacgaaattaccattcatcatagtattcaacaaaatcgatgtgcaacctcatgagtttgccctggactggatgacagactttgaaaaatatcaagaagcgttaaacgataagagcagagacgagcatggggaaggaagttatgtgaacagcctaatgtcaagtatgaaccttgttctggaggagttctataacaatttgagggtaagccggatcagctaattgggctctgggaaagaactgatcagtttcaggcggtgggtgtgagcgcgatgaccggagagggtatgaaggcattttttagtgcggtagaagaggccagaaaggaatatgagacgtatgttgtattattgtttagctcttcgattggctaatatgatttagcgattacaaacctgaactagatcgtttggcagctgagcgggccgcacagaccgaagcagacaaaaaagctcagcttgagcgtcttatgcgggatatgaatatttcggactctcctcggtccggacctggtggtaacccctttggtcctcatgcccgtaatgaccgtgaagatcgatactatgatgacgagggcgaagcgagtgacatcgacgagcaggagcaagaagctatcaggagacaaatggaggaagaagaagaagatgcagaagcggaagaattgggcaagttggacgtagaagagccagagatcggaagcttggccggtggagctgctgctgctgctgcgagtcggggcgtaacatggcctgcgcccagatagatgcaatgtgtgtacaattagataggcatgtatgtgcataaaagcaacagtctagaacgatctaacttgataaatctctaggatgggtgatctatttagtcaagttcagccaagttcagctctggcaagacgtcaccgcaagtcttccagccctcccaacccatcgcaactttctcaagcttttcgccagccaccttcagatcatcgttgacaacgtaaacatcatatttgccctccttcgcgtacctcagctcctccttggcagcatcgagcctctttcggatggaggcgtcggtctcggtacctcgcccagacaaacgggatttaagttgagaaatggaaggcggagaaaggaagagaaacaccgkttcgaggggaggggtttgragcggggccttagcctttagctgaaggacaccttgcagttcaatgtcgagaatgcatcggcggggatgaagggcggtcaaggcagcaaatgtagttccgtaacttgaaggtcttttcagccaagctcatatgcattttgatggatctcacataccaattgcccccgaattcggcccactccaaaaattcgcccttgccgacaccctccataaactcttccttggtgacaaagtggtattctcggccattttcctccccgggcctaggctttcgagtagtatgagagacggaaaaaccaaaggtatcaggctggctctcaaaaagagtcttgaggagggtagattttccggtaccagaagggccgcaaatcacaagtggctgttgtgaatgtcagatcagtgcgaagaggattggaagctcaaatatgcgtacgcggttgacgacgtctggattgatgggcctcgacattgaggatgtatggcggatggctgtcctggagagtaggcgtagggaaaaaatggtggtgttccgttgcaaccttttgcaaagcagtatgccgctatatataggatgcctgaaaagaagatccgtttgaaaggatgcagtggccgac

SEQ ID NO: 147 - DNA, 3355 bp, Cryptococcus neoformans
ggctgcggccagagaaaggggcgatgaggagaagacagatggccaagatgagtttttcggcagcgattcttcagaagaggaggaggagcaacaacccaagcccaagtctaagcctaaatctcttgaacccaccrttccagatgaggacgatctcgctgctatcgtcggtaccaacgaacctgactcaaatttctctatgaaagatatcatcaaakccgagaaggaggctggtaagaagcgaaggaggagaaagggcaaaaagggagagcaagaaagagatgtcgaacttggtcccgatgactggaaaattgatgttaaggacgatcgattcaaggctttgcatgaagagccagaatttgctattgatcctagtaaccctcagtaagttgcgacgaaacttggaaagaatgaaactaactttgaaaaagcttcgtcaagacaaaggctatgcaggatctccttgcagaacggacccgtcgccgtaacaatcaaaagaaaattgagcccgaaggacgcaagtctgcaaccggtgttaagaatgttgagcagaaagagcaggatttggattctttggtggctagcgtgaagcggaagatggatcagaaccagcataaagcgaagagaaagaggacaaggaagtagttttgtacagccttgtttgtaatgtatatcagctttattaattcgctttcaccggcttgcagtatactggttcggcgctcacggctatattaagaatgaaatagccatggacggagcaagcttcattttatatagttgctcaacaataaatgaagcaaagggcgaatttatgggccgaaattctaaccagtgcccaatattttgagatgaaacctggagatgaaaaatattgggccaaagtatcctcatactgcaatcggagttcggttttctttcgaggtcttgagtcgcaacattttgattctttcgttgtgattgcatttctacatctctttcatctcttctctcacgactcaccatggccgccccctctgaaactaccatccaactatcgccagaagctgaggcccagtacgagagaatcaccagaaatctccaagaagtaactagcggggaggttatcaggaaggtcttaagcgaagggaaggtcgtcaaagcttactggggcactgctcctactggcaggcgtgagtttaaagctgtaggcgtataacaatgagattatgctgatatatgcagcccacatcgcctattgcgtcccgttgctcaagatcgccgactttttgacagccggtgtcaatgtcaaggttttgcttgctggtgagttgattgttatgatagatgttgcattgatcgattattgatgctctttttatagatgtacgtccgatgttaccatattcgttaccgtcacttctgacctatgtcgcagctccacgctttcctcgacgcctctaaatctacactcgaaaccgtccagtaccgagtcaagtactactcaaagcttctcataaccgtcttcactgtcctcggtgtgcctaccgacaagcttgaattcatcacgggttccagctaccagcttaagcctgactatactctcgacgtctatcgattccacgccttgacttccaccagagaagccgagcacgccggtgccgatgttgtcaaggagtcagagtcccctcttatgagcagcttgctctaccctggtcttcaggctttggacgaacagtacctggatgttgatttccagttcggtggtgtagaccagcgaaagatcttcatgtatgccgctactttccttcccaagttaggctactccaagcgtgcccacctcatgaacgccatggttcctggattgtccggtggaaagatgtctgcttccgacccaaaatccaagatcgacttcctcgacactgctgccgacataaaaagcaagatcaaggctgctctctgtccccctggagaggttgagaacaatggtgtcatcgcatttatcaagactgtgctcattcccatccaagctctcaggattgaacaggccgaacgaaggggtgagaaggctcccgttggtgaaggaagctttgttaagcctggcgctcctgagggtaccattttctccatctcccgacccgagaagtttggtggtgacattcacttcaagagttacgaggagctcgagaaggcatacgttgctggtgatattcaccctggagacttaaaaactggtgttcaggaggctctgattcaattcttgggtccgattaggaagtctttcgacgaagacaaagagtggcaggaggtcgagaggacggcttatcccagctcttctgttgcccccactgccgaggagcccaagaaggcggtgagtaacaagatagtcactctcgtgagagcctactgacatacagcgcagaagaagaaggatgtcaggtccaagccccctaccgaggaagagcgcgcggctctccgagctgcaaaggagaaggagaaggctgctaaggccgctgctaaggccgtcaatgaaggcactgcccctcctgttccccctattgaggacatcactgcttcccaacttgcccaaagctccaaggatgctgtccagatcaccacaagcaatgcaaccagcagctgcgtcaccagtaccaacttgtccaagttaaagcttttggccaagggtaaggtcagggacatctacgctttgcctggtaaggaagacgaagacaagctcctgtttgttgctaccgacagaatgagcgctttcgacgtcatcatgaacaatgtgggtgtatcgttttagcattttgtatgggttgacttatgtagtatacagggtatcccttcaaaaggtatcactcttaccacactctctctcttctggtttgacaagctcaagaacatcattcccaaccacgtcctccacccctctccttcggcatgcttctctacccctgcccaggcttgggagcaattccccaggagcttggacgagtacagagatcaacttgaaggtcgaagcatgatagtgaagaaatgtgaggttgtgaagatcgaggctatcgtcagaggctacattactggtatgtctacagcttcattcatattacacgtaaagctaacatcatataggatctgcttggtccgagtacaagaagtctcagaccatccacggtatccagatgcctgccggtttggtcgagtctcaaaagctccccaaggcacttttcaccccttccaccaaggccgatcagggcgagcatgatgagaacattcaccctgacaagggtaagtttgaatgttgcaggtagtttcgggtcaatgctgactctggtgtagtcaaggacatttgcggtcccgagctcgccgcgaagat

SEQ ID NO: 148 - DNA, 3025 bp, Cryptococcus neoformans
ggtcgcaagcccacccttcaacgtctccatattcattcttgagcagtacgactttgtactctttcggtagttgctggataagcgaaaggatagttgtggtcttgccctgctccatctggtcagctcagcgctctttgctttgaacgcaaaatccggacatacagctcctgtgggcaagttaggttttgtcctctcacttttcccccgtcacttaccaagaaatccagtaaaacaggtcacaggaatagcctcatccttctcaagcgtcatgtttgctgtggttatggatactgaagagaagtaaaagcgagatttatcaacatcagaagattcgttatcaccaaaaaaaaaaaaagcccaaaaagttccacatcatcacgttcagcagcagtcgataacggcggaatctcgaaccaaaagatcctcaacttgacttgtgcacgaaacaatatctctaaaaatgcttcggctccaatccctgggttccctcccggcccatgccgaaccagcttggacagtatctttcaaccctacccgctctctcctcgcatcatgctccacagatcgcacaatccgtctttactcctacattataccctcttcctccgatggtttaccaagccaggacgattcccaggccgtgtttagtcttgctaaggttatagaaacggaccacaagaggactgtgaggagtatagcgtggtcccctgatggacgaacattggcaagtgggagctttgattcgaccgtcggtgtgtgggaggaggttattccgctttcggatgacgaagaagaagaggatgagggtgcacaaggggtgtataaaccggctggagtggactcggatggagatggggatggggggaaagagaaggagtgggaatgcgtgacgacgttggaagggcatgagagtgaatgcaaatcggttgggttttcgagtgatggggctctgctcgcgagttgctccagagataaaagtgtatgggtgtgggaaggtaagtccaatgaagtttaatgattatgaatggttctaatgcttgatttgtttatatatttttttcggtatagtccaaccggacgccgattttgaatgtatcgcggtcatgatggagcactctcaggacgtcaagtccatcgcctggcacccacacgaagaggtttgttcattttcgtttatacctttcccttcatctatttctcaggcatttattacctcttgagacaacaattgctaacgttgaattgcgatacagatcctggcttctgcgtcatacgactcttacatccacctcgcttacgacgaccccgattctgactggtgcatcttccaaaaactccatccctctctcccttctactccactcaccatcccatccacttccccgtcacatttaattgatgcgttggttcctacggaagaagagaagaaggcagaggcggagttgcaagtcccgccgttggaggaggatgagactgtttggtgtttagcttggagtcccgacgggaggtggttggctagtggaggtgataatggtggaatccgtctttggcaaagaacgtatgtctttgtatcgtacacatttcgagaccagatgccggtagtgactgactgtaacctattgcaatcacagaggctcacaaccagactcggcgttcaaagagatcttacacaccgccgctcactcgcgttcagtcttttctctttcttggtccccaccctatccatccgccgagtctgccggctccaccgactctactgatttagggatgctcgcttctgcgggggaggatggtaagattatcatctggcaaatcaccgtccctccatctccttcttccgcttcacaagaaatagataatgaacaaatctcgatcagaccgattgccgcccagaaagatgcgcacggcgtgaacgatatcaactcggtagcgtggtgtgtgagagaagataaaaagggatgggggatgttgagtagtgcgggggatgatgggagtgtcaaggtttggagggtcgtcagggattaaggatgtcaagaaatgtttttattttttgattttttacttctttttccatcacatttctatgatctgctatatgctattgaatatttatccttcaacaaatgtgaatcctttcacatctacacctacatctccaacaactcgccggacttctagtgcatttttgagtttgaactccactctgaatccgtcttctcctgcttcttccaaatatgctctcactctttttgcttgctcatacggggttcctggttgagatagatgtgaaaagttgatgacgacttttttggctggtggtggatactttccctcttcctcatcttccccatcgaacaccggtatatacaccccttccacttctctgggaggtatgaccaactccaaggtatctaattcccattccccagcaagttcgtatattgcttcttttaaaaacctttttacacctcctttycatccttcaccatctcctgctccccctcccttttccgctccgactctggttgctcgtgagcggcaccgggcatccccaagatggatgataaggtgcctaacgttcaatgggatacaacaaatgggcacagggtcgaagattgggtagggggagtgcgagtcggcgaggtagtacattaggtcccagccgatttccagggtatggacattgcctagtggccaggagtttgcgggtgttatctgtggcggatacgaagaagatgaagataaagaagaatgaaaagtttcgagaataggtgaaagatcaaggactttgacgtgcgctgcacagaggatggagagagccatagggtcgagtaaggtgatgtgggtcgtataacctagagcaactgattttctccctcttgaaaattggtgggtaggggatgttattggcggaagttgccattcgggagcagggaggtgtgggaatgatgggagtcttttgcgtttcccccctacacctcttcctccctgttcccaactaggaggggctgtcaagaagccatag

SEQ ID NO: 149 - DNA, 3544 bp, Cryptococcus neoformans
tcttacgttgtataaccgcttgtacctcaaacgccgtggcctttcccaattcccactcccgactttcgactaccaatctatcagcattccatcaaggaattcaaacgagcaacctggaccgaactgggatccatcgcgacgtcgatctaatcgatcaggaggttatggccatgttcgggccgagggacatgatggggaagaaaggtttgcggcgaggtatagtttggaggaagaacgcgattgaaggcgcaagcaaggactttttcttggccgcctcctgatcaggcgcgctgattataatagctacagttaggcatatatgtacccctaaatactcggttgtctgttcaagtaatatataacaagcatcgcccgaaatgtattgtatgatcctatttattatggatgcggagaatgggtttctttggttttgattggtggtctacattcgtacaatctgatgctgcgaagccatggccctgcttcttttgtatgcacaatgcaattatgcatacaggaagaacttgaaaagtcgtcgacgacggaaatgaaatgatacaacacgcgccaggcaagtgccacacacggagtttttcccgttcttgcgtggtcatctccgcattatcattcgtcgtccacgcctctcgcccaacagccaaccaccatctctccaatctcgcaacccttcttccttctctcctttaacaccaaaaggtcaccaccaaaatgcttagaaacctccggcctctcctccgcaccgtcccagccccatctygatcagtcctcaggccgctttccaccacgtcaaaagcatttgccacggctcagtcatcgcccgtccgggcgcactctgtagaggagtgagttcttgcatcgacaagggcattagcggcaataatgatgagaaggaacaaatgctgatgtcaatcacgaactcaggctccatgctttaactgcggaagagatcttgaaggaagggggagtgagaaaagaggcggaaatgagacactttacaggttcgtgtgcctcgcgtacagtacctcccatctagataatcagctcaactctttcacgtctcgccgggtgttgtatagtcaactttggtccccaacatcctgccgcgcacggtgtgcttcgacttatcctcgaacttaacggtgaagtacgcatgttttacgacaagcttgaagttttggtctgattgcgttgggaattaggaaatcctccgtgccgacccacatattggtcttcttcaccgaggtactgaaaagctcatcgagtacaagaactatacacaggctttaccctactttgatcgactggactatgtttctatgagtgtgtattgggaaaaaaagagaaaggcgagggaacaaaactgattatgccgctacagtgaccaacgagttgtcttactccattgctgtcgagagattgcttaatattgaagtgccggagcgagccaagtggattagaacattgtttggagaaatcacccgtgttcttaaccatcttatggccgtcctcacgtgagtatcctttcttgcctgcctttttgccctgtacctgacgggctgtatacagccacgcgatggatgttggtgctcttactcccttcttgtggggtttcgaagagcgtgaaaagctcatggaattttacgaacgagtatccggagctcgtatgcacgcggcctacgtccgacctggtggcgttgctttcgacctcccgcacggcttgctcgacgatatcttcaagtgggctacacaattctcctctcgagtagatgaagttgaggaggttgttaccgggaaccgaatctggaagcagagaacgattggtattggacctgtaactgctcaacaagcgttggactacagcttttccggtgttatgcttagaggtagtggtattccttgggatatccgaaaggtggctccttatgatgcgtacgacaaggtggagtttgacgttcctgttggcaagaacggtgactgctgtgagtgttttgttcttgttatttttagtaaaaagaagaagaagaagaaactgaccatgcattttagatgaccgatatctctgccgagtgcaagaattccgagagtcccttcgaatcattggacaatgtcttaacaagatccccgacggtgcttacaaggttgacgaccacaagattgtccctccccctcgagcttccatgaaggaaagcatggagagtcttatccaccatttcaaggtaagccatcatccagtctcagggtgcggtatatgatctatggctaatctattcatctcctttttagattttctctgaaggttactctgtccctccaggagaaacatacgccgctatcgaagcccccaagggtgagatgggtgtctacctcgtttccgacggtaccaaccgcccttacaaatgcaagatccgagcacccggtttcgcccacttggccggagcggactttatgatgaggcaccacttcttgccggatgcggtcgctatcattggtactatggatttggtgttcggagaggttgacaggtagtttggtgggtggagacgtaatgggagacgggcgttgtatgatagaggatgcattttttattcattaggtcatatttgttttccttgttatggttgatgatgcgtgtagcgagcatatagagtatccaaatgatgcatgcaagcggacaagcataaatttcaattgtatatagcgggtaaatgtactgtacaacaaaagtctcaagaccgaagttaaacaaaggcgtgcacaaagacattcacgcttgtaaaagatgcatcgttcgcataataagacaccgccgataatcgtcgtaaaaaaaattacataaagctaaagatatgtcggtcttccaaacaccccctcacaaccccgccaaacgtcatcgcaccacatgctcaaaagccaggcgcctcatattcagctaaaggaaggataatagggatgccaaactgtttggttatcacagggagagacacagaggacccttgggcccccctcttttcgttattggagacgggaacgcgagaccctccatcgggagtaaggtagggaatcgaacttttatgtcctgcaagaagatgaaggtcagcaacggttaatggggaaaagtaaggttgtacactcactccgtaaaattgttcaaagaaaaaagaaaaagaaggagagaactcgagaaatttatagtaggacgacgaacgggcgagactggtttggcggatccgtagtgatgtggcattagtatgttacgtaaccggacaaaaaagacgcgttattactaaccaccgccggcctttggttattaattatccttgctgcgattgagcacctgtccgggtttatcttcgcgagctttatctgggtattctttggctaacacttcacatctttcggcccagcaaaattagtcgatcaatgtctacttctaggccacgcatagactctctcaggagctcatccaccatagaccactcggtctggggagcaagagcaccctctccctcggtaagtccgttcgttc

SEQ ID NO: 150 - DNA, 3474 bp, Cryptococcus neoformans
tcgtgttacaatatctgaacatgcacaacaggtcctcctcccgctggacgtcctcaagatcaagatgcagaccaacccggattctatccgcggacgtggtttgctcaagcttgtgacggacgagggtatcgggtccttgtaccgaggatggggatggactatggcgaggaacgcgccgggctcgtttgccgtgagtcatgtctcgtatcgtctccccttggacggccacaagctgatgagatacggcagttgtttggtgggtctgctgtgaccaaggagttcttgttcaagctttccgactactcttccgccacctggactcagagtatgtcctggttcgttcgtgttgtatcaaagctaagcggaacgctggatagactttgtggcttccatcgccggtgcggtcgcgtccatcaccgtcgctgcgcctctcgacgtcgtcaagacccgtatccagaacgccaactttggatccagcgtcggcggtgccaccattatcaaggagatgatcaagcaggagggtatgggcgcgttcttcaagggactgactcccaaggtgagtttaatcgtttttttttttttttcccatgcatcgcagtcgatgaaatgtgcatattgcatatactgaactatgcatcagatcctcgtcgtcggccccaagctcgtgttctcgtacacgctcgcgcagagcctgatccccttcttcggcaaatatggtgagtgtcgtccatggctggcggggatagaggggtgcttacgagggcccggcagtgtaaaaccggattcccgggtgctcgtgatagaatgggtaattgtcgtgagaatatatagcagtggctgcgctgtgccgtggctgtttgcatgcatgaatgttatagacgcctctccattaccgcaatacataaaataccccagttccctgtgcgtggacccttgatccgccctctcgtacgagcaactctcccccccacgccgcgctttttcagtaaataaacaaaacatgcacacctctctccgtcttttatcacaaaacatcaaacaagcccgcataatggttcgtgcccctcttcgcctgccgctgggccacactgacattggcgcccacaggccaaccccgtgtacatcgtctccgcctcccgaacccccgtcggcgcaaaggacggcgccctcgccaccgtctccgccccgcaactcggtgtcgtcgccgtcaagcacgccgtcgagagggccggtatcaagccagagcgcgtcgaggagctttacatgggcaacgtcgtccaggctggtgttgggcagtcgcccgccaggcaggtcggtatcggtgcagggtgcgtctgaaaaagaaaactggaaaaagaaaaaactggaaaagaggtgctgacaacagatgcactatagtatccccgagactgcagatgccaccaccatcaacaaggtctgtgccagtggtatgaaggccattatgcttgccgcccaaaacatccagcttggccagaggggtgtcatggtcgccggtggtatggagagcatgtcccaggctccgtacgtttttcgcaaatgtatcgcagacaaaacgagccccaggctgactttgtaacaaacagcttccttgtcccccgtcagacacccgcgttcggccactttgagaccaaggactctctcgtcgtcgacggtctctttgacgtgtacaacaagttccccatgggcaactgtgccgaacacaccgccgccaagctcaagatcacccgtgaagaccaggacgacttttgtctctcgtcctacacccgcgcccaagaagcgtgggccgccgacgcgtttgccgatgagattgcgcccgtcaccgtcaagggccgaaagggagatgtcgtggtcaaggaggacgaggagtacaagaagcttttgaaggacaagtttaggaccatcagaccggtctttgtcaaggagaacgggaccgttaccgctgccaacgcgtccaccctcaacgacggtgcttccgccgtcgtcttggcttctggcgaggttgtggagaaggaaggcttgaagcctcttgccaagattctcggtatgtctccattcttcttcgttgttatacccattattaacacctgatctgcaaaaaaggcttcgccgacgccgcttgtgctcccatcgacttccccaccgcccctaccctcgccgtaccccttgctctcaagaatgccggtgtgaccaaggacgagatcgccctctgggaattcaacgaggccttttccgtggtgggcgtcgcggctgaaagggtgctcggtttggacaggtccaaggtcaacgtcaagggcggtgccgtcgccctcggtcacgtacgtcctttttcttatactctccctcccccttctttcaacaaactggccggcggaggtgacggagccgctgggttgggccctgtaccagagtttgatcgtgaatcaggtactatagcaatggtcggaatatcataacttggggaatgagattgttgagattctccgccgcgactcatgacgctgtgtatgttctcttggggcgtctgacttccaacaggcgaactaggtctacgaggtccgggaggtctagccgggcggaaggcatcgggtggcggcggacgcgagggtgcaggtcggcgctcacgttccgccagtgcggggtttgaggccgatcgaggctgagcggttaactgagttgatgagagttgagagagttgggaagacacgggtggagaggcagacgaagtagatgttcccgatcgagcagaaaaacgagggtctgaaggataatcttctgatggtcttcgttggtcagggataccaaccggttgcgaatgcgccacagaggcttgggaaccatcgcctactgtcgaagtcgtccctgccaaagaagagcttgactcgtattgcctgttcctttcctgtaatctcttgtactgcatttgcttctgctttaacccttgcagcaaatattgaataatgttgcggatttcagggaggaatctatcgagactatccggggaaggatcttgggagagacaatgctccaggcagttgcgcagatcttgaggaatcgagctgagctctctgtggcaattgtcagattcgcagatgggagactttagctattacgcaccttgtatctatacccactcggctgaaggcttgcacgcaagtctcaaatccattgcccaaacgcacataaatatcgctcacctgaaaacacaatcagatatgggtatttatagccaagaacaataaacgcacatcgatttcggaaatcaagccatgcgaccattggtcaagaccttgcaaaagttgtttcgtggtcacgagcagccttgttatggaagagtcaagcgcactagggtactgaatcgcagccatcagcctttgccgaaccggaaccatgcttcaacacttacagatcttgacccactggtctgtcttccatggcgttgagtaaatcccgaag

SEQ ID NO: 151 - DNA, 3712 bp, Cryptococcus neoformans
agaggccggtgggtacagctgaaacctatgaatgggacactacgccgtttactatgcgagcgggcggattgatggtttctttctttggcgaattgtaaccttctgctctctcggccctctcagcatctctcatcggcgcgatatctcgaacatttgtgtccattgcatgatccatgaatgtggtggaagtgcgatatgctgtaagacttggtaacgtactttccaataatattattatgtaaaaagagcgtacgcggttcgtaggcgatggggcggcggcgtagtacggagtagaagggtgtgacatgtaataacatagaccatatagattactactcattgcaagtcatcatggaaacatttgcgaagactgacatgtgaggggaatacatcgattggcatgagacttgaatcacaaaaaatgagtctttccatcttcatctagaaacaagatgaagtgatgagtgtcacaagcgaacaagcaaatgattaaagacgagatattcccggcaggttggtcgtcgtcaaccgggatcgatccgtcgttaattgagagctgatgactaactgctttgcgcttgccggaaccttccttcttcgctttccgttgggatagtcgggggttaaacctcatgggatcttgatccatccaggcaacatggtgttacttgacttccttcttttcactctattaccgccaaaagcgcgcactcattgccctgcgctcgaagcactgcgaatttttgatgttcaagctgttttgtttgttcgaaatcttgcgccacatgctggagcagtgattgagttcagagctaaggaaaagacaaggattttgttgcctttgcggccccactgatcttcaacatttattcaaccaagccaaaacgtctaacgtgtgacgaccgcctatggccgcaacagtgcactatgaggatagaaggtcgagccgaaagctttttccgaccaggggaggttgccggccgtcataatagtaacaagtatgagtaaggccaagtagggtgtagtttatttctgttcacctgtcttctgcagcggatgttgatcatcataaaggcgagaatgtagcaaagggcaggggcttcctacagcatggttatatcagaatgaataaggattggttatatacgccaaaggcaaaaatcatttgcaggaagggataggagagatgggataagaaagtgccacatcagttattttccgcagaattccgcatttcttcgagatttcgatttcaccaaggacaataagaaacgtcaagaaacgccccttcgcgacttgtaaacacattatttgacccaaagcttacaaaatggccgactcaaagcagtgagttaatattctttcgttgacggagtatgaacaaacaaattttgctgcttggaaacacgtatactaacgagaaaccgcccatacagatccaaccgcgactgggctgccgatgatgtggatggtgcgttcctttccagctttcaaagtctgcctgcctcttacaaaaatgattgattagccgatgagcttcccccaactaccgaatctaccgatgccaacggtatcacaactatagttagctggaagtacaacgcggatgatcaaaaggtcaaggtgaccaggagagtgaggagacggttgcaggtctccactgtgactcagacaatggcggagaggaagcaatggccaaagtgggtgtttatatggaaggtataggaacattaattcttaatttggacattgcagattcggtctcgacaaaggaaagcctcctggacccgacagaaagactaccattatcggagagaaccttcatttcaagatcgcccccatcagcaaggtatgtgccgtaagcgtgataatgattttggtctgaccatgccgtagatccaacgtgttgaacctgaacctgaaacagctgtcaaggctcccaccggaaaggcggttgtctgtcgactctgtagtggtcaacattacactgcgagatgtcctttcagggaacagcttgctgctatcgacaatctcaatgcagacggagcagaggaagagcaggttgttgtttctggaactctggccgccaagggtgctggtgagacaggtggcaaatatgtccctccgtgagtagtgtgaaggctggcccagtagtattttgtcttatgctgtgatagatctcaacgcgcaggggccactggtgctggcgactcaatgttccgagctcgagacgagcttcctacccttcgtgtcacctccctttccatcgatgccgaagaagacgatcttcgggctttgttccaacctttcgccaagaatggcaagcttggaagggccaatatcgtcagggatcgaaacacgagggtcagcaagggtttggcgttcgtcagtttcgagagcaagagagatgcagaggcggctatggctcacttgaatggccgcggtaagtacaggttttcccatcagctaattgcttgtgccggtaaaactgattatacattacccaggttacgattcattgatcttggaggtcgcctggtcacagcctcgaggagaacgaacgtagttgtagtatataggagtgtgttgatgcggcttaaaagcggcgagcggtgttatgccgccttgtatatgcagcccgatacccatacgaaaatactgtcatcgtttattgaatcaataaagaaggaagagcatggacatgcggcctgaaaggcgagttcaggcgatgactaatgctgtttatgactggatgaaccggcgtgttctgagagactactgccatgctggctgggagtgatattggttggaggccccaggttcacgcgttctggcgtagtggataataggactaaagacggtgggaggcaatctcgttccgaccgttaccttacgtaacaaatgaaacaagtggccagaagacgaatgaagttcagagaatcgtttacggcggtcgacagcaaatcaacaggttcacttccaatagtctttacaacaactagctaggctttgttgacctttacaaagcattggaaagcaatatgttcaagaagtacgtccagacgtcgcgcagcccatctttataaactaacacttgttttgtatcagatttaaccccaaggaagatgtctcttcctctacttccctcaagtcttctgtccagcgtaatattagatcatccattctctcacaaataacatacttgtctctcccagcttggaaggatcagtctgccgctacagaggcttccatagaacacgccgagcctgcggctgaggaaaaggagaaagaggaaccaacttctgggaagggcaaaggtgggaagaaaggcggcaagggaaagggggggaagggaaaaggaaaggataaggaagaaaaggaggaaaaggaagatgacggtgagggtgcgggtgtcgagagtgtgcttgacgagttttggccgaagaaggaagctctaggattgactaaatggtgagttgttacaaaaggcatgttgcccttcagccgaaagatactgatacatatgctctagccacgatcgaatatcaatcttcaccatccactcagtgcccatcttcttccagcacttcgatggcccttttatcccgactttaaagcttttacataagtgtatgtctcttcccatcacctccataaatttactgacgaacactgctttcgaaagatcctgacatgcttcctcgtgttcaaa

SEQ ID NO: 152 - DNA, 3438 bp, Cryptococcus neoformans
tatgtcccgagtcaaaggctatacagtgtcaggacgggagtcgaaccagtgctgtgcggagactcactgaaagcgtctgtcttgacggcgagggtgcggcgttgctggaggacgtggaggacctcctgtgtgatggtctcacgggcggggaaggggcggaggacggagtgaagccagtctctggtgagactgagcgaggacatcgggggcgggccgtgggatcaggcgggggcggctgcaggcgagctgcgagtcagaataccattacccacacagagaacccctcgctcttcgtggtggaggtctcatgcgtattacgtaactaccagacaccctcgacggacattggccgacctccgaccaggctggaaagccctgcaactcttgcatggtgctgattcgcctctgtattatataattaaggcaacagctgcacgtatttgtataaaagtctgcatatgcatcagccagttcatgcgacggcttgcagcaggagtttactacgctattactccatggccacttccaaaatagccacccaagtagtgaaacatctatcaaaccctagcaatgcatatacccatgccaactgtcaaggatcgaggagcgcggaaattgtcgatacgagcggtcgagcggtttagcgggaggagtccactaaattacggtttttgtacagcataataataagaaggcgctgccgtttcggttcatgatgcatcctaagcaggcctgtacgctcaggctggctgcagtatcgacggacacggtcattccgacaaaaagatcacggaggccaatcaaggaggagacatatcccaccactatgcatcgtatgatgtcgtcgtgtaaaattggcgcgtttggattggtcggagagacatgcgccactaatttccttgtcgggtgaaaatggagcaagggtcgctttaaaaaccagtgttttgcggcgacccctttctcttttcctcatcacctcaaattatccaaaccctcagccatgtcttgccccttccacaccaccacaaacacctccaaccgcagtcccttgccagaccgtgcacttctcctcgcaatgaagtcccagacaaacactttcattctcggcacgcgcaagtcaaacctcgccctcgtacaaacaggtcacgtcgcagacgatcttcgacgtctccattccggcgcaggcagcaaattcggcgagactagagaggaaggtgacgatgccgaacaaggtgatgtgccttttgtgcatccctacactttctccattgagtctatgaccactgttggtgaccgaaaccagactaccccactccacctcctctccccttactcctctacccagcccgcaaaatccttatggactgatgagctcgaagctcgactcatcaacggtcactttgacatgctcgtgcactccctcaaggatgtgcctaccgttctcaaggacggatgcgaaattggatgtatggctaagaggcatgatcctcgcgatgctttggtagtcaagcagggattaccgtacaaaagactggaagatttgcccgacggagctgttgtcggtacaggtagtgtgaggagagtagcgcaattaaagagggctttccccaatctcgtttttgaggatatggtaaattttgtttttgctaaaaaaataccttttatgccatgcttactgccgatatgcagcgcggaaacctcaacacgcgattcaacaaactggacaacccccaatcgccattttctgctcttattctcgccatgtctggcctcgaacgtttaggtatggcccatcgtgccacgtcgcccctttcctctccaaccctcatgcacgctgtcggtcaaggtgctcttgccatcgaaattcgatccaccgaccctcgcgttcgaaactgtttaaggggattaggccattggcaaactgaatggtcttgcggtgccgagagaggttgcttgagggttttggaaggaggctgctctgtcccggtcggtgtagagtctgagctcgtcgagcttgacgaggacgaggttgctgcgcatcccgaactacttgagggtgtggaggatcctttcaagggccaagaagagattcctcttgaaggagactcacctatgctgtggttctctggtcttgtagacactactccgccccctactccatccacgcccactttttcatctcactctctccctccactttgaacacgcctagcgaagctcactctccattcttgtgtcacctctactgatggatccaaacatgtcctttttacccctcctcctgtccttgtacgatcataccgtcaagcagagcagttcggtgaagaatgtgctcggagattgagagggatgggtgcaggggaaatcttggatgagatcaacaagctcaggaaggagcgagagttgagggacttggaaagcgctatcgagagaagtagagcggcgcaagaggagagtgagaagatggggttggttcaggatggcacagccgaagttgttgcctaataaaagcgtcttggattacaagcgggtttaacgtgtatggtttattgttgattttgtgtgtattattctcgattttcactttttgggcgggcatgggcttgggttctagcatatactcatacatagtttggttctactggcatgtatactggcaaactcataaactggatgtaatggccattaaaacccgtcgtctgctcgacaacctctgccctctatcgtaccagtactgtggtgtgtccgacgcgggagcggaatcaaaagcacgtgcgatgacgctgcatcatgttgcccccgcagatgactacttattactgcttgagatctttcgctcttttgaccataagaagaaccggcacggggaacatccataaccattacgtgctgttcaattccttctagatctttacaagtttgtccctcttcggatacgccacgtttccgctccctatatataaggacacaacatcacctttaattcccttcaatcgccagctgagcgtgacctgttcagccgttcacgatgcaggcgctcaagaatgccgctcttggcttactgaacgtctacgtgtcaccatatgtggaaaatctgaatgctcaagacctatctctatcgctcttcagtggtaagtcgtatcatttacggcctcagagcgtaagatctcagtcgctgaactgaattccgatcaggtaatcttcagttccacggattgcatctcaagaaatcattgttggaaaggtttggtctgccagtagaaattgtggcaggcgacattggtacactgtcgatctcaattccatggaccgccctcaaaactcagcccgtcaagatagtcatcgatgacatctacgtgttggcgcgagcacgaccgccaggaaaggtggatccagaagaagacgagagagtggaacaagcaacgaagcaagaaaaac

SEQ ID NO: 153 - DNA, 2718 bp, Cryptococcus neoformans
ccggagtattccatcaatacatccccaaggtcttggaaaagatttgggttccccttcgcgactcaagatctgtcgttcgagaacgtgcgagcatgctcttatctacctgccttgacactctcaaaacccgaggagaccgaccatcaaccgacacctaccgcaagatctttgaagaggcccgtcttggtctcctcaaagccagctcaacagagtctatcttgggttctctccttgctttcaattccatgcttcaaaatcaacagctttcgatggcggaatattatcgctccatttgcgaactaaccttcaaataccgtgattcgaaggaagtttccatcaggaaggctgtcatcgccctcataccttctatggcgacatatgatagcgacgactttgaggcacattatttgcataggagtatggcgtatttgctacaagcgttgaacaggccggcggacagggacatttgtgggtctacagtatttgcaagagaatatgtactgattttcgctttagcgtatgtggcattgggtcatatggccgtacattcttggatcgaaaatgaaaccttttattgacgacattatgcggatcattcgagatcatctacgcatgcgagggtgtgtcatcttttgcctgatttattgcccctagctgacaataacattgtagcaaaaaaaatgctccatacgaagcccccatcttccagtgtcttgcgatgctcgctacctctgtcggccctatgcttacccgccagatgcacgaaatcctcaacctgatgttcccctggggcctttcggaacccttatgtacagcccttcaagccactgcctcacatatccctcctctattgaggactatccaagataggttgttggagatgctttcacagactttgaccggacacagctatagaccgttaggtgcgcctgccccaagaggtggagcgcagatggatcttaaccttttgcaagtgagtacatctcgtctcgtttgatcaatgggagagggcttcttttctgatatggccacagtctacaaccaatgcccagtcagcagacaccctaaaacttgctcttcgtctccttctgttcatctctttgggcacgaaatagtcctcgacgtgtccatcccggcgcttatcctctccaccgtcggagctgctttcctactccgatacactctctccatcttcaggcttttccttgagcttactgtcttgccaggaaaggacgtgagtgcatttcatattcaatgtacaacatatatggtccaagggagactaatacctgacatcttctttctcataatttagatcaaatcgttccagtctcgaaagggagagacatgggctgtggttaccgggtgtacttcaggtatcggcctcgaatttgctcgacagcttgccgccaaaaagttcaatattatccttgtcggtcgaaggcagtctgctcttactgatctttccaaggaaatcggtatgtcacacgttccattttgcctcgactcaaataaacgaatgtccaatgaccggctgtttgctgattacgacgtggatgatcagagagcaagtacgatgttcacaccaaatctgttactgtggacgtttctacccctggtagtgctcgagacgacgcgctcactcagcttgagcttttggcccaaaaccttgacgtgggtattctcagtgagtcctttggatctttccccggccacaaatagatcttttgaggctcacgtttgtggacatacagttaacaatgtcggtgcatcacacagcatgcctgtagctttccacgagactgagcgttccgaaatgagccgtatcatcgagaccgtaggtcctcccttgctccatcttctctctcctgtttcccacataagagcggccaactgataacttcttccccaaaatttccacagaacgtcacctggacctatctcgtcactcgctccatcctcccatcaatggtcgcccgctccaagcaaaaaggcgctcccaaatccctcgtcattactatcggttccctctccggacgcatcccctctccgctccttgcgagctattctgggacaaaggctgctttggctacttggacaaaggcattggcggaggaggtcaagcctcagggtgtgatcgttgagcttgttcaggctgctttcgttgtaagcccctcttatcaaaccaaatgccggccagagctaaaaccctccaaaaaggtatccaacatgtccaaaattcgtaaatcttcacccttcgtccctacccctgcgccttttgttcgctcaactctcaactctatcggccttccgcgcggtgcccaaggccgtccgcatgagcgcacacccttttggtctcatgctattttggactatgtcgttgggtttgcaggctatgtgagtgagatggcagggatcaaggtcatcctcgggatgcacaaggatattaggaagagagctttgaagaaggctgctagagatgagaagaaagcggagtaaaaagagtgaataaagcgagataggcatatgtggttaatgcctggtaggtgagagtggaaatgcagctataacttcgagcttgagaaatatcggtacattttcatacagttgttcagcctcgaaagctgtatatctagaacgtctaatcaacgtcatctgaaactttctcgttttcattattcccattcccctttcccttttcctttccctgttcctcct

SEQ ID NO: 154 - DNA, 3602 bp, Cryptococcus neoformans
agacttccgggcacactgtagattctggtgcgattcaaaaaggggccgattttgtcaaagcatatgcccttggatttgatgtcaatgtatgttttaaatatggataacgaaaattcggtcatcggctgatagaacatgtcaggacgctctggcgctcttgaggttggatgacttgtatcttgactcttttgagatcaaggatgtcaagacattacatggagaccatctcgctcgtgctattggtaagctgcttcacgtggtcatgatgcggagattaatgtagtaaccatctcttttaggtcgtatagcaggtgaaggtggtaaggtcaagttctctatcgagaatgccagtagaacacgaattgttctggccgacacgtatgtcctttctgagctgttcacttttagttgaaatcggagctgatcattggggttgcagccacatccatattcttggttctgtacaaaatatcaagattgctcgagatgctgtcgtttctcttattcttggttctcctccaggtatgatcatatttgttgcttttggtagaaggcattcactgacggaaaacccaaggcaaggtctacgcacatctcaaggcagtcggtgcgaggatgaagcaacgtttttagagttcattattcttctgtcagcatttgggctatttgtacaattatttatcaggtctgcctgtatggcatgcatgtacactctacgttttctcgttcaacgtctgttctctgcttatacattccatgcaacccagaaagactgatgcgcaaaatgaagaacgaggagtgatcagaaaaagctgcaccacagcaataacgccgtaaatcgccgaaagtgccacattcgtattgagctctcttaccttcgttttgaccattgttcttcaaaatcctcagtataccaccacgacccacaatttcagaggataaaaaaagcatagcagcaaaatggtgagcatataagaggtcccaaaatgaagtggccaagatgatgctgatattcagtatagaaacctatcattctccaaggtccgcttttatctcttgcaactcaaaacgcatttcagctaaatgtgccgtgtctataggtcatgagcgatctctcaaccaaatcgtctttaactccgaaggcgatcttctcttctctgcctcaaaggatagtgtcgtcaatgcctggtacacctcaaatggcgagcgactggggacttatggcggaatcaagggcggcgatgggcacaacggtagcgtctggactgttgcggtggattgtaagtcgaatatcctgtttagggtgttattgggtctataaatggaagtggggatggaaggagatctttgtttggtcggcaagggcactgcagaaacaatgatcacgggaggaaaatcgacctttaccttgggcgaggtttttggacttactaatcatgaaatacatagctcaaacaagatttttacttactggcggtgccgacaatgcgatgaaactgtgggaagtcaagactggagaatgtttgtacacctgggagttcctaaccgctgtgaagagggtcgcatggaagtgggtcctgttttgtgtcaaacggacatggaaggtatactgatccaagaatcagcgaggatgatgacatgttcttgagcattactgagcagagaagtggacagcctagtgtgattaggtgagttgacttcttcgtcaacgttgctggagtctgttaacattgtttctagaatattttccatcaaccgagaggaccccagatcccgttcgtctacctacccttggtttttcttttcttttgctattgctgacgcacgtgcagaatccaccacccctatcactgaaatgcgcctcagcgggtctcgtgccaccgttgccatctgggctcctttgtctgattatattatcaccggccacgagtctggaaagattgccaagtacgatgttaagactggagaggaggtgcaggccgttgaggatgagcactctgctttgatttccgacatacaactgagcccggacgggacttatttcatcacagccagtaaagacaaaacggcgagagtgagtgggaatcgtaaggattgcagagttgtcgctgattgtgatgtgactcgtagttgtgggacattgaaactcttgaggttatgaaggtctacaccacagagactcccgtgaacagtgcggtcatcacccctgatcgaccatacgtaagtgttaccagactccctttggatagatcatcttgctcagtatcgttccagatcattctcggcggcggtcaagatgcgatgaatgtaacaaccacctctcagcgagcgggtaaattcgagtccaggttcttccacaagttgtttgaggaagaggttggccgtgtaaagggtcacttgtaagttctacttcgccttccgtgcgcatcttcagagcatactgactttgtgcagcggtcccatcaacaccctctcggtgcatcctcaaggacgggcctacgcgtcaggtgctgaagacgggtttgtgcgtgtgcactggttcgaggagtcttatttccgtagtcggccttttggggaccttgagcctgagcccgaggtatagagtgtggcggacgtggttagagaggcatgcatctatgtaattctagacggtggaggtgaatggagtgacgccaagagaatgatggccggggattgatgataagtgaaacgcgcgatggtgtgtgccttgtacgcgagtcttggcggcgagggatttctctggatataagttggaggatgggagccccggcgtgcacccccggcgactcccaactctttgacagagaccacgctcttttcccgccatgctcttccccgtcctcgccctcctctgccccgtcttggtcgccgcccacggccaggtttcctgggtccagatcggtacaggcccgcagtaccccgcttggactcttgatgactactacattgccctctaccgcgagtccggtcagttgttatcccacccagccatctccttctccacacactaacaaaggcttgactctttagacccagtctggggcgcgcttcctgagcaaaagtacacggtacgtcgccacggctcgcagatcggtagtgatgaacatacaaggcgccctcgctgatgatttctcccttagagaaaaaccgacaggctcgatcttggatttgccgacatctttagtaaatccattgctacaggtggttatgaggtttgccaaaggtttgatagcatgagtcccgttggaaccatccctgccaaagccggtgaccaagtcatcgtccagtggggttccgattggcccttcgaaggtcatcccggggtaaggcttcagaagtgccgttcaacaggttgagctgaccttcatgttttccgtagcctattggcgagtggatggccaagtgccccgacgacagttgcagccaagttgacgcgaccacactggactggttttgcatagctcagcacaattatgacgccgacactaaaaagtggcctactgagattttgaccgagtcacttaaccgtcaatggacattcaggctccccacggaccttccctctggtaagcatatcctat

SEQ ID NO: 155 - DNA, 3369 bp, Cryptococcus neoformans
tcttttttatcccatggaaaggtcactcacttccttacattccgtctttgtcaacaaagagtacttttccggaagcttcttttcacaactcttacacactctaacatcaaacacctatatccaatcagctctgaacattccatcctctcacactcaagtcgcaaacccaccttcaaaaactgataattaatctccagcgtcccacactccacacatctcggtgaccgatcgggtatgatcgccggttcttccccttcccttatcatctgcaactgcctctccttctccctcgctaattccgcaacagatttaattcggtcaccttctttatcttcttctgtcagaaaacctcctctggagtttcgcatcttggagagatcgtattcaaagtatttcccctgcaattaccatgtgagcattttgtgagcagtggccaggcaataagacaagtgaccaaccagagaaggatcacgccgtaaaggcaatggttttgccttgtctgcctcsgcctgttgctgaaccatattcctagccgatgacggtatcgcttccctcctgttgacatacgctggtccagcgttgccatgattgccgttacttggccccgcagcgttgccgcctgtagtatttgcagtgagcttgttcttggcttttagcctgttgagagctgccaagcgggcctgatctggggtaagtactggtgcggtggtgggagccgacatttagggaagtgaaaaattatatggcgagaaggtaagttatagaagtgtggatcttctgtcaatattatgtcaaccgcctaagatgatgggtggccaaaaaaaaaaaagaaattcattatttcctcacgtggcaataacgtggcgtcaaactacctataatccgcgagttgtcgtttccatttcctccacaagaaggaaagttggccatattgtacttctcgtctttttatcctcattttccttttatctttttaatcttcccctgaatttcatttaaaatggccgagcaagaaccacaggtccagtcccaacaacaaaaacaacaaaaacaaaaacctcaacaacctccttcaggcgaacccaaagccaaatccgccaaagagctcaaaaaggagaaacgcgccgctgctgtcgcttcccgagccatccctaccgaaggaggagttccagagggtccacaaggtggtaaacaatcatccagcactgccacttctgatggccgtcgctctcccgtggttcatctcaacccttcttctcaaaatcccgcttcttcagccggcccttccgcccctcgcagacctcccaaccactctgaaccctcagcgcctaccctctccgttatccagcaaaaccttttcttctcccatctgccacaccaggctcctgccgataccgtctccgccctcgacacgggcaagatccacccgataatcgtccgtgtgggtgtgctgatgaacagtggacagttgaggggtgcgaatgcgagaacgatcgggatgatgtcggcgtttaaagaggtgattagggattatgaatgccctgatcaagcggttttgtggaaggatttgccagtgtatttgagtccgatgattgcttggctggaaacttgcaggcctaaaggtgtgggaggcggtaatgctatccgatggttgaagagtgagatcaataggttgggtgagaagggggataaatccgaggcagaggtatgtgatttttcctccttatgctgtaaaaggaaagctgataatgtgtagcaaaaatcgtatttggtcgatgcgattggtctctaccttcgcgacagaatagaatttgcggaccaggttattgcagacagcgcaaaggaaaagatcaagcctggagacactgtcgtcactttcgctcggtaagcacatcgctatctattgaattgtcgactcacggctgacggaacacaagatcatctgttgtcgaaacggtcttactcgaagcctggaccagcatgcgagaacaagaccccgatgcaaccttcaacgtcgtcatcgtcgactctagaccccttctcgaaggtgaaaagcttctcaaagtgctcaccgccgccggccttccttgtacttacattctcctccccctcctctcctctatcctccctcaagccgacctcgttcttctcggcgcctctgccctgcactcggacggtgctctctactcccgcgcgggtactgctgtcgtcgccatgctcgccaaggaacatcgcgtccccgtcgttgcttgtgtagagacatacaagtttggagaacgtgtggtgcttgatggtgtggcgacaaatgagttgggtgatgtggagggtttattggcattgccgacaaagaagccgtttgcattaggtaaggaaggtaagccgttgccgagcaatttgactcccttgcatgtcgtgtacgatgtgaccccgccttcgttgattaccgccgtttgcacagaggcaagtctttatcatgcctttcctttccatatggcaaattgctaactttccccttcagattggtttcattcccccaagctctgtgccgaccgtcctcggtaaatccaatggtgttgtgtgatagaatctcattcataatcattatatatcattgcacagtatgaatacgcacagtacccgaatgtccaaaaaggatcaaacaaaactcaagaatagtaaatatacaccaaccttccatcttcttatgccagtgtcatttccctttccttcgttctcaaactaccgtacctcgctgcactaccacccacagatgcgcgtgatggaggtatgttctcctctctagattcgcttctctgcatcactcttgatgcaactttcgtgctcggatacagctgcactccgtggcggtggttgccttgtaaaggcgtttccagtgaatgccgcttagagtagtctgggacaggggtctgcatcgcaagagacgatcgacggcgagtaagggtcttggggaggaaagattcgttggtcatggaaggagtggtaccttggtcgagattagtgcgttgggacgctccgagaggtgtactacccgcaactccgcgaactccaaacttccgtttcatctggatcatccaatgagctttaatttgatcgagtgtgtggaatagaatacttaccagctcgacctcttgttgcttcgaatccaatgcgatgttgagcatctccctatcctccttcaactccgctttacgtcgttgaagattggtgatttccaagtctttcgaagccgattgagacttgaggtggtcgatctggacgcggagcgattggagttcctgcgcgtcggccagggaggtggtagggactgactgtgcttgaacgagttgttcccgagtggattgaaggctc

SEQ ID NO: 156 - DNA, 3504 bp, Cryptococcus neoformans
ttctcgcgcagagatagctgcgcgctcgaggatatccggggccgtctctctttgctcaaaggtatccagaagatacagcagaagcttcttactttcgtataagcctcgactgctactgatcttctggattttctttgctgacagaacatgcgggcccgctcgcgtagctcggcgaaaggttttcgaaggttcaggggatgtagagctattaggagggattggagatgatgaaagtcttgaagacgttggcgatctcggcgaaggggggtaacctaatgttggggaaggtggtatttcatcaaaattggtgtagtccagtttcaacttttcaaaattgtcagctcatacttggaccaagagcttctttgaactcactcgtggtggaggttgaccgcctggtcggataccgagagcttttcgagcatcgtcgttcgtattgccttctggtacactgagcatctgtcctttttcagtattccgagtatcctgggggctctcaaagtttcgatgaggaagaagacacaaaatcagaaagataaaaggctattatgttcgtttcgtgggctgagacggagctgtgacattattcgcgttcacagcaccgaatgttgaaacgcgtcaagccgaagtcacggagagtcgattatctccgggcagtcggctaggtggaggcagccgaatagtgatgaatggtcttcccgtatgatcatcttatgtaatcaattcaagtgcagagctcgcgcgtcgttggtgcaaatggtgattcatactgctgctgcttcgtcctcgtcaattccgtcttgctttcatccagttactatacccatcgtatccttcgccacgacattctgaggctttagcaatcgaacacattctcttacattagatcatcttgtcatgtccgtcgacacacccacctctgagaaactcgaccaagcggcgagtgtctttgacaaagatccgaccactgcagagcgactctataaggaaatattgcaagatgacagtcaacgtgagttcctcctctattgatgcgctttagcctccaggggtcctgatagaagccttcttcttcattagctggaaacgaagaccttttgagagacaaagaggtcgctctcatcaagttgggcactctctacagagattcaaggtatttatctatccgtacaatgatctatagaacctttctgacacttgtctgtgacgacaattttggtagcatgctcgacaagttgtctcagttgataacggactctagaactttcatgtcacatatcgcaaaagccaaaacgactaagctaggtgagcttgcttccccagccttttaagttacgacattaatcagtcaattccaaagtgcgcacactcctggaccttttccctcaagattcaaaggatatgcagatgaaggtcattcaagagaatatagactgggcccgcacagaaaagagggttttcttgcgccaaagcctggagataaaactcattaacgtgtgaggcctctttgtttgagaagactatgttagatcttcttagctgactacaataccaatcagcttgttggatgccgagaaataccaagaggccttgactatcacccaaactcttctcaaagaactcaaaaaattcgatgataagattatcctgaccgaggtgtatttattggagtcgcgtgctgcccatcacatgcacaatcacgcgctggcgaagacggcactaacctcagctcgcacaactgccaacagtgtatactgtccgcctacgcttcaggctcaacttgacctgcaatctggagttatcatggcggaggacaaggattacaaaacagcgtactcctacttctttgaagcctttgaaggtttctgtcaatccgccgagagagacaatagagcactgagcgccttgaaatacatgctgttgtgcaagattatgatcggatccgtgagtgggatgtttggctaactcgcccatatgctgatgaagtctggattcccccagcctaacgacgtcttctcgttgttatcattgaaaagcgccgccccctacataggcaaagatgtggacgcgatgaaagcaattgcgacggctcttgaggaacgcagtcttgatcttttcaagacagctctgcaaaattattccgaccgtaggtctgcgtagtgtgaagacttaacagctaacggctcctccagaattgcagaaagacgaaatcattcgttcccatctctcttatctttatgacacgctcttagaacagaatcttatcagagtcattgaaccctattctgcagtcgaactgtcatggatagcttcagaagtggggcagagcctgcaagtcattgaagacaagtgagttattgttttcgttctctttttacaaagaccgacaattatttaacctatttttcatccaggttgagtcaaatgattttggaccaaaagttctgtggtattttgaatgaacgcatgggtactctcgaagttcatgatgattattcaaatgaggttagtcgttttcctaatatcacgaacaaagacagaaatgtgtgttgacatcgcattcttataggggatttgttcaatggcgttgggcactctgaagcatatcagcgacgttgtgaatggcctaaatgataaggttcgttcatctgaacatgttgcgtctagacagcaatagctgatttctcttatcgttgtcaggccgcgcagatggtttaatcaccacaagcactagaacgaacagggttaccagtaaaagcaaattgggcttgctatctacatccactagaccatttttataacatctagtggtcattcacatcatgtatgccattgacgaagtttcgacaaggtttagtcctgaagcaaagagagtacaagtcacgacccaagaagaaggtcgcgagctcttttactcttggaacaataaaatcgggcatataaaaaagcgactaatttagaaggtgctgctttccttcgtctgaaatatgtagaactgaaagagatacgaggaatttaacgaagatttacgaatgtggcttcgttctctttcctattagttacccttattatttaattattatctttttgccgccagggtggacacccccgctgaaggacgctatttatcaatcgccgtctcctattattatctactgcagcatgagttcgagcaaatcttgatatactctccctagcctagtaaataagaatacactatgtccgccacacagttgccagaaatcatggatgccatcttgttcaaacatccctacaaagttgcggtcgaacaggtcccgactcccaagttgcagaccgaaggagatgtcatcatcaaggttcatctcgctggactttgtggtacgttctattattatgaccaccagagggtggaactttaggtttgacaaatatttgctatgtaggctccgatctacacctttacagggctaaagaagatgctgggaaagactatactatgggacatgaggttgtgggaaccat

SEQ ID NO: 157 - DNA, 3441 bp, Cryptococcus neoformans
ggcttgccttcaccaccaagcttgacatttgatacgtccccaaagtctggctgccagatttcgagctgagattcgttgctgaagctttcgtcgagggcaccagcgacagcaccagttgcgaggaggggcgctgaagaggaagtgttatcccaagcgaaggttgccgtgcgtgatatgtccttgagtttcattttgcgattggcgacttgcgcctgtgtgggtaaaaggggtttgaggaaggaaagatgtcgatggaagaaggagattgagggatggatagagaacgagaagcgaacgagggcagcctccagccagcgtgctggcgcgctgatgacgcccgacccttgtcccgcgcgcctatttgctgacgaggaccatgaactgctaggcgctcgaaacctttgggccttctgctggcggacatgaccacttttgcaacctccacttctcacgtggcaattatcagcttttttagtcttcttatttgttgccctgcattcagctttcctccacgggtcgtcgcctctctagagtttccctcgtacttcccacagccgtatcttgtatccatatccattcggaactgcagccttcgctatgcctgacccattttttcaatcccagaagaagcgcaagaggaacaatcgttcaggtccttcagcacctcgccagcaaaagcatcaagacaacgatgaaaatctctcttcggacgcagagggcgacaatggccccgttgatattgatttgatggatttcagagagggtcgggaggatgtagcaatgagtgatgaagagtatatcgacgaaaatgagacggcagcggagaagagagtcaggttggctaagggataccttgccagagttcgagatgaagtagaggctggtgagatcttcttcttttactgttttccgctctgctaatactgtgaagccaatgcggatcaggactacgatgctgctgatattgacagagagcttattgcgtctcgtcttcagaaggatgtcgtacgttaccattttcatatccgttctttacagtgactgattgacgcctacatcaggccgaagcgtcaggccgtatacacctcttcatcacgccccatttgacgtcctcaacatttcatttcatccccacatcatcgcatcttcctacatctgccgccttgaccccctactacatcttcatttccaccaaacgaggctccatcatccgccattctacttccactttacgtcgagccggtcagaactttggacatgcccagggtggaggaaatggccacaatggagagatcttatgtctggcagcgagtgaagacggaaaatggcttgtcagtggaggaagggataaggtgatgggtgtatgggatgtcagtgaaagagagcccaagtgggtgactggattaaagggccataaggacgctgtcactgtgagttacaacatggtttcttggtggattaggttgacccgtcgtatcagtcgatcgccctttcaccacttaacaacccgtcgtaccacatcctctccgcctccctctcccgtcatcttgctcttcattccctttctaccctctctgtcattgacacattctttggccatcaagattctatcccgtctgtctcttctcttaagcccactttggctgtcacggctggctcccgagatcgatcatgtcgatggtggaaagtcgaggaggaagttcagcttgtcttcagagcaggtgggaagactaggaaggatttaaaaggtttaatgcccgcggaaaggaaggaacgtttgggaggaggatggacagagggtgttgagccggaaaaggagaaggacagcaaaggcaagggaaaagaatttatggaaggttcagttgactgtgtttgcatgcttgatgatcagcatttcgtctctggtggtgatagcgggtaagtctcattttccgcaacttgtatcctgtcttaacatatcttgtagatctcttcttctttggcacactggaaagaaaaagcccatcttcactcaggctttcgctcatggattcacaccgatcactgcagaaaaccctatttccgctccccgctggatcacttccattgcagctttaagaggtaccaacctttttgcctctggttcttgggatggccaaatcaaattgtgggctatgaaccaagaattgaaatctttctcttatgtcgatgtcgaaatacccgccaaggggttcgtcaactctcttcaactcagttctcttccttatgagactatttctcatgcttctcttccggagtcaggagaaaaggagagtacaaatgcaaagtcagaaattgtgttggttgctgctgtaggccaagaacccagactgggtcgatggatgagggataagcttgtgaaaaacggagtgttggtcgccagactcgagctggataggaaaggcaaagccatgatgatctagacttagtagacttgtatggatctctgtgtacatattgattcttttggtggctatgaaatgagaaagtatcatgtttacatgtaggaagaaaaagctgagcaccacgaacagttcaaacagtgctcagatgccaacaatctccgcgttctcatcgtcctttgtcaagatatcttctaccgctcgaatcaccacttctggattgactcttacctcaccctatcaatgacagtatcgttaacgatcttactgtggtagtttcttcaagtcattcatcagcttacctttttagcttcttcccctatagaggggccacccgtacgccattcttcctcgagaaggatcctgtcgtactgaattgcaacatattgatgaccgagagaagtggccatgagctcaaagtcacctggcagacagacaatcagcattcatattttcagtatacgagtgacggaagacccacggcgaaaaccaccctgttcaaacagttcgatgacagtcgatcggccggggatcgtaggcatccacattgcgtgtatgagttcatccacgtgtaagcttatgataatctacgtcatattagcctgatcatctcacgcctaagggagcggagagaaaagcatacacaagcacgattcaataactcaattcgtttaaatttggacatgccgttcaacttcacaacgtgaacctcagccaacggagtcaggctcttcaaggcatcgatgagacccatatgatcctcaggatgaagacgaggtgttcctatctggaaggggagcagaaaatgagctggcttgcccatcgatattggatcaacgtacttgatggtcaacgtatacaacgaccggtaatgatgtctcaatggaggtcccagtgataccaagcgacttggctacattctgacggtaaggatcaaagaagttcggttgggcgaagacagtaggaataagaacgttcatcttcatcgcatgagtgtaaaatgttagcaaaagcgattgtc

SEQ ID NO: 158 - DNA, 3476 bp, Cryptococcus neoformans
ttctcctcactctgctccctaaccttgatatctaacaacaccaaagtatggacgcccaacctcaaattctcttccaatcgggggtaccaactatccggcctccatgtttcagtgtagaatggtaaagaaagcgtttggccgaaggagtacatttgtagaccggtagagccgagggcggtgaggatggaggcgttgtggatgatggaagtagggatgttgcgcgactgggcacggagaaggaggtcgctgtgggtggtagctctgtaagatgcgttataatatcaatcatccatctttgtcttcatcttcatcttgttttgttgatgcatgtattttgaacctacccgagaggatcaccaacgaccaagaacgagatatccaccttgtccgcatctttcaaaatatcgtccgcctcgagctcaaccatctccctcgtggcagtgatgaccggtcgctcatagaacgcttcaagtttttccttctcgaccatcaagatggaagtgtacgactccagatagactcgtgcagagttttttacggcctacatgagtccaagttaaggattgggttgggattagcttatcaccgcttgtagggtttgacgttttgagtgaagattactcacctcgaggcccttgacggtaatatccttctcatcagagagaccgagaccaatgacatagaacatgggaggtgctggataaagatgttggattcagagatgtgtataggggcaaacgaacaaacgaaagacagtacgtcgaaaaacgcgaaaacaaaattctctatcttatcgtaattaggattgttttgtgatcctattaccattagattacagctgtagcttggggtattaggaaattactaataggaggttaccgtgaccgtgggaaagtagttccattgttacgccggttatcagtcagccatcccgccatatatttctaaacccacaaattccgttatattcactgtctactctttcctcgtcttattcaaaatgcgtttatcccgtatcctcactgctatatccctcctgctatcgccattaatatcctctcttccccacgaacagctcgatcctcagctatccaacctttttggaaatgacaccacgacagacgggcataccaataactgggctgtgctagtctgcagctctcggtactggttcaactatcgtgtaaatatcttaacactccacactcaagctactggcggtatgtgaaactaatgaatactgtcagcacatggccaacacactcgcaatgtaccgaaccctaaaacgtctcggtcttccagattccaacatcatcctcatgctagccgacgatgtggcctgtaacgcacgcaacgccttccctgcgacagtctacgccaacgccggaaaaatgctggatctgtacggagaagggatagaggttgattacaaagggtatgaggtaacagtggagagctttttaaggttattgacaggccggcatgatgctacggttccgcgctcgaaacggttattgagcgatgcgtcgtcgaatgtgttcatctatatgactggtcatggaggaaatgagtttctcaagtttcaggataatgaagaggtttcggcgtatgacgttgcggacgctatcgagcaaatgtgggagaagagaaggtcagtgccagtttgtgtttgtgcgggaagagcacacgcttatgattcgttaaatagatataacaagttgctttatgtgattgatacctgtcaagcaaacacaatgtactccaagttttattctcccgaaatcatcgctacgggatcttcatctttgggcgaaagctcgtactccgtaagactaccacctcttgtttcgttaaaaggctcggctgacgaagagcagcatcacaatgacatggatatcggcgtcgcagtcattgacagctttacccacaacgtccttcaatatctcgagacagtgggcaagacttcacgtaacagtcttcaggaattcgcgagtcgttcttttggtacctgtttaggtgttgacagctaatcatcaaataacagttcaacacgtatgatcctgccaaaatcttttctcatcctggaatatcaacttccctgagcagtgtccctccggaacaaatccttattacagactttttcggagctgtagctcgagttgaaatatcgccccaaagtgcagagctgcccttggaatctcgactaatagcttccaaagatggttgggagcatacgagcttgagtatcaacgatggtagtcttacggaggagatacccgaagtgttacctaggaagatagaagggaccaagaaaggcaatggggagtggaatcggcctcttgtggataaaacgagtgaatggggattcttgcctccataccttatcggagtcgtttcgttcatttggctttatatctcgttgggggataaggaagacaaggatgacagtgaagaagtaagggaggaggaactttgaaagggaaaaggacggtcgggaagcaggcgttctttgggggagcagctttgtttcctgggtatacaccttactgggagacaaatgaagagcttcggataattatctagatagtagaccacattcacgttgtatcaatataacccatgtatatccattttgcattgagcttttgatttgccttctcatcgatttacacattcttccttccctcggcagcattgatgatcttgacaattctccagctcatatccaccgccataccgaggggcaagagcaaaaagggcacatactcagcaagaaggttggcgatctcagcagtcgtgtgaggaggagtagcttgggtagtgaagatagtgtggagacaggggaggagggtagtagccgtcgaagctccataggcgaggatgaccgctattcacaaagatatcagctattaatgaggatacagagggataacgtatcgtcattacgcacggtacactcgcttatcgtctttggcactcattccatcagctttcgtcgcaaaaacaaaagacacacaaaatactcactgttccacaacccccaaaggcctaccacaaaacatgggacctggaatcccgcttcaagccaggagaaacactttaaccacccgaatgtcggatcattattgacagctccgagaaggattgggtcacgagtgaggttgatcgaccagagcatgaatgctttgagggatgatggtattaaagagggtggatagaggtattggaggtcgagaaggatagatattggctgtgtttgatgtcaggacgcactgaattgaacgggtcaaagggtaatacgtacaaggtggaactgaaaacaggtcgtgatgttagttttataagtctaaggcactttccagtaacgcacagcgaagaacgcaaaccagagcttgtcgagtgatctaccagagaatcgggacatatgggggagtaaaagcgaactgtggacgaagataaaagcagtgtgttgttga

SEQ ID NO: 159 - DNA, 3591 bp, Cryptococcus neoformans
ctcacgtcgtgaacataaacgtgagaccaaagaatcctaaaaggaacaagagagcaatcgacggaagagcagagacgggaattcggggatgaaacgaaggcagggagttgtgaagagactaggaattagagaccggtcagcccaagactgtgaagtgatgacttcatgcgacttaccttggcggatgcataggaggacgacatgttgaaggctgcgggctgtgaaagatgattacgttcaagtccagatcaccggtcctctgactatttttctcctaactcgtcggacggaaacttaagttcgtgtgaatggctccgttaataaagcagatagtgcacaatgggtgcaataacagctgtcgtatcagaaactagtgcgcgttgttcagattgtggttagactgtggttaaacaggtcgccggaaacgtccaggaggtgggtagattgatactggcgcaaggaagtggttaccggtcttgatgtctgaatgacaaatgtatggatgatgtgtagtgcggaggggcggtattgcgttgtacacgcagcaaggcaacgacaggctcgaatctatagagcgataattgttactgcgcttgtaggacccagcggaatcaatgtcttcccaaaacctaatttattttgaatacacgattatttattcacgtaaataattgtttgcggtgacgagcattatcagccttccctcacagtcgtcgtggcttgagtttcaaagcttgtcgtccgtggttttcattattgtccctcttacctgcaattggcatctacgactgtctatctgaccctctgaacaatacagtgcgatagtccacaggctgcctcccctggccagttcttcgttgcttgtccaagagtcaagcaagggtaaaaagctaccttaccagtaccgcaaacagtatcgtcgactataggaagccactacggcctttcgaatcaaatcattcaaagtgacatcttagcccacaggcggcttttatcggtgatgcggtcttctcctgtgattgaaatatctccagcgtcatctgggaccgctatattccaacacaatcccaaaggagacgcgacgcttagacgagaatgggaaccagggtgccagccagatgagctatatgacgctttcttacctgcttggagagcaagtttgcgaaggcttctcgtaaggcgcctgagaaacgagagtacgcaaatggcagactggcaaaaacgagtaagaagcgaagctcgcgataaatatttctattggactgcagtattcggaagtaagtacagtttcttctgcattatatggaccgccgtcattgtgccaaatttgaaacctgctgatgtgagttgtattctcgaagcgcacacgtttttcatgatgtttttaccaattctctttttctttggccatccattggaaggcagagggtaagtacgttcccgtactttgactgtagctggtctgatgcaccttgagcctactgcatgtcgtagggttaggtatatacatttcatcgtttgccaaggatttggtgtgcactccacggccgtacagtcctccagtaattcggttaagtaagtcatgacaagtgcaacatatgcacagctcatcgcatacatgatggacaggtatgagcactcatcatcatgaatatggtcagtgtactggtgtccaagggaacaggatggatagtgacatcttgattcaggctttccatcatctcactctacaaactccgtcagtattgcgctgtatttgggacaatggatattcaaactccaggatcgcctgggatggccgactgtactacttagctggctgagtacatcatccaatcttaaaattcagttcttgtatctaaccccacaactagtgctagcagtgtatatgacaagcgtcataggcggcagagtgtacacgggcatgcactccatcggcaagtgttttatatatttctctctgccctcgtcatgatacttttctaaatcgcctacagccgatattgttggagggagtatcatgggtgtggcttgttggttattttggattgcaattggcgataggaacgaggcatgggtgaattcgggctcttggacaggtaggacacgtcagttctggagtatgagtaacatgatcgttaataacgtaacagttcctgcgatcattgcacccctagcgtttactttgatccaccgtcatccggaacccttcgaagcttgtccatgctttgaagacgctattgcggtgcttgcagtcatgcttggttccactttaggccaatggttcacagttgcaatctggccgtccattaaggtccaaaatccgactgccttctattcgtataacctggcaacaattattctctctataatgttcagattggtttttggtgagtaatctttttgacatatcggtatacatcacctgcaacataatacaaagggctcggaacattgtttgcttggaggctccttgcaaaatatacacttcgccaagtgcttcctcctgtgtttcgcagctgttctctcttacttcattcaagtttaccagctcgacgattctacatctctactgcgtaagtgaagcctaatattaactgtcatgaaatccaaaaggcagtcagtgatggttttctttagagagcacaacaaagagccttctcaacttgcattacgtgccgttccctctttgcttgaccttcagacaggagaagataccggaactcttcccgcgccctcttgtccttcaccacttctcgcttctcacgctctcagctctagaaacgacatcacgataggcccaccttctaatccccgggaggggcttataaagagaaaaaaaagttcctgcgagggtggtgccgagtggaggactgccactcctcgagaagaacaagctcaaatgagtgtatcagctttgacatatgacattgagggtaagtaaataagttagatctcatgaaatcatgcagagtgattgctaacttgccctcaaatcagtggctacgaaggtaggcgtatattcaggcatcggtttcatagcaaccatccttgttccctattggtttgaattgatagaaaatattgtcttgggatgatttcgtgtttctgttaattgtttgcggaatttcaccatcctacgtgttatccccctacatgattttcaacattcggtaaccctagcgggctgcttaataataaaatctgtaacaaggaccaagtttcgagacatagcactctgtgagtgatgcgtaattggagtgaaaggcaacagaacaacgtgcacggggtacaggaaccggttttggattctgggtggacggatagtgattgcgggtacgtgctgcttttggatatccgtccgtccaataataaccagcaagcagtgacgtcctttgatattcactaggataacggaggctgtcagtctttgtccgaatccgtgatggttcgttttcgttccctgtttatttgcgacgcccttgcgttcggcgtcctcttgcgccctttctacgccctccaataacctcttctagcttccgacccgatcttcattcgtcgccatctgcaaatggaactaacatgttgatg

SEQ ID NO: 160 - DNA, 3695 bp, Cryptococcus neoformans
caccctgatccttccttgtactgtctgacaatcgactaaccgttggcatccctaacttcggcaccacttgttctggtacctcccaaaaaaaggccctagcacgattgtcagctttcatgaaagagtcccatggagaatgactcaccgccctggggtcgcgctggtacattgtggaggccatttttggttgttatagagggataagatatcgtagagaacagcttgattgacgcgcgaagaatgtcgaggaagctcagaggcgaaagggtctcagcgtggccagcgggatcaaataattgttcacctccaccgccatggtccgcgacgtaggatggctctcacgtgaccaacaccggttaagagaaacgacgaagggaacaagtgcaatctgcgtcttcatcatctctcgatcaccaattacagaccgtcactgtctcttatacaccatgaaccgccccatctccacacttcgcctcgttctttccgctactcagcctcgcttcgccccgtcacctgccgtccttcgcccatttgtatcctccacacgcctctacgctacccaccatgaaacggcttccccgcattctcaatcacaagccacaagcgatcttttgaaggggctcggaaataagacgggaacatcttctggtacccaagacactgtcgggccattccctcttggagttgggcccaatggccgtaggaagacttggaagtcatggtctgacttgaacattggaggaaagcgtaagcatcagtcttgcagttccaacaacgtctcaactgaagtctaatacagtggtccgtacaacgcagcagactggtaatctgactgtcatccttttcggaggcgccctttttgttgtcctgacgtttgctctcacaacggaattgtttgcaaagaactccccttctgtgctctactcccatgccatagatatgatccgcggttcaaatgctgtacgtctgatcaacatgtttattctaaaccgtactgacaatgcacaagcttgacgcgtaccttctgcctcctcttaaattcactcattccccacattcctctgcacccgtcagaggctctcctccaatcgctcatacctttatccgcaaccccacttcaggcaggatcgactgacccatgtccaactgctgttaccatggaacctttctccacttcagtcttcaaggttctcacttgaatatttgctactaccaccaagatctgcactagaggccgaatagatatcatccacaaccaatatccatctaatatctcctcttcatccctattttctttttacatctattccatctcccagtcccaaatccacctcatgcctccctgcgatgtccggtaatggctcctcatcctttgcagccccaccgtcggcacgcattctcgtcatccctcctcaattccattctatgacagccggcgcaggggcaggccttgtatcatccatcgtaacatgtcctctcgatgttgtcaagactcgtttacaggcacaggcagcctcggtacaccacaaggactaccaaacagttgaaatgatcattaaggatatatggacatcaggcggcttcaggggtttttataggggactaggaccgacactggctgggtacttgcctacatggggaatatatttcaccgtgtatgatttggtcaaggacagattgggagcttgggcggcgcatagtggtgagttgtccagaaggagattaacaggagaatattagctgatacccgttgtagatttacctacaaaaccgtcgatggtgcatattgtagcagcaatgacggctggagccaccggaacgtgtatgactagccctttatgggtaatcaagactcgattaatggttcgtgctcgattccatcgctatctgcgccttgttgtttggaaatgctaatatccaagttaggcccaagtaggtccatccgatcaagcacgatacagaaacactctcgaggcaatagtagacatttacagaaacgaaggatttagagcattttacaaaggactcttaccgtcattgatgggcattagtcatgttgctgttcaatttcctctctatgaaaaagcaaagtcctggtccggtaagtctatctcaaaagtattgctttgtaccatagctgaaaggcaagggatgcagataacaacacagagggcgaccattcctccttaacaccttcaacgatccttatctgctctgcattctccaaaatggttgcttcaatagcaacctatcctcatgaagtcctccgaacccgtctccaaatccgcaaatcatctcctaaatccaattcttctagctccgttttcagttccaacccttccaaaccttctcatccaccattaccattctcctcaatgcctttcaactaccttccatccgcggatggcaaatctcatccaccattagacgcttccgactccacagcttctcatgcccaccctccatcagatcgccagaccagacccttatggcgttcattgatcaagttccgtaaggaaggcgggattatcgatacttttttgagtataaagaaccaagatggttggagaggattttatagagggttgtctatcaatttgatcaggactgtgcccagtagcgctgtcacaatgcttacgtgagtgcgatttttttttttgaccgaaaaagggcaataaccgtattccatcactgaccctgtcatgcagatacgaacttatcatgcgtagattgtcttcacccacattatgaatgtgcatttgtatgcttttttctgagtatcacagtgtaccacagcaatgtttttccttcacatgtcatccggtacaaaaatcagccatagaggttacaggtagagtaattacaaaacccaaagttgcatgctgaattactagttttcaaatcgtccatcaagaccggaaataaatatctaacattctcctacatctaaatactttttgtttctctaagaactataagccttgagaataccttccaccacagtcacaaacgccatcgctccagggtcgggtggcatgtcgccctccaactggcctacatacgtcgctctacccaacttggcctgcaagtccaccgtgctatccccacctttcctacacgcctccacagccttcttcaaatctccactctcggcaagtgtctccccaaagggaataagcgcgtccatgacagttcggtgaccgactcgcgcggcagtacgagctttgagagtttcgagggcagaggaagtgacttggccgaagaaggcaggggtgagttcgggggcaccgttaggggaggaggcggcatcgatgagggcggtagtgagaccggcgaggaagatggagaagatggcgccgagggtaccgcccattgaaccgtcgatgacttcagtcaagactcggaaaaagtggacaagttcgccgtcagagccaaggccttgttcgagagctttaagggtcgcttgggcaccaagggcacatgtttctccacagtcaccgtcaccgacaatctaccaacaagaaaagtgttaagacttataaggaggaggttttggaagagatatgaacttacggtatcccacttggtaagtttgggttcgctagcaagcacatcctcagctgcttgcttcatagccttgcgaataagctcctcgttacctaaccccaaaagaatcagccttgccatcaatacat

SEQ ID NO: 161 - DNA, 3317 bp, Cryptococcus neoformans
ggtggaatctggctcagagaagtaaagcttggacgatcaagggtaaatctcatcctgcccttgactaccacatcctcaacgcaaacctggaagatctgagttctcctattcacgggaaaaaggataagaacggcacactcagggtcgctgcgccaacaacggagagcctgagaaataggctacacgataatttggagttatggcaggaggacatgtacaagatgatgtttgcggatacgtcggagtggaattataaagagagataccaagtgggcgttatgctatgtgatagcgccagctcagtaaaatctctgaggtatgaagatgtctaacatcacttttaattattattccaacaagtacgataatcagcgctccaaaagcaataaccaggtaccatcccaactttatccgctcaatgtgcatcttctgcaccctttgttgcggctcctggatttctatttctgtgtttccagtacactccctctctattgcgccttcttccgcctcgggtgctctctgctcctcgtcggtattcaatcccatcagtgactcgtgctcctccatgatgtgctccgtgatctgcggtaggggcggcaaagcccgcttaccgctaatcggctccctgaaagtatgacgatctgatcaagggcgactctgcggaaaccgaacttcgttgggaatttgacgcgttattagttttagcgttctagccacggtatatccacaaccaggcagcagcagcagtgcaggcagagcagatcaaatccccaaagaacgtgtcttttgtcacaccattttatattcacatccattctcattcgcctccacagctgtctatatcccattcgcaatgtctccttccgtgttcaaaatatcaccaggtatcaattcatacgactggggcaagaaaggctcagcgtccctagccgcacagcttgctactacctcaatcccagacttttccatcgatgaggacaaggcctatgctgaagtacgcgtttttttaaaaagtttgccgactatgcactaacgcgaatcagttatggatgggtactcaccccaacaatccatccaggttatcggacaacaccttactctctgaacacctgaaatctcatccagagcttatcggctcctccgtgtcttccaagtttgaggactgcaaggacggctctttacccttcctcttcaaggtcctgagtataggtactgctctcagtatacaggctcaccctgataagccgcttgcgaagaagctttttgacgagaaacctgatgtctacaaaggtgtgtcattcccttctactcgatgttggacgccaagctcattgatggcgctatagaccctaaccacaagcccgagatggccattgcccttactcctttccttgccttccttaatttccttcccctttctgtgctcctcttgcaccttttgaccgtccccgaactgcaagagtttgtcgactcttctcttaccgaatccctagcctcatctctcggcctacctacatctcaaccacccgatacgtcccttttcaagcccacagaatccccagccactgctgagcagaaagacattctcaagcaaatttttgccgctcttatgtcagcagataagaaacttgttgaagaagctatctccaaacttatcaagagatatcaagcgaagcgagatataaaggagaacgagaagagtcttgtggacttagctttgaggcttaatgatcagtacccgggggatgttggtgtcctatgtgtgttcctgttgaacgtcgtggagctcaagagaggcgaagctgctttccttggggccaatgagcctcacgcctacattgagggtggtgagtaatttcatgctttcatgggaaagctgatcgatatctgacggaaaccagatatcattgaatgtatggccacatcggacaatgtcgttcgcgctggtcttacccccaagctccgagacgttgacacccttgtctccatgctcacatacgaagctgctccaggcaacaagcaactactccaacccaccccatttcaaaaaggtgatgatactaccaaactctacgatccccctatcgctgaattctctgttttgcgtactgagctttctaaaggaatgaagacttctcaccggcctgtggaaggtcctagcttgtgtgttatcactgaaggggaaggtgttgtcagaaatggaaatgatcgatcagagtttgtcaggggtgatgttatctttgtgggagctggcaaagaagtggaatgggaggcgattaagggattagagatgtttagggcctatgttgaggcttaaaaaagcctttatggaacgccggtaccgacaaaggcagttgtttgaacatctatagaattattaaggtataggccgcgtatagcaatcacgtatgtatcatgatgcatgtctctcattgaaccttccgggtaatcctacaagccaatatgtcgcaactacaagctgatggtaagcacactgactattcattgctgtcgctgtcgttggacactttttttcaacaaccaaaggcagctttaaatttctgatacttataccttttgggaaggggcgcctagaatttgaggggagcagacgatgacaagcgaactgcaccgcgcatgatgatgaacccaacgtgctgacgtagcgcttctcgcttatagcccaacaagccaagcatggttcgtttcttttttttttcggtttataaaggagacctccacctccacgcacctccactttatggattactaatcttcttctttctgagctatcacggccgcagtcttataatcgtgatgccaacttataaatatgggctagccaccgttcagcccacatcctgtatagaaacctaaagaaaaaaactactatctctgtctgctacgccaaacgtcatgacagtcattcaatcccccaagctcttcacccccatccaggtcggcgaatatgaacttaagcaccgaattgtcatggcgcctctcactcgattgagggctgagaccaagacagcgatcccttccgaatgggctgaaacctattatagtcaacgagcttctggtgagtctcgacactggtagttgttataggttataggacgattactgactatatgggcagatggcggcttgatcgtctctgaaggtactttcattgctgaggagttgaggggttacgagaacgttcctggtaagcatttttcatatacgtaataatcctgcgactgaatccgtacgatcatacaaggtatttacaccccagagcagatcgctgtctggaagaagatcacctctggtgt

SEQ ID NO: 162 - DNA, 3536 bp, Cryptococcus neoformans
gcctgggagcgggtggccgtgctggtctgcggggacggtgggcgctgtcatggcgctggctgtgggctgagtggatccacggatatcgaggagtagtggaggaataaatgcggcttcaatttggccaaacgccgcgcttcgtcgctggacttttcgcttttatttttccccgccggcaatgcctctgtactgagcaggatggtatacgatccgatacgggactgcgacgtccccgccccgcacatttccgccccccccctctcccgctcccgctccccgccgcccccacaccgcacgccgtccgcctcgggcagcctccgcggcctgctcaacgactcgcccccgcccagagagcccccccgcgccgcctccgtccacgaagacgcagagagccacaggcccaagctgagcaacatcctcaacgatgcagagcccccccgccagcgcagcatgctcccgccgcagcagccgatccacgccgagctcgaacacggccgccgcacgtctgccggcagccatgccgcccagctcgcccgctcgccgtccatgagcctctcgccccggagccagaaccagtcgctgccatatccgagctcgcggccgggatcagccgccgggtccgcccatcccttcgggtacgatcccaggcaagggaccctgtcgcccgtcttgtctgccaggcgaacgtccgaggaccagcctaggccgacgtcttcgagttccgccagtgggcgtcgctacactgagcctgcttcacagacgcctgcgccggcaccgttgggctcgtcggcgtatcgcccccgtcatacgtctactccaggcaacccgtcatcggcgtacgcgccccgtttcacgccgcagcctaccaccacaccctcctcgccgtccacatcacagcacacgccgtacaccccgcaccattcggcgcctcctcggatactccattacaacccgcatcggcagtctgcaccatcgtccgtcctgcgtccgatctacccagatgaagtcgcccatcttcgccagctggcgcacgctaacaatccgcttcggcaaaagccccgcggcaaggaggtactcctactctggcggcagagctcctgaacctacacccacccccaggacaagtttgccaggcgagaatgatcactcgtatttccctcctcaatgggacgatcgaccgtccatgccgccatccgaggtctcgtacggaggtcccccatccagcacccctggtgcgccgccctcgggctatagccagtacccgcccaactgggaagctcagacaccgggaggtaactggaatggcgagagacccggtcggttagggaaaagaagggcgagagatgaagaggatgatgaatatgagcggaataagagggttgtttcaggtcccgtggcagggcaagcttatagcaaaaaggtgactgtcgttgctgagcactgtatgttccctgcatcccatttacttgactgtccttttttttggaactgatcatctgtggtaagataattctcgaccagaagtaggcgtcgagcgccgtgaattctctcccattatcggcctcaaaaaattcaacaactggatcaaatctgtgctcattgggaaatttgcttataggcctcgaggaaaagttttagatgtagggtgtggaaaaggaggcgatctgaacaagtggaaacaagcaaggatcgcactttatgtcggactcggtaagttgccaacatcttcccaagggtgaacattcactgcggcgttgctgataagagtgggctgggtacgtagatgtggcagatcaatctgtacagcaagctgcagacaggtacaggcggatgccgaaacccggattcgacgcattcttctatgcgcatgattgtttctctgtacgcctccctcccacgttttcccttccatgccgcatcctattatatcgttgtctgacagctttttttttttttttgaaatgtgtcattagaatccattgagtgacgttctcagccccgagcttcagatcaaagacctctacgacaatgtcaccatgcagttttgcatgcactatgcgtttgagaatgcagcaaaagcaaggatgatgattgagaatgtgtcgagataccttcgccggggaggtatctttatcggaactatccctaatgctgaattactcttgcaagtggttttttttaaagaaaaaaattcttgaaacaatgctgattacagtccatccccacagagaaagactgaacgagctgccggaccgcgatgaggaacttcgatttggcaactcgtgctactctattcagtttacagagagaagacataaaggcgtgtacggccacgactatcgattctacttgacagatgcggtggaggacgtcccagagtacctcgtggactgggaaaatttcgtctcgtacgttctttttttttttctcaggttgggtactgacgacaccacacgtccaggttggcttccgagtctggacttcgattggtctacaaaaaggcgttccatgagattctccaagaagaaaaagatagcagagatttcggcccgctcttggggaaaatgggagtgctgaacgagtatggggaaagtgcgatggatgcggaccaatgggaagctgcgagtaagtttttttgcaagaaaagccatctctccctcctggcaacctgtgaaacgaaatggctcatctgacttgatcacagatttgtacatgggttttgcgtttgagaagatgtgattcaacaacataaaatcatagacaacttaattgacgactcatcatatcatgtggcccatcctttttcttttttttttaattcgtcgattcgttatggatagggatgggggggggggctcggggcaggaaggagggaaagacaacataggaatacccgtttttcgggcctgtcaaggtcattgggatttgagcacaaatggttgtactgtatgttaaaagtattttcttggcttctttttttagataccatgaggacaaaaaaaatgcatttgcagtttcgccacctttcttcttttctttaaatcaagattcgaggcagttctcgagcaatgatcagaaaccttgctccgccaggtagtcggtcttttcggtagcatatcatcatcatcaatctttgaaactgtaaacgcaacgggccaaaaacaaaaaaacacttacgacctcgaggtaaaaagtagcaggtttaaaagctattggcttccccgtccacccagctactgcatatctaaccgtgttgacccatccgaccctttctacacatcagtatacggcaaactgtgacgaacaagtaattggtccaatgcaaataatggcttacaagtctaaatggttcactcccaccagggtgcccctatattcaccccacattgcactatggacagagaccaatccgtcatttgctccttcctttgcgtagatgatggaatgaggccatttaaaagtatcaagcaaccccggctcgaaactcgcaccccatgaatagtatttgacgtcttcgctgtcaaccacttccgcat

SEQ ID NO: 163 - DNA, 3644 bp, Cryptococcus neoformans
agctcttcaatgttggctacttgactcttgattaaatcgtcctgatgcggcatcaaaatctttggcaactggaacacaaaaacacccattttacgtcagccatcggggaaaatgcaacaagaaaaaacgagtgacaagcggcaagatgacgacttacgaaatacaacgggggaagatcagatttcaccggcgggtccctggtgggacctgttgatataggtataggagcagggttcaagaggttagtttcaaatgcaggaggatgcgggaggggcagagaagtgtgcaggaaatgagcggtaggtcttaacaaggcgtggcgggatgagagctgggaaaaaaaaaacaagtttagtgaaaagtaatgaagtgatagaaagggacacatacagcaatgtccttttgtctccataaagcttcggcagtgtcggtcgcaatccgcaatgtcttgagttctctgtctgtttcttgaatatcatggttaagcgccgtttcagattggagtttctttgttattctctctgacaactcttcccttcgctttgcctaaaataaaacagtctgggtcagtataaagaaccaaaagtgaacaaggaaaatcccctaaaaacacacagcttcggtaacacggctagacttgtcctcggtcttgaacttttgaagtgtgcccaagaggttaccaaacagccgccttcctcttcctttatcatccgcattggacctaacacgtctgtggtctaaatcagcaagagtacgaagaaaagaaaaacgcaaaagtggataaagagggtcctacttgggagctggttgttcagattcaggctctgggcgagagcgaacaggtgaagcgcttggcttggggtctccttggagtctgtgactgggtcagccgtttcagcctcgcgcatctggtccaccacatacctctctggcgacttgtctgacattgctgtggcttgactgcagatgaaatgttgcagtatacaagttgaaatgggtgatgggcatggcaaagtgggtgtgtgaaataagtgtttacgtaacccagtattcacgcgacgggcccctgcttgacgcgaactgtgcgttgttgggtgttcgttgtcgttgtggaacggatttcttcctgctcagctttctgctctccatctgtttctctcacacacccgccccactctgcaatggcttcaagacccacaagagcgagaaagcaggcgaagaagggcgtacagctcactctcatggtagtcggtcagtcaccgcctccccttcccacaccgaacaaccctctgacaccacacaggcgcatccggcacaggtcgcaccacctttgtgaacaccctcgtagagtccgtcctcctcgaacacagcacagccacccttctctccaatcccgaggacccccattccgccctcgacatctccctcgtaaagcaggcagctgcccaggccaacgtagagcaacctatacgcatcaagcctacaaatatcgagctcgaagaagagggtgtcaggatttcactgacagtggtggacacccctggctttggagatggtatcgacaatgagtactggtgggtcgtttatttcacggcaaaaaaatggctggggctgatggaagggcagtttccaagagatttcaagctatcttgaacgtcaatatgacgatatcctggcggaggaatcaaggatcaagcgtaaccctcgtttcaaggacaaccgagttcacgctttactctattttatccctcctacgggccatgcgtgagtaacgatatctatttggtgttccaaaagctgatattcaacagtctccgagaattggatattgaattgatgcgccgactgtctcctagagttaatgtcattcctgttattggcaaggccgattctcttactccgtcagagcttagggatttcaagaagcgtgtaggcgtcttgttttatctccgcaataaacaaagctgatggctctgcagataatggaagatatcgagtactatggtattcccgtctacaactttccctacgacgccgaagaagatgacgaggagactattgctgacaattctgccctccgtgcccttcttccatttgcgattgtcggttccgaggaggagattttgattgacggcgagcctgtgcgaggaaggagatacccttggggtatcgtcgaagtggacaaccctgaccactctgactttacccgcctgagaagtgctctccttgcgtgagacttttcgttgcagattcaaaaaaaatcaaaagctgacatgatcgtagctcccacttgacggatctcaaagagattacccacgacttcctttacgaaaactaccgaacagaaaagctttcacgatctgttggcggaaacgacccgtaagtttaaatgtatgatccatgattcccgcttatgttctgtagcgactcttccatccaccccgaggatatggccaaccaatctgtccgactcaaggaagaacagctccgtcgagaagaagaaaagcttcgtgagattgagctcaaggtgcagagggagattcagatgaagaggcaagaattgttggccaaggaagacagtttgaaagtgcttgaagccaggctgggtacgtcttcatcttacatatctcaacggaaatgctaatgggagtagcggcacaaaatgcggcccattctcgcgagagtacccccaactactagatctcatccgcccaaaccttgctcgaatcttcttaaacccttgcaatgtccatactgatgtctatcacgttaaaaaaatcaaatatcgcctacgaaccgccccccatctcatccatctcatccttgttcttctccttattttacgaactcttgaagagatttgattaacatggagaaggtattacccatgcgccaagcttatttccatttttgatgtcaatacccgggatgaaactgtttacagtatcacatggaacctcagagaaaatactgaccggtgtccaatcggcttgatgcattaaacatcaccacatctttctctttagacttgtctctacgacaacctttcatacatttatattctgtatccgatactcgcttcgctttatcaccatcaaaacacatccatcctgtgttggtttcatcgtgttttccctactgacatcgaggtattttgccagccagttcaggtcaatgtgagtagcgaacatcacggaaaaggagccgcaaggagtggtgaacctcaagttgctcttcttgaagcacaggctactgacgaaacgacaagctaactgcatggtatcctccaacgccaccccattcaaaattatcatttcccgggagaggcttttccacgtactcgcccttcgaaaggaccgccgtacatggtagttttgaaggagaagtaagagagtggtaataggaggcaatgaagtaggatgcactggtcactagaactctgtcgggaggtgttgtggtttgtcgtcgtcatggtcgttgctgttgggggggacgtaaggacgagcgtcactattttctgaatcctgataacgagcattgtgatagttatcggatgggatttttaaaatgcacaaacgtatgattgactatatgcagttatagatagttttttgatgagaatggatgtcggtacctcttggatg

SEQ ID NO: 164 - DNA, 3461 bp, Cryptococcus neoformans
gcaacttaccgaacttgttcttgacagcaccatttttgaatgccaccaccgtgggcaaggcagacaccttgtacttggcagcaacttcagggtactcatcaacattgatagttaacaagtcgtaattggattctgggccggttacccgtttgagtaaaggagtgagaacacggcaaggctggcaccagctataaaggacaattttagccgacggaagactaaacaagagctcacaaacgctacctggcataaaagtctaccaagacgggtttagagttatcggcatcaagcgctcgcttctcaaagacttcgttactggcatcaagaatatggtcccgcgctataggagaagcgtggaaggcgcgctgagtaagaatggtacggagcggagcgacggagagcctaacgggtctggagagttggccaagcattggagtagtattttgactggagaaattgttttgttggtgtgataggggatgcttttgagagagttgaggtaaaatcactgagatcactgatacaattaacgaaaacaagacgatgagtgtcttcttttgcggccggccggtgaacttcgttacaggaaaaggatgatgtcgatatttgatgataacgtaaccagggaccagtctaaggggacttggtcatattaaccaaaacttttgttgttgacatgtcctctccaaaaaggcttgtaggcggcgaattcacacatacatgactttttaagccttctcatattccagcagcacaaacagagagtcacgagcaccgattatctaggcaaatatttgagaaaaaatgccgaaaactagtatgttgctggtcctcacaatgacgttcgctcctgacaagacatcagacaagggtgggaaagggcaaaagaacaaggtgtatgccttaccaacagctcagagtaaggaccacaagaacgtttacttcttatagccgctaacactacatagaaaaaaagggacttgatgtcccaaagttccagatgaaagcaaaggtgcttttttttctcgggcgattatgagatccctagctaacgtttctgcaggccgctagccaagctcaactcgctcccacctcrctaggagctcttagctccaatgatcaagacatctcgaactcctctttcgatcttggaaatgttactttccatgatgtcattgacacttcgctcacgaaggactcctcatcaaaagcctttatgcgagagttgcgcaaagtcatcgaacggagcgatgtgattattcaagttcttgatgcaagggatcctgaaggtacgaggagtcgttgggtggaggatgaagtgcggaaaagggacatgcaggggaagaagctgttgggtgtgttaaacaaaatcggtgagttttcacttatgaggagaagtgaatgctcatccttgtaataagaccttgtaccaagagcgaatttagaggcatggcttaagcaccttaggcattcttttcccacaatgccattrkagtcctctactcaaagccaaaagcagcatttatcccaaaatgccgttcctcttgcccaaccgtcaactgttccaggaaagcaagctgtccttcaagagcttcccacgacttcagcatcccttggtgctcctgctttgcttcatctcctcaaacaatatgccctttcaacaccacacagttcgctcacagttggtgttgtgggttaccctaatgttggaaagtcttctctcatcaactccctgaagagaagtcgggcctgtgcagtggctgctatgcctggcaaaacgagagtggttcaggaagttgctctggacaagggtgtgaaaattttagattgtcctggtgtagtattggaggatgtgggtagccatatggaaggggaagaaggcagaagaaggcaagcggaaatcatgctgagaaactgtgtcaaagctgaattggtgcaagatccaatctctccaggtaagactgtcggagggtattacaaaaatcattagcttatatgaggtagtggaagtgattttgaacaaagtggaacctgctcaattacagaaactttacaacatccctgcatacgatgacgttcgcgatttcttgatcaaaatggcactcattcgagggcgactcggcaaaggtggtgtccccgaccttgaagcttccgccgttcaagtactccgagattggaatagcggcaaaatctcttattacactaccccgcctaaatttcacccatcatctgcgcctgcacctgcacctgtcgtaactcctgttctggcaccaaatgaggcagcgggagatatggaaatgggtggcgacaaggttggagatgccaagattcttaccactctaagtgaagccttcacaatcgaggggttatttgataatttgggtgacgatgctgcctgggaaggagagggtgtggtcaaagaagagggaattgccgaagagtgagttacctatcccaatagaaaaatggaataaggctcataaatgccgacagtgctgatttgattgctcctgaacctgtcattccacctgcccttgtacctgaacaaactgctcctcgagcctcactcactaaacgtccattcatggactccgaagacgaatctgacgccgactctgacgcatcagattctttccgaccccgcacaacccttggcccttcacccgccacgttccaatccacttcttccaatgctctgcacttcccggctcaaccgcaaactgctcaggctaataggcttttcaccgctgaagagcttgctgtgcttccatccggcctgcttgatcgcaagaaggtcaagtctctagccaagaaggctaaaaagagacgtgccgccgtggagcgtactgaaggagagctcatggctggattcatggatatggacatggacgaacctggggctcgggaggagacggaagtgcagatgcccgcatttgagcagaagtcaaaaaaggacaagagaaaagaaaagaaggaaactcaagcgaagcagcgaaaagaaatgacaaaggtggttgcagagatggaaatcgatgaagatgccaggaaggaggcagaatttgccaatttcttggctaacatgaatggtgagtgtcttgttcctacctaatcaaaccccaggcattagctaacctttatgcagcggatggatcagatgaggagttgtaaatatgtagtatatagtaacacattccttgacgaaagcatgaccttgtttatacagaaattgttccctcacccctgctgcagtttgcaacttccattgcattactctgatgtgatcagtaattgctgtatattttgattcggatgctttggtttacgtccgaacctccaaactccaaattcaccaagtcaaaagcggatcatgattttcatcattgatcatggatcataattcatggatattatatttattccagcgattttccaagacttcaaagggcagaaagggatgtata

SEQ ID NO: 165 - DNA, 3104 bp, Cryptococcus neoformans
aactttcacgtgcttggtcagagagagtggaaaagagcttactgaggtcttcgactagttcgaggtaatcgtcatactgtcgatcactttcgaaatcatctctccgcttgttgaatctatccactgatgttaactaacggacaataggtcattgcgtgactcacatatcagccattcgtcgtcgaactgatacttccttttccactttgagatcttcaaacgtctgatgcgcaaagtttactttacgaaggatacggccgcattgaggacacggttcagggccaagagtgaaaagacgatcgatacacgattcgcacctttaattctatcaacactgggcagagattaggctcaaggaggacatacatcttatgataacagggagaaacgagtaaccgcagattcttgttgaattgtcgatcagtatgacagatagggcatacatcttgttccgtctgtccgaatcatatcagctcatagcttagcatttacaagtatcaacacttacgcgatactctgtaacgcgcttgctaggatccttgactccagcaacgtagagatatccctcttcatgacctttcccccgaggagcggtctgtttgagttgggccgctcctatgagtgggttgggctggcctacgaatggtagaggacgatggagcgagcttctttggaggtattcgggacatgatgaagtgtagttagagtcacagggctccgatgtcttgtcttctctatccatctacagaccagaagagctcgcataaggccgaattatgaagccgggtggatcgggacatcatgcatgcctcttttggtcagccagtcggtgaagtcataaggcgcgctgccaagtgtggacttactcaagcctaattcaatgcctattgtcgtcatcgatgaagctcctggtgtatgttgtacaattcttctccatctgtattcacgcatctgctatatatacgagagagtagactgctagtcctccctcttaccaacaatgtctgcaccagaagtattccagctctccttcggccctctaaccggcgtagctttcagtccagacaggactcgtatgtttctcttattgataccccttgtgcacagctcacacgcccttataatagacgttgccgtctcacccaacaacaacgaagtccatatttaccagcgacaaggtgcggaatggattcacaaggatacccttgctgaggtatgtttttctatcgtacctcgtaataatcattgtgttgacacgtggacgcgcacacctcagcacgacaagctcatcactgccatctcatgggctcccaactcgaaccgtatcgtcacctgctcccaagaccgtaacgcctacgtctggactcctactgagtctggatggaaacccgcccttgtcttgctgcgaatcaaccgcgcggcgacgtgtgttaagtggagtcccaacgaagacaagtttgctgtcggaagcggtgcgagaacaattgcggtctgttactttgatgaggagaacaattggtgggtatcaaagcatgtcaagaagcctttgaggtcgactgtcttatcgattgattggcatcccaacaatgtcttgttggccgcgggcactgctgaggccaaggcatacgttttttccgcttatatcaagggtgttgactcgaagtaagtgagatttcgttgatgctatgcaaccgaatgctcacgtatgacaggcccgagcctacagtttggggtgagaggttgccgtttggcaccatctgtggcgagtttatttctcccgatggcggttgggttcacagcgttgcgttttcgccttccggtaatatcctcgcctatgtttgtaagttaatcttgccaaaataaaagtaaatgattctaatatcctctcagcccacgactcttccctctcaatcgtctatccttccggcccaggtgctcctcccgctgctcactttgccctccgtctcccttcacttcctttcgtcgacctgacattcacctctgaatccgccctcattgccgcgggacacgattgccaacctatcgtcttcaccggctccgaatccggctgggttctttcccactctcttgatgatccttcgtccggaggttctcgtccactgaccccgaccgctaccggctctcgttccggcggggtcggtaggctgggcaacaacgaagctttcaacatgtttaaggctgccgactctaggggtcagcgaggcgtccccgctcccggcgcaactccgaccagtgcgggcttgacgcctgtaggcgctgatgggttgttgacgactgtgcaccagaacacgatcacttgggttgagccttatgagtggggacagggcggagaggttaccaaggttggtacggcgggtaaggatgggaggttggtcgtttggcccgttacagctgccaagtctggtttggcgggcaggatggccgggttgtcggtgtagagcgagagcagactgtatccgacattgaaaggaagtaaaaggttgtagatgcaagttgatacaaggaatgaaaggttaaatggctgtcgatatgtcttggggaattcttctataagttgtggtgcaacacagtccgagttggtgcttgaatcatactatgatgcgtgacttcaagttgtcagaaatgcgaaagccagcagttctgattcgactcatgtgcttgttcctttaatacaataccccaagcacgtctttgaatcaacaggaaaaattatcgtctgcacccttcataaacattatccaagtaaagtacgtgaccgaacttttgacaagcatatttctggtctatgggtgatgagtcacgatagtggggatcatcctttgtatagtactgccaaaatgtccctcctctgtcaaatgtattggaaggagaaagaagaagatggtgatggttgagatggagccggatctcctttgatcttgatttacgactctgtggttttatcatggctggatggaaaaaagagtgtgtttgtcgtgaagaggcgggagtgttcataatgtcaatagcttcccgttcgttgctttgtgtccgttgtggaatcagtcaacgaggcaacgtgtactgaggcggtcaaaaaaaag

SEQ ID NO: 166 - DNA, 3680 bp, Cryptococcus neoformans
atggggagtcgtttggccgtgattagcaaagggagagatgactcgctgattagggtgacctggcaatccggaaggagtttgttgtccagaacggtcaggagtacctgtgcgaatcacggggagggcagcaatgacggacgcggaaggaacaaagtcaaagacagaagacaggtagcttccgacaccgtattgttctgcaagatcccgcccacggtcaagtggaacccaggttccttggtattttccgtctacagtgaacgttttagcgtagattaacgagagcggatacaattgcacgcacatccgccttgaattttttcatgaatgccgttgagcacttccttttccagtatcttggttcgagcggacttgtgcacgccggcaactttgagaatttgtgtcgcgttgacccatctgcaagacatcacgttagacgggaccaatgacgcgatgtgtggaagaggaagacttgcgagtcggaagcacgcctcatcacagagatacctcgaatcatggcttcaaatacgggaacctgcggtcaccatgagtaactttcttttgtttagaggttggatggaaagacgtactccagaatagacacttgcatagactttaggctgggtactcatcggagcctcatgtcccggaacatggcctggtgcccccatcactgagccaaaaacattctcatcattctgttgctgttggaaatgttgttgctgctgatgctgttggatgtgatgcattctctgttgctcctccattgttggctgtacagagctggggcgtggaggagcgatatggggttgcggaatggagggccgaaratggggagggagggtgtggataggagctggtgtctgttctgacagagccggggagatggctgaaaggararagtggtgggacggggtgacggggggctggatggggttgctattgcacaatgggatgagatgcgggagggcggcgacggaagacggcttacctgggcggctccatggcggtgtcttgcggggaagcttacgcgtctttggcgagctggcaagatggaagctggcaagagggagcaaggggaggaggacgcgcgacgcgtgggaaatatattatgcaggaggaagcaaacgaggaggaagaagaaatgaacaacgcgactcgcgacgcagctacgcgccccgcgtcgccccaccatgtggcgaatttgatcccgtactcattacgtaacctcaggtcaaaacaaaaatcctcttccccttgtgcggccaaaagtctgccgcacagcgaggcaccttgccaccacatccaccatgagcgcaaagaaccagaagagaaaggccacggacatcccggcagacagcacagaggtccaggacaagaacaagcggcacagaaaggataagcgtgagtaaactctgcctgtcgttctcatctcactttctcatcacaatgcagcatgggacacggatgatatcgaccactgggctatggaggaattcaaggcgcccaatcccgagacccacaaaccgttccttgaagaatcttcgtttgctcttctcttccccaagtaccgtgagccataccttcgatcagtttggtcctccatcacctcggctctcgaagcctacggtcttgcgtgtgagctcgatttggtgcaaggtaaaatgactgtcaagacgacgaggaagacttgggatccgtatatcatcttcaaaggaagggatctcttgaagctattggcgagaggagtgaatgcgccgcaggcaatcaagattttggaggatgggattgcgtgtgatatcatcaagattggaggtatcgtcaggaataaggagagatttgtcaagaggagacaaaggattgttggacccaatggaagcacattgaaggtatgttttaaatgccatctacatttgataatgtcgctgaccctcaactaggctattgaacttcttaccgaatgttatgttctcgtacagggcaacaccgtctccgtcatgggttcttacaagggtctcaaggaagttcgacgcatcattctcgactgcatgaacaatattcacccgatctatcgtatcaaggaactcatgatcaggcgagagttggcgaaagaccccaagctggcgaatgaaaattgggataggttcttacctagtaagcatatctttgtatcatgcttcttcacatacaccagtagtaaccgatatcaattttagagttccagaagaaacacctcaagacgtcggagaagactgcaaagaagaatgccgctttggaacgagaagcagcgtctgcttcatctgccaacgccaatcacattccgctcggtacctcttccgcgtccatacccgctcccgctcccgttcccgttcctgcatccattcctgctcccaccacttcctctactgaaacgaaggagaagaagaagaagaaggtatatacccccttccctccacctcaacaaccctccaagctcgatcttcagcttgcttctggagagtacttcctcaaacccaaagaaaaagaggcgatcgacaagagaaagaagatggaaaagcaaaaggaagttgcccaggaaaggcgcgcggtaagggaagaagcatttgtggcgcccccagaaaagagagacgagacagtagaggagaggaggaagaagaggagaaaggcggaagagtttatgtaatttttccaagcagtcgcattgatttgctggcttctcttgtgtttttatacattggcattttcactttaggcatgatgcatagtcgatacaacaaaaaaaggtacatctaggatatcaaacgaaatatgatggtgcaccctgtaaacggtcgattagctagctgaccagccaggacaaattagttcctacttaccactcttctcattgccgggttcttctgatccgttgaattttcaattgcggcgtcgtacactttgaaactcgtcctgccatcttcgtctacttgcatgatgctcgccgcattaccgcatctgtagcagtagttgggagctgaccataccgtgacaagcgattcgtcaaacatgtgtttgtaaccttcttgaacaagttgatgtgctcgggcgattaacgacagaccgttgatatagttgaactttggaataacccaacccgaaattagttggatattttttatttttctttgcagattgcaaagcagaatcgcagcagctcacctctgaagtcactttccccccaaacaaccaccctgcacctctagggcttatcgaccaagtctcaacctcatcagggtcagaccacatcagatcacagaatgcaccttcgtgcgggacttcttgtgcgcgagaaatggtacgaatttgatcgagggtacggatatcgggcgagaggccaccgtgaacgcagaggattgaagagtcaattatctggtaggatgtgatcagcaggtcattcattaaaacgcaggatacccaagacagtgaccaacagcagcaagattgaggtgatcgaacacattacaacaagctttccataccgaaggattgccgtacttctgcatacattcatctaatgtttctcctttgttagttcactgaaagcaaaattgatcgagaataaaagcaaagcttaccgtagaagccgtaaacctgggtaatctgtctactttcatggtttcctctcaaaagcgtaatcttatctg

SEQ ID NO: 167 - DNA, 2849 bp, Cryptococcus neoformans
aaagaaagagccttggagctgatattatgcgctgtagacgctgatggtgaggacgcttatgggatgcgatatgtgttcaagaagcctgaagaatcatgaagggaatagactgatgtgtaccatgttgaggatgcatccatgatatcaaaatgtatagcatttatgcccggcctcaaaacgacaggaaggagacagaatcggacgaaatgaacctgatatgcaactaggttgccgattgtattacataatcacccattgctctatatgcatttcaggctcagttcgcggattgttcttcgttcatcggtctcttcgttcgaatcctctattttcgcgttgtttactctcttgtgcgagcccatcttttcatttaccggcatccaacagcccttttccaacgcgctataccatgaacggatactacgacccccaacaacaccaatcgactaatatcgagatcccgcaaggccctacgaatcaaccacgtcttctccttcgtaacctcaatgagacggacgccactttccacctttctggcgtggagctcgcctatgcgaacagtctgagaagagttatgatggccgatgtgcctactatcggttcgttttcataattttttttgcttgcgcatctgtatactttgctgacataacgctcttgcgttcctgtcgttgtcgaatacgtcgcaaatagccatcgatcaagtcctctttatgcaaaatacaacgcctttagcagacgaaatgattgcccaccgtttaggtctcattccccttatctcccgtaacgtctcgaagggacttcgctacactcgagactgtgactgtgacgaaggatgttattactgtatggtaactttgagattaaaggtgactttcagtgggaatgatggagagcagttcatgagggtgacaagtgatatgttggaagtggtcccgagtcctggtggggtacgtttctcttccttttctttcactatcgtgcggcgttacccatatttcttactccccgctgatccttctgacttcttcatctagcccccgccccccaatccttatggacctccacctgaactttcagaagaagatcgcatcatcatcaacaatcgtgatcctgaaatgggccagcctattggaaagggaaatcccactgtacctccgatattgatcgcaaagatgggcaaggggcaggagattgatgttttatgcaaggcttataaggtgattttgccgctacatcgtgtcttcctgcgctgtaatactaatggactgccactatagggtatcgcgaagcaccatgccaaatggtctcccttatcaactgtagcctttgagtatgacccctataacaaacttcgtcatacaacgcattggttcgagactgatggtatgttttccatcttcccctgctcggtgttcctggtctttttatatcctaatatatgtcgctagaacgtgcggaatggcctctctcttcaaatgccgcgtttgaaacccctccaaatcccgcagaaccattcgactacaatgcggtcccgtccacattctacttctccgccgaatctgtcggttccatccccgtccgttccgttgtcgaacaaggtctcgaccttctgatagagggcctcgcaaatgtcgtgttgggcgtacagaaagagattggtggcgaagaggaagagggggaagatggagcggccgcagatggagttgttggggatgggatgggcgtgggcatgggagggggtttggtagaaccgaatatacctgcggggataggtcaagatcagatggccatggcaggtggatacggagggtacggatctcagcagggttatggaggttcatggtagaaagggactccgtttatggctatgcataggacagagtcttgggacactgggtagaggagaaaggacgcttttgaaccgtccgatctgaaatggatttgtatcttttgggctgtgcagttgttccacttcgtacattcaaatcttttggctgaacttaccctctctccctgaaggtcatgctcctaatccttttgctcccgatcttctcgtactccctatgatgtttcaacccttgacgaatacccttcaatattattatcgagtattccgttaagacagggaccaagggcttattttatagtaaaagttcaaaccctacggcattagctgtattatgtaatgttaaagaccgacgggcttgcgctgcctattaaacaacaacggcaaacgagccgctttcgttagctgtcgttcgaaagactcaaaattctgtgtcacttcatctccttaacaataaagtgaccatgaaataggcacgataatagcgctttccatcgaattactatggtctgtataacctcataattatggtcttcaaaaggagggttaacggacgacgggtcgagggataaaacggatgtgacctgtgagcctcctttcatacatactttccttttcgaacttcccaggatcattgctgagacatactttaacagacttccacctgactctgtatcacttatctatatcttactcatccactacatgaaaatgatggcgctgtaggcgagtaattgcaaacgtccaatcacgatgtcaagtctcgcagagcagctccaaaaggcagagaaagatctggcagtggcaagagagaggggcttatcaagcgcctccaagtatgaggaaaaggtgaagaaacttaaagaggagctggccaagccacaaccgcatcctgcgtaagtacagtttggcgtggtgcgtctacgctttagcgttataactaatccatgaaacgagcaaagtctgcaatttaatgaggtcgcacaatgcatctccgtca

SEQ ID NO: 168 - DNA, 3562 bp, Cryptococcus neoformans
ccatgttgggtaccctgatgcagagtcagccaagcatgacttcccttccaggctgacttacatcattacggcctgctttttcataccgtccatcgcattttccatcccagcaccttcgagaggattggcgggagaagcatccccctttgactctggggcgggcttgatatactcaccagtagaaagtgaagcagcaagggatcccgagagagccttgtaagaggcaggcggaaggggggacagagtcgcagttgcccgaagcagagctgagcgaccaagtgcgcgtctagaggtgagagacggggccgataaattcagatatcaagaacggtttatctggatgtgcttactgttcgcgaacggcagctgctgtttgtttttttggtgcagagttaaggaattgcgtgatgtagtgtcttaacacaccgacgagtagctaaaagcaaatgagcatatcggagtatatggtagtagctgtgagcacttaccatgattagggtgatagggataaggacccaatcctattcattgtcgggttagtacacacatgacagaagtgttttaggacatacccgaatggaggggtcaagatagagatcttgcctgtgaggtggtgagttatacgtgtaaatgtgggtatgctggcaggttggatacgcactctgccttgactgtcatgttattatacctgccagggctacggtggtcgttaaagaagtgtaacgatagatgtctagcttcgttgtacagtcaccgcacgctgcagaacaaacagcaacctgtgtgcatatcatatcgcagaaagtgatgacgcctgcaggagggtgctttaactgaggggctccgttaaattcgcgaggatgtgattgggcccagccactttcggggattcggccgaaatcgagtcacactccaaagatccaacaaattcgtctctgttgggctgaataaaattcatcttcccaaacctattctttttttttcatccaaaatcttaaaaatgtccttctccagagcttccagcaacgccctcaagcaggccctcaagtctaccgcctctcgacaggtcgccaggaggtcctactctctcctctccggcgccgcccctagggccgccatggctacccgacttggcgtgagttagactctctcaaagtaaatgcttgatcgctgataggacgatgaattgcaggccactcgaggcatcaagactctcgattttgccggtaccaaggaggttgtctacgagcgtgctgactggccccttgacaagctccaagagtgaatacaattcttttttctttttttcttcggagccggcttcagggtcactacgcgttgctctgctctactttgagcgaaactgttaactaatgcggcaacctgtagctacttcaagaatgacactcttgccatgatcggctacggctcccagggtcacggtcagtccctcaacgcccgtgacaacggcctcaaggttattgtcggtgtgcgaaagggtggtgagtcttggaagcaggctcaggaggacggttgggttcccggagagactctcttcgacatccctgaggccatcaacaagggtaccatcatcatgaaccttctctccgacgctgctcagtctcagacctggaacgagattgcgcctcttatcaccaagggcaagactctctactttgcccacggtttctctgttgtctacaaggaggacgtgagttatcttttattctcctttgaaaacggaaatgatgttgacagccgtctagacccacgtcattcctcccaaggatgttgatgtcatcctcgttgctcctaagggttctggccgaactgtccgaactcttttcctcgagggccgtggtatcaactcttccattgccgtttaccaggatgtgaccggtcacgccaaggagaaggctgttgcccttggtatcgccgttggttccggttacctttacgagaccaccttcgagaaggaggtctactctgacctttacggagagcgtggtgttgtaagtatctctggggcggcacagaaactgaatcaaaatactcattgaattttttttacagcttatgggcggtatccaaggtatgttcctcgcccaatacgaggttctcaggaagaacggccactctccctctgaggccttcaacgagaccgtcgaggaggccacccagtctcttttccctctcatcggcaagtacggtatggactacatgtacaacgcctgctccaccaccgcccgacgtggtgctcttgactgggcccccaagttcaaggagtgcgtcaacccctttgcgttcaaaacggctcactaacaatttcttcagggctaaccttcccgtcttcgaggctctttacaactccgttagggacggttctgagacccgacgatctctcgagttcaactccagaaagacctaccgagaggacctccagaaggagcttgacgagattgacaaccaggaaatctggagggctggtaagaccgtccgtggtctcagggtaagtgctgcgagttacaatggatgttttgttttcccgctaatgcttrstagcccgacgtcaacaaggatgagctttaaacagaccttcccatttgtgttcattaatcccaccaaaatggcgcccttttcacattctgtttccagtctcaatcatgcatacccatgaaagaatttgcttttaggtgcccgataaaaaaattgttgatgaagctgcagcttgagaattcgccgcaacatgttcatgacataacgttggtcgtaaaatatgatagctacaaagagtactactataaatgttctcatcttaaatatccatctagaaactatcccgccaaggacttgatatttgtacttatatataacaattcaactctttcagaccttgcatcctaagtctgccgctggctgtcgttctcccattctggcatatacattggcggcagatcctctacgctttcttcatctggaggcggcgcgtctatcctacccgcatcttcgtgccttctgaatccgcctgtcggtgcatgctgaggcggtaaacgcgtcccaaagtcgtctcctgtgggggccgattcatcggggttgtgggcattcagtgaagttgccatttgcgcctttgtcatgttcctgttggtagtatttgagcctgtggcggccaaattaggagagccaggcacaagaggcgaaagagttgtatgagaaatagccggagagggatagcctcctccttctcctattgtctcgggaataaagatgctagagctcgaaagagagtcgtttcggccgcggtcgtgtagagtaagggcgcgcgggggcacaagtgaatctgcatcagaatcaaacccaagagcgccaattgttgggggtcgactggacgctaccatagaggcgattgagtttgagcgaggcggaacagccgccgcgccgtcccagaagggtgagatggacgaaacagcatcaaagtcgtcaccagaaccggagcgggggactccagagtgagcagcgttactgtaacgactgctacgagcggcctcagtggcatagtcgccgg

SEQ ID NO: 169 - DNA, 3438 bp, Cryptococcus neoformans
catcaaccgtgcattgtatatcgagtgtatcgcgggggaatgtagagcgggcaagcactgtcataaccagcagtacgtgaagtacataggcagaatggcgaaagggcccgactgatgggcggcttagattctcgaagaggcatcaccaagcacagcgattctgctttctacgtcgtcactaacgccggccgatccgtcgaggacaaggcccatatctcgcaaaagctcgaagagtggaatgccgcccacaagggacgagaagtcaagtgggagactcttgaaggctggggtcttttagcactccagggccccaaggccaaggatgtgcttcagcgagtcactgaccaggacttgaacaaagtgaaattcggttcaagtgtctttgctgatatcaagacgatggacggtcaaaccgtcaagtgtcatgtggccaggggcggctacactggcgaagatggctttgaagtacggtcctgtcctttcctttccgcttctcattttatctctccactaaccccatcacttaggtatcgattcctccagagcatactctcgctctttccaacaccatcgcttctcatcctgacgtcatgcttatcggtcttggcgctcgagactctctccgtctcgaagctggtatgtgtctctacggccacgatcttgacgaaagcgtgagccccgtggagaaacataacataccttagactcctctccagctttctcggttcttccaaacacctctcgaccaaccgcacagttgtcggatcgatctcccgtatatgactattggcaattaaggacctcaagaccaatttaatctgagggcgcttgtaagggtcggacctgagctgagcgaacatgtacaacagccggccacttcgaacgagcgtcacggcggccatcaacgaccatcaccaggtcggtcgcgcctgtcctcttgctttttttggccgccgagaaagattgtttacaacaactcttcgtcaaaaagttcagcaaaatggttctctcatatagcgccatcgcaaaacccacagcggacactcccaaggtaatctcaatgactgcctccaaacaagtcttccccgaagcttttgaggcattaccggctcctgccgctgaagagtctcaagagctagaatctcaacccgaagctcttgcacaggcgtccagttctaccatcgaggcccctatttcgagcgaagaccgaaaagtcattcagcatttgatccttgatgctggacctctgttgtctttgacgccgcttcgccatctcgctacgagcttccatacgaccccgatggttcttgcggaactgagagatcctaaagctagggagcattgggagaggcttgcgttgactggggtcaatgtcaaggtcgagtcacctactgctgaagccatggcccagggtgggtactttgttgattattcatgatttactgtgtgctgacgaacatacagtcactgcttttgcgaagaagactggtgactttgcggtactttcacaaactgatttgtccgttgccgctttgacttatcagtatgaagtgatggtgaacggtgtcaagaggattaggactgagccccctcaagcgaagaagcctagtgccaaggggaaggagaaggagaaggacaccaagcaggcggaaaagaaagatgaggaggtccaagagaacaaaaacgaaaaggaaggaaagcccgaggaggaggatgttgaagtggaagaggcgattcagtctttgagccaaattattattgaaccttcaacgaaaagcgagctttcagtaaatgatgtttccaccaccaaccggtcccatacccagacctcagtcccagcttctgcccatgcagaggatcctgaatccgagggcgaatggatcaaccccacaaatctcagcacccatcggtctcgagatctgggtcttatcactccttctggatcaacagccaagcctccggccgttgcatgtatgaccggtgattatgctgtgcagaatatattgttgggaatgcgattgggattggttggcgaaggcggtaaaaagattggaaaggtgaagagttgggtattaagatgccatgcctgttttaagtgagttagtaactttgctttatcttgaacatgtctgattctgtgatagagtttgcaaggatcctagcaaacgattctgtccatcatgcggcaatgctacgcttcttcgtacttccgtttcaacatccgctaaaactggtgaacaaagagtgcatctcaagcagaacttccaataccgcactagaggtaccatctattccatcccggaccctaagatgggcagagccaagggtcagcaaaaggggggaagcggcttaattttgagagaagatcagagggaatggcaggatgcaatgaggggagatagaattaaaaaggagaaagaagaaaggaaggcggctaagggcgctttggaaggttggaatgaccctgacgtgagtgtcatcattcttctcccgctttgcctctagctcacagctggtacagtggttgcccgagatgatcacagtaggtatgtccggaaagggtcgctctggtggacataacatgccttcaattggccacgggcgtaagaaccctaaccaagcaaagagacgacgatgaatggtgtgtctgccaagcgggtttgtagtgtatagaccgatagatttgcgtatattctcgctgtaagtcgggaggtgcatatatatactacaatgtggctgactgttgaagaggatggacgacactttccatgtatcaatgaatgacaatctccaagcttctgtgtcgatatcggggcactgtgacaattgcctgatcagatgatgaagcgcgccagttcatgttggtaatgagtctgtcgacatgttctctgacttagtcccagccgccccagatacttatatgctcatgcatagcactggccggtgtcgctccatgcctgctatgaccgtagtcttcagcgtcatgttcatttccgtcatcgcagccatttactacacttcccaccactacgccccagcagccaggattgaggagttaccggacaacgagactgctgtcaccacgcgatcaaagaattactgccatgtctcaacgaccaactcaccaacccaggacatcccagcaatttgccaccagccaaaaacaaaaagcgatggacgtcccgaagcgtgtcaagttggaagagcttcaaagaaaggtgcccaatctttggtcatcaaagaagaaactaagttagatcaagcggcatcaatatggcccttcaccatactctaagacacagacgcttaaagctagtattgcaaagaagggaaataaggatgataatttatagagcacgtctgggggaacatacaaagtcgataaaggcagtagcccggctagggaaaaaaaatgaacataggctgtcgatcgacaga

SEQ ID NO: 170 - DNA, 3683 bp, Cryptococcus neoformans
tggaactagaggttgagaaatggaagacgttggtgtatgggaggccgatgtcggcatcaggacagatgatgggttgtatcctggggcaatccgtttgaggttatctcgtctaatgggaaagttgatcaatcagcatagggcacattgcagtgaaattgacctctggccacgagacagcgtgtgccttcctgaaggaagacggaaagaggactcagacccactctttttgttcctctgcttcttcccttttgtgcaagatctcggcgcacttggcccgtttcagagcgatggcttcatgtggcgaaggatgtatcgagaggacatgttcttcaagtgtgaaagggtacacaaactaccaatgccggaaagtaagtgagcccatttaataagtcttcgaataaaagggacgctgatgggatgttaattaacatatgccaacagtacttacataggcagtgatgtcctctggtaagggatgtatctcatttggcagctcgacctatcccaacatctttcatcagtacaaagacattcacatgccagcaaaggaaatctgtattacaggctgagggagccataacgagggtgatttgattaacggcactgtagcagcggcagcatactgctgggatatagggcctgggattagaaggtgcgcatgagcttttcggagtgatggcttgaggttcgtgagggacgtacctatatccgatgtcgagagcatttttggcatctgcctaaatacttagtatagggattaaagattggatacagatgtgatgagcaaactcatccgcctcgtcgttctcgccatcattgcccattgtcgtcacttgctcgttaaacgccaactgctgtttaccgctggatcacgtgactttgactcgttcgaaaagggaacgtaacgtttggtccgcgattcccttcctttcgttcgtttctggakyagtttgctattgttgcccttcgaattgcgtgaatccactatcagagcaggaaaatggccgtcgactccgccccggtgagttggkcaaaaagtctaagggaaagttccttcatgcggctgacgtccttaaragcaaatgcagaaatctgctgacccaaacgctcgattgactgatactctttgcaccagtcttcggagacggtgagtcatgagtccgtacgtaccttttatatgctcacgtctcgtattttaaggcaaattgttggatccttgaacgtcgctctcgcaacggctgctctcatccagaacatcgtcagaagcgctagatataacaccatcgacgaattactggccttaatcaaagctgttgggcggaaactcactgaggccaaccctaagggtatgtacagctatcacacatctggaaatgtatctcatgcttctcgtagaacttgccgccgccaatatcattcgtcgaatcctccgtctcattcgggaagaataccgcgccgctgcagccgcccatgtctcatccgcccctaactccatcccttctacccctcttatgggtcccagcacaccaggtatcaacgcacctttagatcactacctttctgccgcccaatccgccaccgtcgacgctcagtattttcccactcatatccaaatgtcccgccagacttcactctcaaactttgtggccatgcgtcactctcgagctcagatggaaaggagtggcgcccttagtggagggacagcggaaggatactcagcgaatacaacgaatttgtttgcgacccccaatgggaatgggcatggcagaggttcttctggaatggcaacgccaagggcgagtgtggatagcgatgagtttatgaagcatagtgctaagctcaagccgttattgattcaggccattgaggaggttgttggtgagctggagaccacgcatgaggatgttgccaagggcgcaagagagcacattcactcttcgtaagtatcgcgcattcactttgttcccgcgggactgctaatgcgaggtagcgaaatcatcttgaccatgggccactcgagaacagtcgaagctttcctcaagcaagcctacaaagaccgtaaatttaccgtcgtcgtcgccgaatctgctccgtcctacctcggtcactccctcgcctcttccctttccgcctccggcatccccacccttctcatccctgattcctccatccacgcccttcttccacgtgttacaaaagtcatccttggcgctcactctgtccttgccaatggcggtttgttcgcgctgtccggatctcttgcttgtgctctcgcggcaaagacacattccaagcctgtcgtcgtgactaccggtcaatttaaattcgcgcccgcgtggaatttgtaccatgaatacggagcggtggatttccagggacctggagctgtgattggggagcaggggaagggtggaggagggggtatggaaggggttgaggttgtggatccatattacgactatattaggcccgagttggtaaatctgtttgtgacaaatgagtaagtgtactttttggatgtagagtagcacgtggctaatttagtctgtagaggcgaccacccaccatcttacatctaccgcttgatcaaagaggcgtacgatgatgaggatgtagagatctagtcacagtgacatctgtatatgcatttcttcgaataaggtattttctatgcttggtataaatacttgcatgcctattcttccgcaaacagtgccttcctgaaccaatctaacctcttatccactctccaccctttccacccttcttcattctctgacccaaacttcgtttccattctctcccaaacctgcctcagaacttcctcatcaccatgagttactctcccaaaagccttgagcactgtccacaccgcttttcttccaggcgctttagcataaagcctcgcctgcttttcagcttgtaatatattcacgtccgatttcaaatcgggtccagactgaggatcggagaatgtcaaaggactaaaagatggcaaaatcggacgaagagtaaggaaggattcgaatatatcttgtaaagcctccaaagtccattcgccattaccttctcgaaacttttcaactggccattgaaacggttcagcaaacatagctcccctctcccagatcccactcatacgctgttcaaagcttcctcccaaaccatctaattcacctccacccgacgcactggcaacccccagcatcttcccggcttcactcacttgtcccgcgttcccaaaaccaccagtatctattgaaggggtaacaccgtgcttgacaaaccctttgaaaagcgctgtgtagtcatcgacagaaggggtatgtccgtcttcgaagatatgcttgaagatggtaagcgttgcggggagatggccttggacggataaggagacgaggagaggtgaatacgaccggcgagttagacgaacggagaatggcgggaggggaatatggtggggaacgtgtggatgggtgccgtcaaagtatgatgggttgggaagagaggaacggattatagagaggtcgtgagagtccgtaggacgtagtcggccgtaaacttcagagacaacgtcccatcgtcccaatttggcgtaaacaaccattgcgtaattgactaatatcgacatatcctctttcgtcaccacttcctcatcgaagttttctaacaccttgtccaat

SEQ ID NO: 171 - DNA, 3476 bp, Cryptococcus neoformans
ttacctcttcgtcacagtcacaccacctttttacgcgatagagctggtactcacctgagtaatcgaattcaccggcctggccgatcgagagaccaccggagccaacgacgagaaccttcttgacatcgggcttttccagcttgggaagcacctttgcggaaatcttcctggccaattctgatggagagttgagggtgggctctccatctacttgggcgtaggagccgactgctggggcagcgacggcatagtttctggagagtaatggtgaacgagaaaacggggcgagagggcgtgatcggagcgggagggcggcacgggcacgaggaagggatcggagcatgtctgatggttttttttgtgggaacgaaggtgtcccccttgggctggtggtttatatacttgggggtgataacgatgcgactcaactttcaagcgaaaaaaaatacactcaataaacaacattccacccatttcttcgtcccctccgacctccgtggctcttccctagtcgcttgccctcgctgcggcaccccctgctcggctggtactggttcctttgcagacgacttgaatgggaacggggtgctgtaagtggtagagtagcccaagtggtcaaaggatggtcgaaatttgtcttggtgcgttggttaaagttggctgtctgggcctctaaggatagcttaaatcttggatgaccgcaatttaactttaagttagtcaaacaaggcgaatagggcctaagatgagtatggaaagaagatatagaaagcgatcaacaagacaaaccaaagtcaggcgcggaagggacgggagaaattagaaataaattaggagctttctaggtttttaattacggtgtttacgagttaagaatgacctccaccctcacattcaagatttttggccaccatcctggtgactgtcagaagcgtatacctcctcgaataagtctttattgtgcatctataacaaaaaaacaaagagcagattgagcacaatgcccagcccgtctccggaggcatcctcctcaatgtctcaacctggacctccatcccgctccccttctcccgcgtcctccaaccccgacgctcctgaagcatcgcacaacaagacgttcgcagacctcggtatcagtccggagctatgccgagcatgtgcttcgatgggctttaagaaaccttcagatattcaggctgaagcaattcctcatgctttagaaggcaaggatatcattggtcttgctcagaccggttccggtaaaacggcagcatttagtttgccgattctgcagacattatgggagaatcctcaaccatttttcgctcttgtgttggcgcccactcggtaagtcttttggataaacttggacgtattctgataaagctgtagtgaactggcgtatcaaatctctcaacaagtaacctctcttggatctggcatcggcgttcgcacggctgtcttagtcggcggtatggatatgatgtctcaatctatcgccctctctaagcgacctcacattattgtggccacccctggtcgattaatggaccatttggaaaacaccaagggcttctctcttaaatccttaaaatatctggtcggtactttttttttcccctgtgtgttgtgcttacgcccgtatcaggtaatggacgaagccgatcgtcttctcgatctcgatttcggacctatcatcgacaaaatccttaaagttatcccaaaggagcgtaacacataccttttctctgctactatgacgaccaaagttgccaagcttcaacgtgcttctttgaataagcctgtccgcgtcgaagtctcttctaagtactcgactgtctctaccctcctacaacactatctcctccttcctcttaagaacaaggacgcttatcttctttaccttgccaacgagctttcttcatcttccatgatgatttttacccgtaccgtcgccgactctcagcgattatccattatccttcgtcgtctcggtttcccagccatcccattgcatggccaaatgacccaaagcctccgactggcaagtttgaacaagtttaaatccggtggaagaagcattttggtggccaccgacgttgcttctcgtggtcttgacattcctctcgtcgatctcgtcatcgtacgtctattcttacaccttcgcttgaacgcagactaatctccagcttcagaactacgacatgcctacaaattctaaagactacgtccaccgtgtcggtcgtactgcccgtgcaggtcgttccggtaaatccatcactctcgtcacgcaatacgacgttgagattcttcaacgtatcgaatcccatattggcaagaaaatgacttcttttgatgtcgacaaggaggcagttgcactcctgaccgacactgttgcgaaagcaaacagggaagcggcgttggagatgagggagagtggtactggtggtggaggtggcaagcgaggaagggataaggggaagcgaaagacctttggcgatggagatgacagggatagggacgatgatgttgtggaagctggtgtgccgagaaagaagaacaagttcacaccggggggcaaaaaaaaggcaagaaagtaatatgttcattgcaaagatgttgttcgcatttacatgtcatgtattggatcatttatcggcatagtacatatcatgtcgcactggggaatgattcatccttcgtcaaacaaccaaacaaacctcagtcgtgcaaaaaagtgataaaaaaaaatctgctttacgcagtactgttgaaaaattttcggacatggtcctttccattgaccccaatcccattcaaagctacgtttggtcttggcaaagttcctatcccatccccattctttttcacttcatctgtccactcccaatctatcatgtcgtctgggggaagtttttcagcgaagcgttttttgaacagttcgatattgccgccataaatgatctgatgagcccataacgctgtacggacccataaacttacataagcacgatttagctatccatgccgtcagctcatcttttctctgagagcttgggagcatcagttaatcatgaacgtacgggctggagtttggcatagtgtgcagcggacgtaaggaggaatatgatgaggttgtcttttgtgggacatattcgttccagcaatcgaccgtgctttaatcgttgttctctactggaccaaacgcagcctaaaccttcgaacaacctcatttcggtctgtttcaggcgaaccaattaacgctaatcgtattcggaattggattgactcacctcaatacctttcttcatgtcaatcaaataccatgccttggccaaccccttacgcacaggcgccaagtccgttcttaaccatttgttggcgtctccatacgtcgacatgacctttctctccaattgcatccatgacctaatccactcctttgccctacaaaagccccgctcggactttgcatc

SEQ ID NO: 172 - DNA, 3608 bp, Cryptococcus neoformans
ggaagatggttgtgccaggtaaaaggcgagcaggccggcatacgtgtggagagatgctgagagaaggtagggataggaaggaaggtaccttcaggagtgtcaaacaccttttatcgggggcagagagaccatctgagcttacgtttcgagctcctctagtgcttgacggtaacgggcatgcttgatgaggatcaaaatcagagcatgcaggagggacggtttctgccacatttatgagctccttgtctggcaccttttggtacacttacatcctccattcgggcaccaacacgtaaagaattgatccatctttctgcttgccggtaatcgtcgtccgtttgcgaagcatacatagatgcttgggtgttttgtacgacatctgaacttcctgatgacagaaagagcagaccccactgccatcttgcacgccaatcgacttcacggcatcgaatctatcatggatgcatcagcaaatacataccgaagagctacatgcactgtaactgtaccaaccagtatagcccaggctctctttgcgcgatcgatatccccgcggaggagacaggcgtggaggagatgggcgaggctgtgaatgtatgcatgcctcaggggcagttctccgtgcccatcatagtagtcctcgtctgagtcatcgctgtcgtcctgcctgatagggagtataggctttgctggcataggccttgttatcccaccctaccacatacggagctgttttggctagcggacacaaagacggaaaaacaaaagaacaagtgacgcctaccgtcggcgtttttttcgaccgctataaaacgccgaaaaaattgaattgttcccccttatgattttgagagggcgccgttcaaaccaggttcttcatcaccttagggtataaaactactgaaacaccacctacaaaacaacaacctttgtcagcgaacacacgctaggcaaagaacactcagaagaaaccaacaaaagcaatcatgtctgagtgagtatgcacccggaaacgccaggtggaggtcggactcgtagcgcgcagtgtggaaggaagggattccgactggtggcgacagctcgtggcgggcgttgtaaggatgaacaggaaggatatgacggcagcgcgtggattgaaagcatgatggaaaaagggcgtgacgatggcgacgggatattcgagatgcgagcaatgtgtgattgcatgctaacgctgtgtctagcactaagggtgcggccgagcagggccttcaaatcgacggtgacctcatcaactccaactggaatgaggttgttgacaagtgagtagaggtggtatgtgctttagatgaataagtgctgacgagtggggtagcttcgacgacatgaagttgaagggcgagctcctccgtggtatctacgcttacggttttgagcgaccttctgctatccagcagcgtgctatcatgcccatcgttactggccgtgactgcattgcccaggctcagtccggtaccggtaagaccgctaccttctccgtttctatcctccagagggtaagtcttatctaagcagatatgatgtgcgggtttcagttgctaagccatcttttatctaatagatcgacaccactgttaagaagacccaggctcttgtccttgctcccacccgagagctcgctcaacagattcaaaaggtcgttatcgctctcggtgactaccttaacgtcgactgccacgcctgtgtcggtggtaccgccgtccgagaggacattgccaggcttaacgagggtccccacatcgttgtcggtacccccggtcgtgtctttgacatgatcaaccgaggtgctcttaagaccgaggccgttatgatgttctgccttgacgaggccgatgagatgctttccaccggtttcaaggagtccatctacgagatcttccagcttctccccggagagacccaggtcgtcctcctttccgccaccatggcccctgaggtcctcgacgtcactaagaagttcatgagggaccccatcaggattctcgttaagaaggacgagcttacccttgaaggtatccgacagttctgtaagtcgcattgtaccacccagattcagacatgtacatcgctgacatcccattagacattaacgtcgagaaggaggagtggaagctcgagaccctttgcgacttgtacgagaccgtcaccatcacccaggccgtcatcttctgctctacccgacgaaaggtcgactggctcactcagcagctccacgaccgtcagttcaccgtctctgccatgcacggtgacatgaagcaggaggagcgagaggtcatcatgaaggagttccgatccggttcttcccgagttcttatcaccaccgaccttttggcccgtggtatcgatgtccagcaggtttctttggtcatcaacgtgagtatacatctatagtcgaaagtggagttggagagattattgacaattcaacgaccagtacgacctcccctcttctaaggagaactacatccaccgaattggtcgaggtggtcgattcggccgaaagggtgttgctattaacttcgtttccaacgaggacaagaacatgcttgaggagattgagacttactagtaagtttcatttgatgtaaccacagttttgacactgctaacccaactccacagcaacacccaggttgaggagatgcctcttaacgttgccgacctcatctaagtcaccacccctttatctcacgccgaaaattcccgtactccctcccctttaacccctcttgtaatcctttttccttatctatcttacccttatgtgcccatcgtcgtggagaagtcgtcggagaggtcggcggccgaagcgattgtgtggaggcagggtgatgttgttcgaggaggcggctttagtggactcatctaggttgggcagacggttcgctttataggttgcttttagtttgtgcatgatatttctattccatttctgattacgtgttggtgttggagtctgggacgtgatgcaggactactcttgggtaatgtttgacgtgttattggtcgtaaactttgtcccatataggaagatgtggtacagagccaaaaacaaaatccatgaatgagaggtgacaagtaatgtagatgaaaagatggatgcagtgctgagataaaaagtgaaaactgaagtaagagaataataggagtggagtatctcatactaatctcccatgtccagctgcaccaaacttattccacttggtctctcctgctccttctccttgcgtccgttcttcagccgcaagcatgctttgcaccgtctctgtaccctcagtctggctgggctcagcagtcttctttgctattctctcagccttcatacgggcaagttcttctttgatggcggcatgagttttaggaggttgctaaaaaggtgcaagaaggggagaagggaatgtcaggtctctcagccgtttttgtggggtgaggcataaaaggtctggttggaaacttacgtgggtggtctcatatggaggccagaagacctccttatactgtataaaggttcgcagttagcctcattcgtactttttggtatttatgaagataatcgaatgctgccaaag

SEQ ID NO: 173 - DNA, 3526 bp, Cryptococcus neoformans
agacgtccatcgctatcaaactgattcgagagcaattttatcaggtaatgtcattgcgctttagaggaaagaaactgtcagacaaccaacaaagatggtttgagcttggtctcaagtgtctcgcagctggactgcaagacgaggaggcggcgaaaatttgtgtggtatagaatatgtagcacgtttttcacagttccgcaatacaacgatgcattgtagcatgacattgggatgagtttcattccaactaatattcacgtgtacaatggaagttctacagctacagagatcattacaatagttcgttttaacagtattctgatctatcctacgatgtacggctaaatcgacaaaaagttctgaaagactatgatttctccttgcctttgccagttccattcggttgtacgtcgtacttgttgggcttatgggcatggtccgaatggtcacacttatgagaatggtgatgtcgacgtggcttccgcaatggtctgtctcagacaatggtgcatcagcaaatcgctttgagacacggagcaaatgcgctaacctggcacgaccatcgccagctccgccgtccgattctgagctctcctcctcttccacatttgggtcgtccttcagtctatgacgatgactgttactacctctggaaggacggcgatccgtttctgaagatgatccatccgatgacgattcatctgaagatgattcgtcaaatgcccgtggcttgtgataaatgcagcatactgttcatggttagtgaatggcgggtctgttggccaaggccccggtcacgagtcgttcgatggatctcgagcaagggcaggcagcggataggactcactcttggactttttctttccgagaccctcattatcaactgtctcttctgtccacacgacgcggcgctctgttgaagcgcctgctctgagatggaggacggtttggggcggagtgtctgtgggagtagtatgtgtctgggtgagggtgagggtggatgtgcgggagggcggggagcgttgtgctgtggacattgtgtgcgagttgtttgagtgtggaaagcgacgagtatacgtacattacgtagtgtttatatttggagacgcatccggtccaccgtgggaatcgccgcttctgtatcttttctccagccgcttctccactcacttcttcgtcactttatccaaatatgtcacatcagcgcacagcccatttccaggtgccacctctccagatatcgtgggtccatacaagccccatgccagcgcaagctcacattccagccgtacagctccgtcctccacggcggtatccatcatcctactctcagaacatggcaggccaacgggcggaacctcacaaagtctatgcttatctaccccatcttcatctccgacgaccctgacgctgaacaagaagttgcaactttaccagggcagaagcgatggggtatcaacaagctcgaagcgttcttgaagcccttggtggaaaaaggcttgaagagtgtgattcttttcggtgtgcctgttactatggaaaaggcaagttgcattttggatttcggtgtgacggtgcaaaagggttgtgtctgatatgccttgtacactaggatcctcgtggcagcgctgccgatgacgaatcgacccctgtcattcaagcgctgaaactccttaccaacgtcttcccccaactcatgctttgtgtcgatgtttgcctttgtgaatatacgtctcacggtcactgtggcattctctcgtctctccccaatccagcccactccaacgcccccactcttgacgcggaggcttcagctcagcgtatcgctgaagttgctgtcgcctatgccaaagctggtgcgcactgtgtggcaccaagtgacatgatggatgggagaatacgagcaatcaaatatggactgatgcaagtcggattggccaacaggtgcgctttgatgagctattcggccaagtttgccagcgggttatacggacctttccggttagtcactccgtcctatccccgaatttctttttgacttttagtttggtctgtctagagatgccgccggaagcgccccttcgtttggcaacagaaaatgctatcaactccctccgaatgctcgtagcctcgctagaagagctatcgtgagttcttcaaataagagtttacgatatcagtgctaagctaccatagcaacgagatgctagcgagggcgctgatatcctcatggtcaagcctgctctcccttacctcgacatcatatcagactgtgcacaatatgcccctgatcatcccactgcctgctatcaagtctcgggtgaatatgccatggtcgtcgctggtgcagagaagggcatctatgatttgagggaaatggcgttcgaaactaccgaaagcatggttcgcgcaggtaagtgcatttttgcaagacttcgcgccacttctcctgctaattgagacgtatacaggagccagcataatcctgacatacttcactcctcagttccttgactggcttgatgaatgacctgctggatttttttccgacgtcgtataatagggctgcatagtcattaaagatgcaaaaatcctaggtgaatgtcagggagggaaaatggtacatttttgttcaggcatggtacaatgagagctccgaaatacaaagatgccgcatactattgatttctatgatcaagccattcgctttacaacaaagattttactcctcgtatagtttctaaaaccacatccgtgttttctgagccgtctccttcatctcctccttccatggataatcccccgggcatcaggcgacggaaagtgttttgcatcatcgactgcaattctccaagctcccttagagactgtatcaagccatcaagctttgcagctcttgaatggccgaataagggttgaattacttcgccttcaatctcagcagagacaccgataattttggacaataaaagcgcaagattgccttttaagattgacgccaagggctacattatagaaaatcggttagtgtcactcattacaataactgtgaacttgtaacgcacatcatcgttgctattggaatactggttatacaaatgtgcgaagtgcagccctaatggaagagctgaggtacagcggcagcggcgcagacaagcatgtaccccagcacagtcactttggatatctacatttccaggttaaatgagctgatagccgaagcgcagtttaaaatcgttctgctcacttgtatgggcaattttaaacgcgaagctcttatctgccaaaacagatgtagtgaacagggccagcgcatagcatagcagttcttcttctgagatctctggctcattaatgctgggtctggtcacttttgctccttcttccttttccaacacagtcctctgacctgtcaaatacttttcatgggcgtctttcgcatttctgacaaggtcgactcgttttaagatgactcgcgccaaacagatcggtccagcctcacattccatgactgcgatagcccatt

SEQ ID NO: 174 - DNA, 3813 bp, Cryptococcus neoformans
gctcgggacaccgtttagtgagtttcgtccttagcgggattctctgcggtaaaaccgatctgcaaaaggctcgccattaaaatgccagtcatcttgagagtcggggaacaacccacttggacatccgatcacattcccagctcgtaccccaccgcctatccaccgcggccatcccttcccaccccgcttcttccaacgacctgaccgcctcaacgtctcccatccctttttccaaccccagctctcgccagcttgcctttgactcgtacgcttccagctcatcccagcccactttctcccctcccggcgcttgcaggggttttttacgtacagcaaatccatgaacaggccggttcaacgccttggccgccatctgcgtgagatgcgaaatgtggcgtgaaggcgccctcggccgatgatgtggtgtagtgggtgtagatgaagaacaagtcatgtacgactcgagatgatctttgataccatcaaactctgcctgtattcgttcaggctgtgttccatcgcttttgtacttgcactgtagcacgttagttgtcccttccgttctttatttttgaacaaacaagagcaacgcacgagcaattcccgtgggcttttcaaactcccagcctatctgcttactcgaccacctacatccaggacaaacgaggaggtacagaggtccgggcggtgctccgtcccccgagacgtcgtcccgcgcaaaatcggacgcttggatcgataaactcgatgagcattgagggcaggagaaacatgatctcgcgcatctggtttttttttttttttggccaaagtcaacacaagtcgcgaacaagggcaacaccaccgactcacctgttcctatctccccttacgtttgcgcccgggacgtcaaagagacagtttggacaaaagtaactggcgacctctaccccgacacagagatcacaccgaagagcatcacattcttcacagaaataaagctgttcgatcggaaagaaagatggaccgcttgatgggtacgatggggggagcggcggtgcaggcgtatcgagatgcgagcaggcgtaccggaccgacatttgttttatcaaaagttgacgttataacgtgggtgaaagagaagaagagttacgtatgtgcggaatcaaaatttacgcgacgcgtcaaagggacgaggccgggcaaacttgttggttcgttgctcgagatcgacgggatatataacaaacccaccttttcatctccccagtcttcactttccactttcatctctatatcaaccatatatacaccagcctcgtccacatacactcgcccttttttatacccacgtccaactctttttccgtacacggccccaacagtcgacgcgcgagaccacagtatcacaaacaaccggccgatatcctcgccctgattcaacgcacgaccagaaaaccatgtctcttgacaactatcaaaagattgaaaaggtcggagaaggtgtgtttccgtaccgtaccaattgacccaacgtcgcttccccaatgaacctttgataaccaaaaaaaaacagggacctatggtgtagtgtacaaggccaaagacatcaacaccggccacattgtcgccctcaagaagattcgccttgaagcggaagatgaaggtgtgccaagcacatctatcagagaaatcagtttgttgaaagagttgagcaaggacgacaacattgtaaagtacgttttccaggcaagagcaactgcatgaagaaagaaaaaactgacaagaatataggctgttggatattgtgcattccgaagcaaagctttacctcgtattcgagttccttgatatggatttgaaaaagtatatggataccattggtgaaaaggacggtctcggtcccgacatggtcaaggtaaacatatctgctccttacaaacttggatacaccccggctgacttttttctttgattcaaccccactaaaacagaaattctcttaccaactcgtcaaaggtctctactactgccacggccaccgtatcctccatcgagacctcaaacctcaaaatctgttgatcaacaagtcgggtgatctcaagattggtgatttcggtttggcgagggcgtttggtatccctctgcgtacttatactcacgaggcaagtttttctccccactcttcaagctttttgatggtatggcttgatgctcatgtgtggcgggcaggttgtcacactgtggtaccgagcccccgaagttcttcttggctcaaggcattactcgactgctattgatatgtggtccgttggatgtatcgtcgccgaaatggccactcgtcaacctctcttcccgggcgactctgagattgatgaaatctttcgaattttccggcaagtttaatcctttgctatcgaaacgtgtggcctgatcccaaatcgcagagttctcggtacacctgacgaagacgtatggcccggagtcaggggcttgcccgattacaagcctacctttcctcaatggcaccccgtcgaactggcagatgtcgtcaagggatttgaggccgatgggcttgacttgattgcccagactttggtctatgatcctgctcaccgaatttcaggtatgaattcgcgtctcttgggagctgcgatgagctaatccactcttcttcttttttttaaaaaaatagccaaacgcgcacttcaacacccttactttgacacggtcaatctctccgccgcataaatcctagaacaatttacccccttttttctaaaagtctctccggaatactcttccttgcactttttatcacacacgtcgactagttgatccaatccttacgagaatgattccttcttgctcgtcttcctagacctggacgataacaatgtatgtatcttttggctctatcatacattacttgtacattttgtattatacaacacaagaatctatccaaagttggcccattcaagcgagtagaattccacatcctcttcttttcccccttggtcatcttgtccgtcttctctcttaccatcatcccagcaacaaattaatccagcttttttcgtccctgtacccaacctaccccacgccacaatctcggtcggtctgataggttcatctcgaacgatgacctggctggtaaaatgcgcatgataccgcaagtagtctcctggataaattaaccattctccaccaaaccgcggaccaagtccgacccggtatgagagcgactgaagcttggaaaatacgccgagaagggcacattggcgcggggttgttgggaaggggaagagagggtgggggagggatgttatcgattgtgattctggtggatgttgagataatactgggtgggaggggacaatgtgaaagtggccagcagcaggcgcgccggcgtgcttggtcttggtctttgccggtgaaaccactatgggtgcagtgacattctccttgacgtcttctgcgaacagtccttccccactttctttagccttttctgcttttgctctcgccctcgcctccctcttcagcctcgctttttctccccctttatcgaaagcttttttcgattcttccaatctctttgcttccgcctcccttgtcttttcttctaaagctttcaaacgcgcgacgcgggctgccgtatgggctttaacggtttcgtcagagggtgtagatgggctgggatcaagaggaacgagatgggcgatgcctttttgtttttcatgtcagtaagaacaatggcgatgtgaggaaaaaaagatgaatttgtcttaccttgggtaacaaggtatgcagtctcttcctgcatcaatg

SEQ ID NO: 175 - DNA, 3603 bp, Cryptococcus neoformans
tcgacgcgactgcgatcaggtgaggcgcgtgggacgcggaagaaatggaaatgaaagtaagtccagcattgaataatagccctagtttatactgcccagccgagggatatcaagaatagatgtggtagtgtagcttgaaatctgccggatgttcacacaaggtccgctcgtcttgaatgccgtcgcttttcgtctcacgggtgaatgttcggcttgtcatcgctgaaaagacgcgccatgctgtcggcaacattggcggtgatgtaaactgatcgtagcagtcgcaccaagtggtgcacttccgtccgtcctgaagagacacatatgtgagatggaggatacggttgaaagatgtacgccggatgtcatctctcgttcgttctcctcctttcttcgccaggcacaaaagcactgaggtcagtgaatagtcgcctcatgacgattattgaagaaataagttatagacaacatgcggcaacgacacgaagtgttgggagagggcccataacttctgtgtgaattatataacgaaggaccaaaagcgaaggagaagcggtgtaatcgccagtttaagatggcgagatacacctgatgatcttcttcaataaatagtgttatcaacggcaatccaaactagacgacgagcaacagtgaagacgaacaaatgcttgttttcgtctcttacttcttcttcacagggaaggacactagtcatagaagattatggaacaataatcgttaccgctcttcttgtgcatactcaaacgaagtgagaagcgttacgcctattatgatagcaacgataacatgaatgatgatcttagccaccgctcgtcgccgcgtatgtactactcgtcgtcggaccaagcaactgtgggattatcatcgatccgcgttcatcggcgataccgtatcaccgacacaaagcgccacaaggacgcattagggacaatcccgatggttgactcgcgtttccgggattatcaggctcagggtgtgtatgccgtggaaaaggagacttcctcaaaacctcttttggctcatccttcaagttttttattcatcaaaaaactcttcgccaaacatgtctcacaggaagtacgaagagcctcgacacggttcccttgccttccgtatgtcctgcaaaaacagacctttcaaaagcctgggctaatagtgatacagttcccaagaagcgtgccgcccgacacaggggtcgatgcaaggcgttccccaaggttagttgggtttcagttcaaggataacatggggctggggcggattgtggatgacttgtacagatgaatgaggaagggagagaaggagaggaaagatggggatagaaggtctcgaaagaaagaagacaggtgttgacattatcgaaataggacgaccccaagaagcccgtccacctcaccgccgtcatgggttacaaggccggtatgactcacattgtccgtgacctcgaccgacccggatccagtgcgtattactgtccgattgtcatcaaaacgtggtctgacaaaattttgcagagatgcacaagagggaggttgttgaggccgttaccgtcattgagaccccccctatggtcgttgtcggtgctgtcggttacgtcgagactcctcgaggcttgagatctttgaccactgtttgggctgagcacctcagtgacgaggttaagaggcgattctacaagtgagtattgtttttgaatactcatcggagcagcttttaacgaagtttgcaggaactggtaccgatcgaagaagaaggccttcaccaggtacgccaagaagcactctgagaactccggcgcttccgttgcccgagagcttgagcgaatcaagaagtactgcactgttgtccgagtcctcgcccacacccagatctccaagactggtctccaacagaagaaggcccaccttatggaaatccaggtcaacggtggttccgtcgccgacaaggttgacttcgccaggtctcacttcgaaaagaccgtcgacgtcggctctgtcttcgagcaggacgagtgcattgacatcattggtgttaccaagggtcacggttacgagggtgttaccgctcgatggggtactacccgtctccccaggaagacgtgagttatttcatgaattttataaacatggctgacacatccatagtcaccgaggtctccgaaaagttgcctgtatcggtgcttggcatccttccaacgtcatgttctccgtggctcgtgccggtcagcgaggttaccactctcgtacttcgatgaaccacaagatctaccgtatcgccaacggtgcttctggttcttcaggctctactgagtttgacctcaccaagaaggacatcacccccatgggtggtttcgttcgatacggtgttgtcaagaacgacttcgtcatgatcaagggcacttgtgttggtcccgtcaagcgaatcgtcaccctccgaaaggctctccgaactcacacttctcgtgcccacaccgagaaggtcaccctcaagttcattgacacctcctccaacttcggccacggtcgattccaggatgccgctgagaagaacgccttcctcggtcagctcaagatcaagtctgacgcttaagctggttgagaaagtagaggggatggatgggaaagaagttggagttgggccgggatgtggccgactgtaccatcatgagcggctatgcatatcataccgttggactttagcatctgttcatcattccttggttgcacttccagttatatattacactttctttgcttttgtgctgcacgttcaagcgactggatagacttcttgcataacaacagatttaacaaaagaaaaccataaagaggaagtccctgggctgacttgccctaacctgaattactgaatatgcccgctatagttgaaattctctattctgatacatgataatggaaccatatgcaaaggatgcctgaaacatgcgccagttctaatcgctcatatccccagaactctgccccagcctgttacctccttttgcagcccaaaatgctctcctttcctcacttctaacacccctctttctcttctttcggcccttcttctcttcctcatcactgtccgaatctacttggattgcaccttgccactccttaccaatctcatcctcggaccccaaatcgccgtcagactcggcaaggatccggcggagtgcttcttcatcagaatctatttcctcctcctcttctccaggcggtaggggcggtgtaggggggcgagataaatcggacagctgtccttcttgaccgggcagaggcggagtgggggggcggaaagcgtccttaaccttcgctttgcctctacccttgccaccggcataacgggattcctctggaggatttgaaagaacctcaatctcatcctctgaaggctcgctgtcacccaacggttttcttccccttcctgaggactcaaacggctgagagatttcgataatgccgtctgactcggtatcagatatgtctgcccgtgggacacgcgatgtagaacgggagttggctgtgcgtggggagattgcgacgggatcgctgtcggaatcgtcggaatccgaggaggaat

SEQ ID NO: 176 - DNA, 3590 bp, Cryptococcus neoformans
cataatattgacaaagcaactatcagaaacaagaggttcgcagtctaacaggtttcgcatattcatcagctcaaacctgtatttgaatagggcataagtgagaaagacatacaacaaactcgtaaaagtcttgtgcctccttcttgaccactttaccgcaagcttcccatgcgggaacttcaccttgctgagatatagaagtgttggcataggcagggatgcaatgaagaaggcgccggtttccaaagggaaggcagaatgcttggtcgagctgtgaaagtaaaagattgaatgttagcatgggttcatacaatagaaatatgattagacaatccaagatgagtagacatgtcacttatgaaagactctgaacccacctcatcctttggacaaggagaacattctccaaacggcctacatgttaaatctccagccttgtgggcaacatattcgggtttctttgctggtgttctcttttcaagatggttttcctcaaccaggagggagcggttggtataaatgtatttaggagggggttctttcgctgctgaaacggttataaggacaaagcatgcgaggaagactgtgagtaggggatgtctatggcccgtttgtgatcttcttcctgactttgcttacgtcgaatccaacttacagtatagcctgtctcaaccctctcatcttggcctatgccccgtgtacgatgcaattgtgggatgttctaagtcaataaatcagccgatcttcgttcttaaataataattaatgatggcatcgccgccggatgcaggaggaggctgaaagtggtgatgatgtggttacgtaaacgccacttctagccaacgcgtcgtcaaatgagcactctcgaggggatcccatatcctctttccatccacgctcgctttatttctagctatactttttcgttttccaacctaggcacaacgctcagcgccgaaactatacctataaacagtacaacacattacagagaggaataatggcagtggcgactcagaagatgcccaaagctccaacatctgcccctggaggtagcatcaaggtatgtcctgattgttctatttctatgcacaaggaggttggattctaacaattgtaattagacctactatcagaacaagatcgaagctgccgagcttgacatcacccgtaaaacacaaaatcttcgccgtttggaagctcagcgtaatgcccttaacgctcgaggttagtgatagccagtcttatcatatttgacaatcgaagatggctgtcgttggcccatatgtgcactcgtaactgataagctgcatagtgagactacttcgagaagaattgcaggttttgcaagagcccggaagttatgtcggtgaggtcatcaaggtgatgggtaagaagaaggttttggtcaaggtgcagcctgagggcaagtacggtaagtagcaatgatctcttaccagaaaaaaaaaagaaaacagtgctgagcatgtcgcagtggttgatttctcccccgatatccctatctctgcccttacccccaacatccgagtttcccttcgagccgattcttacctcctccattccatccttcccaacaagatcgaccccctcgtctctctcatgatggtcgaaaaggttcctgacagtacatatgagatggttggtggtttggacaagcaaatcaaggagattaaggaagttatcgagttgcctgttaagcaccccgaactatttgagagtttaggtatcgctcagcccaaaggtgtcttgctctacggtccaccgggaacgggtaagacccttctcgctcgagcggtcgctcatcacaccgactgccgattcatccgagtatctggttcggaacttgtacaaaagtacatcggtgaaggttcccgaatggtgcgagagctgttcgtgatggctcgagaacatgcgccgagtatcattttcatggatgaaatcgactctattggaggttcgcgaggagaaggagctggtaagagtggagactcggaagtgcagaggacaatgatggaattgttgaaccagttggatggatttgaggccacgaagaacatcaaggtttgtctctttatagtgggaactcttgtgcagggctgactctgatacaggttatcatggccactaaccgtatagacattctcgattccgctctcctgcgtccgggacgtatcgatcgtaaaatcgagttccctcctcccaaccccgaggctcgaatcaccattctcaagattcactctagaaagatgtctctccagcgtggtatcaacttcaggtcattggcagaaaagatgggcaactgttcaggtgctgaagttaggggtatctgtaccgaagcgggtaagtgcctttgtcttgtttaaagtttgagagacagcgctgatgatgtcgttgcaggaatgtacgcactgcgagagagaagacaatatgtcggtcaggaagactttgagatggcgatagcaaaggttttgaagaagaatgccgacaacaacatgagcgtgaacaagctcttcagttagaagtttttttgatagtcagctatgaaacgttttgcatttgtgtattttgaaaaagaaaaatctatgtccctagaccgtactcgtacaatacactctattaatccgtacaggtcattgaaaaaaaaagtaccacttttactccacaaataaacgccaagccaatcggcggaaaaggggtattatctgacttcctctccactgcctgcacccttcccatcgccctttagttctattcccctgccaacaccggtatttctgttcgcctcctgcctcaactcttccagttcttcgtcggtgggtattctgtcagagggatcgggggcgaaggatgacatggtgcggagtacaagatcggcggaagaaaggaatgagtttgtggaaagacggagcaggcggacggatgttgtagcgtagttactatatagtgcatgggtcagcattgcattcatggatggataaccccctgggatagtgtgatatggggttgtcccgaagtctccgcactgtaaataaactggtactcacacgactagtacgtcaccttcaacgttcatctctcttcgcaccagtactgccattctgttccctatccacatcgagcgccctcctcgctatgactgcatgttcggaagtgtgaaaagggatttttaatgtgctgtaatgttgacaattttgtgttcgtgtgcggtgacgcaaaagaggagcggataggatggatgagcggacggccttcagcgcaaggagaaggagatatgcttacactgtatgccactgatctgcgagttctcctggctgggacatttgtatttacagtgaaaagctgtgagagatgaataatgtgtgagaaagtggaattgcggattattcgttgccgagatgaaatgtcgggaaacggcgaagaacgagcgacggatggcgagaataacgacggcgacgacgagcaccatacgtactttccttatcctccttaattcagcataacaattatacgtaagaattcacaacttcatccacatacaagcaacatgatcaaggtaggtctgcatacag

SEQ ID NO: 177 - DNA, 3641 bp, Cryptococcus neoformans
ctggggtgatactgcttatcagagatgtacagcgtctgaaatcctaaattttatttcagtgaaaatgtggaagaggacataattctcgcgacttacacgagtgatatcaatcgtctgtttctcaatctcacgttcttcgcctgaccgatctgtgaagccaggtaagacatgtttcgcatgtagcttatctaaaacagcgactgtaccaaaattcaccaagttagccaactcaaccggatttcaaagtccaagaatccacccactcttgttccttgtccgtcccagaatctcctccacctcctcgctcagatctacccattttggcggtaaccctttcattccaacttctttccacccttctctcccacctattagtctctctccctcaccctcaccatcaccatcatcatcaaggctgatttgatgaccgtattctctactaggtcgggcgcgggagaatgggttggagtcgcggatggagaggaagaagagcgttcgagagcgggtgatcggttcgtcagctggtgagagaggattgtagttggacatatcccgcttgcacaaatagtgtcgtagacggtgtctaggacgaccagataatacaatcacttctccgtgatctatctatcgtttccgattgccatcgtttgaaatcgggcctgatgtccttcggcgtcgtcgagcatttatgtaatttacgtaaggatacccccgggtgagacctagactgacgtcaaggtcacgtgacttgtgcatcatgtcgaacgcttgcttgtcttcttccttatccgcaatatcagattgttatgcattcgttttcgacttcaacttacgactgaacttcgatttaaacttcacgagaatgaaccacgggtacgattctgaaggtatgtcgttctgccctgaaaggacatggctgacatagcttgtagacgagttcgaccactacgccgctcctccaccccttccaggtggtcctgctggtatactgtctcacctcatgggcggtggttttggtggtttccatagtgcaccccctccgtcgtaagtacttatacgtctacaaggggagaagctgacgaaatgcagagcatacgatgattatttcaaagcttattcaacagccgtgatgggcggaagagaacgtccagaggtgatgtatggcggcaagagtgcgtccgttctggccctttccgggatgagttgctaacttttggtgtcaacagtcattatgcctccgtcagcgttagccagactttgtatgcctcgttaagaatttgacgaactacctctgacaatatatagccgcgctggacattccaagtccctggacgttccaactccgcaaccctcgctcacccacccaacatatcacccatgccggtgtgctggagtttattgctgaagaagggattgtacatcttcccgcctgggtatgtccctgttttcctgtatcgatcgtaactaacgtaaagtagatgatgaagcgacttaatctcgaagaaggcgaccccatacggctaacgggcgccaagttaccaaaaggaaagatggttaaaattcaagcccagaatacagatttcctccaagtatccgatcccaaatctgtgtaagttggcttttcattcttctgcttcatgcttggctcaaaccgtgcatagcctcgaatccgcccttcgtttctactctactctttcccctgacgacatcattgaaatcacgtacaactcactcacatttgaattcctcatcatgtccgtcgtcccagaaggtcctggtatctctgttatcgacaccgatcttgaggtcgactttgccacgccaaaggggtacgtcgagcctccccgaccggaaccgaagccgatccccaccatggcggataaactcaacattgacttgtcttcgaatgagcccactggctcgggggcaggtagtgtatcgggcggcagtcggcccgggacgagtatgggtacccagactccggtggaaagttttactggtgtaggtcagagtttgagtgggaaaaaggttaagggtaaagggttggcgaagaagattgaagaggtcgatccgagttcaaagataaaccgagccgagtgagtctttttattctcattagctaccagtcactaaccgaagcagcggtcctcgaataataaactcatcctctttatcatccaccaatacgcaagtcccctcagcactcatccttcctgaaggaaagttcttcttcggtttcaaatacatcccttacgatccctccaaagcgcctaaaccctctctcgccgatcaacagaaagtggagctacagcctttcggaggggaagggaataccttgaagggtggaaaaagaattggaggggaagaaggaaagggaaaagagaaggctgctgaagacgagaaagaagacccatgggcaaagctgggtagcgggaatactttaaaacggacgaccaccacagccgcctcttcgtcttcaacccctgcacctgtatctgcgcctctggaggagtttaaggcccgtaaggcgacggagcaggagatcattgatgccaccatgttggatgaggatgatttcatgtttgaggacgaagaggatgacgaggatgatgtgatagagattgattccgattatgattaggtatacgagaatgtaattatgtatctttctgagtggaattgctatccgccgttgcgtatgagcagtattacaagttataattttcaactgtttgtattccgcttgaaaagggggttttaaatagtagctgtgataagcggattgcgttattccaggattagaaaagcagattagaaatttgattccgctaatccccgtttgtgattttcatgcaaacaaatcggatccctttccaccactcttcacttatccatcaataaaagttaagtttatacctcatacatcatgtccaacgattggtggtctcaaacaccatctcggtacacttccactcctattcaccccactctatctcgttctcaatccatttcccaatcaacccgcacccgtttcgccggcgatgagctcgaccctgaagactcccgtgccgccgatgcagtcaagtttctcccttctttcgcttcctctcaagcgggaagagtggccctaggcaccagtcctactggagggatgagtatgtctgttggtagtccacagggagaaaggaggagtcctcaaggaaggttgagtgggtctgtccacgagaggtgtgtacttgtctgccactttttgtgtgatagggaaagctaactggtgacagcaattctccgagacataccacccgagcacgatccctggcacagagtgctgctctctcgtcttctactgcgaacggtcccgcacccatggacgaagacatgcctccaacggccagtttacgggatagcgtgacagaaagccgtgtaaccactgttgttgcttccaacgagtgaataaattgcttttgatttcattgttggcttaaaactaatcctttttttagacttcccacccctccatcccttctcccaactaaatcgacaaccaccctttacatctttgggccaccacccaatatcctctccactctccaaccctatctctctcaattcggccccattgcttcttatcgtcctgggcc

SEQ ID NO: 178 - DNA, 3674 bp, Cryptococcus neoformans
gccgagtgctccctcgtgaaatggtctggccgcagggaggaaaagtcatggtccgggaaggccgagttgagtgtggagaccaggagaaagtgcactttgctgctcgagacgttagacagttcggatatcgctgcggcttggcatcggaacgtaccgagactccttctcgtcgagtcggccaaagcatgaggcgagaccagcctctctcatctcgggagaaaagctcattctgtggtagtcagcagctgcgcaggttgcccagaggcgagacggactcatccatgccttcctgctcgctcatgtaggcctcttctcgctccttgaatgcacgtttctccttgccgacgggtttcacgctgtacgcctcgaacctggcatggacgcggaggtcggaggaggtgtctgaggagagcgagtctgagagctgcgtgaggagggggtagtcgaggtacttcatggcgggggcgggggggggagatggagaaaagaagaggagagagatgcgaattgccgaatgcgtcacagccgtaggtaaacagtccttaattacacttaattacgcaccgcacaaatatcctcacatttccatcaccgctcactgcctgtctcttctccggcacaccgcgatggacttggacgacctcagtaagtacagcccacacggccacagctcaccccgcgcagtcacagacaacacctaccagctcggcggcatcgacgacgagcgggaaagagcacagaatgccgccatcatagaagagctcgaacgcaagaagaggttgcgcaagcttggcgtccccacagacgacaagaaggtcagggagaggctcagggcgtatggagagccgatcacgctctttggtgaaggagtaagcagtcaatctatcggacagcgtatccaaaagacaaacactgacgaatatggaaacagcctggagacagacgagaccgattaaagtatgtacaggagcaaatcgagcaggcgaaaggggagggcggaatggtcatagacgaatcggaggagagcagcgacgaagatgaagaggtgagttgtgaaacctttgccacagcgctacacgagccagccaactcatttctgatacctagggagaattctatactgaaggcgcagacgatttactcgaagctcgtcgaaagattgcaaggtattctttatcaaaggccagagcacgaatagctcgtcagagaagagaatacagcgttcccctgggaaaactcgttaatgctcgaaaggaattattcaaagagctcaaagtacgttttgccactttttctgcagcatgacaaacgctgatcgatcctcgcaccttgcgacagtcattcaacaactttggctcccaatttggagatgaccgtcccttatccaccatccgtttttcaccatcctcccaatatgtcctcacgacctcttggaccggcgacacgaagctttgggatctaccgaacctcaatcccatctctacaaaaaggggacacacggaaaaggtcggaggagccgcttggcatccgtttgcgacagtaggagccagtgaagaagctgtcaactttgcgactggaggaggcgaaggcgatgtaaagctttggtctttgtccgggtacgtattttctttttcctcaatccatcccgtcttgtctttttttctaaccctgccgtgtagtgaaaaacctctatcgaccctttcaggtcacacatcgcgagttggtcgactcgcttttcatccttctggagcctacctcgcttccgcaggttttgacggtacatggcgtctctgggacgtcgagtcgagtaaagagttgatgatacaagagggtcatagtaaagaggtctacgctttgggttgtcaggatgatggggcattgattgcttctgggtcagtttcatttcctcggattagaggcttgaattacaagaaaggttggatgactgacaacaaatgtacattatagaggattcgatgccattggtagggtatgggacttgagaactggacgaactgctatggtcttggatggccatgtcaaagaaatacttgctatggactttgctcccaatgggtaagctcttgtttgctcaacacccccccttccttctcgctcatagctgataatgcgtgttctgctttgataggtaccaaatagcaacaggatcaggtgacgataccgtccgtatctgggatctgcgtgcactcaagacccaatacatcatccccgcgcacaagtctagtgtggccgacgtcaaattctttagatcttccggtgaaatgccaccggtcggcattcagggattgccgctctcgtcccgctcggcaaacgttgatggtatggacgtggataagagcaacgatacagaagacaatgaaaaggaagaaaagctgagtcgttccggcatgttcctcgtcacagccggatttgactgcaatgtccgtatctggtctgcagacgaatggaatatggtgcgcaacttgtcgacggatgcgggtaaggtgatgagtgtggatgtctcgggagatgggaaatttgtggcgagtgcaagctatagtcgatcgttccatctgtttgggggagagaactctttgtaggcatgtacacttgctggaaagggagcagaccacagatggaaacagaagagacgaaaaaaacatatgcattttgagatatactagaaatttattgaaaaaattgtacattagaagatcaaagaaattcaaaacgacaagaaaaaacaaaaacaaaacatgtagtcgttcttgacaacaagtcttatgatttcgtcgcttttatccggttcacaaaattgctggctctagagaaatccagcccttgcccttcactctccacagcagcgactagcccgtccaacatctgttcccatccgttttagccatctcacatatacagcggcgaaggaaacagaaacttacagagtctactttatccacaggaaccttggcgcacacactaaccaacttgcgatacttgaccgccctatccacaccttccccctccattgccctaatcttgtcttccaacacttctgcaatccgatcttcccacagagccatacgtctgagttttaccagacattctggatcgtctcgctcaggcaaagcaatgtcctcttggtcctcgacggaaagcggtgtggatgggggcgcgccgttcagctgggattgcgaggacgcgtcgagtgccaagcctggaacatgccggaatgcaagaggaggcagttggcccgtggatttttcgtgcatcgtctgcgttcggccagtaaactctgcaggcgtcaacagcgtgccggcggcgatggcgtccatgatacgccgcacgttttcagaacgttgctcaaacagttgcatcgtagcgagtttctcttgagcgcggtgaaggtgttgccgtttgtccgcaagcgcgcgagtggcatggcggacagaagcttcggtggcattcaatttcgtttgtttggcgagcatttcactcgaaaaggtggaggatatggattcaaagatggtcgcaatgtctgtgcgggacatgattagtacgtctcataagactgagtaaatgaataatgctcacttttctgcacgtcgcggctcttcctctcgggcttggacacttctgatttgaggtttgccatgacagcctcgccattcgag

SEQ ID NO: 179 - DNA, 3505 bp, Cryptococcus neoformans
tttaggttcaatgcttgaagcttcgggtgctggtttcacgccttcagacgtctcagtctccttggtctcattctgcgagctcccagcgggagtttgttccacctgagcaacgtcctcggtcgctttctcagatcccgcatcctcctggactttggcttctgcttccgcctctgctgctttagcagcttcttgtttttctttcttagcagccttcttcttgctcttcttggactccttaggcggttccggcgcagacctttcttcttctactggtgccggtttgtcgggcgtttcttggtttggtacagcagcttcctcgagacgagcttcaagttgcggcttttcttttatatccgcctcctgcggtgtttcttcctctattacttcagtttccacttttacatcgactggtttaactccttggtctttagcgtcagcgttcttggatttctcactctctggctgcgcatcatccaagcttgtccttgctgatgggaaagtaggagtatctactgatgcaggtgtctgaaattccgacgctgtaccagcctctactgctttcttcttctttctctgagcgagctgcggcgtgtgtgagctgtagcgcaaaccgttgttgtgagtagtactacgtaccagcttcctcgctctctctgcctgttttgccctttcttctttggccttgtcttctgccattgctcttttatggagaaagttgtgattgatatccgtgtatcgagcagaagaatcgacgagactggtaaatagtacaactgaaatcgccttagtcgcacaggacacatcacagggggcgggcctttgaatccggacaggagagcaaatgtccgctttggccacgagttcaaccggacatggtggacaggcaatcgccgacagagtccgatggaattgattgcacgaaaagtcgtatgggaggcaaattgtcgtatactaataaaaacattatattcccacatcttcgtataaaaaaagcatcaaaatgcactcccgaccagtcttccttcgtgctcttcgactccgacaacagccactccccgcccgccgattcctccctccccagtcgctccgtcccctctcatctacagcccgtctcttggacgagtcgaaaaagtctgaacaacaatcacaaaagaaaaagtcaaccaacgatgagcctatcacccctcgatctccgtgggccgttttcacccaggtcttaaaggaggagattgagaagaacaaggggtggcaggacaatgtcaagcagttgcaaggtgatgttgacaagttcgccgatagtgctgctatgaagagggccaaggatgtgtatgagaagactagggtgagctggttgaatgaataatttacacgcaatttctgattttttctagctcaccaacttgatcaaaaacaatcctcgaatccaatctgcagtcggtgatcttcaaaaggctggtatctccgtgcacgacgctgtccagcacgctctcgccgattccgaagttctcaaggccatctctgccgctaccaaccgtttcgtttctgccgcctctagcgctactgcgcccattagagacacaaaggcgtacaagttgatggctgagagtctcgaagaggcctttgaagatgagagtggtgttgggagtagatatggtggttacgaggagaaggaggctaggagaaagaagagggagatgagggctaagaaagctggaagagctgccatcaaaagggtcgaggaaaatcctgagtgagttgagtgcttccgatataacggcgtcagctaatcccacttgtagagctggtgaggctcttgttctctccgacaagcccgagtccgtctctcgtcttgcgtttatcaaggaatcccccacctatcaacgtatgatggagaattactatgagtctgactctcccttcgtttctgccatccgaaccatcggtaccaaggtcggctctttgttcgaagagaacgagaccgctcaagtcatccgtgccatgaaggctttagaccccaattttaggatggacaggtggactggggagttgagagagtacattgtacctgaagttgtcgatgcctatctgagtgcagacagggaaagcttgaaggcttggtgtggtgaagctgtcagtcaaaaattctccgctgataaacaaccagactgacactctatagacctttaacgtcctttgggcgaccatgggccaattcattaaacaaggccttgtttccgactcgaagatcctcgacatcaagcatgttgacattgctcacggcaaaatgcttgagaacaacatcccagtgttcgtcattacctttgccacccaagaacaactcctcttccgatcagccaagaccggaaaggttgttgttggatcagaggatgatgttgagcagtgcaggtacgcgatggtgattacgaggttggagtcagagttggagaatgagttgactggcggctggaaggttgttgaggtgagttctctttctctctcttctgatcactgctgtgcatatgctgatggaacatagatggccaggaggggtgccagaggtggactgtagacgacttcaggataattgcatgcatagcaacaccattcgattcaagagcctttcccatgaattgtccgctgaacatactgcgatcaggacacactatgacgaacatggtcgtttggaaaggatgaaactaatagtatggaactttttcaatcaattgacgctttgacctttcatcaactgtgaggcgatgagtaactttcataggttggaagcggttgacgggagatgaggatatttcttgcaccctttttatctatttgcatcgtattaaatgcgtgcttatctcttacagttgcagaaatggcgacaagagtccatttgctaacagcaagcggacgactcctacgcttaatcattaaacgtgcacaacgccgtaatagagctgctctttacgttgcgccaccgttattccgccccataatagtacacaagagctcgagacggacattcattcagattgtttcagtactggattacatggtaagatgagacgtagaatgaatgtgatgaaaggttccatagtagcaagaattagatactcacactcactttcgttacgtatagaaatcagatgtgcattgcattgcatcaaacgaaagtccgtgcccgcgaggagtgaacggagttagatctcaccggagaaattgctggagaaatcaagggcgcgtcggcggtgagcagggcatgatgaaaaaaacgaacaacaaccaatcccactggaagtcgtaaattcattcgtcttttacctagtaattttcgtttcactcatacagagcctcggcgccaaaagcatcagcacgctccctaatcatatatccgaactatcccacctatataccctcgttgacccacatcgacacatacccctccttctcgcgaaatgtcctgcccttgtgtcagtccgacaaaccccttgccgtctggcgatatcgtcac

SEQ ID NO: 180 - DNA, 3709 bp, Cryptococcus neoformans
cagatcaggtgcgttgttgttttcttcgtcttctttgctcgagacaaaaacatcatggccatccttctcattcaattgcccttcctcttcgcccaaaacgctaccaagctgctttccagcgttttttgtgacgtcgaggcacaccacacctacgacctctcctttatgctggaagacccagattccactctttccttccgcgtaatatgttgagggcctgatcatgtcgattgcgcctattattttacgcatacgcgcagtaaataatggtcgatgaatgtactccacgatacccatgaggggaagaaaagcgagacatgggccaatcaagggagagatgtagctcaagggatttgaattgacagagaatgaggagatgtggttgatacccattccgagaaggaatacgactaagagggccagagggctggtgatgactgggatttataagctcgggttctcaatgcgatatttggcaagcttactcttgttatttgccctagcaaggccttccatgactccttggcctaccagcatcttgaccatgtgttcatctttcgaagggtcaaatgcgcgaacaatgtcaacatcgtcggggattggaggctgttgttgggacattgaataaaatgccgagtaacggggaaatgaagattttggaagtggggtacgtatgtatatatatacagatggaaagaaggtggaggcgatggtggagggacaaatagaaggcagcaaatcatacgcacgttcttcacaggcacatctcaggtacatcgcggacaccatttcatctccatcgagccccgacgcgttcgcctgaaaatgataagaccgcgtttcgtttctataatactctggctttcgtgtttgacttgccgcctgcatattcctccccctacaagatgcccgtcccagtcagcgagaaaccgtgagtgtcaaccagttgtccaattcagaataacagaggtgctgattaatcgcctcagaatggtcgagtatgagtgagttccttgatcagtacaaaacgctcgtcagactctgactgtctgccagtgcatctagcccgcaggttatgcagctcttctacaggcggctgttcccttaccgcccgctctatctttggttgaatcaagaacagagtaagtcttaccgccgtgcaggcttcgacagcggaattgacacggatttagtacccagcaagttattcacccatcgtgaattcgctttcacattggcaggagacgtctaccttcgataccaatctttcaacaatgtcgatgaatttaaagcttctattgccaggcatattccatcacgttttgagattggccctcaatatagcgcaagagtatgtccatgccactgaaacagcgttcctctgctgacgctggatacagccgaaggacaggaagacgcttgcctctggcgctcttcaaccacagaggcgagagctggtttttgatattgatatgaccgattatgatgagatccgaacgtgttgcacggacaagactatttgtaagcgatgctggggctttattgccgccgccgtaaaagtgctggatcattctctccgaggtaggttgtcaattggcattgaaactttgcggatagttttcttattaatctatatagaaacattcggcttcaagcatctcttatgggtgtactctggtcgacgaggtatccattgctggatctctgatcagtcggctttggatctcaccgatgatcagcgacgagcgttggttacttttttggaagttataaagggtggcaaagaacaaagcaagaaggtcaatgtgagaggaccaactggtgatgctgccctccatcctttcttgtcgtgagttggaccatcgtgtaaaagatctgtggcattacataattaaccccaaccatagtgaagcactcgataccctcaaaccattattctctagtctctgtatctacgaccaggattgtttcaagggagaaaagggatgggaagcattgcttgccattttgccaactgatagaggtgagcagtattcgtaaatttggtggatcagacactgaacatttgcagctgtcattggaccactaagggccaaatgggaaaagaactcggatagctcaagcgaagaaaaatggcgggaacttatgagcgagattgcaaaacataagaaagaggaggcaatcatggtatgtgatataaaatttactcgaattcatcgctgactcacattcatttgcccctctagaccaaattcacaaaagcagtagaagacgtcgttttacaatacacctatccgcgtatcgatgctgaagtttccaagcatcgtaaccatttgctcaagtctccgttttgtgttcatcccggtaccggtacgtcgaaggaattcttccatcgcttcatccaaactaatacaagtcaaggtcgagtttgtgtccctataaatccgtctctgatcgacgaatttgatcccgatacagtgcccactgtcggtcaattgctaaatgagctcgacaatgtcaaggctgaggaccctgaagctgctggccggcgtatggaaggtaagttttctttccaggccatatcttttctatatctgtactgatgaaatgtgcagactacgagcacacttcactgggaccttacgtggagatgtttgaaaagcatgttgctgcagtcctgaaggatggtcggaatgcgaaaagaggtaagttagctgatatatagtctacggatttcaagctgacacccttcatagctgccaaggcagagagtttggatttctagaataccaggctttcatttgttgtactatatgcatgtttaactgtctaatcgcgcctggaatctgaagctgctctacaagacccaatctaaaatgactcattgcgcatttatttccttgactatatttgccatcgatcataaggatgaacgcgctttgcaacctccactcacgcggaagaaacgcgtccgctttatggaagcggaacctcgtactacgaataacaatttgtagtatttgmtgatcagcggctgacagcggaggtcggtcatccatcattatacgattctagttcatcgactgtaataatacattgtcatcgttctcttcagcagcgtcttctccacttcgttaaccaatctcgagcaaaatggtccgtcccattcccatccccatccgccgcacgacactcgaagtaggcacggcatttgagaaacacgccctctcgttcctcaacaaatctatgtcaatgtcccttcgccacgtaggtggcgctagggatggaggtatcgatctaagaggttggtggtgggtcccaagaatagccatgccagcaactgaattcgccgccggcgaaaattgtggcggggtgaggagattgagggtattagcgcagtgtaaagctgaaaagaagagcgttggtccaagggcagttagggagttagaaggagtcatgtcgcaactcgagttccgtcagttttgtgctttattgaaatgtagagatttatactgagcaagattcgcaggcagggagcaacagtcgaccgcagaagcggcaatagcaatattgatatcccaatcgggctttacaaaaaacgcaatgctgcatgccacccaatcacgaataccactgatgcttttgcatcttccaggcggtcaaccaacgggcctgactttgatatcctcatctcccgaaagggatagcg

SEQ ID NO: 181 - DNA, 3935 bp, Cryptococcus neoformans
ccaactacatgaaagacgatgaagaggatgagggtagccaagttactatcggagctcgctctgagcctacagccattgcagctgctccccctaccctcggcgcacctgccagcgcaatccctcgccgtcgaaagtctgtccgcatggcagtaccagactcccctagcaccgaatcccaccctcaggtccacgtcccccaagcacccaaacccattgccgtgtctaccgaggaaaggccccgttctcgtactcccagccccgagcctgaaagagttgagcaggcttggtctacgcgaatcggaaggatgagggaggacaccagtgaggatgaggatgagcaagatgattacgtgagagcaagaaagggcttgattaagaccaacaaatgggatgcggtcaatgctgccaaggagaagacgaagggtttgaagaaaaaggggagtgttaagagtaaggggagcgtcaaatccaaggcttctcgagcgtgaggggaaggaaaagaagagacatagtgaacacgcaaaatgcgtttaatagatcttgttatacacacgcataatgaggttgaaagtaatcaaatctataggtaattaagaatgctacgtatagtctgctgctatgaaataccgtatatggccctgggttccctacatgccaagaagaacagaagagcggcaagctgtacatggtgtgtgatgaacgaaccaggaccgatgaacatgaaccaagaagctcaccaccacgcagaactcgtccatgaagcaagatgtttacccctcaagttttactagcaaatctgttcctccggttcaggccagaagtgatgacgtgttgggttcctgtcgcaactcttcactgtttgtccagcgacaacggagcgttggaaagacggatgaaatttccagctttcacggtaaaactacatcggtgatcttgatcacgagccgtcaaccaacaagaataataactgcaggactggacgttgatatcgcccgagttcatgctcaaatcgctgtgcttcgtgatccgccccgcaattgttagtagaccgcaatttcggctccccaccatcgcaagattatcgcttcgacaatttcagaatcagccgcagtctgttggattcttcactatggcacctttggaaaccagagcgctcgcactgtgcccctccgcgaccatttgtccaccgtctcgtattggaacgacggagctcgaccgttcggcatttgacttggacgttcagatactctctgcggtagtcgaacccgggatgattgggaaactgagatcacatccttctttaaaggagtgagtgcttttagaggctgaattgctattattgctgactattgttagcttggttttggatttgcccaagaccaaaccaattgtggagtgccctgctgaactggcccctgttgctgctcgagacgtcaaaggtctcaaattgctcagatttcatctctctagggaaagcgatctgcccgaagaggcgaaagaagttttgaaaggagcaaaggctctagtcaaagaggttgttagattaggatacgacaactggaacgcttgtgagtattctcggctgtctgattgtgataaatcactgacattgactcctcctcagcggagatccttggggcctgccttcctaccacaaaaagcgaggatattccttcttcattcacaacaacaggtcatataggtcatatgaatttgcgtgaggagtggttgcctttccgatacctcatcggtcaagtagttctcgatgtaagtttccgtaatgagcgcgaatttctgtgacggtcgctaatataacatcagaaaaatccgggtttgagaaccattgttaacaagcttgatacaattcatgcccaattccgatattttgacatggaagtgatcgcgggcgacaatgactatattgcgaccgtcgtaggtatcgttccttataagttaaaaatgtcagctgatgcttttaagaatgagtctggatgttcttttaccttcaatttttccaatgtatactggaactctcgtcttcatcacgagcacgaacgtcttattagcctatttcctcctggctgtgtcattgcagatgtcatggctggagttggacctttcgctatccccgctgccaagaagggatgctacgtgctcggaaatgacctcaatcctgagagtgtcaagtggatgagggaaaataggcttagaaataaggcaggtcaccacctcgaatattctgagattatcactgacattctgcttcaggttgaaccgacattgcgagtatcagaaatagatggatttgagttcattcgcatcgcgccacttgaagtttggacccgtccatttgaccctgcccctccccccaaggtgtctaaccgtcaacgagatcgtgaagcgaaagaagcacgacgcaaaagggaacaggcaaaagctgctggccaaccagtcacagaggctgcccctatgtcagttccctctgaggaagtcgctatcaagccccacccgcctcagcctcccaaactaatttcccacttcattatgaatctccctgattctgcgatcaccttccttccctcatacgtaagctgctacactcctcttctcgctgagagatcattcatcgatgaatatggtggtgaagaagaagcaaagcggaaggtcgagatgcccatggtgcactgttattgtttcactaaggaaattgaaactggcaaggcagagatagacattttgcaggtgaggccatacttcagaagcggaaactgtattgacgagccgatagcgagcatccacaaacttatcttttaacctcacaccgcaagtcgaaaattacaaccttcatcacgtccgctccgttgcccccaacaaagacatgtactgtctgtcatttagattaccccgggaagtggctttcaggcataacggatagaagccgtccttacagaggaacactacagtcgtatctgactacaaaatgcatatactttttatacttcttgctctgaatttctttacgtacatgtacacgggacggggtatcctactaagtcacaacgcaagatcaactgtagaaaaaaaaagatcaatcatgaagtctgtaagtacacagtacagtacacaagaggcatccttctattacaagttccagtcatccaaaagcctaacattttgactacttttgagactgttctaatgcgggtgaggggattgagtccgacttcctgctctactacccatcctactttgtataggagtctggtgtaacggtgttctgtaatgaatcagtaaggttggaaagtaccgccaagtataaattgctcacattataccacttccatactgactatgcaacagcccaccactcaacgtgatctggcccttaccgaaaccgggaagaagcatcgacccatcccatccatcaaatccgtccgaactcataaaggttggcagatattctgcccatccattagacccagatggagtaccaaaatgactgccactggtgcccgctgcgccacttgcattgcctgcattgatattggtaccagaggggttagcaaggaaggcggaagtaggagagggcgcgatggagggaccagcttgtgaagggagaataagcatgtcaccaccttggggaatgaaagtgaactgtgtttcatggggaagaacatcaggatgccagttggtggcgttctggcccattaagctaggatcataaaccccgttttgagctccttgtgcgccgtccacagttgcgttggctgcagaagtatttgtctctgtgtcagtcctcgcggatgcagcagaggcgtcactagctgccctagcactgccaaccatgcccaatgtagctgcctcgccaggaacaatgccatgcatatgtcctgcgattgtgtgactccccggtgaggctggggcagtagttgtac

SEQ ID NO: 182 - DNA, 3690 bp, Cryptococcus neoformans
tctgtatgtaaatgatacacaacctgttgaaatgatcgcaccttgtcgttctatcgttctattccaaacgttataccacgggagagggtaggaagcttcttctcttaataacagccacttgaaaagtccgtttaatcgaattgcggagctgtggatgctcatggttgaagagctgtcttgggttatgatgaggtttacacctaccacagaatctcaagaatgtatatatatcacgctccgaagcatacccgagtctcattttatttgcgccagagcacagaatgatacgatatcttctataaatggggtatcccatgtcggctaggtaaagttgaccttcagggatgacaacaaagccattgcgtacgtcgccagccgcaagaacctcctgataaataataaatgagagagagtcgtgagccatgccctcatagccaaaggaaacatactagaaccgagaagaaggtcgaaagtcgcagtatttaaccatcgatttactgtttatgtgtcgatagcgatcctgatctttaacatcgacacagacaggggtgtggatgtgggtgccatcgattgcttctaatcaagcttctaatacgcgatcgaagaaaagagggcatgctgtggctacttgaggttcggcaccggatagctagtaatccgtctgtgcgacccaccggcaactgtactggtacagtatgatccggatgcaaggtttgacgactccggcccaatgatggttggattacccgagctgacgctgtgactgacgagccgccagcctgcaacccgaagtttggctggcttcggacggacgggcttctcttgatagttgacaattaattgatttcaacaagtactcttattgttttcaagcgtgtctacttttctacatgatttgctaattactcttgttgtacatgcttccttcttcatcaacctcacgctccctatattgcacatccattgatctccattcctcgacaccaaccgtgcatgagtcatgtccattgcaaggatttttggtatggggctccgtaacaagcgagtatcaacgactgcttttcgctacaacgcaaatcggaattccaaagtgcagttgcgctcaatagtgcgatacagacattcatctccaagtcaagaatttgagacaaactccgcagaaattcgcgtcaacagtaccaccataactatcaaacaacccgacgaggatgatcttcagtagtgagtcgacgacaatggcattgaaggctgactgttagcgaccatttctatcttttcgatcactgccgctgtccgcaatgtttccaccctcgcaccaagcagagactgaagactttatcccaggtacgttgcggtcaaagtttatatgccccaatctctcgtaatttgttaccataacttatccttgcactactagataccttctgatatacaccctacagccgttgcgctgagtagatcaggtttgcatatcacgtggtcgacgccgtctgcccatacgtctttttttcccgctggcttcctcaggcgagcggcatatgagactcaactttctgagcatgtagactgtcgtgacgagtaggtgtccctctattcatggatattgctgacaacgctaaactagccgcacactatggaactctgagatatcaaaatcacctccttatgttgcgtatgatgacattatgtcacaacaggtacatcagcatgaacaagctgtactgcaggtcttgaataaagtggtcagtcaaactgtagcatggcattcaccttgccgccgacgaaactatgttgttgacgattgactcgtagcatcaatttggcttctgcttcgttactggagttccaatagatgcaaaggaaactgagacacttattaaatctataggtcctatcagacagacccattgtaagtggaagtaccttcatcttgaccatatgcagtatacagacactgatacatctaagacggcggcttttggtcatttaccgcagacttaagccatggtgatctggcatacagtgctcaatcattaccggctcacacggacaccacatattttacggatcctgccggccttcagatctttcatcttctatcacatccttcacctgggcaaggcggtaaaactctgctggcagacggctttcatgcagcttcgcaactttcagccgtcgatcctgcctcttattctgttctttcgcggctccctattccagctcacgcatcagggaccaaggggactctattgagaccactgattagttttccggttctgcgacatgatgaatgtggacgcctggctcaagtaagatggaacaacgaagatcgcggaattattgggcatggctggtctgctacagaagtccgccaatggtaccaggcggcgcaacgattcgaatcattggtaaaaagtgagcaaaacgagtattgggtacagcttaatcctggaacaatgttgagtaagtcacaactgcccgtctttggtctattggctgacagcttacatttccctttcgtagtaattgataactggagagtcatgcatggacggtcagagtttacgggatctcgcacaatgtgtggtgcttacattggcgcggatgactggcattctcggcgggcagttctgacggaacggcatggagatgtagggggaatggacgacgtatggcgcttcggttggtaaacaatgcaagaacgaagcagaaatcatactatgcaatggtaaagatatttctatttgtatttggtggaaatgaggaactgtctattgggtctactgagaatacctcaagaaaattgtacacatactgaaactaattccggctaaatacgtgatatgattgtaaacaaccttctacaagccaattgcggatgcgatcaagtcgtaactacggcagccataccttcatttacaccggtttcccttgcttcttccatgacagaagaccgtattgaattcaaaacgggtggacggaatctttcgccttcgccggacaaccaatgttgacgacctttagagatgccaagatacgtgatatctgcaggaggagatgaagaaattgatgcgggaggagaaggataaggagcttcaatgtgcgatgtatgatccagtatcggtggaacttgaaatgtcgtcttgttgaccgcggtcgttgtagagctggggaggtctatataattgttgggatacgtgggtttgggagaattatgtgctgacttgtagctgagctcgattcccgagccttcaaggatacattgatccattttggtggacggcagcacaccttccctgagagcctcgacatgcctcatcttgatctcccctctatcgacgtccctttttgcgttattgtacatccacaatcctgcgcctgtgagaacgataccaagagcctgcactgtatgaactggctgtttgaaccatatgatggccaagcaaatgacagctatgcgtttgacaagggatgcgatcgagtaggtgacgggagatgtcgatgccagcaatgcaaatgcgatgatgctctgagcaaagtggacggtcccattgaggaaaaaatagaaaagaacggacgttccactttccgaagcagctggattgatccacagatcaattaatcgccgcgcgtcggaataaatccacaatggaatcatcaaaatgaaagccatgctgctggagaagtaaa

SEQ ID NO: 183 - DNA, 3570 bp, Cryptococcus neoformans
actggaagaagtgtgattatggctcgaggattataacaaagagcggaacgtactactgagcgctaaccgagcaagtttctctcttctctcagctttggcatctgctaataatggtgtttcctctcctggatctccattctcgtccccatacccatcccctccccttgctccattcgttctccaatagctatctctccttgccgctttgggactggccacttcttcttcgaggtcacctaatctttgcatgtatgttcgcgagggagtaaaagataacgcgatgttgtgcgtcagttcccctgatagaatcccatccacttctaagtaatgttcgcgcaagcgcgctaaattgcgataatacgggcgtaactttttgggaagtgttgatatttcatcatcacttatgggtaatccgtcaaagtcaccgctcctctcatgctgactgatgattccttccttacgagcttcttcaaatgtcattcccctccctcgccgaaaagagaggggcgattgggtagtcgttaagggtgtkggttgggcttcaggttccggaggatgagagggattgtggaagtgattgttgagacagaatgtggtaccagatgatgaggaaattcggggcgagggatggctgttagagaagccataagaggtcgtagcggagtgttggatcggaggtcttttatctgccatcgtgtcggatgcgcttgctgagatggaaatggcggcatcccatgataaaatgggagcgacaatgttcccgtctggtgcaacattttatgactcacctcctcctttggcgggtgcctttttttctttccgtcatctttccgctggaacggccggaaccttgatcgtcctcataagatatatggtagtcacgtgataaaggagtggcgggcatcgccgacccctggtccccgtcagaaattctgttgacctcttgttcgcgctcgatgaaagttgttgatcatacaagcaagtctacacccaacgaaagatgtcgatcgacccagctggatcacaggcatctcgccaactccccatcaacctcttcaccaggtctccaacagatgccatcccccagtctacctattttattccctccgcctggcgtcgattccaactctcagaactcataaaccaggttctcggtaacaccgctgaaaatggaagtaaaacctgtgccatttgacttccttgtaaacggtgaagttcttaggggcagcctagaagcgtgggtgaaaaagaacaggggaggagatgaagaaagtcagattgatgttgagtatgtgaggagtgtgatgccgccagaggaggctgcgagggtcgaggtcgaggattgggtgtctggcttgagcttaagcaggaaagggtacgttcaaatgatgcagaaaagatttatttgctgacatcctcacagatacgtgcttctttcatcctacctatctcacctgcaagtcctccctctttcagctgctgctcaatcatcctctgctctttacactcttcccctccctacttcccttggtgctacatcctgtacctgggtttctcctcaaactcaagaaaccgacattctcgtcgctgccggcggtgttgaccgtcaaacccacgtttactctattccctccctctcacccgacactgctgatgctcctcgcgaactctacacccttcacggccacaccggtcctatctcttctgttatcgctagctcctccggtaaagaaattgtaacaggttcatgggacggtaacatcaatctctacgtccttcccgacgcggagccaacagaacaccaagttcctgccgaccccgtgtcttatctccctggccaaggtaccaagaagcgtcggaagctcgagaaagaccaagaaaaggctcctatagaaggtctcactgacggtgatgctaccggcgaaggtggatggaggcgggcgcctgatgctgtcatgcgtggccataccggcagggtcggcggcctcgtttgggacaagcttgacagtggtaagatctggagtgctggctgggacggaagcgtgcgtggatgggaggtggagactggtgctgccggagcgttgaggcagggaccgtttgataagtctgcgctgtgtgtggatcagtggaagatgaatggaactttggcgaccggtaatatggacaggacgatttgtctttgggatactcgacaaggtcagtcactgtcgtctcatccatcactagctacacatctaactcattttttttccttagctacctccctgatttcccttacgcttcccaccacgtcccccgtcccctctgttacatgccaccctacatccccattcaccctcgcctctgccacttactctggcgtcgtccaaatctgggatatccgatcacccaagactgcccttttcaccgtttcaaaggcgcagagcaagttggccgatcctaatagaaaggttacgaagaatggcaaggttttgggtgagaggctgttggcggttgactggaatggagaagttttggttgcgggtggtgaagacggcgaggttgggatctggcgagcgagaggagagtaaaatcacgggatatcgagactgtatgcattgggcatgtttaaattgtgattcagtgtctttctttcgctgctcttacgatctttatttttcaagtggattgcgtcgctttggaccgaatcgtttcaaaggcccttcccgtcaaagcgattaaaataatgctgtaccaggatattccattgaacaccagtgggcgaaatgtcaatcattgatttgctcccaaacagccttacagttactcggcttgcaacttatttacctccttcattcatgtaaccttacccttcacccaccgggcgcgccgcgcaacagttacatgccgactgcgccagaccaratccaagagtgttcagagatagatccctagatgctgcctctctccaacagcgtcaagacgcgatggaagaaagtgggattggatcatgtcgtagaccgtcttgcacatgaatgtcgagcctctaataatttctggtcggcaaccaaggggcggacaagaccgatgagatacttgttctacgcatccaacttgcattctatgagccccacttctacatgcatgtgcccaagcattgcaggcagcgatacaccaatcgccttctccccacagcatacacatccggctgcacagagagaaaaagcatctacgcagtcttggccgggccaaacgcgtcgcgtgttgcctcctgggatgcttctgggcctgggcaaatcgcggcggggacccytgtttctgattctttcctgcgtgcatgttaagaaaaagaaaaaacaaccyttcttttgctgctrcttcagttggggatccaccactgtccacacaaactaccatccacactttcgggcaggtcccgtattccttgtatcccactcccactcagcagtcccaaccgaccaccgaaaagcaaccactagtcagagcgaccgtttgtctcggagcacggcagccacggaacaacagcagctgctcgagcacagcgagtaccggcgcattgacctcgacgtc

SEQ ID NO: 184 - DNA, 3710 bp, Cryptococcus neoformans
atggaagagtggccgcatggtgattaattaatagcgctcacggaacatcaacatagatatatcaggtgacacctggtgggccgcaagcatcagcagcacatagattatttattcgggttatgaagtagccgacggagatggcgatcttccgccgcagcagtaacagaaatctcaacccacagctaatcgctactccattttagttgtacactttgccacctggggcggcggaagaatagaggacggacttgatacagaagaaggactagcagacgagcgaagggaaaagtagatattggtacatagtgtcgtggtaagtggtatggattatcatggcgttgtgatattgaatacttgagtattagacttaccattatgaagcgttataatggtacgacggaccctgaaggtggaacagacggaatggcgcaccaccaacaccccttcggctccaccaccgttcggcgtccttcttctgctctcctatcatatatttatcataccatcattatctattcgcttccccaagtgtcgaccatccaaataaacgatcgtcgtcacaaacagtcaggtcaggtcctcctcgtaacacaaagcaccggatcatcaagcattcgacagccttgaccttctgagcgctttagagccgctccacaactcctttattctggcccctggccagtccttgcatttgcactgcccaaccgccagcgatagattaccgtcagccagtcataggtcattttacaatgttccaaaaggtgtccgataagttccatcgcaaacagcagtccacgacattacccggtaaaacgcaacaggttcctaaccctaccagtccagtcctggcgaaagccaattctcaagctcaacaagcatattctttgcctcaagatcattccccgatggaaggtatacaaaggtcagggacctaaataaactgaaaaaagtccgaagctgacagttgacgggcagggattccccccctatccaacagcctatggctactgaaaaggcacccatagttggatcttctgcatcgacgtctttacccaccctatccgtgcaagatggcactcttccattgactccaggtgctcaggggatgcagacaggcacaattgacgggcatcggcaacttcagagtcctgtgtctcgtagtagtagtgcaggcgaggataagatgagagaaaaggcgagggatgcccaggagcaggttggtacacatgacaatgtgcgtcattaacttgttataggcagcgcaagcccaggccaacctccatcacgcaacgcaacaagcgcgcgttgccgccatcaatgccgccgctactcaagctgcccttgaaacagccgcccagctgcccgcaactgctagggtcccagtttccggtgggggagttgagcagggtcaagcaagacgcaaaacagctggccgatatgctctatctgatttccttattgaaagaacgtacgttcattctcctccaacgtcgtcgtagcttatgaacttttagtttgggcaccgggtccttcggacgtgtgcatttagtgcggtcacgccacaacggtcgcttctatgccgttaaggttctgaacaaggagaaggttatcaagatgaagcaagttgaacacaccaattctgaacgagagatgttggtgcgggttcgacacccatttctcgtcaacctctggggaacctttcaggatgtgaataacctgtatatggtcatggactttgtggcaggaggtgaactctttagccttcttcgtaaaagtcaagtacgttgcgccaatgtagcccatccacagactattaacatttgtggtagcgattcccgaattctgtcgcgaaattctacgcggccgaagttgctttagcgctcgactatcttcattcactcgatattatctaccgagatcttaagccagaaaatctacttttgggtgcagatggccatgtcaaggttaccgactttggttttgccaagtatgtacctgatatcacctggactctttgcgggacaccggattaccgtgagcgttttgatcttcagacgcgtgtactggcatactgaaacaaatcagttgctccggaggttgttcagtccaagggttataacaaaagcgtcgattggtacgctttaggggtattaatatttgaaatgctggtgcgtttttatgttgatgttgcgacaatatgatttgggtctgaatcttgctcaggcgggttatcctcccttcttcaccgaagacggcaatccaatgaaattgtatgagaaggtgatattttcgacagatagtattcatccagagcttacacttttgtctagatcattgctggcaaagtccgctatccgacatactttgacgcacttgcgaaagaactcttaaaaaatctactgatcggggacctcactaagcgatacggtaatttgagagcgggctcttctgatatatttgcccatgggtggttcgcagaagtcgactgggacaagctgtacaggcgcgaaatcccggctccatatgtgcccaagattgacggcgaaggagacgctagccagtgagtcggtcctgatatacaaatcgaaatctctgcccgaaactgaaatataaaatgccatgcaggttcgatcgctaccaagaggcggatgttagtgcttatgggaaggttggcaacggtccatatgatcatttcttcacggagttttagtttagaccgcccgtaggtcacgcggaatggcgtctggttgtatccatcatcatataagggatctacattaacatctgcattactaaatgggcgagcacaccaagaaagttttgatttgttacgaagagttatgtgatagatactgcactcattattcttgaattgaagtaatatgaaatcatttgttgtcaaaaaagaatcaggtgttagcctgatccactattatgcgattattcagttatttgtttgacttgagcgacgtccgtccctgttagtgttagtctgtaactgctgctacaatcgatatcttccttgcgcgcacatttctgattcagtacactgtgatttttgataataaacctatagacaagaagggttgagggtcggctcgaagcggtgacgaccgtataagttgctgcggatgaatgggtgatgatcgatgcatgttgataaataaatactgtatcgggctggtggatttgtctataaatcattcgtttttctttagattatttacacagaaaatcacgcaccaaatcgtgttattgatctacccattattcgcatttcaggcaatcacatagttgtttggtgtttcgattggtttcaattctatgtcggacgacgcagaagtgacgaataataagaaaacgacgaaatcgacattgttagatggcaatcacatttttcctcctttttatgcttgctatctgttgaggtccaaggctactgctaattccaatcgaacttatgtaagtctcttatcctctttgtttttgggtctttggttgttctcccgatattgacatttggtgatgattcatgttttgtaggttgggtccacaccagatccgccaaggcgaattaggcaacataatggagagctcaagcagggagcttggtcgacatcccgtcatcgcccatgggtgagcgacagaacgcacagtattgttactcagatttgctaatttggaatcgataggagatgcaaatgatcgta

SEQ ID NO: 185 - DNA, 3710 bp, Cryptococcus neoformans
tcctcgtcctcagactcttcttgcactttcctcctcttccctgccctatcttcaggttctttccgtctgtcatcctcttcctcatccttatcattgaagttatactcctgctcttcgtcgtcttcttcagctccttcggggtcatatccagctcctcctgcctggccatgggtaagaggatcagggcctcggggcgcactacagtttgtatgagtatgcaataccaatctatagatgcacagttacttaccgttgtttaggaggctgttgttgtcgaacctcctcacatgcgtcgacccaactgacaacttgttaagcattttcatatacaaatcggacgtcattcaacttactcgcagtaaacatcaacggctgctgaaaggtctgttatgtttacggtatgtcagcagatgtgtgggtgttgttattcatgcaaacccactatttataggtgtactatatttctgtccgcaaactttacaatgcaagtgaccgaacatggtggctttgtcactgggaatcggacaatccagttagggatgcccatagtcgaatggccgaaatttacatacagctttacattgacagctttgtcgtggttacaaaacaggcatttaaaaacactcgctgcataagtgactgtcagcaacgatatgtagccatatcggcatacgcacatagtggttctgccttctttttcgcaactggcttcttggcggcctttcttttacccattttgtctgtgttaaaaaggatgtaaggaagagcttgttcgtatatatagacgagacgggttcgttgatagtcggcagcggcacgactcggaagaagggcaagaagagctcatctcaagaagcggcgatgcggagatcgggacaactccacgacccgacgaccgaggacgcgcgtttggtcatcgacaactcgacagatgtcataaacctataactgcatcttttctacactcatatcttagccatcctagtactcatcgaagaacatggaagagatcggcattgacctcaaaatggaggtgaggaagaatcgtgaagagccggacaacatggggtactgactttgacgtaggatccctccctcccagctcaaatctcggagaagcaaaatctcctcaactctctgcctagtggcagtgaagaactctacagtacttggaagaggcttgaagcccatcgagagtttttacagctccaagaggtacggctgctgtgttgattgttgatttgaactgagctgattaagcaatggcacaggagtacattcgtgacgagacccagaacctgagaagagaacttttgagggcacaggaagaagtcaagcgaattcaatctgttccattggtcattggccaattcctcgagcccgttgatgaacgacgagccattgttggaagtacaactggctccaattatgttgtccgaatcctttccactctggatcgtgaacttctcaaaccatcttcttctgtggctcttcaccgccactcaaatgctctggtagatattctcccaccagaagcagattcatctattgcgatgttgggagcggatgaaaagccggacgtgaagtactcggacattggtggcctggattcacaaaagcaggaaatcagggaggcggtcgagttgccacttgtacaacaagacctgtacaggaagatcggaatagatccacctagaggcgtgctgctctatggtcctccaggtgcgttgatctctgtctagagttccagttgaaggctaaaacgtaatgataaggtactggtaagactatgcttgttaaggctgttgccaacgcaaccaaggccgcattcatccgtgtagttggctccgaatttgtgcagaagtatctgggtgaagtgagcgaatttttatccacctctgaaagcatgactgacaaatgcgacagggtcctcgtatggtccgagacgtttttcgattggcccgagaaaactccccatgcatcatctttatcgatgaagttgacgccattgccacaaagcgtttcgatgctcaaaccggttcggatcgtgaagtgcagcgtatcttgatcgagctacttacccaaatggacgggttcgatcaacaaaccaacgtcaaggtgagtgctgtttatttggacattcgcaatatctgggtttattaatttttgcattaggtcattatggccaccaaccgagcggatactcttgaccctgcgttgcttcgtcctggtcgtttggacaggaagattgagatgcccaatccctctagacgtgagaggcgcttgattttccagaccgtcacttctaaaatgaatctgggtcccgacgtcgaccttgaggattgtaagttccttagttatgcagagctcgtggattttacggattgcactctgacgccatgacagacgtgtcccgaccggacctgctcagttctgctcaaattgcctccatctgtcaagccgccggtctccaaggtaaatcatttagtgcagcatcaagacaggagctgacctatgttcaatgccttatagctgtgcgaaagaaccgatatgtcattttgcccattgattttgaggaagcctggaaggtgagtgcagagtgccacactcgcgactccgcgtcggcgctttgaaaaacgccgcgttcttgccttcatttgtcgtctttcgaaattcaaagctaactcttttgtttctcttttcatcttagtctgtcgtcaagcgtaacgacgagactcacgagttttgtaagtcgttcttctgaacacgttgatggacagtggctgacttgggattccttaatgttcaacagatcggtaattactttttcgatactttcgatacgtaagtcatgtggtcaattgtaatcatcagcgctgaccccactacttagtgtacaactttacatcgtatgcattagcaatgaatgccaaaccctttcataggtatatgctgcctcttctcttctgtttccattatttcttgcttagtggcctacatttcgtcttcacccatatgtggtgtaggggatcggtgtcactcgagcatagaccgatgcttctttgaagcttccgacgttcatttgctatctttccgaggcgcaagccacttccacgggaacgatacttcacaggcgccggatatcattttatctcgggaactgtacaagatctcgacaccaaggcagggcagtcagttggcgtaaggcgagtgggtgttttgccgtgttgtcgagctgttgtttcatcctttcacatattccaaaggtgcttaacactctgcgagcgatgattaccaaaatcgtcttgctattttaggaacaccgagattgttgctggcggcctccaaatgctcaggagtgtcttgcccccattgttactcaccggcgcggaaaactgaagtagctggtctatgcagtgggtacatattattctgtaatgacgtacttccatgtattttttcttttcttgcgagagctttgctggttatatgcaagttatcattttatacttgaacggtgcacgatgagtagaagatgaagatgtgacgcatcatgatttgttgcctccaccataaacgtttacgcgaaactgaatccactactcgccatcgttctattacatttcgtttacattttcatttctcttttacaattccttcaattcactttcggacaaggattttgcaagctctgctcatatccagatccc

SEQ ID NO: 186 - DNA, 3745 bp, Cryptococcus neoformans
acaaaatagtattgtgtgtacccgctcaaacatgcaatgtaggagagtaagctcgaacagtgagttcgtggctctgggaacagactataagtcttagtcagtaaataaagcaaagctggtgaagccaagcgcatactttgctactaacaaactcccaaagatccccctcttccccactaaggtccttccaggagcaagtggcgtctccgtctagagtcccaaagcgaaattgtaagctctgatcgatgagaaaaacgcgctcgtcatccgctgacatttcacaatcagtaagcacaacagatacaaaaccaaaccaagacttactctccgcatcctcatcgagtagttgctcctctccctcttcataagcgcgagtaacaacgagctggtactgatattctgtgcctgtccgacgaatagtcgcgacagcatcctggaaactgttcattcattaggtgaacaacattttgataacctacatgcattcacgagaccctttgatactgtctggacggacaagatacaaaagaccagcaggaatttgaattagctccgggttagctgggttaccccacatttttcccaggacttcgaaaggagtggatgagtttgtgcaccagttgtgaatgagataaatgtctcacgtgatttgaggacaaacatgacggaagaaggtttggcagggaatctggtcgctggttcgatgtttgtttgttaagttggcgggcgagagaagtgcaggcggggcatggatatagaagagaggatcgctgtggcagcagactaaagtggcgacaaaactccccgtcaccacaaaatgaagaatgaagcatcatgacagaggcacgccacatagttacgtaaggcacaccaggccgcgcgttgacccctcgtcaccaggaatctggaagtagtcctactccgtacaactcacatatttcctcctttccctcaaaactcaccaatcctctacactctaaccaacaagtagtattgtacaatggtatgttcaggttgttactgtctgatgagtgctgacagttgatcttccataagggtcaagcaccatccagcggcgctggaaacaataagaaaggcaactccaaagacaacaaagacaaggttggttcttgtgtttcgatgtagcatcgcaagagattgatttgctgactgacttcggtagcctaagtgggagccccctgtgcctactcgtatcggtaagaagaagagacgcggacccgatgcgtcgtcccgacttccagctgtatatcccaccactcgatgcaaactcaagttattgaagatggagaggatacaagactaccttctcatggaagaggaatttgtgtctaatcaggcatcgcagtctggtgaagataggacggcggcagatcgaactcgggtggacgagcttcgtggctcgcctatgggagtcggcactttggaagagatcattgatgacgatcacgccattgtgtcttccggaggtggatctgaatactatgttgggatcatgtccttcgttgataaggacctgcttgaacccggttgctcagttctccttcaccacaagacgcacgctgttgtgggagtgcttgccgatgacaccgatcccatggtctctgtcatgaaacttgataaagcccccactgaaagctatgctgatattggaggcctggaaagtcaaattcaagaaatcaaagagtcagttgaacttccacttacacaccccgaactttatgaagagatgggcatcagaccgcccaaaggtgttatcttgtatggagtacctggtactggaaagactcttcttgcaaaagccgtcgccaatcagacatctgcaacatttcttcgtatagtcggctccgaactcattcaaaagtatcttggcgatggtccaaagcttgttcgggaactattcagggtggctgaggaaaacgccccaagcatcgtcttcatcgatgagattgatgccatcgggacaaaaagatatgactcgacatccagtggcgaacgggagatacagcgtacaatgttggagctgttaaatcagctggacggttttgatacgcggggtgatgttaaagtcataatggcaaccaacaaggtgagtcatcttcgcttacaagattttaacccgcgttgttgactagtttttagattgaaaatctcgaccctgcgctgattcgtccaggtcgaatagacaggaaaattggcaagtttgcccatagcgatagcttacctcgtgctgacttagattctcatcagaattccctcttcctgatacaaagactaagagacacatctttaaattacacacatcgcgaatgtctttggcagatgatgtagacatcgaggaattagtcatgaccaaggatgaactatctggggcagacattaaagccgtttgcagtgagtgtttcatgtcgtgaccatcgctgacaattagccgaggccggtttgctggcattgagggaaaggcgaatgagggttactcgtaccgtaggttcatgtctaaatataggacatctgttgttgttgctgacttttgggggataccaggatttcaccacagcacgagaaaaagtcctgtatggaaaagacgagaatactgtaagtctatctgcctttaacaccgctgacgctgtagcccgcaggcctgtatctctaagcgtacggagactggagattttggtttatgtagtagactgcatgcacttcaatcaagccgtcaattcttggtgatgatcatgaaaaattggtacgcaagagcgccttaatatctcctccctttcgtgatgataattatgccatgaggagcctataccgtatgatacatgatcattttggtgccatagagatgccattgcgtaataactaacgaaaatgctgtgccagcgctaaccgttgcatgtcgcatgtagcggatgatctgcgcctagcccgagttatggttaaaaatgcgtagtaggaagatagaaaagctgttgaatggtcatgagtggcaaacctcaaaagatagggagtctcttcagtcacgggtgcctgttctgtagcatataatagtgtggcggtaatatgtgatagcgaagtaattcaaacaatacacgcatatcgaagacccgatgatgttgcagctgaggaactcgcatcatgttgcttgcagcggcagtatgtattatacggagaagaggaaaagtaatgacgttcacacttttctccccagcgggtcgtcgtggtcatgggttgtgttgcttatccgtcaccacgcgcgtactgactggatttactaccgtgacaagtacttctcactacatatcgactggacaccggataaatacacattgctagggtgtctgtctataagtggtgcgttcttatcaatcattcatgcttgagctcaatctctacaacttattacacccgttttcagcgcctaatcatcacttcctactgtatacatttaatttgtagatcaacgataacacgaaccaattttttcttttagcaggacaatgtttggcaacaacaactctcgatcacaatcttccacggctacccgaaggtatggtatcggtagagttttagacagacaaaaaagcgtcccgctgatcttgcttccttgaagactgatgaaggagtatcgcgacttaaccgccgatcctctacaagatacaatcaccgccggtccagtctcggaagataacatgctagaatgggaagctttgatccaaggtccagaggg

SEQ ID NO: 187 - DNA, 3750 bp, Cryptococcus neoformans
atggtacgaatttgatcgagggtacggatatcgggcgagaggccaccgtgaacgcagaggattgaagagtcaattatctggtaggatgtgatcagcaggtcattcattaaaacgcaggatacccaagacagtgaccaacagcagcaagattgaggtgatcgaacacattacaacaagctttccataccgaaggattgccgtacttctgcatacattcatctaatgtttctcctttgttagttcactgaaagcaaaattgatcgagaataaaagcaaagcttaccgtagaagccgtaaacctgggtaatctgtctactttcatggtttcctctcaaaagcgtaatcttatctgggtatcttgccttgtaagccagcagaagagataatgtttccaaactataatagcctctatcgacgaaatctccctgatcgctcatcagtattggtctcttctttgtctttaaagtacagcagctgaaactcaccatgaaaatatagctagttttaggaacctcgcctccctgcctaaaaatctcgagaacgtcccaaaactggccgtgaatatcaccacagaccgtcactggagactggacgaggcggacgttggactcttctagtaaaagatcgcggacccggttacagagaagtttcatttgacgttctgggaggtgcttgcactggcggatctgcgggatgatcagttgaggaagagaaatggactggacgggccgggtacgcacatgctgtatccagtgatctggatctgaggagactgggatgggcatcgtcggcgaggtatagcgcatcactcagaatatgctgacgagtagtaataacatccctccaaatcccatccgaatcccagtggaagtaattattaatccccccaacaatacttaataaaaccattaataacgcaccctcataatctcgagtcgcggttttggtttcttgcgcaccttgcaagaatcctcatccacacccataaccacactacagcatgatcgacctcattcatcgtaagcacaaactcacgcccgctcccacaaagacgcacatcagctaacatgcccttgttttagtccaagccgacaaaggcggtaaccctgacatcgttcgggagtctcagaagaagcgaggcgccagcgtcgagctcgttgatgaggttatcgcaatttttgccgagcacaagaatggtacattaactcctgatatccttctttcttttgctctcgctcactgtttgacttttcttagccaactatgaaatggagaatgccaagcgagaactcaacctcctccaaaaagaaatcggtcaaataaaaaaagcaaagggtgatgctaccgagttgcttgccaagaaagcagacatggacaagaagattgcggagatgaccactcgagtagccgatcttatcaagaagagagaccaaaaggctggacagattgggaacattgttgaccctcagaaccacgtttctttgactgaggcaagtttgctaagcgcctggtcggggaaaggaacatacagctgattgattttataggacgacaaccctgtccttcgtttatggcaccctgagcctaaccacaagggcaattctcaacttctcgaccaatctgacaagcccgagggtattatttcccaccatgaagtcctcgctcgtcttgaggcctacgacactgatcgcggtgtcaaggtcttcggccaccgtggtttctatctcaccaacgacggcgtcgaccttaaccaggctttgatcaactacggtctcgatttcttaaggaagaagggattcaaaaaggttcagcccccgttcatgatcaagaaggagattatgggtgcgactgcgcaacttgaagactttgatgaggctctttacaaggtttctggaggtgctgaggacatgtacttgattgccaccagtgagcagcctatctctgcctaccacatggacgaaaacctcgatcccaagaacttgcccctccagtgagtacattcgtctttcaactgcaaccatagccgttgactgaaaggaatttaaagctatgccggttactctacatgtttccgaaaggaggccggttctcacggtagggacacttggggtatcttccgagttcaccaattcgagaaggttgagcaatttgtcgtctgcgagcccgaggcttccccagccgagcttgacgccatggtcgccaactctcgcgagttctacgagtctctcggtatcccgtatcgtctggtcaacatcgtctctggtggtctcaacaatgccgccgctatcaaatatgacttggaggcttggttcccttatcagggagagtacaaggagttggtctcttgctctaactgtaccgactaccgtgagtcccaagactgatcaaatgaaataaagctaatgaaggcctcagagtcaaggtctttgaacgtccgactgggtttcaaggaaaaggacaagaagaccggttttgtgcacatgcttaacggtacactttgcgccactgaacgagccctctgttgtctcgttgaaaactaccaaacccccgaggtgatttttactctttttttactcttcagtccgcaaaaaaatgggcattgaggctgacgatagttgaattcataccagggtctccgtatacccaaggttcttcaaccttacatgcaggggcgggacttcttgccctataccgccgagttgccaaagacttctaccagcaagggccccagcaccaagagtaaaaagtaatggtattcttctcttttagatacatcagatagcactgcggggttgtggggatgggtgtggattagacgagagcattggtctttacaaaccacacctatgacaagatttgacgtagtattatcagccgcaagatactgcccttcggactctcgtgcagttctacaacctccggcattacattccccctgccccactttcgcctgacgtatcccaccgccgcacctcgtcgttcaaccccttgtacgaagatcccgttctccagacccaacaccctcaatttggacatcgggcgcgctcagactctactagcggcaccagttccgaatccgacgttttccccccccgtaaaagctcttccaataacccggcatcattgccttacaatcctgacgagatgattgagttttggctacatgagtacgaggatgtactggtcgaggtctttggggtagagggtggtaatgagcttgctaacgggcgatgcagttctactggtgtatcaacgtcggcggcttctttgccattgcttcttcatactctgcacgttttgtcggcttttggctggcttaccttctgcccggtatcgtgtacatgctcatgcctatcgtcttggtcgtctgctataaacgactctataaggccccccctcagggttctgtcacccttgaagcgatgaaagtcttgtaccttatcataaagaagggaggtttcgtcaagatgttcaagggaggtgaagaattctggcagacagctaaaccgagttatatcttggccaaggaaggctcggtcgacacttccaagatcttctgggatgatttgtttgtggatgaaattaggcagtctattgcagcttgtggtgtcttcgcccttattcctattttcaaccttgccgacggtggtattggttcacaggagaacgacatgtcaactgccatgactctgaacagtgagtgtccaattattatgacaggatggaccatatcactgactcattatctag

SEQ ID NO: 188 - DNA, 3573 bp, Cryptococcus neoformans
cctgtagtaacatatcagcgctgtgcaaggcgacatacccacgagcatgtaaactcgccgaatgtattctctcttcaagatcttccagcctgtcctcgggcttgatttcyacctctttgacgagcaagggctcccccctgtctacctcggccacgaccctgtgaaccatgacgcctgtgcgcgtgacctcgcctttttggaaagcctccaaggccctgtcaatagcatgcgcgccgtcaaacgcgcccggcaacgctgggtggagattgatgatgggcacggggaacgactggctcggcggcggcgggggaagctcggacgtggcctgtgcgttttgcgaaacggcgccgggggcgtgggaggggatgggctcygtctgggtgggcaggctgctcggtgcgggcggcggaagggcgggcgcgggcgggggctccttcttgccgtcgagtatatcgaggaagcggtctgagagaatgtgcatccagccggcgaggacgacaatgtccggcctcgtgtccagyacctgcctcgcgacttccgcgtcgtagtcttccctcgtggcgcccgggttgcggttcaggaacgtcttgagggcgcagacggcggcggggatcgggggggcgtgcgtgcgggcgcgggtgaggccgtaggcgtttgagcgggaggagatgacggcggtgatcgcggcgccggggagacggggcgtgccggccgcatcgagcagcgcctggaggtttgtgcctgcggggcgtgagcgggsgtgggggagtgggggaggaggacttgcctgagcctgagatgaggactgtgatgcggcgggtgcggggcatcgtgctagcggcttgccaagaggctgtgagacatccatcatttattagtctgcggctagagamgatgatgatcgacaaaatcagcgcgtgacgtggaatttccgcggcacttgcaccaccaccactactactaccgacatcgcattctctgccatcgccckgtcaccgccatgccccgcccgctgcccctccccgccctcagggccgcgctcccccgcccacaccccctccccctccgccgtctcgcctccaccgcgccgcccccgcgccgccactacctctccaccgccctcctcctcggcggcagcgtcctcctcgtcgcgtactactatgactccaggtctctcctgcacgagcacgtcgccatgccgcttatgcgcctcgtcgcagaccccgaacagggccacaagctcgccgtcagggtcctcgcatgggacaagtgggcccggccgagagacatgggtgtcgacggcgccgagctgcaagcagaggtaagatttctgtaaaccgtatgcgcagcgctcaaacggacactgtgcagcttttcggcatgcatctgaaaaatcctgtcggcatcgcggccggctttgacaaggacgccgaggccatcgatggtctctttgacctcggtttcggttatgttgaagtcggaagtgtcactcccgaaccccaggtatgtgtgcagactatgaaatcgtatcatatcctgatccatgcagcccggtaaccccaaacctcggtttttccgtctcgaagaggacgatgcctgcatcaaccgatatggattcaactctcttggacacggccacgccctcgcccgacttcgtctccgtctcgccaagtttgctcaggatcatccttccctcttcccgtcccctctgcctgcaaacctcgtcccacccgcgggtttgccgaggtcattgagagccggacagctgcttgcagtcaacttgggcaagaacaaggccagtgaccctgattcaaacgacgactacattcgaggcgtcaggacgctgggaccttttgcggacgtggtcgtgatcaacgtgtcaagcccgaataccccaggcttgcgcgctctccagggcaagcagcagctcgagcgattgttgaacgatgtcgtcgaagaaaggaacaagatcgcccagggaaccggactgcccaagattgcagtcaaagtcgcgtcagacttgagcgaggacgagctggcagatgtggcgagtgcggtgagaagtagtggtgtcgaaggcgtcattgttagcaacactaccatccgaagaaaagagctcaatcttgtttccggtaaagtgcccgcttctcttttctcttcaagctgacggataccacaggcaaccaagaccagatcggcggtctctccggcaagcccctcttcccttacgctctcaatgctctcaagactctgcgcccgcttctccctccgtctgtccccatcatcggctgtggcggtatctcctccggctccgacgccctcaccatggccaacgccggtgcttccatcgtccaagtctacacctctttcggcttccgcggtgtaggtaccccccgtttgatcaaggatgagattacagagcacctcaagggtgaatcatggaagactcacgtaggccgcgactgggcgtcttcaggtcaaccgatgggatgggacgagaaccgtctcaagcaagaaagccaagcgcttgtcgacgaggccaacgggctggcagagctcttgcgacagtctaatgacaaggcagagacggccaagctcatcgaggacgcggagagggcgttgggtatagtgaaagaaaaggatggggcagcgagtgccgcaacggtagtcgatgaaacgatgccgtccctgcctccacaggcggcagtcccttcacaaggcggcgggtttgggattgagggcgtcggtgcgccatctataggagaggcactgatcgctgagcccgtgccgcaagtcgatcttgcacccattgtagtattggaggaaaagaagaacaatgttgacgacaggagggagcatggggaaagggacaatgagtggaagcaggcagtcaaggctgggccaaagaggttagtctaggagtgggggatggtttccaagaagaagtgaatcaaaatctgcaatttaaaatgcattggcataaatcatcattttaaaaatggcagcctgtcaggaaacctatctatctcctttccaaccacttcttcgccatagttgccgcaaaaacgcctgccgcgccaacacctaccacacccccgatccacccagcataacccacgacatccttctgccacctctccttcctcagcgcttccgaataacctacatccggcctaaaagtcaccatctcataaagactcgtccaccctcgcactttcttggtagggaaaggttccatcaacgacaaggtggcttgaggcgcagatcggaacaaggtggtgaaaaccttgtcaacctgacgacggagatggtgaagcggagaaagcacgtgcgagcgcatttcagtgctgacaaaacgacaatgcgttaagctactaataatccgtatccaaaaaaaaaacttttaaaggtttcacaggcttactaattttgcaaggccagttcacaaatcgccttcaagtctccttgcctttcatcagaataggcctttagagccaattccagctcaggatccgtctcgccaagcgcaagtgtggttgtgggtgagatgtggtgtcgctcaaggatagagct

SEQ ID NO: 189 - DNA, 2023 bp, Cryptococcus neoformans
ctccttaatcgtctcacgtacttggtcttttactcttactcctctattcctttacaactggtcctccacaatgagccgccccctccgaatagggtttatacacccagaccttggaataggtaagactgattgactcgtgttatgctaactcggcaaggcggggcagagcgtctcgtagtggacgcggctctatctctcaaaaacaaaggccaccatgtcacgatattcacttcgaggcatgatccttctcggtgctttccagagactatagatggcactcttccagtccatgtcctcggatcgtcccttcctcgatcattccaccccaaattcccattcaccatcctcttctccatcctccgatcccttcttcttgctgtccttctcctcacgtctcttcttttacccggtccgctatccattgccaaccctctttcgcctcttcaagggttcgatatcttctttgtcgatcagcaaagtgttgctgtgccgcttctgaggtttgttagcgggacaaggatcgtattttactgtcatttccccgacaaactgcttagcggaggatgggagatcgatgtgggcaaagataaggccgtggtggagagaaaaggtgttggcatactgaagcgcatgtaccggtggcctatcgacaagctcgaggagtatacgactggtgggttgtccgcacattcattatgccgtggctgaccagtatgacaggtcaatcggacatcatcatctccaactctgaattctcttctcgcgtttttgccctcgctttcccttctctcgcccagaaacctcgccgagtggtctacccttgtatcgacctatcttcttacacatcaacttcttctgatgtcaaggatggaagcgtcaaccttattcaatccgatcgacctacaatcatttcttttaacaggtttgaggcgaagaagaatgtggacctagccataaggacttttgcaaaacttcgtgacgatgatctcatctcaaaggaagagtttggaaatcttcgatttgtcgttggcggtaagtcatactacgttttgaccgttaagaagctaattgcaaccaggggggtacgaccctgatcaacgggacaatgtccaaactcttctccacctccaaaacctctgtactaacctctccttatcacatcataccattccctcttcctctccaatctctcccaacacgcaaatcattttcctcctcaacttttcctctgcccagcgcgcccatctccttacttctccttctaccttagcgctcttgtacacacccaccaacgaacatttcggtatcgtccccatcgaagccggggcctgcggattacccgtattggcatgcgataccggcggtccggtagagaccgtcgttgatttttccatcccttccaatgctgagaacggcacgggtctcctacgaccaccccgagctgaagaatgggcaccagcgttgaccactctcctccatctctcttcttcccaacgctccattatctctcagagtgctcaaacccgtatcgccgaaaacttttccttggctacgatggggacgcagcttgagaaggcttgtcgggatgcgctagcgatgggtgatttgcatgttcaagttggggataagctgatttggggtggactgggattaatgggttttgcagcgggtgggttgggcgttatttggatggtatggggggtttgagtaagctcatagatatattgttatgcatatgtccagttatatatagactgctacttgagtctccaatgagaagctgcgtggtggtcgcagaaatgtaatgcaaggggcgaccggcatgcccggcctttcaataggctaaagcaactgagacacatgccatactggacgggcaacatcctgcttgaagaagccagctatttccatcccatgtaatttggcaacacgaaacacctagctggacgctggaggtaagaacgaccatattttcatcgtcgaatctttaatgttgcctatcggagtagtcatacccccacta

SEQ ID NO: 190 - DNA, 3988 bp, Cryptococcus neoformans
aacacgtttttctgctgctgtactaccagactcaagaccttctgctgttcttcgctaagggtcacacgctgtttgatgttgagggcagagcttgtcgatttgggctgagcgttttcctttggcgtcaaactggtttgggtgtaaactttcttgcgagccctgcactacgcataagcaaaaaattagggtcgcgttatatggcggcttacttctgatctccctcccaaggtagcggccgttttggcaaagacgggagtgtttggttcacatgacgtatggaagagccagggcaatgagttgcgacggatggaactgaaatatcacaattgatgtcttgaggcgaggcaaaagtagatgatgtttgccctgaacgccagtcgagaactggagaggcatatgcggtctctttgttttgatttaatgcagcaaggatagctttgcgacgtctttgagacgcaatttcttttgcggcagattctggaagactgggcgaagttgttgtggactgcaaagggcctgaagatggcagtatattgccttttctttggacgctggaaaagaagatgcgtcagatatggttacctcatcttgttgtacttacatttctgggcttggactccaatccagttgactagactctggtccatcctcctctccccaactgcgtttgaaagaggttacgcgagaaagagtcccctttgatgtgttgttgggattggacgatgaaagtgtgcgggccgtaagaataggcatattactgcgtagagaaagcttaggaagagttgaaattagtcagaaaaggaaggtaggaaggaagacgcgcttgaatggcaaaaagtaatgaaagggaggttcttgtcgagttgcacgattggcgtagtattcagggaatgcggggtggtaacgggatacaatgtagcggtcgaatcgaggataacgctggtaacaggagtacagtagtacaagtaagcgacatacagtattcaacaaattattaggaatggcacgtactgtactgtaccagtacaattgttctctctgtcggtgacttgcaggagaggcgcgcccgcgaggtttcaattacggtatcaccgcacttatcgtatttaggtgattattttattgttaatttttatttacctcctctctacatacttgcaatttgtcttcttaaaaattttgtgatcgtttatcttccccctcaatttaattttcaacagaacgttgatttctaccgctgtaaccgtacatttgtttcacatagctaaggcacttctcacttgccgaatcactcaaaaatacttctgtggaccggatatctctagccagtaatcaccatgcctaaagacaagaaaattcagaacgctttcaaacgttcagaagtccatcggaaaacaaaacgtgaaaaagaacaagccaagctccaacgccgtcttgaggtatcctccttgctagtgttttcaccaagctccggctaattccctcaattatagataaaaaaggctgaaaaagacaaagtaactggggctgctctccgcgccgagcgtttgtcaaagaatatccctgtaaccctcgataatactcgtgtttacgattccagttcgtatcttacagcaaatcctgcatccctgcaaaacttggctcaggaggcgaaagaagccagtgcattgatcaatgagaatgatcttatggggaaacaaccatccaaggaattaagtaacagagaagatagcgccgttttaacatccggcccgtcaagtgaccaagaagaggatgcggacgggtcaagtgaaatgtctgataaggaaatcgaagaaaagctggatggagaagatcaagaagcctccgcaatgcgagacataactactcaatcaccaccccgtatcttgatcaccacatcaccgtctccttgcaaacaaacttatcagttttgcgatgacttgaaaaatgtttttccgggtggagaattcttcaaaaggccaaagggtagaggatttgaaattggcagggtgtccagatgggccagtaaaagaggttatcgagctttgattgttgtaaatgaggatcataaaatacccagtgagtcagcagtccgtgcactgttccatcggtttttctcacagatattcagatgctatcaccttaataaacctgccttccggacccaccgcatacttcaagctttccagtataacactttcgtccaacatatacgtaagtttttttttcactattggtatttttcatcggacactgatcttcacattcgcgcaggggcatgctcgtcccactccccattcccgtgagtcttgtgattatctgattagggaagacagtactgatgtttaattatctctagcggagctcatactgaacaatttcactacccttcttggaaatagtgttgggcgactgtttgggtcccttttcccaccccagccgcaatttcgagggcgtcaagttgtcactttgcataatcaacgagatttcctctttttccgtcgccacaggtaagctagtcgatcgggataatttcttcaaattactgatccacgaaaaaggtatatgttctcttctgccacttcggccaaactccaagagattggtccgcgctttaccctaaaacttcgatggcttcgaaaaggccttccatctgtcacggctcccgacggtcacgcctctattggcggggatcctgcggacgaaatatacggaactgaagttgggcccagtaaggaggaaattgcacaagatgagttggatgaagaagatgaggcactgaaagagattgggcaaccaacccagaaaaagaatgtttatgaagggaccgaagtgcctccgctcgatgaggagcaggagtatgagtggaagtggaaggttagttgctcatcgttcaacaaggcttgttacatgtcaatgcttatggtacgctttatagccgaagatggaagtatcgaggagaaccttctttttatgatgcaaaattgatcatcatatcgcctcatcagattctggccaacctcctgtccaagattcacatgttgttcggcgtcatctgactattatgatatctatagacaacccgcaagctgcttctcatcacctagtctaagcgttccgagcgctggcaacgcaagattgtggcgactctcaaatgactatatgatgggaatgacagacacaatcccgcttcttttggggcatcacctgcttgttactgttagacacattaggcatgaatacaatcttatcagccgctactttatactcgatttattacgcccgctccaccattaccttatggaccctcacacccttagccaaggggccctcatggcggggtaaaatactcacttttaacgctacaccggacgtgttagcatgaggcgattacttccttgagcatatggctcaacattagtgcatttgacccgctaatttcatttccattgttcattctgtttcatcttggagctttaaaatcattttggatattcctcacagcaaccaagcatggatatttcgtttgtgtgacatctatgatttcagcggggggattctcttttccccgcgacatcgtttttaatgttgacgacctgccgtacaggtgttacaaaccaagtaaggaaattagcttccgtagattaggaaacagaatgtaattgacatggcctcccgccagcgtgcccttttttgatacgtgcgtatgtacctgttgtatgtcatatgcagagacacactgcatgcagcacaagacctcgcacactgcaagtagtacaaccgaccgtgcccctacgtatcatttcgatcatcgctaagcctgataccgtatatctcttcattgtcatcatctttcacttttcattatacgtcttgcgacgattaccacgtccctttcatatcagtccatttcaaaccgccaaaacagaagcattctcaggatggctaaacaagtatgtgtaatgtcattcataggccggttttaagc

SEQ ID NO: 191 - DNA, 3746 bp, Cryptococcus neoformans
attcatccacgcctctggagaagcggacagtctatgagtgttgtgatcccacgaaaatccaggtagaacctccatttccttgaccagacgataatccctttgcagctgtagtacgttaattgtagcaccgacatgatgaaacctggacccaccctctgccatctgctcctacaagcctctggggtttttggcccacccacaaagtttgaattttcgagcaaccgagcggcctctttccatacctcaggcttaaaaccgttatctaccgtgcggccagtatcccgttcacgcaacaagacgtcaacaaggatatcggtatccgagtcactccaatgggctgaacgtttgcggtctttgggaaaaaaaggctcattggaaggcgttgacatgattacggtgtccgtggaacaagagaaaaaaggggaccggaaatgtacgaccggtgcttaacgactgagcgataagacggccacttcgtccctaggcgagcagagggcgtgtagagaggagggggtgcttgggattgtggattctgaggaggtcagatcttgaagagacctgatgatctagagctgcgtgggcgcagagtgagcgggacggccgcagcagacaggaattgaggcagacgtactagggacatctacagcaccagactcttgcccgcctatagatattgctgccggtctgaggggatcgagtacgtgcagctgtggagtcgagctgctggctattgaaagtgacaacggattaactaaagagtgaagaacactggtgatcattattacatactcccgcaaggcttcccgcgataatcacacatcacatttgcatcattccctccgtatccctatactctcacccatcccatataccatcctcgaaatccatacagagtatctccagcagctctggcaactgctctgtgaaaaaacaagtccgaaaaacggtccagtaccggttaatatagctcaatctacccactcgcctgctctctttaaccatgcctctcgatctcaactatgcaccagggtctgaagatgaagaggaggacaacatcgatgacgaggacttcccaggcccatcttcacggaggcaagctagaggagctgctggaaagggcaagggcaagaacaaggacgtaggtactcagtcgctacctgatggctctcatttgacaagctatccgatcagaccggaaggcaggcttgggaaggggagtaccagaagtcatgggatatcgttcaagaggatgagagcggctccctagagtctgccgtagagactctgcttgcacgaggcagacggaaaaggtggatttgttctattacgcctctgaaaggataaggctgacctgcaccgcagagcgttgatgtcagatactcccgtgagacggtctattatccggcacgtgttcattatcatcgacttgtcagaatccatgttagataaggactaccggccgacaaggtacatgcttcacaagtacccgctctcgggggtcagcgatactgatctttttaaccagattcgaggtcatcctaggatacctccgaacatatgtcgtcgagtggtttgatcagaatcctctaggccagatcggtgtcattgccatgcgtgatcgattatcagaagtcttgatacccatgggaggcaagtttatcccccctcacacttgccgtagctctcaactgaacgttacagcctccaataggaagtcccgaagagattgttcgcgccctttcggacaagcgtaaactcgaaccgtcaggcgaaccgtccctccaaaacggtcttgtcatggccaagggcggtatggcccatttaccctctacctcttcccttgaaatcctcgtcatcttctccgctatatccaccgccgaccccgacggaccgatcactattcacaatgtgctcgatactctggcaacagggcatatacgtacatccatcctctctctctcgggagaaatcaagatttgtaaacaaattgccgagcggacgggaggtaaattcggtgtagctctggatcaagaacatttaaaagatttgttatgggaaactatccctccgcccgcgacgaccatcgcacccgtcacagccaatgtccgttcagcactcgccgctggtggccgtggtccgaaccaaacaggggagcgagcgcctgcaggcgatctcatggtgatggggttccctattcgcttaccccttggcggagaaacaatgtgtgcctgtcatgggttgttgagaaagggaggatatctctgtccgagatgtgggagtaagctttgtgatgtaccgacggattgtgaggtatgtgggttgatggtggttagcagtccccatctcgctcgaaggtaggtcacttcatgtttgattgaaacatggttttgctgatcgaaccgcgaaaaaaaaaatttaaaaaaaatagcttctggttcttattccctgtggccaattatggtccattatctatcgaggatgtggtggaatcgagcgagacatgctttgggtgtgatagcgagttttccgatgtacgtctctttgactctcttaatcatcttttgaaaaactatgtatcgctaatcaagaggtcaaggctaccgcgatcaatgctggcgtagcccaagttgaagatggtgtgagccccacgggacggtatagatgcgccaagtgcaagcatgatttctgtgccgactgtgatctctacatccacgacacactacacacctgccctgggtgttcgtaatagccaaccccccctcttgaacttggaacatgagaaacagtataatgcataatcaccacaccgttaccaattgatacacactagatcatacagatgcatgttttcgttacaaataatagaaagaaaaaagaaaaagaaaagtccgctgtcgtacatggatcgtccgtatactatgctatactgaaaatcatcaagcactatgctgctgttatccatgacacaaaatgtccgcttgcgttaaaccaagagtccacccattatcatcccaatcaccatgactcccatcccaactaccgtctccgcccccatcctcctgggcgcggcactactcgacccatcatcactcacgttactcccccccccattattccctactgcgatactactaaccgcgctgttatccacacttatcacgggcacatccatcacctcgtacgcgctgctattcgccaaacccaagtactgcggtgcaccgggctgaaggagtgcaggggtggcagagtatacgtacgtgggggttgggaatgtcgggtctgggaggacggcgttgggcaaggcggtttgaagggtggtggtgagcgatagggcggcgatggaggtgggtgtaggcgagttaccgtcggcggtagaggtggtgatggagttgtagtcatccgtagagttgctggcgacggatgtggattcaagtgggaggaaaccgaccagcggcgcttgtttcccgttgattccatagctgttttgagcgattacgtgtagtgtcagcagctggcaaaatcgcacaaatcaatgtagaaaataaatcaaaaaaatcacctaaagatagtatacacattctttaaaaacggagtacccagttgccaatcaatcccgtcgcctgtcgcgggctgagcgataggccaagcgagacacatgcttgactgtgcgataccggcataaatccaatcagacggctggagctggatgtacctcccactatacgatttttttgctcgttagcaca

SEQ ID NO: 192 - DNA, 3859 bp, Cryptococcus neoformans
attggatgatctccaggcaacacttggacagagaaaaaagaaaaaacacatttaaggaggtacacgaatcatgatcatacgacggaccacacattgttttaacgacttctcattaatccaatataattttttgacctctgagagaggaaggccttttgaaaagtaatggaagtacagaactagcgtaatttgacaggttaattcgttcatgtccctggttgaatacccagcatcgaatataccacttagcatatgaatcgtttggtctcttgtcgcctctgcttcaaatgcccacatagcggactattaacccagacgaagacgtataattgcggtactttcagacaggaaatggctgtatgccgaagatatatgggctgtccgtgaagttaacacgccaaaaacatgaatgatgacgggaaaaactgggaaaaacaaaaaaatgaacagagtgagattcgaactcacgcgcttacgcaacggatttcaacccttatcagggaaagtgtattccacttgagaccgtccccttaaccgctcgggcatctgtccttccgccaaaacttactttttgattcttttctgacagcaagttttgtacactccacctgtgtgttctatttaccacaatattcagatcgttctagcagaagtgaactctatgcagccctcatggctttgtgggttgctatttgagcctctttgagtaggaaaaactcgcgcgaaatcgcaattatatatttgtaagcccgcgacttgagccgatggccatgcaggagaccggtgctggcctccacctggaaagttctcggacacgtagatggacaccgtggcgaaggtattggtttttgcttttgccacaaattagagaacgtccacgatcacatcatcttttcaaccagttccactcctgattcctgaacactcactgaaatacaacgtccgcaggtcggaaggaagatcgaggcgtcgttcgctacgggaacacgactccgccgttatgcgtctcaccgcgaaactggcagtattcagtttggtcgctgcagtatcagcacaactagacggtttagggagcagcagcaaagctgcttttgctctcaaacaaaagcctgatagtagagtggctcgtaatgtgctagagggcaaatcggagggctactgttctgtaagccccacttgtttctagaccagtatttggttccaatagctgacataggttatccgtagccctctggtcccattgaatcaacgcactgtctttatgagacagtagagtcccttaaccagcaattgttcccagttttacatgagcttgtggaaacacctttcttcaaacattacaaagttgacctatataaagaatgtccgttttggtacgaaaatgggttttgtatgaacagaaactgtggagttgaagagatggatgaggtgcgtctttccgtgtggtttgtttggtagtatgttgacagcttgggatagaatgagatacccgaaaaatggcgagcaagagcattgtcagaggtcaaagtatcatcggaggtgagtaattacgagcctataaaaacctggctaacgtgatcgacatcaaaagagtgacggtgtgtccagctgctactttaaagaacaagatttctgttatgtcgaggacgatgcggatgccagtacgtttttgatcgattattatgagagtcgtgcatcacatctaatatccattgtagatggccagtatgtagacttaactctgaatcctgagagatttaccggttatgctggtgactctgctcacaatgtttggagagcaatctacgaagagaactgcttcggtctttcggaggcatccctttccgaaatgtctaaagcttccgttggcatatcgggtttgggaagcaaggggaaaagtgagctggcgtctgctgtggtaggagctggaggtgtaagcaagccgtcaagaggcatcaatgctgctcctggatggggcttctccaagctgagcgaaggatggggaacagaaatggtaaaggcaccacttaacggggaggagatgtgtgaggaaaagaagatctactatcgagtcatctctggtaagttacacttttcagaggttgtcaacagtaaactcattagacgcttgtaggtcttcatgcttctatttctattcatatttgcgccgactatcttgatcaaaccaccggcaaatgggcgcctaaccttgaatgtttcatctctcgtcttgctacccatcccgaacgcctgtccaacgtatatttcaacgctgttctgctccttcgagctgtcgcgagagctgctccgtatttggaagcctacgacatcagtacatcgccagccggtctgctgaaagagggtgataagaaggcaaaggctcgtttaggagaagtcctttctttggctggtggacagagtatggagaagggctttgatgaggctgatttctttgctggtgaagactccggggtaagtgacatccctctcttgatacaggttggtccctaacttttgaaatagatcctaaaggagcaattcaaatctcatttccgtaatgtttcacgcattatggattgcgtaggatgcgacaaatgtcgcttatggggtaaacttcaagtctctggtatcggaacagctttgaagatcctttttgagcttgacgacagggctctcgagtaagtcctctctcggttgttccaataacctagctaatcttcatgacagccctaaagttaaccctgatcttctccaacgctccgaagtcgttgctcttttcaacacccttcatcgtatcagtgaaagcttggcgtctgtggagcagttcagacaaatctatgctgccacccaaaaggctgagaccgaagcttccagagccaaagctctaaaatctgcccggaagaaacacgtcccttccccagtggccccgccgccagcgtttagcttgacgaatatggaacgtattggtgctagaatatgggagaaattaaaggggaattgtaaagggtgcttagaaatgtgtctgcagactctggagagacggaagttaggagaattggccacttcgtttcgtagatgggtcggaagtataggacaagatagagatctatgaggacatttttcgtccattgttagtcatgtcatgagcttgttgcacctattttacttcatcttgcatcgtaaattacgaaggggacacaaaatgccccatttcagatctaatgaacattgctctaatgcttagctacatttacaactggttatccaagaaacatgtgcaggtgtatgtccattttatgtctgtcatcttcttctcttaaagtccctctcatcaagcctggcaccttgtccctggccaaagctacctcctcttacatgtccttggaacgggccactccccccattgctattaccacttccgttcaatggtctccttgttcctgctgtacggggaagaccttgatggggtccacctcgcatgtctccttgggtttgcacaggcgtttgcacattagcggagttatctgaccctacagcattggtagaaccggctttcaacgcctttccgtggaaaccacccctatctccgccaaggccccgatttaacctatcttgtaagctgcctcgtccgacagaggcgggttggcctcgagttgtggatgcggcagagggagttgtacggtctgacacattttgtggaagtggaccgaaatggcttttatacgctttcaactctgaacgggttgattcgacgacagacaggtgatgcgataggtcggagctacaaggacggacgggcatttgttgttgacttgcaagctacgctatgggaaactgaaacttactccaaagattcaat

SEQ ID NO: 193 - DNA, 3823 bp, Cryptococcus neoformans
agcatgaatagcatattttctggccttgtgagcatcaaatagatggtgggatataaatctacctctgcattgaccccatcgcaaatggtgatgcaaagaaatcatacatgccgtggtggggtatcgtacaacaagcccatcgtctcctctagtctaaagacatgcccattccactgccttctgcaggtatcaatcggctctctttttgctttttgccctgtcccatctgctgcaacgccattgcctttctgcccgctgctctgaccttgatcttctctctgaccttttctctctgttcgagagcctcagaggccttggatgtggatacagccgttgccgatcgaggctggacaagctcaatgtgacgctcgatttcaagggcactgtcacgcatgtttttggcagtgttaccagacatactacgacagtgggtcagtgtcaaggtaaagaaaaaatgcgtgcaccaaaaaaaagacccaccggttcttccagaacgccttttctcgcttttgtctaatctcggccacccgctccatagccttgagagtggtagcaacaagctctcggtcgtatcgcacgggaacgtttctcctcttctcgaactcgaacgttgtgtcctggaagagaactggtcagtaaacgggcgacagcagcacaggcggaatctactgacgacgaccatctccttgccgtttgccctcctgaacgccttggtccatctgacctttctagggttcctcttcatcttgaagtttttgtggcactttgacgagcagaacctgaagcactttgcgtcgtttctgacgaacatggtgccgtggcctggatagacgttggcggagcagaagtagcacttttcgatacgcatcgcggggggttggagatcggctggtcggggttgggttgcggatggatattttccatggctgctgctcgaggaagcgtaaatctgacgccgggagaaagatggtaaaatgaggccacggataatacacgtgggatggtgcctttgtgtgcggtacctgctggacggagctaattctgggttgggtttcggttcatcccaccagtgcgcgccctgctgctgcgccctggccagatccctgagcgatccatcgcgcttcaaagtcttgatccttgttcggggctagcctctctttttcttccttccatcctccttccttcctcacagccttgccccactcgcccatacaatgaagataagtgcgcccccactgcccgctccagaaggctaacccgctccgccccacacgctctgatcctcgtcggtggtttcggtacccggcttaggcccttgaccgtgagttctccgccgctgctgcccttcaccgctcaccccgccacagctctcgtggcccaagcctctcgtcgagttctgcaacaaggtgagtccccctctcgtccgtgcgcgcccacatgctcatcccctgcgtccaggccatgatgtgagtcgcctagcctgcttctcgtgacacgtgtcacggcgcgtgcagatgttctagaagcggcacgtttcatcgcgcgatgcggccactgacagtcttcccacagcttgcaccaaatcgaggctcttgtcaaggtgcgtggcccagctcatatgcccagtcgcactgcctgactcttgttacaggcgggtgtcaaggacatcgtcctcgctgtcaactaccgaccagaggtcatggtctctgtactcaaaaagactgaggaggagtttggcatcaacatccacttcagcgtcgaaaccgaacctctcggcactggtgcgtgaataacgataaacagtgacgcgcagactgatgtgtaccaaagcgggtccccttgctcttgctcgcgaaatcttgggcaaggacgactctccgttctttgttttgaactctgatgtcacctgtgtctatccctttgaggctttccggtaaggcttgtgcagtacctccatctcccgccactcgtctgactatttgcgcagagacttccacattgcccacaagtgcgaaggttccatcatggtcaccaaggtcgccgagccttctgcctacggtgtcgtggtcacgaagcccaactccactgtgattgatcgattcgtcgagaagcccgttgaattcgttggtaacaggatcaacgctggtatctacatattcaaccccagcgttttggacaggattgaggtgagtctgtcccatggcaaagggtaacatccaagctcacgccttttccagctccgtcccacttctatcgaaaaagaaatcttccccgccatcgccgccgaccaacaactgcactcctttgatcttcaagggttctggatggatgtcggtcaaccaaaagacttccttgccggtacctgcctttacctttcccacctcacttctcaacattctcccttgttgactgatccctctcaaaacaagtgggtgtatggtggtaatgtgatggttgaccctgtgagtcgcgctttacaaagtaccgaggaggctctaacattgttcgatagtctgcggaaatcgaccccacagccgtcatcggccccaatgtcgttattggtcccgacgcgaagattgggcctggtgtccgtctccagcgatgtgtgatcatgtccaacgctaccgtgcgagaccactcctggattgccaactccattgtcgggtggaacagcacggtggggcgatggacaagagtggagaacattacagtgttgggtgacgatgtgacgataaaggacgagctctatgtcaatggtgcatcagtgttgccccacaagagtgtaagtgggaaagctcgtccaagctgctgtgttggtactaaactagcggacgttgtagatctctacctctatcactgagccccgtattgttatgtgtaagtgtcgacgatgacggagactgcgcgttttgctgacttgaatgtcgcagaaaaatacggcttatcggtgaatagatacatcctgtcatattcatttttattaaattgatggatgttgttgggttgccattagggtttggatatatacatatttattttgatgcagcgatatgctatagatcttgtgagaacaacgtgagccacaaagaagacttggcgtttctcgcctctttggttgtccttttccgccgcgttccccgtcatttcgcgtccattcttcgtctacattattatcctcctttattcccgctgaatgcgcgtcctttcttcataaccttttcctcgccgcccctacttcatccccagccagccacatcccacaccctcctctctgcaacaatggcacaccctccgcgccccacccctgctcccaaccgacacacattacccctccacaaacgccagtcatacgtgacagtctccgtcgtcgcaaatgacacggacacttcttccaccacccccgccaactcatctagcggctcctcatttcctgttgccatcgctattcccgcccttgtaggtggtatggcagtagcgatcgctgtattcggattctggtggtggtggtccaagaggagcaaacgcgtcaaacgcgtaagtcttgagctttcgtctcaccaaatcaacgcccacgcaaagctgactgggcggttaacaggagagatgggaggctgcccagagaaggaaaaataaacgtcatgctgctgaaaaggacaagccaacaacgcaccccggtcaaagccaaaagtcgcctaccggtgaaaaggcatttaaccccatcctaccacctctttcaaccgcacagccgtactacccgcctccgcaaactaacggatacggctacgcgccctcccaacaaggctatgccgcgtggcagacccag

SEQ ID NO: 194 - DNA, 3634 bp, Cryptococcus neoformans
gtaatcagggggtgggcggaggaggatgacatcgttctcgataacatccattcttcgtagagtgataggtttttttgaaggaggggtgttgggatttgggggtgggtttgaagctggaaggtttgcgccttgacttttggaagtagtagaagaagaagaacggaaagagctagctggcatagggctgcgagaggaaaagagggctatacgatggagccatgatgttggccctggacctgcgacagccatagctaccggtcgcatcgctaatcgtagtggactacatggttaattagctctgtacttgaaataaatattgtacatcatgtctgtcgacggataaaagtagtagtcactatggagaacagcgaaacatggagtcagttcaaactcacgccaaattagttcgagtgtagagggctcaaacccagctgagatgattaaaccccgaaaaacaataaatcttctttccaaaagtttgcgatgacatagcagcgccgcaaatgagtatgaagtgtcgattataggtaaagtagaaaagcaaagatgtcaacaaaaacacaacgaagaggccaacgaattcgaagggaacaaaagataatcatatgtattacgtaaaataagagactgtaccggaacgctggatcgtggcaatagtccgcttcagtccaagcatgcaactttttgacctcatgaagaagttgataggcctcttgagatagtgaagagtgacttttgaattttctccctcggcttgcaggtggcgttcgatatgctaaaatgaaactgggtgagtatattacgtaagcacagtaccccaggcgtgaatgctttttcctcgaacagaacaaacaaacattgaattttcccatttgcttggttagtcaaacagtcctttatgcttgaagaaaatacatctagcaacctccctggagacgtgtaagttgtgcccccgcttgatccatggtcgtgtcccgcaccacgactgtctcactaaccaatgcacagctccaacccatttataaccaaaccaaattctcccaagaaatccagaggaaatagttccacctctgactctaccctagcgtcccttcgccagggtatgggccggatggacatctcttccaagggttcctcaatcccttacaccattgacgtccgagagcggaaagactccaaagatactcgccgagaacttgaccgtttcgtgcctgcccgtcctgcgtccctctcgcacaattctcattccagctctactttaccgacattagctatcgatagtgctgggcatacccctgatacctctgtcgatcattccttatcccaggaccaatcgacactctcacttcaagcatctctcggtctcaactctaaccgccgaatcctgtccttccaatccgccccaccactcgcgtcccacgctacttcccatctcgatgcccarcgaaactaccttcttcaatcatccgcctcggccaaccggggcactggatcccactcgggtaaagataccaagaagcgagcaccgccgtacatgccggagagagtgcttgatgcgccaggatttgaggatgattattacttggatttgattgatkggagctgcgccaatagggtggcgatkgggtkgggggatatgggctatgtgtgggatgcggagacggggagtgtgagtgctttggraagtggtgccgagtgagttctatctcatcgataaggataatgctgataaggttcagagaggatacgaataaagttacatccgtatcatggtccaacgacggtgcatacctcgccattggtcttgatactggtgatatagaggtttgggatgtggaagagaataagaagatgcggacgatgaagggccatttagcaagagtaccggtcatgagttggcacgggcatgttcttacttccggttgtagggacggaagtatctaccatcacgatgtgagggtcgcgaaacacaaggttatggagttggtggggcataacgcggaagtgtgtggtcttgcgtggcgaagcgatgggcagtttttggctagtgggggtaatgacaatgtcgtcaattgttgggagtgagttctttcaactcggaaacgtagcaagtctgatgtgagtagcggccgtatcggcgcttcaatcctcaacgacgaaggaacaccccgcggtgtcgcgaaatggacaaaacgaaaccatactgcagccgtcaaagccatcgcttggtcgccctggcaatcatctctccttgctactggtggcggaactgccgacaaacacattcacttctggtccacttccaccggcgcccgaactgcttctctgcctacttccactcaagtcacatccctcattttttccccacattcgaaagaaattctcgggacacacgggtatccggataatacccttacgctgtggacttatccgacgttggagaaaatctgggaggtgccagcgcatgattcgaggattatcagttcggcattgagtccggatgggacgacggtgtgtacaggcgcgggagatgagaacctcaagttctggaaagtatgggaagtgaggcaggcaaagaaggagagggaagagggcgagagtgggagaggcaagacagccgtcaggattaggtaaagttaagtagcgcactagttctaatgttattgatatgtcatgtatttctttcgtattttgaacactacctagggagctcgttgtgcattgcattgtaattttaagcgatggagatcggacctacttcacatgaatctagcagtatcctgcgcaaagtgacgcactcccaataaaagtaagtttcacgagcgatattttcgggaatagtacagcgctcaaacatagtacaccacgagtgacaagcttatatggttacgtcgggcgattggtatctgtaatgccgacgatccttgttgacacaagatggccgtctcatcattccgtttttcgagtatggaaggacggtcagtcagattctgcacaggaggacgttgggatgaaccatcccagttggcgtgattataattgcaagaaagggtaattgttttgcaaatcaggtggatccatctctttttcacgtcaaactaaaaaaagaaagatgaaccctgttccctgatattccccctccgcctttttgaatgaaaaccaaagcaaaaaacctaaagcaacaactggaaaacaaatcgcaaaccagacctaaaccaaatcctcataccggcctacaatcctcgggtaaggagaacagagggagaaaggtcgagggaggtaagggaaaggaatgaagagatgtttaccagccgccctgggcgtcggcagcgggctcagcagcccagtcaccggcaacaggctcgtcggaccagtcaagagctgcaaacacaaaagttagaattgtagaaacttggagaagagggataaaagataaaaactcaccagtctcggtgggctgagcagcaagaacagcgtcggcagcgttaccagcgtcgtactcggcggtcacaccagcagcggcagaggtagcggcagcttcggcgtcggcaccctcctgagcggcggcggcagcagccttctcggcggcctcacgctcaatctcctcggggtcacggtagaagaagaggtcagg

SEQ ID NO: 195 - DNA, 3881 bp, Cryptococcus neoformans
tggcagaggatagcatagaaccgttcggccaagtatgcgccacatacagcgcagatgctccgaatggccacagtggttgtcgtctttctcacacggagtcgcaacaccgagagtcctctcctgcatttacctctcctattaaaaatgaaagggtccgaaccccgttaaaagagcaccactcgtgcacaaaagagcaaagcgggtcatagaatctgcttttatagaaggccgaagagaaaaagacaagtgagacggaatttgagagactagactcacacgaaggacaaggaaggaagggactgcttcaatgtcaaatgattcggagatgtcggccaattgttcagcttcaatctatatgaattttcaattttgttttcggagtttggtatttggcattcgaaggcgagatggattatggcagcggaatgaacaaatgtcagcattcatttggattattcatcattcgataccacttcttcgagtagcaatacacctcttttcaaaacgatcatcgcttgaaaagctctaattattcttgacaatagacgattacttacgtttaagaagagaactgaaggaaattgggccgcctcttgctctacagcgttgttgaaagcgacacatggctctgcccaaggtgcccagaaattgaggcacgaaaccctgttgaggtctgcagagaggagttccctgaagtgttcgggggaattgacttggacgaggttgcttgcggacattgtggtgggacgtagaaagttaggagtagacaacacttgtacttaaaatgagtagacaacgcttgtacttcgttatcagataatagtgggactggagtgatttgcccgtcatcattcaccattattctaaagttacgtaacacgacgccatccgccacactcgaattttccgtctcgcccaacatgagctggttgacggctttgctattgctttcatcgcacgtatacacccatatcctatagacatctccacagaaaacatcatgtccagcgcagaagaggtatgtgctgtacatccacatcatatgccacacagttgctgaccatcccaccagtctgatcaggccatcgaagtaagccataccattcaatattcctcttccttgaagctggctaaaagcggctgcagctaacattgccgaactcagatatggaggtaccgcaagcttctgaatatgcttgccaactcccgaggtgccggcacctcttgtatcaccctcatccttcctcctcgatctcaaatttctcaggcgtctaatatgttgactaccgaatacggtaccgcttccaacatcaagtctcgtgtcaatcggtaagctcttgttgttctctttttcttcctctttaggaacatatatgcttgtgttttagggtctctattggggggtttgatgcttggtggaacaatggaagggtttttttggacggttttcaatgcgctttcggaagaacggagatgatgggtcagggcaggatgacatcacgatttgtcaagctgccttgggatacagcgaacgaactttttaatcggctttcggggctaagagatacgccagaacataatgaattagctgacacttttacttcctagactttccgtcctttccgccattacttccacccaacaaaaactcaagctctacaaccgagtccccggacaacggtctttgtgtctttgtcggtacggttttgaacgatgaaggcaaagagaagaagatttcctttgcacttgaacctttcaagcctatcaacacttctttgtacatgtgtgatagcagattccacgttgaggcgcttgaggagcttttagaaaatgactccaaatggggtttcattatcatgtaagtaacccctttttacagtactctagcaaaactaattttatttttgtcttttcttgatagtgacggtaacggatccctcttcggtactctctccggtaacacccgtgaagtcatccacaaattcactgtcgaccttcccaagaaacacggccgaggtggtcaatccgctcttcgtttctcacgtctccgagaagaagctcgtcgaaactacgtccgaaaagttgcggaacttgctgttcagcactttatcaccgccgacaaggtcaacgttgccggtctcgtccttgctggtagcgccgagctcaagactgatttgagtggaagtgatctctttgacccccgattgctggccaaggttgtcaaggttgtcgatgtgtcttatggtggtgaaaacggtttcaaccaggctattgagcttgccgccgactcccttgccaatgtcaagtttgtacaggagaagaagcttatccaaaagtacttcgatgagattgccctggacactggcaagtactgctttggtatcaacgatacactcaaggcgcttgagatgggtgctgtggagactttgatcgtctgggaaaacttggatatgacccgaaacactttgcgtaatgccgccggtggtaagtttgtcatcatctcacatcttatcccatcacgattatgtcccattaaccttggaattgggattttatagaggaaatcatcgtcttctctacccccgccgacaaggatcgagagaagttcatggacaagtctaccggtctcgagatggaacaagccgccgaaccccaacccttgctcgaatggtttgccgaaaagtatcgcgaattcggtgctaccctcgaattcgtcaccaacaagtcgcaggaaggctcacagtttgtgaaaggatttggtggtatcggcgggttgttgagatacaaggttgatttcaatgatttgggtgatttggaagatgacgatgatgagttttacgggtctgacgaagacagtggtgcgttaattttgcctttttaatggacataagcccggttttgcttgtgctgattgtggcttctgaatagacatttgacgacgtccatcgggcgagatcgcccccgctcagcgccaagtgccggagggagcacaatcagcacttcttctgcggtgcggtgcgacggcctgagcaggtggtatgtcggtgaatgtaagcggatctgagaaggagaaggaaggaagggatggggagcttaaaatcaattgagaaaaaaccaaaacattcgaaatttcaacttgtagtgtaatagattagactcctgttttcatgtgtgcgaggtattaggcaacctcaagcgaagaggagagttttccaaaaaaaaggctgggttcaactagaagatgcttttgggccgcgtgatatcctcggtctatagatgagtgtcttttgagaattcgactaaaaggcgatatgtatgaatctgtgtgggacatctgttgactgctggttgtcgaggccgaagaagctcaagatgtgacgtgggaactaattcgcgcatttgtttccctcctccctatatattgatacgtatacattcatcaccacctgccactctataccatacaccatgttcgcagcagcctcaagcctcttctcaaaaacatcgtatctctctgcatatactctcaactcgccattctcctccccgtccacctcgtccacaaacctcccctcaacttccacacagacaccgtcctcttcttcctcttccggctatcaaaaaccgttcaacgtcggtctctggagagtcacacccgcaacacacaaaacaacaggcaaagaagtctctgtatggatattcgagaagcgagcgctggaaggtgtcaaggccggagttgggtttggcgggatgggagggaaggaatgggttttagagcagctcaaaaaggaagcttcttcactctcacggctccggcatcccgatatcctgcacatggtcgaaccacttgaagaatcgcgttctgaactagtcttcatcac

SEQ ID NO: 196 - DNA, 3150 bp, Cryptococcus neoformans
aagacgaaacttgaaggatagatgagaaggagaaaggtgatagagatgttggaggaactttcatgatgaattttgtaatttcgtttggtgcgggagacgcctgatgtgtgattggccagtgataaatttgtttccgtgatttctgcaagctgctgcaacgtcaccgccggccgccttgtctccaattctcaaccgctgcctttttgtggctgccatttcattgttcatctttttccttccatcttccatcttgcaacccaaaatttccccaaaacaacagtcatgtcgtcacacagaggtcaacccctgtttagtggtggcatgtatgagctgctcaataaaggcgctgccgaacatgaagaagttgaggaggaggaggaggcccctgtagagacgtgagttggcgcctcctgctttcgcgagatccaagctgaaccaatttgcccacagttctcccgaaaatccttccgggtctcaaagtcaaactgctacgttgtccaagtctgcacgaaagcggctggctcgacaagcttccaagggcctggacggaaaatcaaagtccaacaagcagtcaggttccgaaaccgaaagccctggtactccttcagtccctggcgcggaggaatttccagagacgaatatagaagctcctatccctcaagaagcgcctaagcaacaggcttctagtccggcgaagactgaactcgaacattctaccaccagtccttcccaaattcccgccttagagaagcagattcccgacatcgctcccaagaagactaagcctgttaccgcggtccctgagaaaaaagaggaaaataaggaacagaagaaggagactcccaagaaggccgacgctgcccgctcttctagccccccttcttcaaacttctctccttccctgccggctactcttcctcaaccgactggcaatgctctccctgccaacaggaaaaggaagactcctcaagactttacacccgctggtcctggaaacgtcatgaactctgctagccctagcaagattgctgtcaagtttgaggatggtcttgctcccggcgagggcaaggaaggcgagaaaaccattgctcccaagaaaaatcgcaacatgattgagaggacgatctggacctttatcatgatcggcggcttcatcggtaggtctttaccttaccctccaaattccatgctcagagtttttttgcagttcttctctgtatgggtcacccctacatgatccttctcgtcatgttgtgtcaaacgcttgtctacaatgaggtcactgctcttttcgaccttcgtgaccgtgagttattgacataatcgtgtaatataatgtcatctgatgactggaacgtaattcagacggtggttccaaggctgctactcctggagagcaaggcgacagctggaacaagactatcaactggtctgtaatacccaacaattcctttcttattaatactaaacagttctgtcaggtatttcttcgtcgtggccaactacttcctctacggcgaatctattatctattacttcaagcacattgtctttgtggacgcttatttcatcccctttgctcgcaaccaccgatttattagcttcatgctttatgttgttggtcagtatcctttctcttgatgactggcgcatgccactgacttgtcttaaaggctttgttgggttcgtcgcaaatctccagaggcagtaccttcgtcagcaatttgctctcttctgttgggtccatatttcactcttgctcattgtggtgtctaggtgagtcttggttttcatgattcttctccagataactgaccctgatagccatttcatcgtgaacaacattctcgaaggtttggtgtggttcttcgttcctgcatccttggtcatctgtaacgatgttatggcatacgtttgcggtgcgtgtcctgtctttgactgttctatcccagttgctaatgtacacgtacgtacttgtaggcaagcttttcggtaagactcctctgatcaagttgagtcctaaaaagactgtcgaaggcttcgtgggcgctttcatctgcactcttttgttcggcattgctgtgagtcttcgatattgctttcaggcttggcagtgcatttaccatgacgttcagtggggtacattctggatgcgatatccttacatgatctgccccgcccgtgatcttggtaccaatgtcttctctcaggtgacttgccgacccaaccctgtctttatgtggcacagtttcgagtttaccggtgtcgccaggcaagctcttcagactatcgtaagcgtcattctgccattaagatttttttcgggccattgctcattcttttaatgtagctcggccaccccccaccttccatcccctacgctcccttccaaatccactgtctcgttatggccaccttcgcctctttggtggctccctttggcggcttttttgcttccggctttaagcgagctttcaacatcaaggactttggtcactctatccctggacatggtggtatgactgaccgaatggactgccagtaagtgttgggcagtttgtggttgttgtgtagatgctcacgagcattgctgcaggttcatgatgggtcttttctcttacgtttattacagctcactcatccgagtacgttaaactgaattcatcttcttctgacgcttatgcttattttctgtttctagatccaaaacgtgactgtcggtggaatcatgcaggctgtagtcacttccttgacccagcctgagcaaattgagcttttgtatgatttgaagaggttcttggctgggcaaggagtcaaggtctaaatacctttcttgttgagaggtggtgatggaagagttcgattagatatttaacaagagaggcgacacttgcatcaatcttcggagaaagtgagatgaagtgatacgacgctatcatttcagcttttcaactgtacttcatgggtggactgatttatgtcaagctgttccaaaacgaccgttttgccgtttgtgtcctgctcttgcacctccctttaaatcctgtcacgaattcagatttgacactccatgtctggcttcgtgcttcgtggccgacagatacaaagactctgcctcacccatttcatacaaagttcaagggttgcaat

SEQ ID NO: 197 - DNA, 3651 bp, Cryptococcus neoformans
gttggaggcgacctacgggacctatgtatagatgagcatctcaatatccctcaggaaagggataaaaacccactcggctctctctctctctttgtaccttacatctcgcctgtaatcattgcgatcgtccctatgacgatcatttcggtcaccatatcgtcgagaataatctcccttcacgggctcacgttcacgataatcctttcggtccctttgaccagagcgatgctcgccatttccctgccttttctcattgtatctttcaccgcgcctgtcatcgtaagatccccgtctgtccccatactgtcgctctctatcgtagtttcgctcagaacctctcggcctctctcggtcccgttccctctcacgaccatgctctcccctaggtgaatcatccaggaaagcctctctccagtcccttggcttcttcctatcacttccttgggatttatcgctccttccgcttgccgagaaggcgtcgtcgtgataatgacgtttgatacctgaagacattggcaaaggcaaataggagcaagtgtgagaactcgtttcttttttaaatatgagaggtgttactagttgttccgctgcgccaatcttggtgacagactgttgtgaatgtaggtaggattgtaaataggatcgtgaagttgaacgtatgggcagatggaagatgtaccgatctcttcattcgccacatgcagaagctacgggtggagatgggggaatctccgttcttgcttgtgccaattcggcccaccggtcggtcactatgtgctcgtttaactctttccttttgggatgtatttcaataaagcgcgtacgaaacaaaatgccggcagacatacccccagatgccaagataaagatggcgaacgatttaagaaaggccataagagagctcagggataggggtcttatggtcgctgcaaagtggtatgtatttgccccataggttgctcgacaactgaccaaaacttacagggcttctgaactgctcatgtccttaccgaaagaatatcggtctacatcgaacttagtattcagcccaccaccccaaatttcttcgttaccgccacgctcaccgccaggtcacgcccgtccatccataggagacttcctaccctctccgggtccgggcgctttcgctcaagcaggaccgagccgcggacgtacaatgcacggtatagaaatcgaggaggaagagaatgttattgaggaggacgagtttcagttggctaggggatattttgatctgaaggaatacgaccgggtagcatgggttctgagggacgcccagggaagtcgtgcgaaattcttgagatattactcaatgtatctcgtgagttccattgtcataataaactaaatcgctaaaaattcctagtctgcggatagaaaagcacaagaatcactgccacatttcctcgataccaaagaagaacgtcttgctttctaccctgccctctctgctcttttatcagagctcaaaaaagagagcgacccttacctgatctatcttcgtggactatgttatatgcgtctggatagacgccctacagcgattaaatgttttatggacagtgtaaggctcaaaccctataactggagtgcatggagccagatggcgcaactggtatcctcagcggacatggtaggttggctacggaaggtcgcaaagggcgcagctcattatgctgcagtttatttcgctaaaagaggagctaccctcgacaccaatgcttacctttttcgctattaattgcatgctggaccttcacactgctacggacctcgtcatgaacatgattaaggagctactggaaattttcccttccagcgtacaccttaaagctcaacgcgcactggtgtattaccatatgcgaggcgagtggctccttttccacatttgattgttcgttaatataatgcagattttgaaaccgccgaagaagaattcgatgctgttcaacatttggatccattcagaatggaagaagttgacatttactccaatatgctgtatgtgatgaacaagcaggccaagcttggaaagctggcgcatgagtacgcagagatagataggaatagagctgaagtgtgctgcttaattggtaaggctcattgtcatactgtgaagatgccactgacaagcgataggtaactactattcatcaagatctgatcataccaaggcaatcacctattttaaacgctctctcatgctcaaccgagaatatctccccgcttggactctgatggggcatgaatttgttgaactcaaaaactcacacgccgctatcgaagcttaccggaaagctattggtacgtcgctcccgcgtttgtgaagttctgccgcttatctcatgtggttaagatgtcaacgcaaaagactatcgagcatggtatggtcttggccaagcatacgaattacttgatatgcctatgtacgccattgagtactataatcaagcaacatccctccgtccgtatgactgtcgaatgtggaccgctctcgcgactgtatacgaaaatctccaccgccttcctgacgccatccttgcgcacacccgcgctctcctgggagccgatcgggtccaaacaatgaccatcctcctcaaattggcttctttgcacacaacgttggatgagatagacaaggcggtcgggtatcaccgaaaagtagtagcactaggcgagaagagtggattggaggtggcagaaatggctggaagttatttggcagtagcagagtgggagatgagaggtgttatacagcttcaacagagggaagcgagggaaggcaaaaggttagataggacaaacggggatggggacgaaactatggatggtgcagaggcattgaaagaggctgacttagccctcgcggcgcagtatatggagaggctggctcagacaaatgcgccgcaaagggatagagcagaagagctgttgagaagtctgagggtatacgaaatgaggacggtggcggccatataacttattcatacacgccatttacgaataacgagagcattaattatgatataaacggtatgctgcatagtaatgactatagattatcacaacaatgaccaatcaaggccattcgtttgagctctctcgtgccagcagacattgagctggccccacaaggagacatcacttcctaaacccaaaataaaagaacaaatagttacaaattcagtcgagagcctgctctccgtttgaacgccgatgtctttagtcgatactgatccttcgctgcgccaaggtcatttcctgtcccttttcttcagaagcctcgctatcatttgaccagaaacccaacactcctccaaacattttcgcacgaggcttggccagcacttcatcagaacctcttgtcagccgttgcataatggcgaggtggatcgagatactcacaagcctgcttcaatccctttccaaaattgatccagaccatcacaccccataccccacaagcggcgagtaataccagactaaatatatcgaaaatcgttagggacttttcgaggttgacataagttgttgagacttgttgccagatgcgaacgagtttgaaaatgaagtaggcacatcctccccaaagtccaaccatgaatgcagcctaaaaggaaaggtcaacgc

SEQ ID NO: 198 - DNA, 3788 bp, Cryptococcus neoformans
ggaatcattgaggtatgctgggatggagttcattcctagccaaaagacaacaagaaaagcgaagaagaatccgatctcacgaccgtcacttgaagagcaagctagagtcctgccttcttccccaaaagtgagggcaagtggaggcagtcttacgagtacacttatctgacctgggcagtccggggtatggttagagcactaaccataaaaaagttgtagggatatgtagtgcaatgagccttcggcctcatagactaataatgccacatcacagtcggaagctaccgccggtgacagtgaggagagatagagaaaagaaagagagatggtttgagatatatcgaaggaggggatcagggagaaggaggagagagaacgaagtagagcctgtgacagtaactaccccttccatggggtagctgccaaacagcttacagagatcccaagtacataggtacataactgttagttacgctcatggagcctatattgctatattatttgatacacacacaacacacaacaactcgacatgagacccgagttcaattataccactacacaacctaacgacctatcgtcagtatcattactaggtagatcgaccaccaacagccaaacttaggaaggctttgtattccgtagaattgataccaaggagtcgatattctgttatctgctgtgggtggcagtggaacggaaccaactggatcgtttaaccaataggagacccgggtatttccctacagcgtgcatttgcgcgttcgcatcggacgtctcaaataggcgccagcatagtagcccacatgccacgcgagcctaacatgtcctgcaaggaagcgcgccttgtgaatggtcagccacggcgacgggcgtgtcgtcactaccctatggcggacctgcagcgagacgttcgttgaggacacccagtcatccatatcctcatccatccacgttgtatctattctaaacatcccttctcccacagttccccatagacatgtcccgacaaccccctctcgttatcgacaatggtactggttacacgaagatggggtacgttcttaatggttatctacacgtatatgctagcacatagcttaatgtctatgcgttctagcttcgccggtaattcggaaccctcttttgtgtttcccaccgtcatagcaacccatcaatctggcggttctggtgcgtcgtcctcgtctactggtggcgctgggcgcgccccaccacctatcgccggcaagccttcacatctcgccagtaaaagaggaatcgaggatttggatttcttcattggtgacgaagctgtcgccaactccaagttggtaaaatccggtgtctcctcaagagctgtgctaatactgggcgtaggacttattcactccattatcccatccggcatggaatgattgagaactgggatcacatggagcgtttatgggagcaatccatcttcaagtacctccgtgcagagcctgaagaccactatgtgctcttggtatgccttctcttatatgatgaaagacttcgtcttattagagactgaccacaattcttgatcagactgaaccgcctcttaatccgcctgagaaccgagagaacaccgccgagatcatgttcgagtctttcaatgtgcaaggattgtgagtgaaggatctagactggtagtcagagctcacaagctaatttggcacattaaaggtacattgctgtccaggctgtccttgctctcgcagcctcttggacgtcgtccaaggtgactgagcggacactcaccggtgttgtcattgactctggagacggtgttacccacaccatcccccttgtgcgtaaagttctggttaagctcaatgatgattcgactaagacaacccactcaggctgagggctatgttattggctcttcgataaagcacatccccattgctggccgagacatcacctactttgtgcagcaactcttgcgagaccggggtgaaagtgcacacatcccccctgaggaccagcttagagtagctgaaaagatcaaagaggactacacctatgtttgtcaagatatcgtcaaggagttcaagaagtatgattccgatccatacaagtacttcgctcgatttgctggcgagcacagcgtgactgggagggtgagtttcgatacaggagtgacgaaaatcactagctgaccgcccatatcagaaatacgatatcgatattggctatgagcgattcttggcgcccgagatctttttcaatcccgagatttattcctccgacttcctgactcctcttcccgaagtggtcgacacagtaatccaaacttctcccattgatgtccgacgaggtttatacaagaacatcgtcctttcaggtggatccactatgtttaaggactttggtaagaggttgcagagggatgtcaaaggcatcgtggacggcaggattgcgggcagtgaagagaagtcaggcagtttaatgaaggtgaattaccgactattgtttcaaacccaaaagctaacactgtagaaaagtcgagcggcgttgaagtcaatgtcatctcccacaagaggcagaggtatgcggtatggtacggcggcagtttgatggcgtccactgtaagctatttgctctgaccagctcgctcgaatgtctcattaattcacttttcacagcctgaattcttcaacgtcagtcacagccgcgaagactatcaggaatacggtccttcccttgtccgcaggttctcggtgtttggaagtgcaacttgagtgtaggttgtcatcaatagtacagtatatgcagtcagatcgtctcccattagctttgacgtaacggacgcatacaatatttgcagggcaatcgatgcttgtatcttgagccttgatatcctatggtcgataatcatgattaggatagatatcctcttgctggcaatgatagttcataaaaatctttggaacgggacgatctatcggttgtgactggcgttcgcaagctccttgatcctagagctgtcagcgcttcaaccatgtacatgactgtagcgccagaatcaaataaatcacccaccaggcgcactttgcgctttgaagtttgaagagggaggttctcgttcgttacacgcccgtcactggctgttaacaatttgtatttaatgtctttttactgttaattaataaaactaaaagttccacgtcatgtaaatggtgaacgcgttccaccaccagtaccaccacgactaccctgccaacgagcaacaaatggccggtaaaacaaatgacaactttcgttgcttttgatattctttcaccacgtctctaatctatatcacactcttcacctgatcctgtcgcaaacttgttgacaagatccgcaatgaaaatgaggatttctcaagcgctttttgcgcttccgttgctttccgtcgccaacgtcagtcaatcgtatctcatctgccccgtaactccctttggtggaacattgttcgggttaaacacggtgggaactgggtaaaattaggatgctaatccatttatgcttataggccttgcacttttactttgaatccaacgagaaaaggtgtttcttggaagaattacccagtcaaaccatcgtggaaggtatgtccggctggcctcacaattctgcgagcaatcaaggtcgactttagggctgacattgtgtatctgtctggtataacaggccattacaaggcgtttttgtggaatgagaatgagaaacaatggaaaaaggacgaggccatgggtattcacgttactgtcgaggtc

SEQ ID NO: 199 - DNA, 3653 bp, Cryptococcus neoformans
aatcatagcccactgggtaggaggtaccacgtaccgacttggaagcagcagcagcagcagcagcgctcagactctcggctgcctctatactactcagctgttggggactgtactcgtttaagctggcatagaaacgcttgtccacgacggcatcgctcccagacgtcacttcagtagcggcatgggctcttccgtccaggtgaagggcgcggccagcagcagatgcgagtgctcgaagacgtgagcggcggagtatgcgggcaaggggcgattcgtgcatgatgtgagggccgtgtgccgggttgtatcaggttgagtgatatggcgaagtgggtggaaaggtaggaaggcaggaaggaagcgagaaagagagagggtggatgtaggggaaatgagtgtggttgacgtgtacaagaatagaatggcgggtgatggtgcaaaataggtatggagatggaacaatagaagctgtgagaaggtctgtgcgcgttgaggggggttgggtatgaacgagtgtggggagcgccctgtcaaaggtgtgctgactggagtggggcagctgtgggcagcagatcacgccgacaaggtggcaagacgaagtatggggaggaggaaggaaggaacgagggaaggaagaaggaagacagcaggaggaaggaagaacagcgaccagaagagtaccctacgcatcaacaagcggctgcagaaaaacaagacgcgtttcatttgtctgcgccctgagtttgtgccccccccctgaatgagtcgcgtcggcccccttcaaccccagaacagctcctcaaaaaattatttattcccgggcactaattaataagcgcccaagatttcctcggcggcaaggcggagtcaaatatatttgcctcttcggccttcagcggacgagcgccgccggcaatctttcctccatctcattcgaaaagttaactcaccgacttgttctcgttctcaacctcatctccattcttttcctatctttcagatgctcgctacaatgaaccccatcagacccctttttcgctctactcccctccgcctctgccacaactccctctcttctagaatacctcgccgcacgcttgtcacccccacaaacctcgtccacgccaccgtctccaacgttaccgtagatcatgttaaggaagaccctgcagagcaccaatcgggagagcaaatcgctggcgaacacccttctggcaaaggtatatttttgtactttactatggtctagtggcgaaagcatgcaatgctgactcgttgcttcgtttatcagaaatgttcggcttcaagctcaatcccgtagctaccaagactgggggcagtgccaagtctggaggccgacctatctacctcgacatgcaggccactactcctatggaccctcgtgtgctcgacaagatgcttcccctcttcaccgagcaatatggcaacccccattcacgaactcatgcatacggatgggaagcggagaaggccgtcgatgaggctcggcagcaagtcgctcaactcgtcggtgcccaaccgaaagatatcgtgtttactagtggtgcgacagaaagcaacaacatgttgatcaaggggattgcaaaattccaccaatcaaagaagaagcacatcatcactacccagactgaacacaagtgcgtgctcgactcttgccgatggctctccacccagggcttcgaagtcacttatcttcccgtcctcccgaacggtctggtctccatcaacgaacttaaggctgcccttcggcctgacacttcgctcgtgtctattatggctgtcaacaacgaaatcggcgttattcaaccccttgccgagatttctcaagccatcaagtcatgggccaaggaaaatggtgtcaccaaacccttattccataccgacgccgctcaggctgtcggcaaaatccccatagatgttgaagcgttgggtattgacgccatgtctatttctggtcacaagctctacggtccgaagggtgtcggcgccgcttatgtccgacgacgaccccgagtccgacttgagccacttatccacggtggtggtcaagagcgtggtcttcgatcagggaccgtcgctgcacctcttgtcgtcggtcttggtgaggcttgccgcattgcggagaatgaaatggctgccgaccatgcaaggatcaaggctttgagcgataggttgattgagggaatcacgtcaaaggtagagcacatcgtgaggaatggtgatgtcaatgggtatcccggttgcgtcaacttgtcattctcatatgtggaaggcgaatcgcttctcatggccctcaaggtaagcccttttcgcaatctaactactttttatatactgattttcggccttaggacatcgcactctcatcaggatcagcatgtacttcagcttcccttgaaccatcctatgttcttcgtgctctcggtgccgctgaagacatggcgcattcgtcccttcgattcggtattggccgattcaccaccgaggaagaaatcgaccttgtggtgcagaggattgtcagcgtggtcaacaagttgagggatatgagcccactttgggagatggtgcaggaagggattgatatcagcaaaattgagtggaaccagtgagtctagtctctgtcagctattgagaaagattgctgatgatggatcaaggcattaaaatgttcatacggtaggttgagatgtattaccagtaggctgggggctattgataaaaattgtacaacgtgggccttttatgcaattttattctttctgtgtctgtacgacaaatggtgttatgacgcctgattggtgatggagtacgtagtgattgatgccgatgattgcgcgtcccgacgatgagccaagaagcggcggcacatcggtaatgtccgaagaggtggaggctggctgtttttatacgacgacggtcttttgttggccgggtaaccaatcgctcttttcctactggctcagacaggcatataccccatgtttcgccgggccgctctcctactcaggagacacactgttattcacccccaaagacatctctccacttcactctcccggcccagggcgcctatacccatccccaacactccttcagcgccacccctcccactcccagatgcctatccacttgagctcccccgggccatttcccccactcgcgcccttctgcttctctccacgccttcccctcccactgattggccatctcatcttgaaatgcattcccccctcttagcagctacctctgcgaaactcaaagcccgtggagtcggcgtgaatgtcgtttacgatccggctgccccgtatggaagctttggttttcagactgaaaagaagggggaggaaaaattcatggggagactgttttggcctgacgggagaaaaatggaatgggacgtttttaatctcgaaaccctcaattctgaccagctagaaaaagcgatcaactacacacccgtcctatcacactcttcgggtttaccacagcttctacctgcatcaataacttccaagaaagagatcctagtatgcacccatggatctagggactgtagatgtgctgatcgaggcggtccgcttgttttggctcttcgaaaagaggtcaatcggcgaggtctgcaaagtcaagtc

SEQ ID NO: 200 - DNA, 3682 bp, Cryptococcus neoformans
tcaagcaagtccaacacatttctattgcggtcatgttttggttcgctggtctttctgggatgcttcttgaatcccgatgggtcagaagagtccttgcctcagtcatgtccaccggaaggagctctactgaagagcctgccacctatgcctttagttttaaccctcttcctgcactcaccatcggtgtagtaagtcaatcacaatgctatgtgttttaatcactcactgacatccttatagactggtcttgccatggccgctcatcatcagacatatgtttttcaggtgcagattcactctttgtggggtatccttctcgccggtggctccctcttcaggtgcctcacctacatattcctccatgtttctcctcctgttcactccgctttgccctctaggccacctacagaaattctcacatctttcggctgggctgccggtggtattgttttcatgctctctaatgaggagatttgttggtccgccatgcgtgccggctgggacgacatgatggctttcctgaattttaccatcgcactcacgtgtttcgtgttctgctgggctgttgtcatcatggcaatcaaaggttgggccactatgagaataaggaaggaagaagagaggcaagaaggtgtatctgtttaaatacgggataacagtagatgtgtctatagtagccttggaataattataatttacgaagatgtcattattaatacgatcctttgtatgcctgtccatccttggcaatcttcgccgtacatccgtgtcatctattccctgcccgttgggactccactcacatagcctgtaatggttgatttctgataaacgaatcaatattgttgatctgtttttattcattctggttacggcacatgtcaacaacaagcagtaagaagttcaccctgagctttattttctctgttcaatattcagagttccccagcgcaatgaacatttaaagcccagaaaactagatactggcagtttggctagaatggaggaagtccatcttttacttttattatacaggggagaaacggccaacgaaggaaacgaacggcgcaccttcatgattcatgatcggacgcgcctacaacgccgcccaacgcgttcgtcgttctttctgtcagtcgtcaatttctccgtcaccattttgttgttgctcacatcacatatctctcacctttacatctcctgcttccatccgacctttcgcctctgctttcggtgcgccgctaacattatggcatccggatcgtcatcgaataataaacttatctcggccactgccaaacataccgatgctgagggttacgaaatgccctggtatattcgctcctaatttcttaacaaagatttttccaactaataacaatttaaaagggtcgagaaatatcgtccggtccttttggacgatatcgttggcaactcagataccgttgatcggttgaaggtcattgcagaggatggtaacgtgccgcatatcatcatctctggtatgccaggtatcggaaaaaccacttctatacattgcttggcgcatgcgcttctaggagaagcgtacaaggagggagtattggaactgaatgcgtccgatgagcggtgagttaaagcaagttgatcaagggtaaatattgatgtggaaacagcggtatcgacgtagtcagaaacaagataaagtcgttcgctcaaagaaaagttaccctcccacctggaagacacaaaatcatcattcttgatgaagccgattcgtatgtgcaactgcaattctattggtcccttgtaaactgaaattattggaaaagaatgacagccggtgctcaacaagcacttcgtcgaactatggaaatttactccaataccactcgattcgccctcgcctgtaacatgtccaacaagatcattgaacctatccaaagtcgatgtgcaattttaagatatagcaagctcaatgacgccgaagtattaaagcggcttaaggaaatttgcgatatggagagcgtccgtaatctaccagtcataagcagttcaggggctgatgaaattacagatcaagcacaatgatgaaggcctcgcagcactcattttcactgctgagggcgacatgcgtcaagcaattaataatctccaatctacgtggtcaggttttggttttgtcaaccaagataacgtattcaaaatctgcgatcaaccccatcctattgtcattcgccaaatgatcaaagactgccagcatggcaaaatcgatgaggcccttgcaagagtgaacgcactctgggatcaaggatactcggcggtggatattgttgtaaccgtattcagagttgtcaagggcatggaggagttgccggagtacttgaagttggagttcatccgggtgcgtcgaaaaagtgtagcagaggaccatccatgacttaactgatttcacttgcaggagattggctggactcatatgcgtgtccttgaaggcgttggaacgctcgtccagctgggcgccatgattgctcgtctgagcaagttcactcttcctccaaacgccctcaaaatatagccagtttaaaatcctttgtatgcagcacttcaagcattacaaatctgatacataaggcacagatcccaaataagttaatgagaccaaatacttttacccaatatctattcctcgaacgctcctaaaggttgcccaactttgacactttcgccagccttcaggtggaatttccacttttcaggtgcctcaaacacaagaacaattgtactgcccaacctaaagccacccatttcttcacctgccaaaaggggctgccccttcaatatggatgctgaattgtatgtagcttccgcgtaggtcttgggagggtgagtgaggacacgtgtgtttgtgcgcagggcctcatcgaaattgaccttgattgaaccaacattggtggcacccacaggaatcattgaatagaagccgtacttccaacggccgagcagagcgacacgttcgtttagcacaaacaagtccttcatcctattggcgatatatggtgagacggagaaaagatcgccggtaaagtgtcgacgacgctcaacaatccaagttgtgggggaatggaatcggtgatagtcgccaggggcgagataaatgacaaggaagaagagcttgctatgttcggataaactaggcagcttggtagaaccatcggttttggagtcaagagcactggtacccagggatgcagcaactgacgcgtcatgcccaactgcttgaccttctggtggatgactggcatcttcaattttgcctacgggctgggcctcggagtaatcggcttgagctctctttcggctggggccttggccaagaagagcggtgagagagtagggaatatcgttgattttagcaaagtgctcatcgtctacaacttcagcttcagagttactgcgtggaatgtcgattggttgaccatggagatcggattgagagccaagaagggcctcaagagagtaggtgatgcccttgacctgttcaacccgctcgccggcaatctctccaaaatgaaggactcggccatcagccggtgatacctacatgaaagacgtcagtcaaggagcgaaggagacggtagtgaccgcaatatcaaggcataccatgggagcttcagctataggtctcacaccatctttgagc

SEQ ID NO: 201 - DNA, 3851 bp, Cryptococcus neoformans
ccctgcatctagtttaatgacaactcctcactaggagctatctgatccttcccgataactacaatggtcaacctatccgtctttagatatagattgtctctcctcttctacagctctccttgacatcttctccttgtctgatacgtggactgcctttttttggtcaccgtgcatattcgagcgctggggctaagcattttgccatctcgctcattgagatgaatggaacaggccactttcatgaagtcgatcaatgtgccgggaggaaggtgggtgccgtggacgtgacaacgcgaggggatgtgacaagtgtggagtaaaagtgaaaagatgtgccgatgttggggcttgaagttgaaagccggggagcctcaatgctatactatcgttttgtaaagccctcagattgggcgaatctagccgatatccagttatacggagtgtgatccaagtgtgatccataaccccacaattagcaccagctcgtcctccatagattagtgccaccatagtatgagctttgtcaagtagtttactggtaaaggtatctaccttctgctgctggaaaagatcacctaaagctctttctgtgaaagcagctgaggtagtttacgaacaatagttcagtatggggcatctcataactgagtgcgccaagttgctggtggtggatgtcaggatgatatgagaacagcaccattggaaaacttctagatggactaaagtagcatcagtcaaatagataacggtcaagttgagaactttggcacacacggtcaaagctaccctggggaaccggcgtatgttaggttatgagcgatatagctgaaggggaattgaaggtatagggcgctggtcctcgggtgccattttggcacgccacacgattaatttttggaaatattttgcagtcatagtgttggccaatgtaccatggggatatcttcgaaatttgggctgatttgaagctgatttaaataaggacctacaaaatggtggaatgaggaacgaggatatagtgagtttgttcttcagatgtcaattttgcggacatgacgccttcctgttcaattcttttgcttccagacgattttcaatgggtcacagaggtatgatagaaaattgggctggtttggagatgaactgactgctctgtgaatttataaaagcggactcagtgggcagaaaagggggacaatgaaataatcgatacttaccgattttctcgatgcatacacacccctggtaaatgtaacttatagagctgatctctggctaccacatatctcaagagctaagcatagtatgcataactgaaggagatatgtggatttgaatgaaattacagcaaacaaagcacaaattacagcaaacacggtgatgcattttgaacttacagcaaacgcgggtcgaatttacagcaaaaacctatctatctcgcttggttgtatccgctttcaggtgtcccgatccctgtacgttcggtcaaagcgcgtcaaaagtctgaaaagagcttccgctgtggtgatgttgtttttcgccgatttctgatgttggtttctggaaagtactcgtaaagtccttttgtgttccccttctatacccttactttttttcacagccttaccccgcaaccatgtccaaggtattctccatcctcggtaaaaatctcaaggccaacaccaaggccgagttggaaccttatatctcccagttggaagaaatggaagatgttgaagaggttcatttcggtggcaattccttgggtgttgaagcctgtgaggctattgccagcgtgctcaagaagaaaaccaatttgaaggtgagaatcttgttctcatgtgatcacagacgctcatgctctttatgcaggttgtcgacttggcagatatctttacgggccgactcatttctgaaattcctcaggccctctccgctttgtgcaacgcactctctgatcacacctctttggtcgagcttgatctttctgacaatgcatttggcggtcgatgcgcggatgccctcgtgccattcctacagtccaacacccatttccaaatcttcaagctcaacaacaacggtctcggaccatggggcggttctgtcgttgcaaaggccttgcttgataacgccgccaagtgtgagaaggaagggaaggagtctagcttaaaggtcgttgtctgtggccgaaaccgattggaaaacggcagcgctcctgactgggctgaggcgtttgggaaacaccgaaatttgaaagaagtcaagatgccccaaaatggtatcaggatggagggtattcaggctcttgctgagggcttgtctaactgcaaggagttggagcatctcgacttgcaagacaacacagctaccaagaccggaacccgtgcgattgtcaagcacctcggctcatggcccaatctcaagcacctcaacttgtcagactgcttgctcggttcagccggcggtattgccctcgctaccagtttgagcctcggatctaatcctaagcttgaatcccttaagctacaatatggcgagatggacaagcgtgctatcgagctattgagtgtagctatctctcagcatctcaaagaattgacggtgctcgaattgaatggaaacaggttttctgaggatgacgaatgtgtagaggagttgaaaaaagcattggagctttggggtcatgaagaagctctcgatgagtgtgagtttttctatcagtacgaagaaggtttccgctgaatgtacacgtagtggatgacatggaagagccagagtccgaagaggaagagagcgaaaaagaggaagagcgggaggaagaggagaccggcgagccggacgacggtgttgacaagggtgcttcaggagaggataaacttcctcctgcctccgacaagcagactgatgagtttgtgttttcaatgtatgggtcattggacaaagctgatcaaggatgtaggcttgcggacatgctcgctggcgttcacgttgggaaacaatagagaccatattggtttattttacatggcataggcgtatatgcaagtcgggtagttgctttgggttcttctgcatgtaacaattctcatattacctcatcgcgaattgcgagttggccgcaatcacttgtcccaggctgcgtgccctttctaagttttacagtcgattatttgtgcatatggcctccaacctccgccatacatcatctaatcttggtccattccgcctgccctgtctttgaactctctgttgtagaaagaaaatgttaaaggaaaggagcatagttgatattgatccacagatatgaggcaaagtggaaaaaaggggcagttcggcgtcgtcagcatcaacttcaatttccatctgcacttgtggccacgcaccttatgtacagaacattgttgcagcgaatgaggacttctcccaaagcaccatttgacttgccattctcaatttcttcagtgttagcaagctgtgacattttaatcagtattctacacgtctgatccgcggctgattgacatcatccgctgcaatccgcgcccataactcttgccacggagcacaagactcacttgcaagttcatgtagccatctgtagatacgagatagcccctgtactcgagaccccactttaatcggacatagacgaccttgcctgtgagatcttggaggaagggctttgggttgacgggctgtgaattggattgttggtagtgagcatagattgagtggtgtccgtgaacggatgaagactcactgcgatggcggacatgatatttgtgttttgagtagggtataagagagtataggcaacatataataagcttggtggtgtgtcgctgagagtt

SEQ ID NO: 202 - DNA, 3598 bp, Cryptococcus neoformans
gatcagttttcgtctagtcaaacatgaattggaaccagcccaccttgaggtttggtttactcctctttgtggcaccctcaaacgccaaagcgtcgagttgggccatctgcgaagagcccagatctacacgatatccgtcggcatgtctagcaatgattatccccaagactatatctttttgcgcaggtatatactacaagtcaatttaagttacggccctatctcatttgcattggcaacaactgaccctcttcgagtttccttctatccacaatttctgactccgttcctttccttttcccgaatgcagcatccccagtctcgttgcgatatatccctgagctgatgaggatccggacgcggtactagaggaagcttgtaaggttggagtcgattgggagatgccggggcctagtacgacggctttcgatgtcgatgggatagggactgtttcccccggtagaataagagttggcatgaggttgatactctggtctcttaggtttttgattgaaggtcaagcgactggtggtcttggtggatgttctagttcttacagtgtgaggctaaggaggaatgcatcacatatgcatccttcgtggtctttcttcttccccgtttgcagcggcgtgggccgtcaattatggtggtggtggaggagggacgattgaggcggacaaatttaattcggccttcgccgtcgtaaaaaagttggaagaggaagaaataaagaagagcaacgggcgtctaacatcataattgtcaggtatgataatacacagttcctcttctaactccaaaaaagaatacaccatggcggacgattttatcactaccattgactctgatgacgaagtatcgaactatggtgagccaagcgccttaccaaaaatcaaggacgacgagttggaccccgactttcaattcgatcttggaggaggcagatcggagggacttgacctttggggaggagacgaggttcaaggcgtaaaaaagggtaatgaggtacgtagtattcggcaacatgatatagactcaactgatgatatctatatcctagcctatcaatgtcgacgacattattgagcgaaaacgtggcaagcccattagagcgttcaaggatcgaaagagaaaacgagatgaagacgctacctcggaggatgacctagaggaagatgaagaggaggaaggggattccaatgatgattcagatgccgcgaaatctggcgacagtgaagaggacgaaatggacgttgacatgagcgaaggggatggtgacgaagaggatgagaacgaaatcgagagtcttaaacgcgaagacgagagtgatgaagaggaagaagaagaggaagatgattacgatgaggaaggtgaaaacgaggtcgtcgactctgattcagaatcggaggaagagactgctgctgagatcgctcgtaaggacgcattcttttcgtcagacccaacgacaaccgaccctacactcccttcctcattcaccgccatgaacctctcgcgacctctcctacgagccctcacttctctccaattcactgcacctacacctatccaggcacgtgccatccctcttgcccttctgggcagagatattctcggttctgctgtgacaggttccggtaagactgctgccttcatggttcccatcctcgaacgattatgctatcgagacaggggcaagggaggagctgcatgtcgtgtcctcgttttatgccccacacgagagcttgcagttcaatgtgaagcggttggaaaagctctcgccgagaagggtggcctagacgtccgtttcgcccttctggtcggtggtctttccctcaatgcccaagcacatacactccgcactctacccgatatccttattgccactcccggacgattaattgatcatcttaccaacaccccgagcttcacgctttccgctctcgatgttttggtaatcgacgaggcggaccgaatgcttgaagcgggttttaccgatgaattggaggagatcatcaaggcatgccctcgttctcgacaaaccatgttattctccgccacaatgacagattcggtggatgagcttgtaaagctttctttggataaacctatccgagtttttgttgatcccaagcgcaacactgccaggggactgacccaagaatttgtcaggatccgttcggatgattcgagatcacccagtttgttggcactgtgtaagaggacaatcagagaaaaatgtatcatatttttcaggagtaaggcccttgctcaccagatgaggatcgtatttggtttgtttgggttgaaggcggcagagcttcacggtaatctcacacaggaacaggtaagtcttcccagctagtaccgtataagaattatgctgacatcctcacagcgtctccaagccctcaatgacttcaaagccggcacggtcgattatcttcttgcgaccgatctcgcatctcgtggtcttgatatcaagggtgttgagacagttatcaattatgacatgcctggtcaactcgctcagtatactcatcgagttggacgaactgctcgtgctggccgcaaaggtcgctctgtctctctggtcggtgaagctgataggaagatgctgaaggctgctatcaagcaggcagaagcggaccaggtgaggcataggatcatacctagcgaagctgtaactgctatgaaagagaagcttgaagagttcaaggacgatatacaggaaatcttgaaggaagagaaggaggaaaaacttgtgagtgtcatacatttctgtttctaaaacaatgctgaattagtaccttagctccgacaagcagacatggagattaagaagggacaaaatatggttgagcacgaggctgaaatcttttcaaggcccgctagaacttggttccagtctggaaaggaaaagcaagcttcaaagagtgcgtattttgtttggtttccttgtactccttggcgtaatctgaccgtgttgaaaaggcgccggcaaagacgcctacgttggttcattcccgtctacgggcaaatctgcagagaaagaaaaagagaaactcaagcgaggcaagtacgatggcctttctcgtcgcctcaagaggcgcaagatggccattgaagaggacgctgccgatgcggctgctgctcgaaagactgagatgggtatccgagctgccaagaagaatgctcttcctaagaagattaccgagcctcagcccagactggagaaagccggaaagggcaaggacaagaagaagggtaaagcaagaagagtaacgggggggaagggaagcgcattcgacagtgaaggaaagaaatcacacgagggaatgagagcgaagcctgccaaggtcaacttagaaaaggggaagaagaaggggggtaaagggaagggaaggaagtagccagcttgaggcaggtcctatatctgcttcgatcggctgtttcataattttctcgccatttgaacatgcatatagagttgatttcatgcgcgataacatatgggtgttggctttcacagcttacaacgaactcgtcgcaaataacttagttaacatttacactgctgggaaccgcaaaccggtgcaaa

SEQ ID NO: 203 - DNA, 2653 bp, Cryptococcus neoformans
caaaatatttcgtgcatcgtccccagccaccacaaccaccgcaggatgggaaaacgaacagcagacgcagcagaccttcccgtgtccaaggcggccgccacaggccaggcgacggcgcgggagcccgccgccgacgacgagatgggcgagtttgaggacagatgggaagacgagatcgagagcgaagaggaggtcgtcgagcacgatgcggacggcgaagcagatggcaagtcgtgctccgtctgccgcccaccgtactgacaccccgcagacgactttacgcccgcccaggaagacgccgagcccgctgccgcgcccacccagacgtacctccccggcacagccatcgccgaagacgagcagctcgtgcccgacaactcggtctacctcgccctccattcgctctcctatgcgtggccctgcctgtcgttcgacgtcctgcgcgatagcctcggcacagaccgcgcgacgtacccgcacacctcgtggatcgtcaccggcacgcaggccggcgaagtccccggcgagggcaaggccaaggacgaggtcgtcatcatgcgcctcggcaacctgtccaagacccagcacgacgacgacgatgattccgacgacgggaaagacgacgacgacgacgaggcggacgacgaagatgccaccctggactttctgaccatcccgcacgtcggttcggtcaaccgtgtgcgtgcggccccggctcccgtaggcggcgccgtgcccgacccgtaccacgtcgccaccttttccgagaccggcaaggtccatatctttgacgtccgcccttatatcgacaccctcgccggtccctcgcgcccccgtcaaaagctgccagtgcacaccatctccaaccacggccgcgcagaaggttttgccgtcgagtggggagctaccggcctgctgacgggcgatatcgaccgcaaaatctacttgaccaccctcacaccctccggcttcaccacttcccccaacccttacctcagccacacctccagcgtcgaggatcttcaatggagtcctactgaacctaccgtctttgcctcggcttctgcagacaggaccgtcagggtctgggacgtgcgtgcaaagggaagaaggagtgtcgtcagcgtcgaggcgcacagcgaggacgtcaatgtcatcagctggaataaaacagtcgactacctcttggtttctggcggtgatgagggtggattgaaagtttgggatttgagaatgttcaaagagtcagtcgcctctgtaaactctgctatctaccccagctaaaatcttttatagcacaccatcccccgtcgctcagttccagtggcataccgcacccatcacatccgtcgaatggcacccgaccgactcttccgtctttgccgcctctggctccgacgaccaactcaccctgtgggacttgtccgtcgagcccgacgaggacgaggcgcctatcggccccgcagacgggaacatcaccgccgtcccaccccaattgctgttcgtccaccagggacaaaaggatgtcaaggagttgcactggcacccccagatcccgggcatggttatcagcacggcgtccgattcgtttaatgtcttcaagactatttcttgctagagttttttttttttttgcagatattccatgtgtaagaaactgaaaataatgcatggtattcttcataaatacactctattgccacaacaacatactaatacaactacactatgtatctacctagttccactccccaaactcccacttgtaacaatccacacaatcttcttcagagacaggtttcggcacacctccatgctttggatcttctcccccaggctgtctcttcggccctcgtcttccccacccccaccaaacgtttacatcatccctcaccactgactcgtccaacgcggccctcactctatcggccgctctataccatccctccaccgccttttcccatacaccactcttaccctcctcctcctccggccacggatccgccaacaccttgtcaatgacctcttcgatcctatgcgtcctcacatccacactccaccccttgaccctcaccgtatcatacaagatcgtctcgcccgtatggcatttactctccatcgcaaagccggcggcgtagcagctgctatacgggccattacatacgcccatcgcgatagggtccgcagtgtggtacacgtgggtgatacccgacaggttggcgggcataccgggcggcagcggcaggtgcagacgggatgcagggagaagctcgcccggcgattcgtacgtcacagccggggcgccaaaggagagaccgatcagggatgacacggcgccgccaagcgaatggccggtcagccagatagtggcgttcgggtacatgtacgtgatgttattgtaaagattctaaatacatggtcagatgcaccgcgatcggccgcaaaaaaagaaataaagaacataccgtgccgacggtcgcatacacactttcagatacaagagcgtcttccaagcacgtctgaccgcatttatagccaccagcatagcaatcgcaaaccggggtccatgaaaagtctacgcgcgcacaacagcacgagaataaaagattgtcctagcggcaaaaaaatacacaatatcagtgtctcaaatcaa

SEQ ID NO: 204 - DNA, 3361 bp, Cryptococcus neoformans
attgatatgtggaaatcagcgcgacgcgacgcgtttatagcggatggaagattaattaacagcaaagtgtccgtgcggaatctggaaaggctgaaagcttagaaatatcgtcaagggcttgtgttgcagtggtagcattctagacttcgaggtcgtgaactggagtttatctagcggtcgcgggttcaaatcccgtcgagccttgactttttgacgcttttttttgtggctttttggtaatttgatcccgtagttgggagagcaatgcatgtatgatagcagttgtgagacccctaatcatagcctattatgctggactggcactgtgactgactgggttgccttgcatcgaggacactatggtcatccagccatagttgttggttaaatcgccgtggccgacgtcgaagactagactgctggaagagagacgaggaatgccacgtcaggacttgtctgttattatccaccaccaccaccaccaccagcagcgaccactactcgataatatgggcgtgttgcggtaattcccagccagatctttcaccttcccacccctgcatgcccccacgccatcgcctcctcaaggccctttctttctctttcagcctcacacgtcgcgcttacaccacaaagaaaccgaaacccacaatgcagaccccagaccagccttccaagtcaggcgcaatgactccaggcgctatcgcaaaacagctctccatgcttgatctccctgctcctacagggctcaaactttccacctccaacctgcagtcttcagccaaccccgactctgccctttctcccttttccgatgcgactaccgacactggggatatctccggtccagagcctgaggctatcgtccaagccagacacaaggctcgttctgaatccatgtctgaacaactttctgaaaggctcgccaagatgaagttgccacagccagaaaggatcttcggtcctgaagaaggtggaagttctgcctccagggaggacaatggtggcaagcaaggtgtcagtgccgatgactgggaaaagatcaagctcgcggatgaggtgcctgaagctgtcaaggagcccaagaggatgactcactccagacataccagcagggcgtaagtcatttcttttttgcgaagggcggataaaatcatactgatctgttctagcgagcccgctcttcccagaacacctaccatccctgaagctgaygaaattagcgctcctgcgactgtcaaggagcagaagattactccttttgatgttgaaggtggtgtcgatgcttccggaagggagctcgccatgtaagcatctttttcaaagggttttttactcgtccctaatatctttccagcgactatgagaaagtcacaaaacgatttggtgctaccctcatctcccaagaattgctcgagcgatttgagagactcactggtcagaagcctcatcctctcttgagacgaggtactttttactctcatcggtcagttcattctcttgttctcaagcccgatgcgataactcattattatggcagagacttcaacttgatcctcgatcgatacgaaaagggacaacccttctacctttacactggtcgaggacccagtagtgactccatgcacatgggccaccttgtccccttcatgttcactgcgtaagttccatcatcttcatctcgatgcgtgactgatgaatgtgtcagttacttgcaacgggtcttcaacgttcctctcgtcatccagatcactgacgatgaaaaatacctccttgaacgagacgccaagaagcagcaggagctcatgaaaaagatcaaggccaagaagcctcttgatctcctccgatactacaagaagatgggccaggacaacatcaaagatatcattgcttgtggtgtcatccctgagaagaccttcatcttctccgacttgaacacagtcaggtatgtcgcaacttccctgcagtaaacacccttctaaccagactacagtggtgtcttctacgagaatgtcaacctcatctccaagactatcaccctcagccaaagcagaaacattttcggctttagcgactctgacaacgtcggcatgttccactttgccgccgttcaagctaccccttcattctgcaactctttccctcaaatctttggtactcgcgacgacattcctgctttgatcccttgtgccatcgatcaggacccttacgtgagtactctttcatctcttacttcgaaatgtgcgcagctgaacattcattcaagttcctcctcacccgagactctgccgaccgattgggctacaagaaacctgctctccttcacgccaaattcctcccagccctccaaggtgccggtaccaagatgtccgcctcgaaggagaacaccgccatctttatgacagacgatgctaaaaagatcgccaaaaaaatcaagtcccacgccttctccggtggtggtgcgacgaaggaagaccacgaaaagtatggcgggaaccctgatgtggatatcgcgtatcagtacttgagtttctttgaagaggatgatgccaaaatggagaagttggcgactgagtataggaagggtactttgagtactagagagatgaaggaggcttgtattgagaagctccaagaggttgttgccgagttccaaaaggtttgtctttcattactcttctctccttcctgaaaaattcttccgtacaatggttaacctttttttctttctagaaccgagccgccgtcaccgacgaagtcctccaatacttccaagaccccactagaaagatcgacccccgaccaaaggccaaggagacgtctgagtctgctcccgctgctacttctgttcccggtgttggtgctgtgtagttccctttttttctttactttggttagattagagatgagatgagatggtatgatatgatttgagactttcgtatggtgtagtggcaagaggtcggtaaatgtgcatgacttttcctgctaatgtatcttggtaaatgggaatggacgcagtgctttgtaatctcaggacgatcgaaggctttgccttgtttaatagaaatagctttggttctatactgatagaagcatagtaaagtatcaatgtgtcaagcgagtcctcatgatcatgataaagttattattatgacgcatatacacagatacattttaccaatatcttcattagtataacggttagtataaccgcttctcagtgattggatttatccagwtctgttcgcggtagaccagggttcaactccctgatggagaattactttttatactttttccaggccttcgcatgatgtatatatcttcatcgcgaatgagattataaaagagcgcagat

SEQ ID NO: 205 - DNA, 3662 bp, Cryptococcus neoformans
taatagggattagcctttgagaagccggcactttccaatagctgatccacttccgacttgctagcgctctttctatccagggaatattcatctttcttaagaccaattgttcggcgaagcacaagttcctgtcgaccagtcgggaagcgcccatcagaatctagataaattttcagcttaggcaagccattctgaagataaagcggacatactgtcaaagacaatctcgacataagcagaaagtgtcgtacttgtactcgttccttcatgtagcaaacgctgcctttcttctcgactcaatttggtatattgatcagacagtacaaatcgtatagctacaggcagagtttaggccaggcctcattcagtgagaagaagcttaccggagaaaaagtttgattttccactaccatttcgaccaaccacaacattgtgtccaggtctgatgatcggtcagtaataaaatctcatactgaattaccaccggaatatctcacgagaatggatctacagccacttgatctctgtaagatttgaaacctgtcatgcgcattagtagtcgctttgctaagatcaatggcagactgcaacgcaccttgaatggttattgttttgatatactggcgataagaagtcagcattgtgctctactgtatgtgtctccacttgccatgttctatgtgtaggccacagagagggcgaaggctgtagatgggttgaaagaaatggggaaatcaggtggggaacctactcagcaacgcgactgggacgaagtgtcagatcgcgctcatgtttctcacttccgaaagtcgcgtcagctacttcttattacgtaaaagaaaatgcaagggaatgatagacaagcaaatacgccacagcattgaaataccgaaacaccgtggtaaaggatggtgaaatgttaaaatctcgcctggcagctttgccgtgcgaataactgggtctcacgggcacttccatatacctcaaaataacaataaaaatggctgttgccagctcatccaccctcactgacagccaggtcagcaagatccagcaagattccgacttctccatcaagagcgagtccgtcacccccaagctcggtacgcatctcccctccttttcagagagtggggctaatgtttggcagacacttctcaatggcctcttttgcttaagaactacgataagttgcttgttcgatcttctcattttactccaatcccctccgtgagcatattttcgctttttattcaaggcctaactaaacatcattcaactagggtatctcacctctcaaacgcgacctccaaacttatgtcaagtctggtgtcattaacctcgacaagccttccaacccgtcttctcacgaagttgttgcttggttgaagcgaattctgcgagtcgagaagaccggccactcaggtacccttgatcccaaggtcactggttgtttgattgtctgtatcgacagagctactcgactggtcaagtcccagcaaggtgcaggaaaggaatacgtgtgtgtggttcgattccacgacaagttgcaggacgaaaaggctttgcctcgagctttggagaccctcactggcgcccttttccaacgaccgcccctcatctccgccgtcaagcgtcagcttcgtgttcgaacaatctacgagtccaagttgattgaatacgacaatgaaagaaaccttggtgtattttgggtgtcttgtgaggctggtacttatattaggactctgtgtgtccacttgggattgctcttgggtgtcggtgcccacatgcaagaactcagacgtgtaaggagtggtatcactggcgagaatgatgacatcgtgtctatgcacgatgtattggatgcccagtggttgtacgataacactcgtgacggtgagtcctttttttatccttattttgtatgtgctcatacgaggatttagaatcctaccttcgtcgagtgattcgccctcttgagtctcttctcgtcaattacaagcgtatcgtcgttaaagattccgccgtcaacgccatttgctatggtgccaagctcatgattccaggtcttttgcgatacgaagcagacattgaagtcaatgaagaggttgttctcatgaccacaaagggtgaggctatcgccattggtatcgcccaaatgtccactgtcgaccttgcctcttgcgatcatggtgtggtagccaaggtgaagagatgcatcatgaacagggatctttaccctaggaagtggggacttggtcccaaggctcaagaaaagaagaagatgatcaagaagggagagttggacaagtatggcaagcctatcgaaggtgttacccctcaacaatggtcctcgggttatattgactacaatgaccctgatgctgtgcctgcttctggatccaacgatctcttgcccacccaacctcccactgcagaagatgtgaagatggagccggtcgaggtcaaggttgaggcggacgagaaaaagcgcaagcgcgaggaagaggaagttggatcaccaaaggctgaggagaagaagaaaaagaagaaggtgaagactgaggatggtgcggagcgagaggaaactgctgaggagagggcggcaaggaaagctgccaagaaggagaagaaggagaaaaagaaggcgaaggaggagtaggtctgggttttttgcgtcttatagagggctcttggattctgtatgtaccgtatctgcatttcaacatcccataccattgcctatatgcctacagtagttcatctacaatactcattgcttactcagtgccaatcaattctcaattccctgtcaatctctccgaaaccttggaaaaaaatcttgaagaagttgatataatgcctgacatcgtggctacccgctgtctccctaatggagtgcatggacagttgggcgagaccaatgtcaaccgtgcggacgtgtgtagagaggtgtggaccaacggttgaaccgcatgtctaaatcaccgttgaatcagcaccgccttcgaacccctggtgtaacgcatgtacgtacggaatcattgcggatctcgaattcttggacaggaacccccgccttcttcgccactcttctcaacaagaatgtggtttgagcgttggaagtgtaacgctggttggcgttggtcttgataacgataccaccgttgattttgggagcaagattgggttcgtagcgtgattcgtaattgggatgcatctgccgagcgcattagattaaaaaaacccaaactggaaatgaggaaacttacagcatggcccatgtcagccgagatcaaaaagctgtttgcgagcatagcgtaatagcccacgtccttgtagtccttcagctgcactatgcgttctacaaacgcgggaagcaaattggattcggcgccatggtgggagacagagccaacctcctcattatcgaataaaatgacacatcgaatgttagattcgtcttcagcgttagacgttttaaccgcttcacaaagagcctcgatagtgcagaaactccaagactagtcagacagaaaatcaatgcactgcagattgatacgtacgacgtcatgagattatcgatgcgagggctatagacgaactcgtttgaaaggccaccaatagtggatggctgtgtgtcaaatagggagcttaacagc

SEQ ID NO: 206 - DNA, 3804 bp, Cryptococcus neoformans
tcaggctatgaccaacgtcctcgctgaatggctcgccaagcagggtgtcaagcagtgccacattgccgagaccgaaaagtacgcccatgtcaccttcttcttcaacggtggtgtcgagaagcaattcgaaaatgaaaagcgtgagatgattccctctcccaaggttgccacctacgacaagcagcccgagatgtccgtccaaggtgttgccgacaaggttgctgaaactgtcaagtctgacaagtacgaatttgtcatgtgcaactttgcccctcccgatatggttggccacactggcgactatgatgctgctgtcaaggctatcaccgctacggacgctgctgtcaagactgtttacgacgcttgtgaagaggctggttacgtcctctgtgtgactgccgaccacggaaacgcggagcagatgttggaccccgagactggtaacccccacaccgcccacactaccagtgagtccatttcagacagtatctgattttagacatgctgactaattgtgtagaccacgtccccttcatcgtcaccggcgacaaaggttctcttgaggtttccgaagagcctggagctcttgccgacgttgctcctactatcttggacatccttggtttgcccaagcctgagggtaagtttttttgccagcaaaatcatctgtagcattgctgacagggttgaacagagatgagcggtcgctctttgctctccaagaagtaaaaactagaaaattcagccatagaaataacaatctttcgatgtaattgagagtagtagtgatcacgtatgaagctatgaactttacagcgatgccctgtcaatatttttgtagaatagattgtttgaagagacttccagacagactgagcggtaggaaattatcttgaattgtgcctgagataaaagataaccgcggccagcattgtttccacgtcaacacctaacaaaccgacggaacatttctccaatcccatctctttttcaacacaaaatgtcaacaatgagctacggccatcccaccccagtactactcacatccactcttatccccatctctctcctgctcatcctcaaccctctgctcccacttatcctgcccgctctcccaccaccaatcgagtcaatcatctccaatgtgccattaccgaaacaaccgaccttaccggctttacaagcaaatattggatttgcgttactagcttttgtgggagctgtttggatagtgcccagagtgagtggggcatttgtggagaagggtttgagaggcagggatttgttgaaacctggagggaggacgagtggaccttggatgtgagtcatcattccccatcccttctgctctgggatgtggcttcgagagaggcgtgaagttggcatgctgatgtggtatacatagtcccgagagtctggggttaccatgcgcaagctggtacattgctttgatgatgttattcatcccctttcccttttcgcacctcttccaaggtggtatgctcgaggtttttccgcagcgagaggttggtcaccaagcttcataaacaagatgaatacttctgactgctattatagttaacattatacctctcctccctcctctcccttcttacagccacattgctaggcttcattgatgacctgttcgatattcgatggcgacacaagttacccattccgatcgttgctgcggtccccacgttgttggtgtattactcggtcggaggggcgacgagtgtcgtcttaccacaaggagtggtaggttgggcgaggacgatggggatgggagaatgggttgataacggggttgttgaccttggacctctatactacatctatctcatcctactccctactttcaccaccaactcaatcaacatcctagccggcataaacggtgtggaagtcatccaagccctcctcatcgcgctttccgtcattcttaacgaccttttgttccttcctatctggcctgaacgtttcttgagactgctaggagtcgaccagccagaaaatggaagagtgctagaatgggcgataggggaagtggtagatcggcatctgatgagtttgtactttatggcgccccttgcaggtgtttgtgctgggttcttatggcataactggtgcgtctacctcactctatctctcgcaaccgcacttgtaagcacagagctgaatacgaagtctgataggtatccagcaagggcctttcctggagacaccttctgttactttacaggcatggccttctccgcggtcgctatccagggacatttctccaagactttgatcctattcttcatcccgcagatattcaacttcgtgctctcatgccctcaactctttggacttgtagattgtccaagacatcgattacctgcgtaagtcctcctatgccgcttatcatgtgtgagaagctttgtaacatgtggcttatgggttgatgatttctgtctgccatcatttatagattcgatgcggagaccgggctcttgcatccctcgcgagtaacttttgagaatccacccccaacaaagacaagaataactctccaaatactagaatttctccgcctagttcgcttggaacgtagtaaatcatcaagaggagaccaacagatccacatcaaatcgtccacaaatctcaccattctcaatttcctcctagtccatttcgggcctatgcgagaacaaacattgtgcgcgcttatagctggagtgcagattttggggagcgcagtggctttcggcattaggtatggcgttgggagctggttctatggtggggatcgacgatagattctgctcggggtatgagcatatatgtatgtatkggtattggggtcttcttwaaatttttgatatggactatctactgaattactgaactactgatgtattggtctgcacgatttcaaacatcaagaacgtctgcccaagagctctccccctttctgcctatatcgtcttattccaattccagaaccttttctctctgtcttccaagtcaaacgccaattggttcccggaatcgacctcgggccaaacttatccccttgaatgagaaaacccgatccaaaatttgcccatggcacgagcggtcctctcttttgttgagttgaccttccggagggtatcgatcagaaaaatgaacgcgagttcggtctgacggttcgcgtaagccacggataatagaatggaagctctgtgtaacttaccgtgtgaaatgatcccagaaagcgtgtaatctcgcctggcaactgtcccacagagtgatgcctgtaaacagacagtatcctattgttgagcttatgagaagtagaatgcaatagatgactggctgtcctgtcggagttggtacataattgcacatggcagctcgaagtttgcgaagagactgacgaagcgataagtcaattaaaaagcatatgacttatgaatcgacacaaccggcgtgacctagggctatatttgtcatcagagttcgggtaaagagacgaaagctcatatataataagctccaagatctcttaggtattacgctgcactccggctcaaccgtgcgacgatccaagtcgtctaccagggtgttcaccacacttaactgctgactacaaataggagcacaaccgaggacatgaaactaaagtagcatcaagtgttttccggcctctactacgaggacactgccaccgttacatgtgagaacccaatgagcagttatttagttccaaaaagccgtcttgacagtgtgctactcagtcatcaattccatgctaattctcatcggcaaaccgac

SEQ ID NO: 207 - DNA, 3902 bp, Cryptococcus neoformans
tcattagtagggtcatgctttttttactattagaagattaacttaattacggaaagattagtaagatttttctttttcactaatagatcagtgacgtggtaaattaataatgtaatgatttttttcaccataccgccgccgccgtcgccgacagcaacagccattttatttaagcggcggcgaccaattcacaacttttgaggaactatacctgtacttgtacctacatatcggtttcgccaatactgaatccaaccatcttccgtggttgtctctcgtattgggtagacatctcggtctggctaaaccaccgaactgtcaacttcgagagacactaaaacgcctcgacaggcatgcccctctcatccatcacatccgcctccctgcttatgacaaaagtcgtaaagcttccccagccatccaatccagttccaaaatcgagacagaagtcaaaaaagttcgccggcgtcatggtcaccaacgattctcctgtatcaggttcctccagagcgtcttccatggcaggaaggaagaggcctcgggaatctgatggtgatggcaaaatccgctcaagacggacaaagagtactggggatgccaaagatagcaggggttctagctcaagtgccaaagatcgtgaggcattccagcgaagcctcatagctgttttcgttccgaaggcactgcaggagtccaaggagggcaatatgacccattataatgatctcttggctcattttcttccaaccccgacaatgccaattgtcaatctgccgccactgcttcccctcctgcgtgctgtttcagctcatgtctctcttctttcgcctgatattcatggatctttggtttcagccataatcagcttaccttgggcgaccggcgacgaaaagtttgtcagggcgttcatcggatgggcagctgtactcgtcaccgcacagcccggatggatgaaggagattgtcgggatgggcgtcaagggtttgacatggcgtgagtaatgtgtagctttcgcgttagaagtcgctaatcggtaaaaagaaccttgttttggagctccaagcacagtatcccgacgagttttccatgcccgacatcatcttttgctttcccatttgatttccttggtccccacccttccaaatgtcttgcaacctcttatgatacgtcatttccccaataaaagagagccagaagtctctcaaacaacctggatacgaaactgctgcgagctcgttggctattgtccggaattagggggtagaatgtggggggagatcgtcgataggatgctgagaattgatgtacgttcttttcatataaaactgtatttttctggcttaactccttctcaggttgaaataaccaatagcttggatcaagatgatgatgaaagttcggacgatgaatatgaaccccaaatggccaccccgcaatcgataatgacaacgctcgatccgttggaccttcttatatcgcaggaaattcctcggtcccggtctgtttcccattctcccgaaatcggtgtagatgacgaggattctgagggtgatccagatccggacgatctgtcctccgtagatggagctgagtctgatgcggaggacatagccgtaaatgaattgaaggaagcagaagaacgtgccaagaagaatgcaaacaccaaagcaatgcgcgaaaaactcgacggaatgctgtttcattttttccagcatcttgaagaatatttggcggggagaaaagagcatccttccgccctcgagatggcttcggagagaatggaaacagatgtcagatctggagcttctacaccaactgtggaaactccgtctatcgcctccacgtccctcagtcggaagcaacctccatctccggctcagtcattatcatactttcaaaccctgcttaacctcttctcgcgacagattcttccgacagcttcaacccagcacatacctttccttcttttcctcacatcatccttctccccagcgcatacagagctgtttttgggattgcttgtatcgcaagctctttacgccacaacttcgactgtgccatctatcaactctcaacccgtttccatgaaccaacgtattgcggccacagtctatataggttccgtggtctgtcgtgcgcgcttcgtcaccgatgaccaagcccggacggttctcacttacctccttgcctatatggatgggaaactccatcagtcccgggtgaacaagcgccattcaacagacgagcttccgctattctacgcggtttgtcaagcggccatgttaattttctgtttccggtggcgggcatttctggcaggtgcagataaggaaggtgacggcgtcttgggcgatatggaaatggatggcgaatctgttgatgatgaaggaaaggcggagggcaaatggatggcagacctggatgtgctgcagaacgccatcactagtgacctgaatcctttacttgtaagtaaacctcatgtgtgatccaaattaattgttaatgaaccacgaattatcaagggctgcaatccgacggtagtctcaacttttgctaaagttgcccatcacactaatttcgcgtattgcttctccatcatcgaagctaatcaacaatcctcccatccacgatcgtcttcttcgcacgctctgtccaaaaccgccgttcccgcaagccgttcctcgtctggtgctggttccaatcgtcaggatccgactttcggttcgcagacgcttcccaggcaagccaggcagctgaatgtcgatgccggtctggatagctatttcccatttgatccgtatgatcttcctaagtcgaaaagatttattgaaacgctatacagaacgtgggatgaagtagcgattgatgggggcttggattctgactcggacggcagttctgaatcggagtccgattctcaggcaggagacaaatcggacggtgaatcctcttttgaagatcaccttgcaccaaaggggctgcctctgcccaaactaaaagtggggagctatggtgaccgccgaaggagtctctgggactctaaacaggatgcgggtttgtcaagtagcttggaagggatgagcatatctcctggaagaataggaatgggggttttcacatcctagacccggtgttcataattcattggactgtgtaactagttttgagatgttgtatcagtgaacgtcttgtgacaataagattcatcgtatagttgttccctgctgcttaattattgcaccaatgattttggcttttgcgctacttcactcccagctctacatggtagacaccaatcgactccatcaccagggccgcagtcactcattgctggccgattatctatcaggatcgtcgttctcttcggaatttatagactcttcatcgcccatcggaggtattaatccttccatacctgacatgatggcaattcttcgaaagaatctttcataagcatatcgctccggatgaatctctgagggataccaactacaacaattgattagaatacgctggacgtgatcacaccaacatcataagcagaaagatcttgacacactagttaacagcgacagcaatcccctcttcccctccttcttgttcaacacggtgccaccaccctgccggtaagaacaaggtatcaccctcgtgcagagttacgcttatggaacgagcagatcgcggaaggcagaggttttccacccaggggattctgggcccgcaagaggggtttggatagtcgtactccgggtaaagctggcctgaaggagagcgcttgagggtcgaaggaggatagaacctttctgtaggcagaaaagaatcaacatctgtcagatcaggaatcaggaaggcaatacttacggtcgaggtgaatggtttcaaggggcgaaagcaaggtgaaa

SEQ ID NO: 208 - DNA, 3411 bp, Cryptococcus neoformans
tggttattacgcatttcgctcacagcaaaaagcttacgactacacctaataaattgccacaaagagtcgtcagaaagagcagcgcccgcagatatcagttagttatttattaattattattacaccggcggcaatttccacgtcaacctgagcggaatcaaataaatgatgagatcatgacattcttgaatatgactcggaccgaagtaccatatttggcttccaggacgagaaacgtcgaccgaagataactaaggttaaagggtattcgtatacagtgccaaaaaagcacttctttccccaaactcacttaaagtactgtctatcagcatgtccgtgagtgtgtgggactagaggactcaaagctgtcatgtgtttgctgactttcagctttgcagggtaaatcaaaattcacccctctgactatcgtcattaagctcggtaggtccataatacatgcatattgatgactgataagttccctcccaggtacctcatctattgtatccccgacatatccttttgtcccccaccttcgacttctttcatctattgttgagactgtagtgaaactccggacccaaggacatcgtgtcgtcttggtatcttcgggtgctatcggtgtggggttaaggaggatggatcttaaggaaagagggaaggggttgcatcagaagcaggtgagtaagagtgtacaatcagaaaaaaagggaggagtggatgctgacgcaagtcacacgaccaacaggcccttgctgctgttggtcaagggcggctgattgcgctgtgggataatctgttttctcaattggatcagcctattgcccagattcttctcacccgaatggacatttcagacgtgaggatttactgaaataatatgtgcatagctcataaggtgacacagagaacgcgttatctcaacgctcaaaacactttctctgaattattgcaaatgggcgttattcctatcgtcaatgagaatgatacagtctcagtatctgtgggttttaccttcattcgtagctatgaacctcctgatagagtctaggaaatcaaatttggcgacaatgacacattatcggcgatctcttctgctatctgccatgccgactatctcttccttttgactgacgttgactgtttgtaagttcaagctgtaccgcgagcatcctgatcctaaaggcttccagatacacagacaacccccgtaccaaccccgatgcgaagcctgtgagagtcgtacgcgatattgagaaggtgaaacagcaaggtatgcttgtttttcctacgtcatgttacttatactcatattggctgttagtatctacttctaccctcggaacatctcttggcacaggaggcatgtccacaaagctcattgcggccgagcttgctaccgctgctggcacaaccaccgttgttatgcattctatcaacgtaactgacattttcaaagtcattgaaaacggcccttcgccttgccgagaggttgcagagactccagaattgtttgagggcccactgtgtacgaggtttttaagacgagagtcagcccttaaagagtgagtggcgttttcgtacgtccagccccattgtacttacagtaatgaagccgaaaatggtggatcgcccacggtcttcacgctgccggtaccgttgtcatcgacgaaggtgcctgccgtgccattcgacgcaaagaatccggtggtcgtcttcttcctgccggtgtcgtccgcgtggttggccctttcgcaagtcaccaagccgtccgtctcgttgttcgccgtcgacgccacgacgacatcgctgcccttagctcagtcgacgaatcaacccccggtagccctacccccgacctttcccaagtaccccagccggcgacattcgcttctcctgctcttcgacaccttacgattgggactaccaatcctatcaccgtcatgtccgacgccaacaacactgaacctgatactcctcaactccaaccttccatgtctctttcatcgtcgatcgcttccctcgaccctttgagcaggagtgtgccccctagtcctgcgataacggctttggcggagaggttgggcacgacatcgttaacgagtattgggcggggagtggccgaaggagagagtgatgagtgggaagaggtcgaggtggcgaagggtctagctcaatacaacagtgtagaaattgacaggatgaagggacgaaagaggtgagcaattattgatgtcttcttgtgcatatgttgatgagcttttagttcggaaattgaaaaacttattggatacgtcgagagcgagcatgtggtggactgtttctactgtgatttctatatagcgtttcaagctcggctaatatggactcaatattttgctcactcagcctgtgaaacaaaagtaagctgatttgctccctcaagttatatcgaggcatacctattgagcagaccctgcgcctttctctcaagtcgtattttttcctctgccttttccttgttccctttcgatttttcctctaattgagcggctcgaaggtgtggagggatgtacttggtaggtgccggagtgtccgttgaggatgaaggagtgggatctgaaggtactgatggttctggaggctcaggagaagaagacaatggcggacattaaacgaaatgcgaaagctgggaacatggtgcgtgtgggcgtcccaccaaagtcaaagcgaaagctgatcaagcggtatggtgatccagaatgcctgcaaaattcttgctaaagacctcgtgcgaacacgaaggtatatccaaaagtttacgcagatgagggtgcagctgcaagcggtgtcattacgtatgcagacactgaggagtaacgagcaaatggctacggcgatgaaaggtgctaccagggtaagcaaaatttcatatatcacttgcagaaggaaaatgagacagggctaattgcttgtacaggcgatggggcaaatgaataggagtttgaatctgccgcaagtaggtgtcaaatacttcctctttgcttctgcggcatgctaattaattctgacacttggtactatttagatccagaagatcatgaacgatttcgaacgtgaatcttcaactatggatatgaaggaagaaatgatgtccgatgcggttgatgatgcaatggaggatgaggaggaaggtgaaggtgaagaagtagaaagcgacaaaattctcaaagaggtgctggatgaaattggcatgaacatgaacgaatcggtaagtgacttcattatttacccgctatttcggatttcaggctcagggtgctgcgctttgaaccgatcgactggacaacgctaacatttgtattttttaattattttttacttaaaacagcttatatctgcacccactgcttctccgcttgttccggaacc

SEQ ID NO: 209 - DNA, 3913 bp, Cryptococcus neoformans
acgacattccagtctttgttttagtttccctttggcttggcccggaggacatgcattttattttgtacaagcttctttgatagcaggaagataatatgcatgtatttacttcaggtttaattccatgctctactctgggcctggccatcgagataccatgtccatgattccagcatacctctctctttcgctttctacaagagcctcttctttagcatcgtcttcatcacgcgcccttcttccattctgcttgagggacaagcctactaccacatgtcttctcatctgaccgctagtttgcaatgcccaccagacaagagttgctatttgagaaacatacagctcatgcaaagtttgctggggtggtgagcctagaaggggtgtgagacatgctgaatgggggggcggaggaagaatagagagaatgtgtagatttgaaggatgaccattggactgtaaaggcacagttggaggaggaagaggtatttgttgtgggagggaagcttgggtcttttgtgcacggaatcagcactaatcactggacgaaaatggagaaacttacaaggcatcctactttgccattctgagtgacaatggccaatattcgatcgtcgaatgtctggatgagaagctctgtctcaacttcacatatggattggcggagctgatacgactggataggaggagagggttggcttttggtggtagagagaggcagggcggtatatgagtcttcgagcagagacgacattccctgggaaccaaggttagatattatctggtggtggagatacaagatagccttagaagacgagtattgttgacagagttgaatcagattgtcgttgatgctcgatttcgcgttcttccagacggtaataaagacaatctgctgaggagcagggcgttgtaagggctgtgttggacagtttggcgagcaaggaggtgcgtactaccaatcaaattcgacagaattattggtagttaatggattatttagatggttgagtacaagcaaatcaccaccaccacctacggccttactgaagagggagaaggtatcactcaaaatggttctcacgagtatagagtgtgggaggtgcttcctgtgaagggtcaaggagagcccatcggtattcctgaactcaaggtgagcaatttaattatccgctaaacgttgtttgatcgacgacatggaatacaggtactgatcatttgcccagaaacgtctcggtgacgaaactaccaaggttggtcagatgcgagcgttcaagaacaagtggatagcgaaggatggtgccggtttcgtccgtgcggtgagtgcatatgttgctaatcgtgaagagcgtattgttgattcaaagttaaggctgaggcgcctgtggatgaggctgccgtacaaatgaaggaaatcaaggaaagcgggctggttgcaggaggtgaagccgttgtcaaggagctgcaaaaaagaaaattgattcaacccaagtacgttatccattcagtactgagaaaggggcatacaagtctcacattttacagaaagtatatccactattctatctccaaaggacctcagttctctactgaagtcaagcaactggaaaccgaccttactgttgaaatgctgcaatcgtaagtattatccagcgtccataaatatttacataaactaatgggggataacgcagaggtgcttggaaagacgcttcgttcaagcagtacaacttcgccgctgctggccaacctactgatggtggcgctctccatccattgttgaaggttcgagaagagttcaggaccattttctttgacatggggtatgtacttcgactgaaaaaaaggatactcaatccctgatggaacgttgcagtttcaccgagatgcctacgaacaggtttgtcgagtctgctttctggaacttcgatgccatgttcgttcctcagcaacatcctgctcgagagatgcaggacaccttctatgttaagggtgcgcatatatcgaactcatggatagtacctttaggggctaacagtctgttgcagacccggccaaagccctcaagcctgatgccgactattacgagcgaattcgaaagattcacgaggaaggaggttacggatccattggttaccgagcacctttctctcaggaggagagtgagaagctcttgttacgaacacacaccactgctatcactaccgacatgctttacaggctcgccaatcagcccggagggttcaagccggcgaagatgttctctatcgaccgagttttcaggtaatatctaccatcaattggatgttcaattgcttataatttttgtagaaatgaaactgccgatgctacccatttggcagagttccaccaagtggaaggccttgttgcggactacgatatcactctcggccacctgcttggtacgttctccctaaaaaatgcgccgtccgctccattaatatggtatatctagcgttcatgcaagagttcttctccaagactggtaaccacaagctgaggttcaagcccgcatacaatccttacactgaggtacgcctattttgataaccttgtaaaacgaccctcacacgattatagcccagtatggaagttttctcataccatgaaggcttgggcaagtggattgaaattgccaacgtatgtctatcgttgtttataatatacataacagcagctgatgtgaagctccagtctggtatcttccgccccgagatgctcgagcccatgggtcttcccaagggtgtccgagttcttggttggggtatgtctctggaacgccctactatgatcaaatacaagatccaagatatcaggacgcttgtcggacacaaaacggatttggatcaggtaaagaagagggcggcggtcaggttggagaagggcgatgactagatgcatgtggatttcttggcggacacgcttcgatgcctcactcccaggctgtattatgtgtaacactgtgctatattttgttgttgtttgtatgttgcagatagttcgaaaatctcgatttgtctggtcgtcacaacttattaagctcaaccggacctgggcgtcgtcaccagtccaaggatcttgtgtcgaacccagtccaactcaaactttcacggatgaaaagaccaggaacaattataagatactgatctaaactctccgccagataataaccaccgaagatcggagcgcgtcgcgtagcatcatggcaacaataatttatgcgccgtctatcttcccggttcgtccatcgtcgcgtattcctgtcctgtataacgataatactcaacgctccacgtattatcgtcgatcttatttccatccatctacagtttttttcagataaaccaacgccaactatgatttcattatcgaggcgctcaatattacgcacccttttgatcacatccccactcatcttcatcggcctgttcgtttcccttaaaccttctgagccagttgaggatgaaagtgcggctagcaaagcacggtcagaaactcttgtatcgcagaagcatggaaattggtggaaaggcatccatagaggcgcgaactggagcccgttagactgggcaaagaatccgatgctcaaagaggaagctctagatggtgacaaggacggatgggtgaattttgatgaagagctgaaatggacgaaatatgaaggtggtgagttatcatgccattggttcattttcaagatatagcatgctaatcatttatcaggcgtggcgggcttccaggtattttccaacctatatttaacaggcggagcttttacggcgatcaccccttttcctccagacgatccctcttcctcatctcttacaaacgatgaagaagagcccaccgtagagttcgaaagtccttttccagacaccaagttcatcatatcctc

SEQ ID NO: 210 - DNA, 4074 bp, Cryptococcus neoformans
tgactttttttggtttttttcagggatgacgagttgaacgtggaggtgttaacaatgggggataaatggggttttgtatagtgcgagatggattgaatatgtcatgtcgttgttaagctgttttcagagctgcaagtataaataagcaaataagcttaggtttctctaccttgattcccagtcatcgatgaacaagcgctttaatgtcgattcatgtcatcacgcatttaccttcgagaaacttatttacagtactcaaatgcatatgattttgcatataaaawtcttgaccgttattcttctttcatwatttcttctttcgactctaggcgatccagcaatttacttgtcggaccaagtaggcttcytcttctcggcaaaagcagccatacctgaaggggtattcgtcagatcagaccgttggaaaaaaaaagagaatagtaaactcaccttccttctggtccttggtcgcgaagagttgctggaagagcctcctttcgagccttagaccttgctcgaggggaaggtcgagagctacataaaatctcagtgcctgcgtccggacgtcttctggcacgtatgtcaaacttacatccattaacggcctccttaccagcctgtacagccacctttccaaacttgctcacgttctctgccaccttcaccgcttcctcagtcacactctctccttctttcgtaaccctgctaaccaacccccatctctcagccgtctccgcatcaatcttcctcccagtgaggaccatgtccattgccctcgcctttccaatcagggaagtaaggcgttgggagccgcccatacctggaataatcccaagtgtgatctcgggttggccaaagacggcggtcggagaagcgacgaggatgtcgcagagcatggcgagctcacatccgcctccgagggcgtagccggcgacagcaccgacaatgggcttgcggatagaggcgatttggttccaggatccaaggaagttgctagtgtatgcttcagcaactggaatggaacatcagcaaaagacgcagacatttcacacggtatatggccaagaccgagaacgtacattccttgtccttcatctccttgatgtcggcaccggcagcaaacaccttgtcaccaccggtgatgacgatagccctcacactctcatctgtctcggccttctcaagctcggcgttgagagcattgaacaagggcgtgctcaacgcgttgagggccttgggcctgttaagggtcaagatggctacgttgttcgaaggagaacgagaggggatgacgagctgttctgcagaggtggacatggcgcggatagtgagtcggtatgtagattgggaaggcttgaggagagtgcgagctaacatgatacaatgactgaaaacaaaaggagataccccagcgaagattactcgttgagaactcgtaccacgggcttatatatgtaagcgttcgttgttcatacgagggatgtggtcattcggctaagtggcggccgggaccgccggctatggacttaggcgaaatgccacgcagatgaaactccgagactcccgcggtcaacaggtggtgttacgtaactatcaagactttcgctttcaatccgccttggaaggggtcgttctttgtcttcgagggcgactcgcttcaacactccattttcactctccgtcttctatcgttcagcccaaaatcatctgtggccgacgacctctctcagaacagctggaacgaaattcactcgacttcagcgcctcaaacaattgtatcaggaggatattggaatccgactcgttgccacacatttggcctatttcaaacgtccagaactagagatccgccacccatcaacgcttgtgcaagatgccccgattctatgagaacaaatatcccgaggtgtgtttgcttatggagcaggaaaaagagacgtggagactgatgatcatttatgcgtgataggtcgaccaattggtcatggtccaggtccagtctattgaggacatgggtgcctacgtcaagctcgtgagtgaagcagtatcagttattctaaggaatatttctgatcgctgctcatagcttgaatacgacaacattgaaggaatgatccttctttctgagctttctcgaagacgtatccgatcagtccagaaaactcattcgagtgggacgaaacgaagtcgttgttgtgatgcgtgtggaccccgacaagggttagttcagctgccgagtcgaaggatagaatcatattgacaaaaatcttttcaggctacattgatctttccaagcgacgagtttctgcggaggaggttgtcaagtgtgaggaacaatacgagaagggcaaagcggtcgactctatcattacccaggtcgctaagaagcgaggtgttactccggaatcattgtacgaaaagattgcttggcctttgcaccgacaatacggacacgcatacgaggctttcaaactctccatcaggtaggttcaaccttctttcagaccatcattctgtaaggggcgcgatgctaacgaactacatagcgaacctgaggctgtctttggctccctcgaacttgatgaagaaacccttgccgatctccgatccggtattgcacgacgacttactcccaaacccgtcaaggttcgcgccgatatcgaagtcaaatgcttctcctatgccggtattgacgctatcaaacgtgctcttactgccggtgaagccgtctctacccctgacgtacctatcaaagtcagattggtcgctcctccgctttacgttatgagcacgacaagtacggacaagaatgcggcgatagagttgatggagaaggcggttgaggttattggtgagactgttaggaaagacaagggtgatatcactatcaagatgaaggtgagttttttccagtcgtcttgtatgacaggttggaagatgttaacggaacccgtctacagcccaaggttgtttccgagaccgaagatgcagagctcaaagctcttatggaacagttcgaagcagccaacatggaccaggcgggtgatgacgaatcaagcgaggaggacgagtaaatgctgttcactagagtgtcggcattggcgttgtgttgttgggcatctctatgtgtctaggctatgatagaacatgatcatgttgggtcttcatttggagccaatttaggggttttagagtttttgggtgagacggaagagtttggcgagggagttcaacggttggactcggggtagaggaatgagaaatcaacttgtgcatttcttagaccgtcacaagggaaaagagcttgcatctttgagcaagataacaaaggcttagttttggggcgatggtagatgcattttcaaaatacttagtttccaagtctctaccaacggaggaagttggggcacgtactgctactttgactgctatcagagcaatgaaacgatgcataatgatagggaagcgttatgtatacggcaataccacttacttcaactattgatcattcgtcatcatataaaaggcacgatcaaataaaacaacaatgggggtgtagctcatttggcagagcgcgtcattagcatcttctaaacaaaaggttcttgacgaggtactgggttcaattcccagctcctccacagctttttactttttgccccttatctcatctttatctatcaatcacctgacctcttttatcttaacgggattccaggtcagtcctcatttgtatcaccatcccccatagttcaattcaatcttttgttacaaaagcctcaacattctcatgcctttatttacaaaaaagtgcttttgatgaatatgtcgtccttgacccaatatatcattatggggaccatttttttgacattcacttggcataagaggcctcaaagctggcgggcagacccttactcgtgcttgtggaacggcccttcaaccttttcaaacgagagcgatttcagccgaaaaataaaaaataaaaataaaaagaatgtagaaggtggagggagactggaaggagaccgtcgtgcggatgccggaaaggaggaacggagttgtggcgtgtga

SEQ ID NO: 211 - DNA, 2796 bp, Cryptococcus neoformans
cccctccctacctcctcaatgacctcattatgcgctcaaaatcgcttgtcttccgtgtcgctatatacatcatcccacttataatatctgcctatctctttcttccttatccaaacaaacactcttattccatagtcgcaatgtctctctcttccaagctcaacattaccgacgtcgacctcaagggcgagagggtcctcatccgtgtcgactttaacgtcccgtgagctttccacctcctctctcatttcttgttgcagattctaattagtatcaacagcatggacaaggagggcaagatcaccaaccctgctgtaggacacttttacgcaaatgcatatggacatgtgctgatgagccttattagcgtatcgtmgcggctctccccaccatcaagtacgccattgacaacggtaagtttgcggttgcttaacatcgccaatcacctakcaatgaactaggcgccaagtctgtcatcctcatgtcccatcttggccgacctgacggttcccccaaccccaagtactctctcaagcccgttgcttccaagctctctgagcttctctccaaggacgtcaagtttcttcccgagtgtgtcggtgacgaggtcaagagcgaggttctcaagggtgagaacggccaggtcttccttttggagaacttgcgattccacatcgaggaggagggtaagggcaagaagggcgacgaaaaggtcaaggccgaccctgcggccgtcaagaagttccgagagcagctcactgaactcggtactgtctacattaacgatgcgtatgtttttatcccctttccatgattaaaacattgtcctgaacaattatcagctttggtactgcccaccgagcccactcctccatggtcggtgtccagctccccaagcgagctgctggcttcctcatgaagaaggagctcgagtactttgccaaggtccttgaaaagcccgagaggcctttccttgccatcctcggtggtgccaaggtcgccgacaagatccaattgattgagaacatgctcgaccaggttaacactttgatcatctgcggtggcatgtctttcactttcaagaagacccttgacaatgtcgaggttggttgattctttttttgttggcggtgcattatactcatcattaacactaaatatcagattggtacctccttgttcgacgaagctggctccaagcaggtcaaggaccttgttgagaaggccaagaagaacaacgttaagcttgtcttccccgttgactatgtcaccgccgacaaatttgacaaggacgccaaggtatacctgttttgatattccttacatggaatcttgctgacattgcaatagaccggctctgctactgacgagtctggtatcccctctgactggatgggtctcgactgtggacccaagtcccgagaactctttgctcagaccgttgctgaggccaagaccatcctctggaacggccccgccggtgtctttgagttccctgcgtttgccagcggctccaacgccctcctcgaagcctgtatcaaggccgccaagaacggctccactgtcatcgttggtggtggtgacactgctacccttgttgctcaggccggtaaggaggatgaattgagccacgtctccactggcggcggtgcttctttggagttgttggaaggcaagactttacccggtgttgccgagttgtctgagaagaagtaacttgcgcgattgtagagcggtggagtcgcccgccgcgggaccaaaagtacagagcaagtaccgtactgcgtcgaaagtgaaggatgtcgggggtagaagcgaagtgaaatgtgtcaagtggagtgaagcgaaatgtgtcaagtaggatagtaatagcacagtgttcaaatggacgaaatgaagcctttagcatgtgttgccttggaccttgtgtgtgtgaaaagtggaaagttaaattgccgcccatttttattgtttacgcgacgcgacttcgttgctcttttccactgcataaacaaaacattccgccatctcatcttttgttgtcctccgtattcttcttgctgcccacgatgccttccctggcagagtcgctcgatgccctcgcgcatcactccgaacagatcgcctacctatcaaccctcaacactgcccccccaggcccgttcaccaccgcctatctccacctgccccctccccacctctcccatctcggaaaaggaaacgtcctcgaactcatccgcgatgcatcggatgcagagcggaggctcttcaagtttgtaggggagagcaatttgcctggtgtcattggcggaggaggaaataaacgggtcgaaaagagggaaggtggggtagtgacgccgttgaaagagttgaagcgtggtggtggtggaggtggtggtggcggaggaggaattgagaaagacgaggtggaagtcatgctgaggacggcattgaaacttgttgatgactagtatgtgtactccatctcaacagagtagatggactgatcaaatatgtagtcgccccatgccgagggcgagagcgcatgtcatcaatctcttggatcaacaccatcggaacttggatcggctggcagagcttgagatgcttattgctgaagtatgtcgctgaagaagctatatattgtattataagctgaattatcatggtaggcgaacagaccggtcgatattcctgcttctccgtcccatcaacctgaagaagcagaagaacctcgacaggaacctgtaaaactcacgcccgaagaagctatcaaggcagaagaagcggctcttc

SEQ ID NO: 212 - DNA, 3856 bp, Cryptococcus neoformans
gtggctttgctgttattgctcgctcaatggctcgtatacacgagacagtgagttctaccctggatatctctccgttgccgtgtacagaaagctaatgaatggttttgatttttgcagaacttgaaaaagcaaggtctcttgccccttttcttccgtgacccggccgattatgacaaaattttgccaggcgcgcaggtaagctgaagatgagattaaagtgaggagcaaccagctgaatcgatgattctcattctagctcaggttgactaacctgcaagctttggcccctggaagccccgtttacctcacctatacgaacgcaggacaagaacacattcagattgaactcttccactccttaactgaccatcagatcacatggtgagtataatggatttgtgctctaaaaaggcgtcccaatgaactgagacatgtttcttttttcataggttcaaggctggttcagctctgaatactctccgtcccaaagactgaaaggctgaagattaattagaaagcagaagatttggcgtttagttacagttgtacagtacattttttggagaaactggatcgcatacatcatggtaacatttgcggagtgcattttccaaacctctgagaacagtcagtgcacttgagtactccgaaatccctaaaaagacatcggcattaataagacatcggcattaaggcatcgacattaagacttcggcattcggatctctacaacgtagaaggatcggcccagattgatatcaagcttaaaaggtcattgtgagtggccagatagaccccggtgtcacgttcgttcgatggagcgtactgaagatgaaatttcgagactagatcttacaatcctcggacgtcatgaccaggaaaagtgaggggggaatgacatgctaacgtgtcctgaactgaatgctgcaatcgcgaagccccgattactgcatgatcatgatctgggtctcaggagacctgtatccatcgttctttggggatgcatccggacgatgactattataccgcaggcccaaaacggttccagcaaaaaagacaaacacggatcaaagaatatttccttgttcggctgtttacttttcaggcacgggagaggcacggacctccagcggaaagatccgaacacctcaaaaccttgttcctgactagctacgaaaagggagccgaatgtatatattttcttcgaaaacacctctttttttcatttctttgcttctcctctatccacgcccaagccatggcctcctacaccccctactcttcccgcccacacacccctctgggtctctctcctagaggctcgtataccaacctcgcctctgccgcgtacgacgcgtcttcccccggaggacatggtgcgaaggatgagaaggagaggctgagggcagagcgtgaagtacaggaggcgttgttgaaagcacaggacggtgtggaaaaggccaagaaggaggaggtatgcatgcccgcgagcactactggtgagtgataaattccgggcgggagtgccgagtgatgtcgctcgacacttgacctggagctcatcattcgtcgatggtgctgacagatgagggtagtactgccgatcctgagctactgtgttgcatcgattatgatgaccgttgtgaacaagtttggtggtatcttggtcgacagtttacaatgacgtttttgcgtgagtctatcccggaatcattgttttctctgatactgaccgctggatagtccttgctatacaatcgttcgtctgtgttgcgtgtgtatggctcgccaagcgcataggcgtcatcaactgtacggcattccctcatcttccttccattacgtcaagctgacccttcaacagtccgtgactgggacatgaacgatgccaaagcgtggttcccagtgtcgtcccttctcgtcgccgtgatttacactggttctaaatcgctccagttcctctcaatccctgtctacacgtaagtatcctcctgccccgtatctcaccaatacgaagcaatcaactaaaccaaatcacgacagaatcttcaagaaccttaccatcatcctcatcgcctatggcgaagtcatttggtttggcgggcacgtcactcctctcactctttgttcattctttctcatggtcggttcatccgtcatcgctgcatgggccgacatctccaccaccctgtcaaaattatcagccggtgtcgccgttgtggaccccatctctggcgccgatgttcctctttcaagtattagcgtgatggatacgatgaacgtgggttacttgtggatgtttatcaactgcttggcttcggccggctatgttctttttatgaggaaacgtatcaaggtgactggattcaaagactgggattcaatgttttacaacaacttgctttccatccctgttttgtttgtcttttctctcatcatcgaagactggggtgctgcctctttctcccgcaacttgtacgtccctttttcttttttttcttttttctttccagcttcctcagactaacaatcacctaccactacagccctgaagaaggccgagccttccttctctccgctatcgccttttccggcgccgccgccgtctttatctcttactctaccgcctggtgcgtccgtatctgcggcgcgacgacatactcccttgtcggcgctctgaacaagctccccgtcgcggctagcgggatcttgttctttggggacccggttaactttgggaatgtgagcgctattctggttggaggcgtaagtgggattgtttatgcggtggccaagacgaatcaggcaaaggtggaaaagtcaaagcaggcgagagggggagaaagcaaggcgtaatctaatgtttgtggtgtgtggtactttttcttttttttctgtaaatgggattggaatatgaagggaaatgtggatagctaggctttttttgggggttatgggctggtataacatcttcatattgaaataaagggtatcaggcagtcatcatatttatttctacagcgtgtatacgtgtaatttttcagatatggttttgtttttatttcatacatgttacgatgaaacccaatgattagaaggggcggagaaaagaagagcaaaatctggtcgtctcatcccttctcctacatctgaaatcttcagatgactcatataagtaaaaaaaaaatatactgtagtattcctaataatccaaactattcaaaccccgcttaccgcctcgcagcaccccgagccccaaacatacctctcgccattcctgacccggcgccaggcccaacgcctcctcctcggtgggcagatgctcgccacaccccttggcctcctccatgaccccccgcactagactgacgaaatgctgtcccccatccactttcctttggaggttcaaacatcaccacatcctcttgcttctctacaaacccccttcctttctttactaccggttcatcctcctcctcctcctcttcttctttttcatcctcaccccttgatccccatatctcaatattgttgttggaagaatagttgcggtgaaagagggtggtggggggaggacggttgtcacgtcggattttgatacttttcgttgtggacatggaggtttggtctgtaccattcccttgcccggcggcgttgtccttggactgggcctggccttgtgtttgggctgcactggcgatcccagcgatattcaatgaactgatctgtgcgggcttgtttgtctccgtcgtcataccactgcgagccgtagccgcagctgcgggaacgggtgatgaagcagcaagcttacccaaggcaagtctatcaagcgctgaaatatgtcccatccccactg

SEQ ID NO: 213 - DNA, 3795 bp, Cryptococcus neoformans
ttgaggttattctctggattctggcatgctgatacgagccagatacatatcttgccgcccatgacatgtttgcactgcattgttatgtttgtgttgcgattttttccacttgtaaggagtgagtcccctcatgtttgttatatcagcgtataataagccataaccgccttcgtgccatagaacattggaggagttggatggatcagaggcaaagcttatgttgctcgatcttccgcccatggacgttgaccgcgtatgtcttcaactctgaaactcttgagggtgctgtgttaaatttgacgtagctgttacaagatgctgcaaatttaagagtcactttccctctcgcccgacatgcagatgaggaggaatgattgcatattccgcagttccatcgaccatcacaagagctaccatcacaagaactatttctgtattttgcatagaagaagaagggccaatttgtctattaattcatcagtgccacgctcggcatttatataaggaggcgctacgagttatcaattttcaagcagcaattgcaagcggaatcaaaaaaatcggagtgtgcctgagttgctgctgctggcttgtggatccatctggaaagaaaacgattcctgtaacatttttttcgccgattattttattatttcttcggattattcagcagcctcgaccactgcacgttttataaatttgggcgttcttctattttagtaccatctctctttctttcgaaattcgcaatcacccgtgccagtctattatcgtgatataggtgagttcaacgccaactttgtattgaggccaactttcgacctctccgtcttccatgatgttcaatgtaatttgcgtttgagccgtctcctcgagagacgtctttgaaaccaaaattttgcctatatgtctgatactcttacttttgtcctcagtacatgattttattcacgacaacagtagactaacaaatattcttaggctttgaaatcgatcaaccatgtcctctgataaaaccaaccttttccctactttaggtgaggtggcggaccgcacagggaaggctgagagtactggtttggagcaggaaggagatgacagacagatgcaggagattgagagtctttgtatgagatgtcatgaaaatgtatgtcattgccgcaatttcgtacatgttgcagacattcggagctgatgcaaagggcagggcacgaccagactgctcttgaccagcatcccctatttcaaggaaatagtggtctcttctttcagatgcgatcattgtggtcaccgtgatacggagattcaaagtgccggtgaaatccagcgtaagtgactgtcgctggcggcagaaacagcgtgaactaaattctgttacttgctagccaaaggcgtcagctacaccgtacaccttctcacacgtgccgatctcgaccgacagattgtcaagtctaattgggctacaattaccattcccgatatccagttgactatccctcctggtcgagggcaaatcaatactgttgagggcattattcgtgacactgtacgagatcttaacatcagccaacctgtccgacgagtcatggaccccgagacgggtaaaaagattgacgagctcctcgagaagcttagggcggcaattgacatggaggaggatgatgaagacgatggaggtgttggaatggatgacgatgtgaaacccgtacaccacgaaccatccaattcttcgtctaaagaagaaaaacctttcgtccccttctctatgatcgtcgatgatccgtctggcaattcttacttccagtttaaagggtctcaatcagatcctcaatggaacatgagagcttacagtcggacatttgatcagaatgtgatattgggtttggtcgctcgaccggaggatatgtctgaggagcagccggaaggcgtcccgattgtcgctgctgaccacaaactgagcagtgcggaggagtttgagtcgaaaaggaacaagaacgtgatcaatcgggatgacgggacagttgttccggacgagatttacagcttccctgctacgtgttcttcatgtggacaccagcttgagactctcatgcagcaggtcaacattccttactttcaagtaagtttttttttctttgcctatgtagctcgtcgctaattcttgtcgttaggatatcatcattatgtcaagcaattgctacgcatgtggataccgagataatgaagtcaagtctggtggctcgatcgctcccaagggtaaaaggattactctgaaggttgaggacgaggaggatcttagtcgagacatgctcaaggtgagcgtatctttgtactgtattacagctagtaacttactgcttctgtagtctgatactgctggtctatcaattcccgaaattgacttggtgcttcaacctggtacccttggaggccgtttcaccactcttgaaggtcttctcaatgagatttacaccgaactcagtaccaaagttttccgagctggtgactctactaccgctggtatcggacaagcggattcgagcgccggtgaagatgaagcaaactttggggatttcctcaaaggcttgaaggagtgtatgtcggcccagaggcagttcactctcatccttgacgatccggtgtccaactcctatcttcaaaacctttatgcgcctgatcctgacccaaacatgcaaatcgaggtgtacgagcgaacgtttgagcagaatgaggaacttggtcttaacgatatggtcgtggaagggtataataaggaagctgagggaacggcgtaaggttcaaatatctggattgggcaagctggaatgttatgctttgtaatcacatagggaaattagagtagaagacgtgctgctatcatcgtctccgacatgtggtttgctttcatttattgtacttcatagacatgcataattaatgttcattcgtattttgcaaggataagtcggatccttattatctgtatctcatatgaagcagtttcgtcaactacaaaggtctaataaccgttgtccgtcatcgacgacgtactatttattacaagtattgctgtgaatgataatgggcgagatgatgtggtttcgataagctttttcactcattttactacttcttgtacagccagtaagccaataacgagtaatagttagtaagcttcatgactgatagtagtggccgttgtacactaggtaaattataataatttatcatgcttcacaaagcacctgcattgcaggtatctacgcccgctcacagctggcaaaccctagtggtggtggtatcgagggaaaaaaaacagcgaaccttttctttcaaaacgcgtcactcatcatcaatctcaatcggccctactagtaaacgctgtatacaagtaaatagtaacaataagtccagagatgtgcctctatagctctacgcactcccttagaggacgacgcatcctctacagcatcccttatcgacatgatcatccttttcagctgctcgaccaccgacagcgctcatctgagatttggcgggagcattcacagcctgaggaggaccagactccttattttgcaatcatgttgtcagtggtcgatcttgaaatgtaggagagtggtcaacataccttttggtatcttctgatggctcgtacgacggcaataaaggcctcgtccacgtttactcgttgcttggcagatgtttcgatacattgggcattgaaccttttagccaagtcacgcccctctgaaatgacgttaagctgaagctgacgaatgtgattgagaaatg

SEQ ID NO: 214 - DNA, 3658 bp, Cryptococcus neoformans
acaagaagcatctccgaacgggaaactgccatatttgataagcaaaatggtcgggccgcctcccgaagaggtcacaaaggcgcagtatagatctggttatgcgtggttgcctatgcccagtgtgacaagcgggaggatttaacgcgtctacgatgggagacgagaagttagagggagctgtatcagtgtgaaatgagttttgatgtgtgctaagcagcagtaacgatacttcgcaaggtcatcaggggaatttatacccacgtttgtaaatgcctttttatgaatcatatatagctttgtatgagcagtaaaccccaagatctctccacgtcctcatacatgtagacagccttcaacagtccctagcatctttcaacctcctaatggctcaaaaacttccttcccttcaacaacctcctcagcaacgtcttcctcccatttttgccccctttaagcctactcaagaacccgtgcttgttcttcctctttctctgggaaggttggtagaaggcgcccatggcaacatgtcgaagcgcaccgagtggagagaacgccggcaaagaaggaaggatgtgggtgggaatgggtggtgatgaaagtgccatagggcgagaagcgacgaatgtggatgtgggcgtgcgtagagaagagaggatggaagattggggtgcaggtgcgggtgcggagagggttgcacgaggaagggagaggggagcgaggcgtgctcggggtgggagaggtacggcaagaacacgagcgagacggggcattttgtgggtgcttttgtgcgctttttttcgcgagatgtggttgtttggtaggcttagttggtgcttttgctctgatatgcgtgttttcagagcttcgatgtggatttgtagggatgttgttgtgtctgttcgaaaccagaaaagtcgaggaaagcgaagagtgccgaaaaggggggagaaatcgaaattaaagtattttcttaattacgtttgcttcaagactgttaactatgctgttaataattttcccccctcatgggcactctactctttccacaagttgccatacagtactttttctcaaaaacatccacaaaatgtcaatggcagcatcgtcatccacggcaacagtccagccatcgggtatcatcacccagcccccacctccatccaccctgcgcgaacagcgaattgcaactcactcccacatcaaaggcctcggtcttgctgatgatggtacagccatgtcctcgtcccagggttttatcggacagattctcgcccgtgaagccctcggattgcacttgagcttgctgaaaggtggcaagtactcgggtaggccactgctgcttgttggccctcctggaacgggaaagacggcgctcgctttggcgttgagtcaagagttgggcagcaaggtgccgttctgtgcgatggttggaagtgaagtgtactctggagaggttaagaagactgaagtcctgggaagctgcttccgaagggctatcggtaggtcgatagatcacattcgtaacaggaataaacgctcatgattcggtagggttgaggattaaggagacaaaggaagtgtacgaaggtgaagtcaccgaactcactccttccgaagccgagaaccccctctctgggtatggcaagaccatttctcacgttatcgttggtctcaagaccgtcaagggtaccaaacaactccgtctcgacccctccgtgtacgaatccatccaaaaagagcgagttgttgttggagacgttatttacattgaagccaacactggcgccgtcaagcgtgttggtcggtccgacgcttatgcctcagaatatgaccttgaagccgaagagtatgtgcccttgcctaaaggagatgtgcacaagaggaaggagttggtacaggacgtgacgctgcacgatctggatatggccaatgccagacctcaaggcggacaggatatcatgagtgtgatgggtcaactggtaaaaggcggcaggacagaggtaacagacaagttgagaagggagattaacaaggttgtggaccggtatattgagcaaggtgtggcggaacttgtccctggtgtgttgttcattgacgaggtaagccatttcaacgtatctttctctgacgaccgcgttcttatgattgtatttaggtgcatatgcttgacatggaatgcttcacctacctcaaccgtgccctcgaatcccccatgtccccctacgtcgtcctcgcctctaaccgagggatctccaccatccgcggcacagaatacgacggtgtcgccggttccgcttccgaaggtatccgtgctccccacggtctgcccgtcgatttgctcgataggtgcatgattgtcaagacccagttgtacacccgagacgagattcgtcgtatcgtggagatgcgatgcaaggtggaagggattgcgatctcctcggaagcggtggacaagcttgcggatgaaggggagagaagtagtttgagatacgctttacagctcttgacgcccgcagggattgttagcaagaacaagggtaagggagaggttggtgtggcggatgtggaagagttgygagaactgttcttggatgctaaacggtcggcgggcgtgttgagaagcactgaagatttcgagaagaggtattagaaagataaaacgtgtatacataaggtgggggtaaatgcataggttagtctacaagtgtgggtgtatggcatgctaggttatggctacagggaatctatttttcgttaataacctttttggcagctgctctgcctttggttacgctatcactctcttgctcttcaccctttctagttttagaccccttgtcatcatccgacgaatccatgacttctccgtttctttgcgcagccttggtgcgacttcgctgttccccggactcttcagccaactctgacgcctcatcgatcgtcttgtcgacatcaattttttccgtctctacttttccttcctccccttgcagtttggtctcattctcctcttccatctctttcctttccccctctttacttccatccttggcatcaacgttctctcttacatcctccttcttttcccctatctctacaccaggcaaccctaccctcggcgaacctccaccggccccttcccgactaccaaccttttccaaaccttccaactctccacgccattcaatgtcataatccgctgcgattctctcaatctccttccgcaacgctttcgcttcagcgaccatctctgtccatttttcgaggtctagccctgcctccgcgtagagtttacgttggcgggcggtgatggagaggtcgaggagggaagagtaggagacttcgcggttgtggtagctaattttgcgtttgttctccgtcaggcgccataggaaactaggtggagaaagactcatgagacttacatgaggaaagcggctgatccaagaagggcggcgaagcctgtagcccaggtgacaggctccatcatgtcccatccggcgtctgtgaagaaggctgtatatcgcgttaggatatgctctgacactagctgaaggtgacaaacgcactaaaacggataatagtaccccagtagactacaccacctccaagcgccatgactgccaatctctgcgcacccttgtgggcagcatagtca

SEQ ID NO: 215 - DNA, 3907 bp, Cryptococcus neoformans
tctgatgattgcagtgcaattaacagataccctaccgtccttattgacgtcaagcttcagtgatagtcagcacatgaccgtgattaatacggatacgacttacaaagtcggttgtgagagacacgacagtcgttgaccatccgttaaaaccaaagacgtcatttgccagctccaccactgattattgtcagacgacagagtcagacgctcgttggacacacctttccagccctcaatgtagctaattaaaatttacctttagtttagctcacacactagaagagacctaactcaccacaacttggaagttccacccggacctggtctttgtgtgatatactctggaccgagcttccttgccagtctagcttgaatctgatgaactctttcttcagaccattgactagcaaacccttgtatcggtgtagaaacaggaaagttctggcggcccatatagcttgagtcgtttggatccattttgagagatcggttttgcaatgtgggtttttggatgggacgggtgagccgattggagagtgcaggtgctgagaagcttctttcgagtcctggatttgtctgctgatgttcgagatagttttccaagagctttgtcgaaacgctcatagcacgagccgaaagtggcgaagtgcagtgaccggtgacgatcgagagtcgcttgaggatgctgctctgtggtgtttctaatagctttcttcggatagtagctggatattacccgctagccttttgactaactttcacctagctaggttggaagagaacaagacaagaaaaaagttgagaaattgcagggatctgtattatatggtgttgcacgcagtgagagtggttgactgtgttgttgaacgcgtcaaagtcaaaccgcgaatattacgtaactttatttatatccacccgacgcgtccgtcgtataaggagccgctcatttccgtctcgctcttccattaccgcgtacgattctctatacgtttctcctgcaatggctacggttctcccagaaccagagggaatcccctgtatccgcccggctgcgtcctacgatcccctcacagagctctcgaaaccattcacaatcgacccggcttctcgatcatacaagcaccagtatgccaacatctactttgtgaggttggtcgagcagcgccctgctgttgagaagaaggctacggaaaagtggaaggatgttaagggttagtgactgtcaatttctttgcctgcccgtactaacttggtaaaaggcaatccaccgcttttaccgcgtatcctcaacttgacccggtcacagctttgctatatcgtcggtacagtttatatggaaatgcctctgaaacccaatattctggaagatatggctcgagacgtaggccgtttagccattttgagtacgttttaagctgacttgcaacagcactggctcgctgcacctattccaagaacgaaattcttttccgctcaagattccatccaccttgaagatgagtcaggccgagtgcgactgataggcgatgccatccagagggaaagagatagggaaggaggtggtcttgtgacgggagtgatcatggccgcattggggatggaaactccttccggggatttcgaggtgatcgacatatgctttgcaggaatgcccgataagcttgttcttaaccctgcgccatccagtgccaaaagaaaaggaaaagaaaaagttgaaaatgacgaggacattgatatgcaagaaggtatgggcgttgtccgagcttcaggccgttgctgacatgtccaaaaagatgctaaaattgaactcccagagaatgcaaaaacttggatagctatggtgtctggtttgtcgatcggtacccaagaagcgtcgacggatctcaaggctgaaatgttggtcgaatggttgatgggagagattggaggacattcagttagtaacactgtttgacgaaccagattgccttaacaccggtacaggatcagctgggtggtggacggatagcgcggttaatcatagcgggtaactctttaacacttcctgtaaaaggtgaagatgataaaaagattgtaagggtagtcattttccgggttactgacgtatgctgacttgaaacgtcagaaacgcttcaactccacctccaaacccctcttccccaaccacccgacaaaaacccttgcaacgcttttcgccgaccttctttcctcatctctacctattcaccttatacccggaccgtccgaccctgcgggtgccactcttcctcaacaacctttgccgaaaatcttatttggaggtaaagcgaaaacagaaggactggagtgtgagacaaaccctacatggatggaagttggcggaagaaggtatgtctctttttcctcattgtcatccagcagaaaaagaaagaaaaaactgaatcgatacagcttccttactaccggtggtcaggcaatagatgacatttttaaatacgtgcccggcaactctagactaggtatgacacaacgtacattagaatggcggcatatggcacctacagcacccgacaccctgtggatataccccttccctgacactgacccttttatcatgaattatcgaccggacgtgtatattgttggtaaccaaccagagtttgaaacgaccattattggaggtatgaccctttcgtatccccccttccttcagccgatttgaaactaacctaactctgttattctgtagatgaggacgctcccacacgtcttgtactcctcccatcatttgccaagacgggcgtaattgcttttgtctgtctcgaaacgctggaatgcaggacgcttgaatttgaggcgcccatgtgggttggagaaaccatggctggtgaagcagagggcgttgataatgaagaaatggaatcatagaatctttagcacgaggcattgttttgggtcatatcattcatttgtaacaggtaatatagcttcctcaactgatgccgagttggttagaattgaagaaaaaacgtatatggattagcagctgcctaatctgataataggaataccgcggtgttcttcaaaatcctttctgcatcggctcctcatttacaaccggggcatgacaatgggcatgcaatctgatacataaatcgtcccaaaggatgtaagcctgctatcatatcgtgacgttcgtgatatcaattctctacagctacaaaataccctccttctctcctttcacatgattacacaaccatcctcttcaaccggtttgctcacaaatcccatctccgcaaacgtctgagggcccttcttcttcttcctcttcttctccatcgtccccgatattcctccgctgatcgtactggttgggccggaagagggtatagaaatggatgtagatgaagatgcactgagaacaggaaagtcattaacgcttgaactaactgtactcattcgacgatggtcaaccaccgatatcggccttggggtgctgctcgactggcgtccacctccagtggaggtggtagaagtggaatgggaagaatattggtgctcatgcataggaggtcgggaagggttaataggagggtcttgaagggcgtaagaaggttgaggttgatgggaggaataattcatagggggcacagttaatgacgatacgggggaaggtgtgtgtgagatgggaggtggagacttaggtaacgccatgggcatttgtatttgactcacttgcccaaactcgagcagtgagtttgtctggccatagctaggaagaggaggagggtgttgagactcgtagatttgctgacgcacaggtcgagaagatttgttgcggtcagaacgaagttttgccgtagtgtgtttgcggacgagagtgtcattaagacgggattggtgttcgttcattgagatggccgtt

SEQ ID NO: 216 - DNA, 3787 bp, Cryptococcus neoformans
aatggtcaggaacctgccgggccccggatcgaaataagtgtctgtctcctgactgacacgtctttgcgggggtccacgctcctgctgtgacgagaaataataatgcgctgtttctctcttccccattttggtgcgctcgtgcttggctcgtgcactgcttctccatgcagaccaaatttcatacgagcgtgactgattcgtacaaagcggcgagctctgtgtgatttgtgggttatatgtacaacaaaaggaggtcttaagccacacaaggagaagtaatgcaaaaagaaaaacaaaaggcaggaggagggcgcagggacgacgagtgataaaggcaatcggcctaaaattgctatacgtgtcagggttatgcactgatctcatcggatatcaagctcaatcttcattggtccagcggaaaagttgaacggttgtcacggatgtaacgtagccaattccaaggcgttggggcattttggggacaggactgtcctctcggagttgtttacctccacctgcacgaaatgtacataagaaaataaatgaaataactccttctctttctccaatcccttccaactttctgcttgcagcaccaactacctttaccaaccttcaactaaactcttttactactgcccacgggcaacactatatgttctcaaacagtctctgtagtgcacacaacgctcaccggtacgtagtctctgaccaaactattcaacattgttcgctgacatgggctactacaaggggctttaaacacactgctgccccgtctcttagaatactctaattctttcactcaatacgccgtcacacttgaataataaaaccaaaccaaaacaaaatacaaacaagatgtctcctaccgctttggacgcacgtggtcataacgactctttctctttgcctgctcaagaccaaagcgaggttcaccccagcgcccggaggactcctgaaggtggtcttatcaaggtcgagagtgactccactgtctatgaagccgatggtatcaaagccaaattcaccgacagaggggcctcagtcatcagtaggttcatggcatatgatcttgcctactatcgctaatggctttgcagagggtcctgacggcaagctctctgtcaaaaagacggagaagaactttgagttctttaccaagtctaaggttggccgtgttgggtgagtccatgtcatcgtgtacccatgtccgacgtctgacaatctacaggcttatgctcgtcggtctaggcggtaacaacggtacaaccgtcttggcgactaatcttgccaacaagcacaacatctcttggcacaccaagaatggcatccagcagcccaactacattggttctgttgttcgagcttctaccgtccgccttggtaccgatcctgcaaccggaaaggatgtctttgtgcccatctctgacatgcttcccatggttcaccccaacgactttgtcattggtggctgggacatctcttcgctctccatggacaaggctatgctccgtgccaaggttctcgaatgggatttgcaaaggcagttgattcctttgatggaggatgtcaagccccttcccagtatttactgtgagcagctatcatcgtcattctacgattactgagctaatgtatgactagaccccgacttcattgcggccaatcaggctgacagggccgacaatcttatcccaggcggcgacaagaaggctcatctcgagcacattcgtgctgatatccgtcgcttcaaggccgataaccatcttgacagtgtcgtcgttctctggactgccaatactgagcgttatgccgacatcattccaggggtcaatgacactgccaacaaccttctcaaggccgttgagacctctcacgaggaagtctccccctctaccatttttgccatcgcttccattctcgaaggcgtgcctttcatcaacggctctccccagaacacgtttgttcccggttgtattgagcttgctgagaagcacaaggctttcattggcggtgatgatttcaagtcaggccagaccaaggtcaaatcagttcttgccgaattcctcgtcaatgccggtattaagcccttgtcgatctcttcttacaaccacttgggtaacaatgatggtaagaacttgagctctcagaggcagttcagatccaaggagatctccaagtcaagcgtcgtaggtctaattattggtatattgcggaacaatggctgacacatttcaggtcgatgatatggtcgctgccaaccacatcctctacaagactgccgaagacctcagcaaagccactggagaggtcgtcaaaaagggcgagcatcctgaccacatcgtcgttatcaagcacgtcccggctgttggtgactccagtgagttcattcttctttctttcccatgtcatttctgaccattgttgccagagcgcgctatcgacgagtactactccgagcttctcatgggtggccgcaacgtcatgaacattttcaacgagtgtgaagactctcttcttgccacacctcttatctttgaccttgcgatcctcgccgagcttctcactcgtgtgacttaccgtgagaacgctaccggcgagtggcagccgttgtacagtgttctctcgctcttgtcttacatgctcaaggcaccactcgtcaaacccggcgaggacgtcgtcaactctctcaacaggcagagaaacgctttggagcagttcctcaaggcttgtctcggtttggagcactcgaacgacttgttattgaatactagggtctggtagatataatgaggcaaaagactggagagcggataggaagaatgtcgtgtttatatttcgctcttttacttggataggaaaacttctactcgtaccacttggattgcatgaaagcgcgttttacgcacaaaatgaaggccgggctggaatatgatagttctagtgtttattattttgcaagttccgctttaaaaacgaagtccgtatggtcttgacttcagtgaaatgtcaaactgtgccacacgcgtgtaacgactcgaaacaccggcgcgtatcttctctcctgacaggagtctgccagaataggtgaagaaccatggccaaaaatgagatgtagggtgcaaggagaagcatagctgctaaccatatttcgaatacagcaaagaaagacgcttgccagaggaaggaaaggcccagtcaactgagagacgtcaacatggccgacgacgcgcctactactaccattcccgtcgtcttgggcctaattgggtggtgggtggtagatatcccaattgtacacacaggcacatgacatggcctttgcaacacacaaacgccgccggtactatcatctcttgatgttgcgtctcgaagctcgaaggactttgtatatgcacatatgcaatccaaaacatggtccaacatgaaggttagaagggttctaggaacgccagggagcctgggcccattgaagagtatggaccgatagtttcaaggcgtgaagaagaatcacttctttgctcgccattcaagaggctattacttccaacaaacagggtgatgaaaaaacctgtcatctttctggcctatctgccatatggacgatacaaataaaggggaagcctgctattatcgatacgtaactctttgcggctcacggtactttatgcagaactagaaaccagagatgtttattgtttgttgatgaagactttgatggatggagccagcattggcccacctaagttatttgtttgctggtacgttgaacgattcttctact

SEQ ID NO: 217 - DNA, 3845 bp, Cryptococcus neoformans
gttgctaatcgccatcttgcagatcaaacccttcgcccgctcgacataccccttggaaaaaataccgtcacctcatcgaacacatgatctggaccgacgtgattgcctccgtctcccaaaacaaagcctcgcgtctacttcctacttatcgacgtattctcatccatttcccggcagatactcctgagactgcagagtcaatgattctgatggacaaagtcatgggatgcgatagcacaacggtgagtccatcacttgtcctatctgaccgtttacgaaagctgatgcaggatgggcagttactggcgtatgctgaagttgttgcgctttccgaatggcgtgaaagggttgaaagaatgggttcattgtgtggacatcttggctaaatgagattagaaggaacaagccagttaaaatcaactcactgcagcctcgcaaattgctctcttcgtctcccgatcagataaaatgcagggacaccaacaccaccatccaaaacaattgcatggagctcgaggttgtcgtctttagtaccgactatttctatcagctcaaaagaagcaaagcaacaactgaactcacaagagcatccagcgaatatgcaaagcggccgaataccggacggacgaaaaaaatggaacgttagtcacttcacccagcaggtgtaggttccccccagcctccaccgtttgtctcccctttgctttcttcatcctttttctccgtccccgtatcatcttcccatcttctctttcgttctccctttgttccttctttttcacaaataacaatggctactctcgaacccaagcaggacccccaggcctccgccaggcagaggggccactcagcaatggtaagcacagtaggcacgttccgacaaagctgttgctgatcaagacatccacgtctttttccttcgttctctacaacacttgtaccccattcttgccttcaacaggactttaaatctgccaccactggtgtcgctgccaagaccatgcgaaacgagctcaacagaatggtcgcaaacgagcaagaccctgctaagaagaaagtgagttgttgggtcctttgttgagcacgttttcgtgcgcttttcttaggataataaacagtctcttgttaaaagaaattcgtgtaaagttgctgactatgggcttgtaaagatgtttgaagctgagatgcagtccttcttcatcctcttcaatcgtttcctcactgagcgcgctaagggcgaaaagctgtaggtgcactgcacattatttgaatcaatgaattgaccacattacatagcgactgggacaagatcaaccctcccaagcctgagcaggtccgcccttacgaagtccttcccaatgttgacccttcaatcctcaacaagcttgctgttctcaagctcaacggtggtctcggcactactatgggctgtgtcggccccaagtcaattattgaagtcagggataacatgactttcctcgacctttctgttcgacaaattgaggtaagcaaagcctcttgtgtttcaaggatgctgctaatagggagcaattgtcgcacagcacttgaacgaaaagtacaatgtgaatgtgcccttcatcctcatgaactctttcaacaccgatgaggacacagctaggatcatccaaaagtaccagaaccacaacatcaatatcctcactttcaaccaatctcgatacccccgtgttgacaaggaatctttgctcccttgtcctcgagaatcttcaagtgataagagcaactggtaccctcccggacacggtgacatctttgatgctttgacgtaagttctccactgctgacttgtatcgagtataattgacacctcacgcctccctcagcaactcaggccttcttgacaagctcatcgctgcaggcaaggagtacatcttcatctccaacgtcgacaatcttggtgctgtcgtcgatctcaacatcttccagaccatgattgacgctcaggccgagtatgtcatggaagtcactgacaagaccaaggccgacgtcaaaggtggtaccatcattgactacgatggcaagcctaggttgctcgaggttgctcaagttcccaaggatcaccttgatgaattctgcagcactcgaaaattcaagatttgtaggtgtacattctatgaaacgaagtgaaagctgattcagaacagtcaacaccaacaacatttggtgtaacttgcgagccatcaagaggatcatggacgaggatgcgctcaacctggaaatcattgtcaacaacaaggttaccgacgatggtctagccgttatccaactcgaaactgccatcggtgctgctatcaaggtgattggctacattgatgagaaaatcccaacattttgctgacctcatacagcacttcgactctgccatcggcatcaacgttcctcgatcacgatttttgcctgtaaagtcttgctcgtaagtgctcatcattgggcatagagtttggagctaattgagatacagtgatcttcttctcatcaagtccaagctctacaatcttgagcacggtgttttgaccatggacaggtcccgagaatttggaggcacccctgttgtcaagcttggtggcgagttcaagaaggttgccaactttgagaagcgattcaagtctatccccaacatcaccgagctcgaccatcttactgtttctggcgatgtctggttcggtaagagcgtgaggcttgctggtacttgtatcattgtcgccactgagggcaacaagatcatgatccccgacggtaccaacctcgagaacaagttgattactggtaacctttcaatcattgaccattaagcatgaggatgtaggtttgagaggttgtggcggtgtctaatgtttcctcttctgtccggagggtattgtgggaatggctgtataaataaaattcgtcatgcatcccaaagatatgactgattgatttgcacgtaagacgtggttgtatatacatattacgggcgcgaacgaatgctttgctgttgtatacgtaagctgctgggacgacctccactctgcttcgtacatagactcagctaatccattcgttttcgacattcgtcctgtctcaatctttcgtccaagtagccagcagcggatccacggtcagggaacgcccatgtcctatatcctcacgtctttcctcgcttctttcctgccttcacagatcaccaccgctatccttccttatctctccgccaatcttccggccatcttccccccagcacctaggggctcgccacgttacttgcataattaccgccttgcatttactggggtcatatgcatatggcagggctactccttcttgaaggatggtctgggcaatggcgatgattggtatcgcttgctgaatgtacagggaaatgctgatgaagatgcactcaaaagtgctttcaggactctgtatgtccagccttcattttcagatgtatgaacacctgcttatatagactgtgacccttaagtgccaggaagcaccatccagacagggctggcaaggacaacgacgatcacttcatcctagctcgcaaagcatatgaaacgctttctgacccggtgaagcgatacgcatatgataggtgattgacagttgtggaagaagagcgtgcgtgtagagctgatacccatcttcaataagatttggtcctaagatcttacaatggaaagccgcatcggtcagggagtacatcctttttggtctccagaactcaataggtttctacatcgtctctggtggcattatgttaatattggctcgcaagtttcccttcaactgctatttgaagaaatgtataacactaactcattcag

SEQ ID NO: 218 - DNA, 3156 bp, Cryptococcus neoformans
tcgacacggccaactggcaagtaacagccaccccttccaccctctccggtggctccaccgtcgccgtcgcctctgtcggcaccacctcccagtcccctcctcccggtatctccacctcttccccaacttcttcttcttctgcttccggctcttctggctcgtccgctggcagctcttccagctccaacacgggcagcgcgtcaaccggtgcaacagccgtcgattcctccggctcgtcctctgccgcaaccaaggcttccaccgtccacggacaaggaatcgtcgtcatgggtgttgcagctgtcggaatgctgtttggtgctgccgtcttgctttaaatttgaagaaaaagaaaagaccttttgacaagcccaagccaactacctccccgactttcctagtcgaatctatcccgcgttcagccaagcgtagcatttctctcgcatctaaaccccagaaactttggaaccatttaaaataaatcaatacttgatgtacatagctaatcacgtctttttcgagccccggatgatttctgaacgtgtcgtcttcttatgaatttctcatggactatttcttctttttaaaaccttgtggtggcacttgctctcgtcgtcctttttttccgcttcggttcgtttcgttgcattgatgtggtgcgcggtaagacgagatcgatcatccaaatttgacgttatacatcctgaatcgccttgatcttttctctgaaatcatttacgtggcttcctggttgccgcgatccgacattaacccctaatacatggtgaaatggtgatgatggatgataaaacccctgccatcttgtcttcacacgcacgcaccactttgaaaagcagtccgagatgacacaaaataagccgtgacgtggaacatccacctcccatcgtccgatcctgtttttgctttcgtccctttccgtcgttccaatcgagtcccccaaggcgaactcgatacaacacctctgcgtatcccaaaaagaatgacgacaggaacgacgacagtggtatcctcccctggcaaggtactcatcgcaggaggataccttgtcctcgacacacactactctggtctagtcatcggcacttctagcagattctactcttgtgtctcgagccgcgcaacgtcaagccgcgcaacgtccagcacgccaagcatcgatgccgataccaacaacgacattgacacagacacttgtcaaaataaagcgaccatctcggtacgcgccggccaattcccttccgacgcttcgacatgggtctactgcatctcaaaaccttctgcttctgcttctgcttccgccggtgaggacggtgaagacggtgaagaaggtggagatgggactttatatcttaaactagagcagaccaatgaagagcaggcgggtaaaaacaaattcatctttatcacgctttgcaaagtgctcgagtatgtttacgaatccatcttggcccacgttggggatgaggaaacagcattggacgagttgatgaagcggataaaaggtggtggggatggtggggacggtttggacgtggtcgtctttgcggacaatgacttttactctcaacgcgagcaggtgcgtatgatatattttcttgttaatgggataatacggcttcggacctgacagacctgtatcccatcagctcacatcgctatccctcccaacccggatatcatcccttccccatctcccgccattcacccctcttccccgcccaatccccgcaaccaacaaaaccggcctcggctcctctgccgcgctagtcacttccctcgtcggatctttgctctcccacctccatatcacccattcctctccagagggcagtatcgcagatgacgacaaggctgtcattcactctgtcgctcagctggcgcactgccaagcgcagggtaaagttggatcaggtttcgacgtttcctctgccgtctacggttcccacctctacacccgtttctccccatccatcctcacgccgctcatgtcccttgccccattctcccgacctcgaccctctcccggctcaacatcgcccctcctcctcgatgcactccacccgagcaaatgggataacaaatctatccctttccgactccccaaacatttgcgtctcttactcgccgacgtttcgtgcggtactgacacgccatcctttgtctcctccgtcctcaagtggagaaataacgatagggaaaaggccgatgaagtgtgggcgaggctggataatgcgaacagggccttgggtgaggtgctgaacgatatggttggcgcagaaaatgagattgattatgaaaaaaccatgatggccgcctcagagctcacatcggacgaggtacgtccgcaaatctcctctccctctctccctcacattcttccattccccgtcactgacttggaaccgtcctgttgtagcttttgaacctccctacaaccccgagcccttcacgcacactccatrtcctccaccgcctcgccctrtccctrtrgtccatccgcgctctgttgcgtgaaatgtccgacctctcgggcgtacccatcgaaccaaaagaacaaacgagattgctggatgcatgcggacaagtcaagggtgttgtaggcggtggcgttccaggtggtacgtcctaaatcccctctcgtcccaacccgactcccaaaactttattcccagggccctcagccccatcgtataacagcacacatgctcatgcttcgatttgtttctagcgggcggctacgatgccctttacctccttgccatcgaccacccaacccctatagcaggtgtcgataaactttgggcagagtgggcggagatggacgtctgtcccctgtccgcaaagcagagcgatggcgggataaggcaagaacaagttgcggaagtgaagggtttaaaggaagcgctggagagagcgaagagatgagccgtgaatcggaagatagcatataaggataaaggttaatgccaggctaatagattcgtattgtgtttataccctgcatgagatatgccgttttgacgacttacgtgacgtgagtcaaatgctctgtgcaaagtgaatgatgctatatatgttacaacagattgtgtgttttatgatgttatggtgatatgcgaaattttttgatacccc

SEQ ID NO: 219 - DNA, 3995 bp, Cryptococcus neoformans
cagcatcaccttcacctgccaaggttcttctcttcccatctccggcggctgtctacgttgactttgtcggtgtgcatggccgggtggtaaccggtcgggatggcagtatgtatagagtgtgggagacttatgtggtgatatgagaaggatttgtgttgaaatactgtcgtgggatggtgagatgtgaccgccctctttctgtagacatcatcggccatgaaatgacacgaaaatgatgtcagcgatcaatgcccaaaaaagcgcacaaaccagcacatgccagaatatcgcaacgcgttaatgaaggatgtactcacccatatagctttgataagccctaatatatcctgcaaatccgggtctatccacaacgaaaggcctactccggtgtctggatctacaaagattccactgccgtcaagcaggtacgtccggccgcctgatgggtagtatgtgggccatacatgttgtgtttcggagccggaagcgtgttgaatctgtccgggtggctgctgggaatgtgcagaaagcatttgcggagtgggctggggtgagtgacggctgatgatagagaaggaaggagaaaggaaggaaggaagtaaactgtgggatgatgtatctgttttttacttgcgcattagaaaaccacgaagatgaagggaaggaatggcttactcaaatgctctaatagtaattacggtattgtctggtaggtatgggcgccaggtgggtatgcagcggcgtattctggaaagagcgctggttggcggtgggaggaagaaaggaagggacagacaagcggcggcgagaatagggtgtatgcaggaacggcagtatgggatgggaaacagaaggcaggggtgagtcagctctgcgaagaccacgtggcgaaagaggaaggaagggaggaaggaaggaaggaaaccatgcacgcacgccgcaggaaggaaggaacggaacgttgacgctgcgttgagcgttgagtggcccattagtgctgatgtcaccactttctcaccacgtggcgggcatagcggcgttaatgccatcaccgcagagtaggtctgggagtgtggcacccggggagtcggcgacacccgcctccgcaacgacgatgacaagtcgcgaaccaacgtcgagcaccgagttcaagaacggttattgagcaatcctcgtcttctgtctgcatctacctttaatcttactgtaatacgatcaatatggcccctaaagcgtgagtcggggtgactctgaaacggcataatactgacattactggcagtgactggggagaaatgtaagctcgacagggagtaacattagagcgtcactaaccttggatagacgacaagaaggtcacagacgagaaggaggagaagattgtcggtgcgtatgggctctgtaggacgtggagattcaagtgctaataactgatcagctctcgatgagtccgatatccagatcctcaagacatatgtccgtctttccgcctctccatgaccagcgcttgcaactgacacatatcgtagggccaaggaccttattcccttcacctcaagaagattgagaaccaaatcaaggatatccagaagcgtgtgaacgagaagattggtgttcgcgagtccgatactgggttagcacctgccaacctttgggatatacccgcggataagcagaggagtggaaggccgttgcaggtcgctaggtgtcagactattatcaaggccggtatgtcttttgcagctttgtatctgcgaattctcaactgatttctttgctgtagccaaccctccatcaggcgaccagcctttgaatcctcaagatggtgcgggtgccggtaatccggaaggagatcgatatgtcatctctatcaagcaggtggcaaagtttgtggtcggtttgggcgacgaggtgtcacctaccgatgtggaggagggtatgcgagtcgggcaagtctagggtgttcatcgtccaatcacagccgctgacaatccaaaacagagtggaccaagtaacctacaagattatgctccccttaccgcccaagatcgatccttcagtaaccatgatgcaggtcgaggaacgaccatcaattacttatgccgatgttggtggatgcaaggaacagattgaaaagttgcgagaggtcgtcgagttacccttattagaggtaagcgggaaattatttgtctcgggacgttgaaatttgcgctcatcggcactctttagcctgagcgatttgtcagcctcggtattgaaccccccaagggtgtccttctctatggtcctcccggtaccggtaaaacgctttgcgctcgagccgtcgccaaccgaaccgactctacctttatacgtgtcatcggttccgaacttgtgcaaaagtacattggtgaaggtgcccggatggtgcgagaactgtttgagatggcccgatcgaagaaggcgtktmtcatcttctttgatgaagtcgacgcaattggtggtgcgagatttgatgatggtgctggtggagacaatgaggtgcagcgaaccatgttggagctgattaaccaactggatggtttcgatccgagaggtaacatcaaggtcatcatggccactaacaggtacgtcttggtccatgtccccatcatacacgccccccagctgacatccttccagacccgacacccttgaccctgctcttctccgtccgggccgtctggaccgaaaagtcgaattctccctccctgacaatgaaggtcgaacacacattctcaaaatccacggtaaatcaatgtctgtcgagcgcgatatccgatacgacctcattgcccgtctatgccccaatgcgaccggtgctgaactcaaggctgtggccacagaagccggcatgttcgctatcagggcgagaagaaaggtggcgacagagagagactttttggatgctgttgagaaggttatcaggcagggcagcaagttctccagtacagcgttgtatgcgcagtataactagggtgttggcgagcaaggagttgtaagattgcttagaggtccatcatgcattgacgaaatcaatggtatcatcatcgttttgacatgcgatatcttccccattacattctctataccgaacgtttgcttgtgcgaaggaaatggaagaatcatgttgctcaactggcgaactgggtggtgacgacatcttcatgttacgtaataatccaggttatgcacttcatcccgatgcgtttaatccatctccttgtttctatatctgaacacatttctgtcttcttcacgtctgtttttttttccattttcaccaacatgtccagatcagttttcagcactctcagacctgtcattgggcagaagaccaccctcgccccctttgccctttctcttcgacacgcttcttcctcctcttctcctttttcaactcccaccgaacccacctcattccacacccagccatctcactccacacctaccggccctcttcctctgacatggcccagctacctctctctccgtcgccagcgccgactttggtctactctcacctctgtgcccacgacatttttgggattgttccttggtggagggtactttgccagtcttgaagctgaccccagtcagttgatctttggtgtggagcctatgtaagttgtggtgaaacaagggttgagatacgtgacaaagcgctgactggatgatcaggtttgtttacggaggtgcgacgtaagttgccgagattgactctcctaagatgtccgagcatgttgtgctaaccgtattcttgcgatcgctgtcaatcagtttgggctgcatgggtgagctcttttcttttccttttttttattgacttgtcgcataccgcgcccagtcgctgacatgtataccgcagctcttggttacctcattggtcccagcgtaggcgccaccctcttctcccttactcatccttccatcgcccgtggcaaccccgctcccctggaagtgatggaccgcgagtt

SEQ ID NO: 220 - DNA, 3792 bp, Cryptococcus neoformans
actgtttctttgtattatcgaataaatagcatgtgcctatgtataagaagcaaccattatggttcactgtcaaggttgcaaggcttgactaatggccctgatataatccacaatatgcagcaatcaaaaaagcgaaacaccagattttagacttgccatagatggccatggattgattgtaaggccgcataattagttgacctctgtgcttgctttgatgtgttgttgctcaggtttcattcaatttctattttgtcactgcggaataaccgattgtaggcccattttatgcatccatatctgtatgcttttcaatgtcactacctaaactagatttatatgcatgaaactccattctgtcgtgcatgcagataaagtgttctttcgtcgtttgccgctgtattcattcgtcttttattattgtatgaataaatttcccacggtatttatcgagaatttagttttgagagcaagagtcgagttcaccacaaaaacaacaaaattacctctttcatttaacaacttcctcgtttactcccataatctacatcagatcctctcgaggacgtcccaccattacaaccctacgttcacttcttccaaagtcactcacgcgcattgtcaggcgcactcccatccagcttatcgctcgccaatactcagccccagcctctaaactcaccctatcgcctctaaggaattacctcaaaatggcttctctccaagcttcggatatcccccaaaagtactctctccccactatacctgagattcagggtgtggaccccaccaggagcgtagtcgaggcattcaagattgccgcggctaagcttgtggcggatgcctgggaggaggatgttgcgaagatttaccctgctgttgagatgggcaagaagggtgccgacctttccgttgctgtggttaggttcaaaaggggaaagcccgccgatttggaagtttggacaaagaaggtcattgacagtgtaggtaaagagctgtcatgagtacaaaggagagtactgatatgggccgagtagttcaaggcagatgtctttttctctggcctgaagtctcctgacaacaaattcctccattttaccttcaagtgagcatcgactttcgtgcaaggtataaaatctgatgtcggtcatagcaaagaatcatttgcctaccatctccttcgtcaaatcaacctcactgcggccgcgtctgtcgctgacccctctaatcacactctcgcctacggtaccaccactgaaggcgccggcaagcatctcgttgtcgacttctcctctcccaacattgccaaaccattccacgctggtcacttgcgaagtactattattggtgccgttatttgcaacctccacgaggctaacggctggaaggttacaaggttgaattacctcggtgactggggaactcagtacggtctcttatccgttggttttgacaaatacggaaacgaggaggagttagtaaaggaccctatccaccacttgttccaggtctacgtcaagatcaacaacgcgagggatgaacagaagaagaagtttgaggcaggcgagactattccagatgaggagaacatccacttgttggctaagaaggtcttcaaggacatggaggacggtaggtgtctatcgatgtctatctgcgaaaattatgtacattatcttacatgtcttcaggcgagcccaaggcaattgcccagtgggcccgattccgagatctctctatcgagaagctcaagggcacctacaagaagctcaacgttcattttgatgtctactggggtgaatcccaagtttctgaggaatccatggagcgggctgtcaggatcgttcaggagaagaacttgacttgtgaggaccgaggagctttgttggtcgatttgaccaagttcaagatggacaaagccatcgtcaggaagggtgatggtacttctatctaccttacccgagatcttggtggtgcctacgacaagtaccagaagtacaaattcgacaagcacatctacgtcgtccaggccgctcagaccttacacttcaaccagcttttcaagactcttgaactcatgggcgaaccttacgctgacaaacttgagcacgttactttcggtcttgtcaagggtatgtctaccaggaagggcaccgttgtcttcttggaagacatcatcgccgaggctaccgatgtcatgcacgagcagatgaagagcaacgaggccaagtacgctcaagtcgaggaccccgagggcactagtgccatcattggtaccactgccgtcaagatccaagacatggctggtaggaggtaagctttccaaccgaagcgcgtattgaattgtcagctaacctgcttgtaggattaacgattatgactttgacatcaagcgatgtacctcttttgaaggcgatttcggacccttcatccaatactctcacgttcgtctttgttccgttcagcgaaagaaccccaatgttctcgttccgcaatctatcaatgaaattgatctttccatcctcaatgagcccaaggtcaacgacatcatcatgcatctcgccctttatcccacccacgtccgaaacgctttcctccaaagtgaacctagccaacttgttacgtggtgtttcaagttgggtcacttggtcggtgctgcttgggagactgtcaaagtcactggtcaggaggaagaaattgccaaggcgaggttattcttctacgtcactaccagggaggttttggcgagcgcgatgaggatgttgagtttgactccaatcgagaggatgtaaatggtggtcaaggtttagaagtggtattagtagatgcatattttattactgggatatctagctatttcatctcctgtcccgcataaacatggtctgtctattgtcatttgcgccgcattcatcaatgcaaaaggcaacgaagaagaactgaacaacgaacggcggacaacaacttcataattttcgaaaatcacgtgatgtagtacattcctctctttcgagctttgcgccgcgctcctcgtccgtcgcgccctcccatgtttagatcttactcattcgattgagtgaaagcatttgaaagagcatacagtacaaatttcagcaatcatggctggtgggtacttttgtagcgggatttttggaaacacaaaggctgatcagtttatagactacagagctattttagacgaagaattcgaagtttgtctgggcaattgttttcaaccattgttctaacaaatgctgatatgtgttgtctcgccaggttttggactctatcttcccggaggagacagaaagtgcgttctatgacttctgctcaggagataactgactgtcgcatagaaatcaatgacacatctttgtcaatacgtatcgaacccgaagaacccaactctgcccatccctgtaaggctcccaaagtccttggacgatgttgactaacgacttcgactgctacagtgacacttaacctcatattcgaataccctgaaacatatcccgacgttattcctgaactcatcattgaagccatcgatgaagagtccggagacttgacggaagaggaaagggagaaggtgcttggccgagttgaattcgattgtacgttggctcccacaggcatgaagagttggcagagtactgatctgaaatgataggcagaggagtctttggggatggccatgagctttactatcgcttctgcggccagggaagcattgggcgtcgtaatttctgagagattgcggaaggagaaagaagaagacgaccgacgcacgag

SEQ ID NO: 221 - DNA, 3830 bp, Cryptococcus neoformans
gttggtgttgttctaattgtcaggaaatatgactcaccatcccgaagctctcccaggttcctccatcttctctagttgttccaagcccctcaatttgtttcttcgttgccggaaatattctctgaccttgttccagggtctgcccgtcctggccgccagcctttcaagctctttcctatccgggttgggattgcgggcatatgattcccgaagaatagcaatttggtcattggctgaaagaggagcggatggccgaggaaatgtatcaggcaggggtgaacgacgcagcgtcgatggaccagcaatggaagtcgcaacgccggtcggcgacagggcagtgaatggttgtcgagaaggcggaaataccggttgacgagggtggtgttgcgaatttgacatgtggggttcttcccgcatgtggatgtccctctcattaccgttcgaaccttgtcggcaggtctctgtttcttctgcttcttgtctgtccgcattagcctgtacatgagcaacagccgcttctattgcttgagctgccacctgttttgcaagctccgtctgcatatctgtctggccaggactgtgtgtatcccttgtatcccgctcgtggcgcatatctagatggtgatggatgtcatgtccgagcatgtcgccttgttgctgtcgctctggcgagggatattcgtcggcgatattggactaggtcatagttgtcagccctgcttgtcactatacagctgaaggcgtacgcacagcatcctccggacctcttggggtgtgcatgtcctcgttcttgccctccatgatggtgtatgcaggtgaatttgggccggaaattgttggatagagatgtggattggatatttacacccaaaacaaataaccggcgcagggaattgttgggcaaccaaatattgcactttctcccagaatttcagatttccaagtccgcaaagtcacaaactgaactcatactaaaaaaaaacatccacaaccttccaccatggcaactcaactccccccgccaaaacggcagaagtcggcctattcgcagtcccaaatgcccaaggtcgaagaaccggcgaaagacgtcccctcaattgtggtccagttcaaatcggcagaagatggatccagtcttggtcctgcgattaacttgcctgctgataccgccagggatgctttacagatgcttgtaaacaaacttaggggagaggtcagtgtccgattcattcgttgcacagccgctgactctaacacaggatgaggatcctctgccgtacgcttttcatctcgttcctaaagaaccttcaacttcaacgactccggcatctgctcgagtgcaaatcaataactctattcaatccgatgctcttgaagctaaaaaaagtactttctctccggaagacgtgtttgaactatggtgtgagccgcaagcggtttttagggttagaagtgttgggaggtgcagtgctacattgactggtgcgcgagctctctgcatctatatagtactgaaactgacagccactgcaggccattcatcgccaatcctttgctgtgctcagtctcctactggtcggtatgctgccacaggttcgggggacgccaactgtcgagtgtgggacatggagactgagacccccaagtggactctctcgggccacaagggttgggttctgtgtgtggaatgggattctcgggagaagatccttgctacaggtggacatgacggacaagtcaggctctggaatccagccaccggccaaccttatggtgcgccccttttgggccataccaaatgggttactgcgctggctttcgagcctctccatctcgtccctaagagctcatctgggccacgtattgcatctgcttcaaaagatggcactgttcgagtttggaatacgtctaccagaaagttggagtttgtacttaccggccatgccgctagtgtcaactgcttaagatggggaggtgaaaatgtcatatacacaggaagcagtgacagaactgtcaaggtttggagcggcgttgatgtgagccatcacttattgtagacataaagaaacaaggaactgacagaattacagggcaagcttattaggacactctcagaacatgcccattgggttaatactatggcactcagcacagattttgtcctgaggactggtccattcgatcacactggcaagacccctaccaatgacgaagaaggtaggcacaacctgatagtttcacttgcttcgtctgctgacatcttcgatagtcaagaaacgggcggaggagcggtacaaatccgttatcaccaaccagcccgagactctcattactggttctgacgaccacaccctttacctttggcctgaccaggcttcctcgtccttctcatccacttccacacccaagaaacctctcgctcggctgacaggtcatcaaaaacaagttaatcatgttgcattctctcctgacggccgaatgattgccagtgcaggttttgataatgccgtcaaactttgggaaggaaggacagggaagtttattgcaagtcttagaggacatgtggcagcggtatacagggttgcttggtcggcggactcgaggatgttggttagtgcaagcaaggacacaacgctcaaagtaagaaagtttaattcgtacgtagtaagaatctactaatccaccgtggtagttgtggaacctcaaaacttacaagatccgcgtcgaccttcccggccatactgacgaagtgtactgtgtggactttgttgcagacaaggtcgtcagtggtggcagagataagaccgtgaagatgttagttcgccagtagacgtcggattgcctttctcaatgctgacccttgttcgtagttggaggaattaaaactcgatgaagaacgacccacagatcgcagactgaaaccctggcatgctgtaacatacttattatatgtcatctgcatatgcatattttagattcaactgcccacccaaggcgaatatcgcctgcgcaatgccgcaaatgtagtgaacatgcgcccagaaacatcggattatacacacccataagaatcccatcactgcttagaccagatttccatcggtgctctcgaaggagctgacacaccatccatccagtttctagagaagttacgcttttagctccactgggtaaccactgcctttgaagtcagccaaaccaaaatttggttggcgatgtgctcgtaagacgtgaggcaatgtgataagaccttactatattttcggggatcaccattgccttgactcatagtataaggatttaaagtaaaaccaggacacatttcaaagattgtctcgcccacgttaagacgagaccggatgagaaagcctaaccttaatcaaataattgttattgccattctccttcagtgtgcgttgttcttgaaagactgactgaaattcttatcatagtgcgcatcgatgtcatccccaagaatgataatgatacgatgtgcaatgctccttccttccggctttcgtactaaagacggaggagttgccgatcttcttcctgagctccaccggtgtggtacttatttctctcaatcttttatcgtccagccgtagtgacttcagatccaattcggggaaaaacaactttggtggtacaccctttcagaatatggagctcgttcgatggtcagtacgatcgattattcatcagatcaaagagcgcgttcatttgaactgatcgttgktgtgagtttccgtctgtcggccgtccagaagcagaaatcatgggaaggtagattgcatggtcacgatgagtaatgctgttcgcactaatcc

SEQ ID NO: 222 - DNA, 3785 bp, Cryptococcus neoformans
caataatctcctcgacgcggttctttgagaagaatattcctgcgtaaggatctgacgccatttgttcgccatcagacatatcctctaagtattgatttgtcagatgaagcttgtgacgagccctttgttatcaattactaaccatcatagtcaaaattaccatcgttcatatcgtcataatcatcttcctcgtcctcatgtcccatctcgtcctcgtccatggcatcgtcttcattgttatcgatcaccacgggatccgccttctacaattaaggcagtaagcttcagctattgacgcttatatgagatagatacggacaacttggacggagccgcttccttccgttccatcttccccttcatcatccgatggtatgtcatcaaattctccagcaaatactcgttcctacaagatgaatttcagaatgttctaaaagtacggaattgacatgtgaatgaccaccgtgacttacagcagcagacatggcgtcacccttagacctcttcagagcagctcttgctcttccgaccggaatgcccatatcgatcagctgtgataacgccggatctcccattgtgttgcgtatctctgcaagccgctgccaaacaatggactttattgacaaacctccctgaacgggcgagggtacgggaaaggaaggtaaagtagtatgaagaaagcctaggcgggatagatgagtgtctgaaggagaacactcacacctctgttcgtctcttgattaacgcgtgaaagtgggtgtaatgtgaggcacgcggagagtggaggtggaggttcagacgttaggcatgactcacatcgagaatagggtcctgccgtctaaatacgtaatcagtattatgctcattgaatggtcggtggaggtggaggcggacgagtcgagatggagatgttcttcgttcttggtgtcgacgttcgctacaaatctccacttcttggcaactcttgcatcggcaatacatatctattcccaattttaacatgattcctcggtcagcgcgtctaaggcttccatcgtcttccctctccgcccatgccagacggcggctctacacccccgtccgtccccctctcaaactcgcaattattggcgctggcccctcaggtttctataccgcctctcgtatcctctctttgattccccctacatccccagaaggtcaaaaacttgaggttcatatgtatgaaaggcttccgacgccttatgggctggtaagatatggtgtcgctccagatcatccagaggtcaaggtatgtctcttcaggctttgaacgaaatcgaagtgaagtgtcgtactaatgaaagagatagaattgccaacacaaattcgatgagctggcccatgattctagattcaaatattttggaaacaccctcgttacatctcatccttcttcgactttttcaccttcgccaaccgaaaaagcaccatcatacacttaccctcatgccctccgcttgtcatttagcgacatcatgccgtattattctaccctcattctgacctacggtgcctcactttcaaatcctctcaatgctgtcccggggagtagctccaacagcgacccattgacaggtgtttacccagccttggccctcgtaagctggtacaactcccatccagcttacgctgacttaccggtcaacttggaaaaagtcaagcaagtcagtgttgtcgggcaggggaacgttgcattggacgtagcgagaatgttgctcaagcctgtatcttctttggcagagactgatttgtctgaagaggtactcgacgttctttcggaatctagtgtcgagaaagtgcgggtggtggggaggcgaggtccaggccaagtagctttcacaacgaaagagtttagggaaatgctctctatccccgatgttggatacgcaggtatcgaccctgctttaatggaatacgcaaaggagaatattgaaaagggtaacggagagagaatgaagaagaggttattacagttgatggacaagacgaagcaacaagatggtagaaagatatttgagctcgatttcctcaagggtcctaaatctttcctcccctctacagagaacgcaagtcaagtaggcgaggtggaatggaatcttaaccaattagaaatgagacccgcaaccgagtcccagccagcgagtatagtcgcaaaatcaacaggcgagactatcaggaccccagcagacatggtggtcgagtctgtagggtacagatccgagcctcttactggacctggccatgagtgggatctaccgtttgacattgctcggggtagagtgagcaatcttaatgggcgtgtgatcgcagaagaaggtggtttcgtaagcctcatttctcgccttccccgaacccctactaccgaaaaaaaaaagaaaaacaaaaaaaaaagagagactggatgctgatgagaacgaccgaaatctaggtacctggagtatacgctgctggctgggccgcccgcggtcctgtcggtgtcatcgccaccactatgaacgatgcctacgctctcgcttccactatccttgacgatatatacgcacccaccacatcttcccccgctgcttgcatgctcaactctcggccttatgctggtatccccgaaaaagtccagaacgcggccatggaaggaaagattgtggttgatttggaaggatgggcgaagattgataaggctgaggttgagagggccaagcggatggggagtgggaaggaaagagaaaagtttaggagggttgaagatatgttggcggttttgcagtagatttgcctaaattgagcataatagatgcagcaaactcatcattcaaatatgtcaagtgttcatgctcatgtactcataatcgtggggataacaacacgtctggaaaatatgtttaaaaaattgactgtgaaagcggtaaatggaaagtttcccatttacggaaaaaggtattgaatactttgaaaatgtccattactttgcggtttcctggaaaaaggaatgcgcgcaatcgtcatatgctcgtcaaagaaagaagggaaagaaaaagcaaagcgtcctcaaagctmcccgcaacatttttagcgatactttgacacttcaggcgcatccgcatacctcccattctgcatcaagaaaacctcactgtcgtgacccacccgatctgaatcatggctccaccccgatgtgctatcacgtcgaaggtttggaggaagagggacagattgatagtcggtgcccgacgtccaggcagtatcaccgtagagagaagctcgagctgcaccggcggtggtgtttggcgggagtgaaaggagggattgtttggcgtgggacatggacatgatggattgtcgataggcgatttgttcattgtagtattgctcgagcatgacctgcttttcgtttctccatcgacggtgcataaaccagagaccggtcataacggcgacaatcactaaaagaaaagaaaaaaaaaagtcagtgatagttcactttgactcaatgggatttggcatttacagatgacgatacccaaaccgacaaggacgtattgccaagcagggggatggacgacgtcgtttgcggcttttccacactttccattatcctcacagttgtacgacaggcatctttttcacattatcagcggggcagctcgtggtgtcagtagcagggatgacttactccttgttaccgctacaggtagctccaaaagccttggatttgtagcagaccaattcagtagcatcacaataatgtccattcgcacagctatatgtaa

SEQ ID NO: 223 - DNA, 3862 bp, Cryptococcus neoformans
cgtccgatgctccttcatctccttcccctttatccacagatgccttgattccatttgctgctgtacttgtccgtgccttctttgcggcttgcttggatgattcgggtttgggagttatagatgcctgcgaagcagtatatgcttcttgacgtcctcgctttctgggcgctgcggccgtcttatcttgtgattcccaatacgcagcgacagcttcttctgcactcgcacttctcaaatcaacgatacgcttggtgtgagaattcaaagtagacatacacattctcggtggggttcccaagtgtcgtactctggggcatatcctttccaacgaacaaggactatacttcaagatcagttttacatatcaacaactatgaatggtgctcacactcaatgtttttctgtcatcaacagaacaataagattcatggtaagcttttcatgcatgtaggcgcaatcgaggacgcaataattgggcgttactcacccccttccctcgatgcttgatgaccttttccacttcatattcatcctccacgccagactcctctgactccgratccttcttctgggatagttcttccttctttaccactggcatggcgggcgtctgtgtgatctcttctcgatgctctactgttaccagggctgctgttcgcgcgacttgtctttcccctcggctgggtcatgttgaaacgcgctcaaatatcttccacgtcattttatcgtcttttatcccaccattctccaccgcgcgctcgatgacacgaaagatcccagcgattctatacacttccaatcatccataagtccttctttcgcctctgtacagtcacacaaaatggcttcagcagcagtagctccttcaggccctggagcctcaatctccgacagctctttcaccgataaggttcgtctagacttcggtgtgattggtcgtaagccgctttgtgctgacagatgagtgtaggggagacctactgaggtcaggttgtccaacatgaacgcggcgaagggtatcctcggattatttgacggccgtgaagtcatgctaactgggatctatagccgttgcggacgccgtgcgaactagtttgggacccaagggaatggacaagatggtaaggagtttgaaaatgcggctcgaaacatcatcgcttatactctatgctttggtcagatccaaaccagtaatggagaagtcgtcatcaccaacgacggcgctaccatcctcaagcacatggcggtactccaccctgctgcacgaatggtatgtgccgaatcagattcagtcttcctgtactaacagtcaattatttcagcttgttgagctctcacaagctcaggatatcgaggccggagatggtaccaccagtgttgtcgttcttgccggaagtctgctatccgccgccgaacagttacttgctcaaggtatccatcccacaacggtagcccagtctttccagaacgccgcttccaaggctgtcgagttcctcgagggtataagcatgcctgttgatctgaacgaccgagagagcttgttgcgtgctgcccgaacaagtctgaattccaaggttggttattatgtcttttgaaggtggatgttgtatacttaataaaaatttagatcgtttcccaatactcctcaacccttgcacccatcgccgtatccgccgtcacccgactcgtcacctccgcctcttccaatgtcgacttgagagatatcagaatagtgaagaaagtcggcgggacgattgaagacactgagctggttgagggtttggcgctgaaccaaatcgcgatgactaacgccggaggacctacaaggatggagaaggctaagattggtttgattcaattccagcttagtagtcctaagcccgacgtatgtggattcgctccgtagttcattgaatcagaaactacgctaacttttctgcagatggacaatcagatcgtagttaacgactaccgtcagatggacaagatcttgaaggaagagcgacaatatctcctcaacctctgcaagcgtatcaagaagactggctgtaacgttctcctcattcaaaaatctatcctccgtgacgccgtcaccgatctttctcttcacttccttgccaagctcaagatcctcgtcatcaaggatatcgagagagacgaaatcgactttattgccaagtccaccggtgccaagcccgtggccgacattgaggcctttaccgaggacaagctcggttctgcagagttggtggaggaaactaaccagtccggcgccaaggtcgttaaggtcactggtgttaagaacgcgggtaagaccgtgagtgttgtttgcacgggtgcgaatgagcttgtgcttgaggagagtgaaaggagtttgcacgatgctttgtgtgttgtaagatgtcttgtgaagaagcggtaagtcgttcgttgtttcagctgttcaagcgttcgctgatctgtcctagtgcgttgattgccggcggtggtgctcctgaaatccatgtctctcgtcttctgacagattattcccacactctcaagggtaaagaggcttattgcttccaagcattcgccgaagctctcgaagtcatccctaccacccttgctgaaaacgccggtcttaaccccattgccatcgtcacggagctgagaaacaagcacgctcttggtgaccggaatgcaggtattaatgtgaagaagggaattatcagtaacattttggaggagaacgtggttcaacctttgctggtgtctacgagtgctttggagttggcgactgagacggtggcgttgattttgaggattgacgatattcaggtgcgtattttactccttggcagcccgccattgctgacatagtacagttttcacgataattgtttcatactacccaacatgcattgacaattgtgatagatggtaattgtttttggttacactaacatgcattttaacaacgtcatcaaaaaaggctcagcacactcgatttttcaccggataacggtcaaaaaactctacgagctggtcgatagcctgaagacacacatcgatctgggcttccacggtgctacctccgctacatggaaattaacatttgtagctaattccagactttagaactcacatatgaggcgttccaatgaagttattgagctccagtaacccgctggcgacatcctatctaatgggctctactacaaagacgtcactcgccgctccccatactctcctaactcctgcatcatcattttgttcccttctcaactcgtccgccaaggcaacctcatccaccacagcgcctctcgacaagttgaccaagacactagagagggagcatggatgataaggaggaatgacgagtgtgagggagtgggccagagggatgggaggcagaccaccgcgtaggaggcgaggtgggtgagaaggtgcggatggtgcagtcaaacgcatgctgaacgcatccattagcaggggcatttggttttatggaggtggcttacatggaagatagcggcagctcgacgggcagtggcacttatgccaaccattcctactactttacctctcaacgttctaccgaggttgttaatagacaacatggtttctccagcacgaaggcgacggtcaagcttgggcactcgacgaaggagagcgagagtgagcgacaatgtaagctcagtaacgacctgggagttctcgcccggacagtctgccacaggatcatcagtaatcatttttgggatcaaaggatcgagcgaagaagattaactcatcagtgtgacgcccttctccttgcaaccctcaatatcaatactgtcatacccgacacctacaatggccaaacccattaacttccctg

SEQ ID NO: 224 - DNA, 3871 bp, Cryptococcus neoformans
tccgctacctgattcacgagtcgttggtgtttcagaagatgaagacgggtagagaagatcaaaatccgggcgttctaccgggaggtcaggtataggtctatctggcggtactcctctgcaaaagaagtgagtaatggtccattaatacggactaattatcacttgcccgttgtagaagagcttcaaagttagagtcgaaatgacacctttccagagggcccattcctttatgaatcagtcttgtacaagggcaccactcctcaagggcagcacttacccaagccccttgttctctccattccacatacggattccagtatctcccagcgaatttaaggcttgaatacctgaaccgacgaaaatcagtttccttccctttcaaagtcaactctaccataactcaccgctctttcaacgcatttcgctcaatctcggttgctggctgtgcatgatcaggtcctccgcccggcaatgtttctaatgtcttgatgagtttcttgtttcgttctcggatatgtgccctgcgaagggtatcggtgtacgctaatacagaatgttaaggaactcagtttttatcatgtattccaggaaaacataccataataccctagccaaattcctgtccaagccactggcaggattattgcagcacgcttgagaccgtgaagacctgtagcaagcatgatcgaaaatagtggggcgttctctagtgtcttctattgttgagctctatagactgcccatgacgggagcttccgatgggctggcggactaactgagtgctggctgagagaggtgtatcgagaaaagagagtcttaggtgaacaattggaagtgtcggccaaataggcgagcatgaggcagtcaccgacacgtggcaacttttgttatttatttcgacgtcggcggccaacttcttccgtctctctatagttccgcctgtccgctttggtctcgaatactgatcctcccccctcccccttcctgccaccgccatcctatgcacaggccagcccgcggcgccctccgcatctccacacgcctggccactcggcctcctcttcccgcccttatacactcccgcccgtactcactctccgccacagagcccccgccaaacctacagccacatcagtatccagccttcgaacgcctgtcaaccgcactctctctgaagcagccatgtttcggtgccagaggagacgaagtagagcttctgaccgggccagaagtcttctacagccggctcttggacatgatcaaaggggcgaagaggagaatattgatcagcagtctgtatatcggagccgaggagggggagctcgtgagtgctggatacaagccgtctttcgttggttgctgacattgcaatcaggttgaggccatacaagccgctctgacgaacaatccacagctgcgtgtagtctttattctcgattaccatcgcgcgactcgtctagctacttcgaccaacttacccccttctaccgcccatcttttattacctcttgtggaacgtttttctgaccgatgcgaagtgtggttgtttagaagtccaaagttgaaaggattaatggagaagatcgtacctgccagatatgacgagggatggggcacatggcatggcaagtggtatggtgcagacgatgaagtgattataagtgggtacgtatctcttcttgacatcagtagattcgcattgacatatgtttagagccaacctcggtcgctcgtattttacgaatagacaagatagatatatccatttccgatccaatcccagcctgttatcttatctctcatcattaactcgacttttcacacaatactcttatcttctgcatcattcaccaccacctcacatccccccctacaataccgtcccgctcccttcaccagagaatccggacaattcgaaactccctagctcttcagtttcaatccgcccgcgtgcctctctcatatggccctcttcttccatcaatccccgcaagttctcccttcacgctctagccacgttgtcagcctttcaaaactcttggcgtgcctccaattctgccaggtcgcgtcgagtagatgttgatacttggttttggcctgtccttcaagctggagtgttgggtatcaaagaagaggagagggccatggcagaagtttggaaggctgtaagggaaagtcacgagggagagcagaacgaatccagaaaggtagaagtagatttgacaagtggatattttggtctgtacaagaagtacaagcaattggtggtggaatcaccggcatccgttaagatcattgcagcgtcaccaaaggtagagcgatattatctgtcacaagtatgtctaagtgtgctgatgatatatacaaggcgaacggattttacggatccaaaggattctccaggctcatcccagaaggctacactttgctggaaaccaggtttcatcgagatactgtcagggctggtagaacttggaacgttgagaagggcaccggcgtgagattaaaagagtgggagagagaaggatggacatatcattcaaaaggtctgtagcagcattgtcgtaactttttttggtcacttcattgaccttgtattcagggctttgggtttcaccgcccgactcaaaaccattcctcacatttgtcggctcgtcgaatctttccacacgatcactcacactcgacactgagctgtccatggtgatgatgacttcttcccctactttgcggcgggctcttgataccgagctgaagcacttggacgagtatgcgacgcaggtaggggaagagacttggaagctggaggagcggcaggtcagttggttggcttggcttttggtggcacttggagtcgaggggatgttataaagctttttttttctttgctgcgaatgcaccaccctatttatctcttttttacgtctctttttaactcgacttcttgtttttcctgttcccctgttgtccactattctttttctcttttccatcgataatatcacgcacataaccaccgcgcggtcctccgatcaagagacttgcggtgccactcagtatcgatatgacggaggttgtcgggatatgacgtaatttgccatcgccccaagcagcgaaacgcccgtcaccaaggacgaacatggcaatcatttctgacgctcatatattcattttctttttgctcttcttcttatacatctatacttccatccgtccatacctcagatcagatataccaaaacaaccatacacacaatgtctgcctccggttacaccattcacgtcgcgggccttgctcctgaaaccactgaggacaagctccatgatttcttctctttctgtggtaaactcacaagcgtcaagaagagtggaagcgctgccgatatcacctttgagaagctcagcgctatgaggaccagcttgtgagtcgtgtcagttctcattgccaatcgggtgtgtgcacggtaataggtgaatgattgggatgcgatggtccttcgttcaagaggcgataagcgtgggaggctgtgaaagtccatgtcaacgttaaaaacctttttgaaagacggaatcgtgggaaccgtccgtctatcgtgttatgcattcggcttgtagtacgcggaaagatgatatgctgaccagacattgctctttgcgctaggatgctcaacggcggcactgtgagtccttatcttctcccgtccacgtgttacatgtacttatgctaaatgattttcttcagcttgatggcgctcatctcgaggtcacatctgtatcagacatcgagaaaaccccatccatccttcccgcttctgctacaggttcaacacctatcggtgccactgaaggcgacctcgcccaggaggacaag

SEQ ID NO: 225 - DNA, 4020 bp, Cryptococcus neoformans
tggatgtgcctatagctttgtgtacactcccctgacagccacatactgtgcagaggtgttggctaaccataccagagcaaagggaatgggagtggtgagtccaatacgaaaaagctgttcgaccatcagtgctaatgaatttactgcgacagcatgtgatcatgagcaattgtgccaatctgtacaacacttatgttacagctatcgctcttgaagcaattggatggaagtattacctggtctttgtggcgcttaacttagtatatggtaagttctaattaccgccgttccctgccatgcgtttgaaaagctgacatgcctttgaagcggccgtttggttcatcttgggtgtcgaaactcgtggtcgaacactcgaggaactcaattcggtctttgatgccaagtggcctccaaaagaggcgctgaaaaaggccactctggtgaaggcggagggtcgtctagaacagcttttgagtgggcaaaactgttcgtaggcagaatgtttgatcgtgtactggagaacatggcggtgtacaaagttgttttgctatagagctggcgggtcctcagggtactggcaattgtatacgaatcataataaaggggctactgtacgagtcttctgttagatgcaataatatgtgatgaacgaagaaaacaccgcaaaccgcaaaagtaattcggtttgagtcggatttgacagagaaagcggaagggctggttatccggcaaatccaaccggcaaatcaacagccggacgtccacgccaaaaggctggagacgcaatgaaaaacagatactttttatattaacggaacagcttcttttcaatcaaggagagttctttcagctcatcaggcaaacgataagacggttcgaaggcaattcacttatcgctagtcccgagggaaaggctattttgacacttgaataagaaggggaagagcaaataatctcaggcacaaatcacctcgtattctcgtctgtaacgtctgtcagcatgtctcggttcaagatttcaggtgcactgtgggacagtatccaccactactcgtctttcccacagactggaggtgcgtcctcatcccatttggccgtttgaagcggtatcatattgacaaatctccacagtttccctccaacaaatgattcatttcggccataaccccacacctggtacactcctcaaagcttctcagtttctttctgaagaactgcctatcagattatcacatagggtggtagaactcaacgctttaccagatggactcgccaagatgcctagtatcaacaaggtgaaggagtggtatgctcagagctttgaggtatgtccgagttaatccgaaggcatggcggaaggaactgtttagcgtggaaaacggtatgcttctaaatcaagatccccgaaattgtcgggcggtagatgaagtgactcgtagatggtcttgacgaaatctgggagacatgaggacacggggacagttgtcggcgtcagcgaatgatgtgcagatcggtggctgatgattctcatgtggagtaggagcttgtgacatttccaaaacctagattcaaaccagaacttgaaggtatacttaatgtcccaaattcagagtgagcccagcaatttccgcttcccacttatctccctgacagttctacctgaaacagccgaacaaaactagctttccccagctccactcctaacccttctctggacccacttatggacgaaggcccagtcggttccggtcttctggtcgagagacataaccagggaaacgggaacgggaatgggaatgggaatataagcgggaatggaaatggcaacggaaacggcaacgggcagaggttacggatacccatggaacgtcggtactattcaccgccacctgcaactctcgtctacccaccggaagtacatgagtacaacgaaaggtttactcatttacttgagaatatcaagaaaagacacgacccaactgtcactaccgttgctcaaggtgtattggagtggaagaggaagcgaaagaccgggaggataggagtaccgattcaggagtggttggataggttctacatgagccgaattggtattcgatttttgatagggcagcgtgagtctatgacaatgcctcgagaaaaacgtgatcgagttgaaaacattaaaggatgaagctgatcttggaacctatagacgttgcgctcaacactttacaacctcatcctgattatgtagggataatttgcactcgagccaacgtgcatgatatatgtcatgaagcaattggtaagtctaacccagtacattcgttattcatttaactcatcttgacatccactcagaaaacgcccgatatgtctgtgaagagcattacggcctcttcaaaggcccgcctatccagcttctttgccctaaagacctcacatttccatatgtgcccgggcacctctcccacatctgctttgaactcttgaaaaactcccttcgtgcggttgtagagcgttttggagtggagaacgaggaagctttccccccgatcaaggtagttgtagttgagggtagggaggatatcaccatcaagatttcggatgaaggtggggggattcccaggagtgcgattcccatgatctggacgtgagtcggaatctatttactgtccatgtggaggcaaagagtcaggtcgactgatctggagcaggtacctctatactacaatgagtgacgaaggtttagaagcgaccattgaacagtcagatttcaaagcccccatggctggtttcgggtacgttgccctttttgtgctcttgcccatcaacacaataactgacaatgactcctcggtagctacgggcttcccctcgcaaggctggtacatactttttccaagattactctcaaggctgatatgctaactaccgcacagtacgctagattctttggtggcgatctcagattgatctctatggacgggtacgggacggacgtgtatatttctctcaacaagttgtcctctaggtaagcatattccagcatcagctgtagctgaagaatgatgtctaatggttattcagttgtgaacctttgcaatagcatggaaattgaaacatagcatatgacatccactcacatcagcagcagatggcagtccgtgtatgaagaaggtacaaaatgtaacataatcacgatctgtagtcgtagggcctcgcaaattgcactttgtacggtacaatgcattggaaaaacgtcttgaaaacattacagtccgcatcacctccggccatacacccttgagcgccagataaaacgtggtctattcactctacttcttcttcttctctttctcctcttcttccgcgtccttcttcgccttggccacatcctctgccttgataccggctgcttcagctcgagcttcgttggccttttcagcaggagacttggcgtcttcgatatcttgttgagcgttttggatgcggttttcaactgagtaacgggatcattaataaggagaattaaaatcagagcgaacggcagggaacgtactaagatcatgcaaagccaacaccgtcctgatcatcgagctcaagaacactactaaactctgatcattcacgcccatcctgaatgccttacccagctccacatctcctccaagttgaggcaagagaccaattatctcctgcaactgatacaccacctggtggttaattggcatcttcccgctacgtaccgcttcgaggtactctccaatttcatgcagacgagcgtgcagaccacgaagtgattggagttgggacgcgacacgggtagaaagggattgcgtggtgagtaaagaagatgacggggcggatgacgaagaggagatgtctctcaaaagatgttccacaccaatctcttcggcttcttcggcttctatagaggttgagacatgggtaaatgttcgttgagtggcagtcccgtcatccttgatctcttcaactgcaaagtaggcgtcagtggggataccagtgtcacctcgg

SEQ ID NO: 226 - DNA, 3950 bp, Cryptococcus neoformans
ccctttcttgagtttcttgcagagctgagagatgcagactttgaaatggatgttcctttacgcgacgccgaagaatgggaggcaaagagggcatctatgttggtcagagggtcattgcgacttttcgcccgcgcatccttcctccgttctctgtctctcctcgcttcagcttcctctccaacctccttttcttcgtatcgcctcatgtcccgatccgtataccaaggatttgtctcccgctctggacgggataaatagactgtaaaagggtctttctcctgctcctttttctttttagctacctcagccaaagtgagttctggtttatggctcgattcctgtgacctgcgtaagctgtggttgatacatacccgaccatagaacgtactcctttttcaaattgtgcaaaaaaattgaaatggccaccttcttgtaagtccgcatggtcgatgacatctgatttttctctcctccgatcactctggctagggaaatcaaaatccaagcgttcccgtttcttcctttcccttttctcctcctttatcttcttttggcggtgtttttccaatagatccggggttgaatcgaccgcgtaactggaagatgttgatgggagatcttcttcctgttgatcatggactgacggtgaattggctcgacggcgaagcagagtgagtcggtgttcggcttcctgttaagtttgtgagctatattcacttgtagttggtttctgggtgactgtacctacattatcgacccttttttgttctttggctatttcctcttcctgtgcacgcgcttcgtcttgccttactcgttccttgttcttctcgagataggggtggtatgatttgtgtctagatgtgttagagacagaatctggtgttgagattgaacttactgtaggatttgcaggcgaggcataggtaaaaaatattccaatggacacagatggtggtaagtttaagtgtatgtcacagaagcagcgctactaaaataaatgactctggatgaagaacgaatagtcggtgaattggctcgagtaaacggagaagcgggggtggaggcagggggtgatgaaataggcatgggagaagtgaggtcccgcgccttaccgcctaaaagcatttacgcgtgcctagaggagtttacagagtcgcgtaggacgacgcgaggggcgtgcgcggtgctgttgaccgttggacactacactgtccttcgcagtgctctctttatctttctcctttgcttcctgctctcccctcctccaccttccaccctttgcatttgtgcaaacgactctaatcaccttcatcatgtcagatggtatcggtatcgcaaagtacgtcaatctctgctcaatctacgcccatcaacgcttcgcttcattactgacaacttcgcagtttgccaaatcaagtgagacgattcggccagagaaacttcaacccaaccagctaacaattaccacagaggcataagatcacaagccagagaggcgcgcatttcactatcatggttgttggtgagtgcacttccattcaacagttgcgaacaggaccgtgcacactcttccagtacagtggggcaaaagctgacttttctctagggcaatctggcttgggaaaaacgacgcttataaacaccctctttgcgactgaaatttgctcgccgaggaattatcgccaacggtgggtttcatttgaagtaaagttgaagtgatgttgaaaacactactgctaggttcgcaaaacagctggataaaaccacagaggttgaaattttaaaggctgaccttgaggaacgcggtttcaatattaaattaacagtcattgacactcccggatttggcgactatgtcaataatcgcgactcatggggccctattgttgactttattgacgaccagcacgaatcttatatgcgccaggagcaacagcctttcagaaaagagaagcaggacttgcggatccatgcgtgtctgtatttcatcaaaccgactggtaccacgtaagtggtttatcatcaaatatcagattcttttgagtctcataagatggcaggttgaaaccacttgatgtggagatcatgaagaagcttggtacacgagtaaacctgatcccagtcatcgccaaggcagatactatgtctccagaagatctccacaacttcaaaaccattgtaactcaagttttcccatctctgcatatattttcgctcatcttttcaggtccgtgaaacgatcattgcacaaaatatctctgtctacactccacctgtagacctcgacgacgaagctgcggctgagcatgcgcgagcaatgcaagctgttatgcctttctcaatcattggtagtactcaggatgtcactacgcctgacggaagggtggtcaagggtagagagtatttgtggggtgtagccgaaggtagatctgatctgcattgtcatcagacgtttggctgaccaatctacagttgagaatgaagaccactgcgactttaaaaagctccgatcccttcttatccgcacatatatgcttgacttgattacctccacggaagaaaagcactatgaagcctaccgcctcgcacaaatggaaactcgcaaatttggcgaaccaaaggttaaaaagttggataacccaaagtaccgcgaggaagaggaaacattgaggaagaggtttactgaacaggtcaagttggaggaggccagattcagacaatgggagcaacatgtaagagtgatttacggactatggcaaccgtgctcacgcgaacgtagcttattgccgagagagatcgtttgaacaaggatctcgagcaagcccacagcgctatcaaagctcttgaggtaggtgtaatttcgccctctctctgcggaaaaatggctgacatgttcaggctgaactggaccaggtggctgcctaccatcgtcaaggggggactgtaggtcgacgttgagccaacgctgggagaaggtcgtgtgtggaagttgtgtttattgcagagactttgaaacttcagcatgtcttgtctatgtttatgaattttatgcccctttctcttaaccccgccgagctggatgcccaatgcgcactgatgaactgtttttattttcgttattccccttcgaaaaagcaacaatgaaatccgtatctcgctatcagctagaatgtcccaacgatagaatctgtaaagggcaagatgtatacatgtctagctggatttacaagacaaagtgaccagatcattcgaagaagggggacattgatagcagtggacatatcatgggatataaatacgactgtaaccttcgaccctaaaaaatgcgtcatcagccatggccggatcaaaggagctccttcatacgtactttttgcgacamcaggggcacatgtgattctgcgctgggagtcttgcagccaaactttccctacagtcgttgcacacggccaaacatctggagaaggggtcattccatgatacaccagcggaagaaaagaaaaaaaaaagaagaagaagacgttcgcgaggagggatggatggtgggaaaggaggcttacctgcaaggccagagaatggtatctctcatactgaccatacaaacgacacaagtgcgctttgtttcttcgtcttcttcttcatagcctttcatagcttgtcgtctttcatgcataacgtcccgaaggcccaaaacattctcattatgcattgaaactagggatggtagtgctggagtgtgcaaagagtcggatgaatagagtgtcatgagcgatgtgtaacgttgccgggtaagaggagcagctgtgcgtgatgtaaggtgtgcaagtaagactggttgaaaatcgtcactcgactgtctgccgtcgctttcagtcgtctgtgagacgagatccccatacagcattcccctctgcttcatttcctcctcctctacgtccataccctcg

SEQ ID NO: 227 - DNA, 4039 bp, Cryptococcus neoformans
tccttggacgacaaggttggcaataggcgtggcagtcattggccagtatactctttaccatctgcttgagatgggtactagagaagtgatgaaagtattgtagcaacatctgaacgcctgcacctgtgaaacctcgtcaaatagcgcaaattatgaacagcttatcccacgcacgcacaacaactctttcagggaaggaaaagacaactgccttgctcctttccctgcctcgacgtgtacatcttttgttgctgcaatcacttgaattactgactgcttcggctgcccattcccatcttttggttcaaagcactccaaatttactcaagtcacactttatgctttggcacaacgctgatctcgcatctgccaaagcgtttctgcgtgctgagaagcgtatcggaccgggccgtcaacttgttttttttttgcttcgattcgtgtttggcttcctccgggaactgctgcggtcggcattgtccgactttctcagcatgctgacgcaagcagccacgagtgcattgtttgtgatgtcacgtgaccgggagagaagtttgcagattcggcaggattcgtgcccgccaaggtggtacgatgttctgaattccacctccgcctggcaaatcgtttgttttctttttcatctccttttcggtttttcccttcaactttccgagcgcgtgtactgaggtgcgtactgccgtctggaggcctgtggaagaccaaggtggtgccagaactgactttccattgcccacccagtgtcgaacagcccttctttgatttttagattccctttccctcggcccccggacgcaactttttgtttttcacgagacacgacttctttacacacctcgagacacggtctttacacaggttggcacagaatacactactgcccgtgagtcagcgcgccagagatacatgtatgcgagatggctggcttggtgcaattcgatatgggcgggataggggggactagcgtggtttctattatatgtagtgactccgtcccggacgccgagcgcgcgtactcaccgcaatattatagtcgtcccattggccaagccaaatcatgttatcgatattactcatacatatagctgacccactgttatagagccctctaattcaatcgatacataagtaactgaataaaatatggaatcccataccgttctccgccccacggccatccctgatcttgccgcgatcaagacttggggtcttgaaggactcaccaaggccaagttcagctttgacacgtgtgtataacattttacaattcactcgaaactcaaactgacatattaaacagcaaaaccaccactgccaccatccttacccttatcctctctcttcttgtcctcgaacagctcgtctacagggccaagaaagcacacttgcccggtgccaaatggaccattcccgtcattggcaagtttgccgactctttgaaccccaccttggccaactacaaggcccagtggaactctggacctttgagcgctgtttccgtgttcaacatgtgcgtttttagtatcaaacaattgcagagagatgagtactgattcgccaaacagtttcatcgtcatcggttcctccaacgaaatggccaggaagatcctcaactcccccaaccacgctgaaccctgtctcgtcgcttctgccaagaaggtcttgttgcctgagaactgggtctttttgcacggcaaagtccatgccgactacaggaaggcattgaacgttctcttcaccaagcaggctctcaggtaggtacatcgtcaagtcatagttgaacggctactgacagcgtcgtagtatctacctccccattcaggagaagatctaccgaagctatttcaacaagtggatgtctgatcccgcccctgctcagcagtacatgatgaagatgcgagacctcaacatggacacttctctttccgtgttcatcggcccttatctcactgaggcccagaagcaagagatcaacgacaagtactggcttatcaccatctctctcgagctcgtcaacttccccctcgctatccctggtaccaaagtttacaacgctatccaggctagaaagattgtcatgaagtatctctccgctgccagtgctgccagtaagatcaggatggaggacgacgacgccgagcccgagtgtcttttggaccactgggtgcgagccatgatccttgcccgtcgtgccaaggatgacggtgagcagaccagactcctttctcgagagtacagcgaccacgaaattgccatggttctcttgtcgttccttttcgcctctcaggacgccatgtcttccgctctcgtctacacattccagcttactgccgaccaccccgaagttcttgagaaggttagggaggagcagtacagggttaggggtaacgacctcgagaggcccttgactttggacatgcttgacgacatggtttacacccgagctactatcaaggaagttttgaggtttaggcctccctgtcatcatggtacgtttttgcaccattcaccgctaccgagacatctgactgatgtggatgtgtaggttccctacatgaccaccaagcccttccccgtctcccccgaatacaccgcgcccaagaactctatgatcatccctgccttttggaactctttacacgacgagacctgttaccctgagcccgatcgattccttcccgaacgatggctcccccaggccgacggttcagcccctatcgccgactccaagccccaaaactacctcgtctggggtagcggtccgcacaagtgtatcggtggccagtacgcttctatgcatttggcggccactttgggtacggcgagtgttttgatggattggaagcacgagaggaccgagttgagtgatgaagtacaggtcattgcggcgtacgttttcttctcaccattgttcccggagggatttcaaagctgaccttgttttgttttgtttttcatagtatcttccccaaggaccactgtctccttaaattcacccctcgagctcccccttcataagcttcttcaagctgtgtattatggcgataaaggaagtaatgaagtattctctaatgtttaaagataccccggtgtggatctttcagtaatattaatgttttcatcgtctggaaagttatcttgggcgtctgtatagctagatgtctctcttatgggaatcgaccccaagaacactgaaagaatatgcaaactctcgtcttgtctttgtaaaggaaaattggcgcatgatgaaaagaccatacgacatccagcacagtttcttcgcgtttttctgaagagtctctcgctcgatacgtttttttacaaacgggacaagtccattcgtcttctttcaccatcacttctccgagctggacagcgccatttatttccatgcagctctacttttcgatccagttgaatcaatctttctattgctttgtctaggcccactctcattgggatcatcttggagcgtaatattacatatcttacaaaacctttattatcatttctcccataccgttaactcccattctctcatgatatatgcttgtccatatcgtgaccttaaatacccaagaagttctaaagggattgtcctcttcatggtctcagaatgaagaccttgatcaaaccacttctagctgcattaggatcttgtatgccgcaaccgtggccgcctgtttcttctttgttcgtgtagcttcaccttgcctatactcattgattagcctacgcctctcttttggtcgagtgaactgaagctcaccactctttcccgtccctattacgtgcgattacaatcgccttccacatatcaactccccgtggctcatacgtatacacaggcatacccgcccctctggagatgaacagctcgttaagctttcctgacgcaccattcgccaagtcgtcgaggtcggtatccattaatccagccttgacagctgtttctgcttccaaccgttcttgttccttcttcatgtaacccaatacccattcagcgatcggttcaaag

SEQ ID NO: 228 - DNA, 4044 bp, Cryptococcus neoformans
gggttgcaatacctttaacttcgtattcatcgacatttttcccctcgaggagttgggtgttgagttcgaaacggtcgtcgaccacgagcttttcaaattgcatgtatcagcttatccgtgaatgccaggtgcaaaactgacctgggaagggtctggcttatccgatctaggatccttcctcttatgttctattcccatggaggaaaagaggtccacattcgaaacggaggtcctatcatcaggctgcccatctccgtacctgtccgctgtatcagcggcagacttgacagcgctatggggcacatcgtccctcggggtcgggacaatggcagaagacaccgatggctccagcatccacgaatcgcgctgccggccttctgagcctgttgctgtggagaggggaagagaaactttcggaccagaaggattcgacgttagagggagagagtcggcggtggggatgttcgcgacagcattggtaggatccaatgatttttctacccacatactagggtcatcgtccaacacctgaagagtatggtcatcatctgtcctcctctccttcttgagccgttttctctctctcctctgctcctcttcaatctggtctgcatcttgcttgtcccgatccctgtgagttcgatgtctatgaggcctgtcgtggcggtcatgccttgagccgtgtctgtgagtgtcccgatccgtgttggtgctgtctctccccatgtcgatgctgtattcatacagtcgaaagggatcccagcttcctttcacactcctcctgtcttccagggcacgctctaggccgatcaacagtgacgtctttttacgtaaacacaaaatttaattcttccccccctgagcacgcgcctctggtttgtccagcgggaactggccatacatccatacgcttctttcaccccaatttccttctcttttccttccttctttgcttccgtcctcgattatctatcaaacgactgcgccatcgtaccccacaatggagtccaggaacctcgaccacaggcgtaacaacttcaagggaaagacccagttctcagcacaagaggtgcggatgtctcggtggccaaaacacggccctaaattatggcagcgtgctaatatttcatacctttaaacagctccgtcgccgaagggaggaacagcaggttgaaatccgtcgtcaaaaggttagccttcaaatcatctcgccacagtctacattgcactttttccatgcccaatcaaagctgtcaagcagttgggtcctgcatcagagtggccagcacggaatattttgtatgctgaccagcgttttgtgctactgtagcgagaagaaaaccttgccaagcgacgaaaccttcaatctgtcattaccgacgaaggcatcgaatccgacgatgaggcttccatggattctacagcccttggtgatgtccttcctggaatgcttcaagctgtttacagcgaggatgccaatgcccagctggatgctaccatgaagttcagaaagtgagtcggtgtataaggggctttgccttctcaggtctgcttactacatatattagacttctttcaaaggaaaaaaatccaccgattgacaaagtcattcaatgcggcgtcgtgccccgattcgtcgagtttttatccagcactaactcaatgctccaatttgaggctgcttgggctttgaccagtgagattacattgctagaaatacactccgctcggagctgatagctttatcttgaaagacatcgcctctggaacttctgaacacactcaagtagttattggtgcaggcgctgtaccgcacttcatcgccctcctttcttccagtgttctcgatgtgagggagcaagcgtaagtgatcccacgggaattgtgaatacagtctaatctcttcacaagggtttgggctcttggtaacattgcgggtgactctcctaaatgtcgagattacgttcttggggagggtgctcttcagcctttgcttggcctcctcaacgagaaccacaagctgtcgatgattaggaacgccacttggactctgagtaatttctgtcgaggcaagaatccccagcccgaatgggagctcgtatgtcgtctgcctgatcctttttagaatacctgctaatgatctatgcagatttcgcctgccctcactgttcttaccaagctcatctactctctcgatgatgaggttctaattgatgcttgttgggccatttcgtatctttcagacggctccaacgataagatacaggctgttatcgaaagcggcgtttgcaggcgattagtggacctcctcatgtgagtatttatgttttgtaattggatattgcgactaactagttggatctaggcatccttctaccgcggtccaaactcctgctctccgatctgtcggcaacattgtcactggtgacgacctccaaactcaggtcgtcatctcttccggtgcgcttcccgctcttttgagcttgttatcttctcccaaagaaggcatcaggaaagaggcttgttggacaatctccaacatcaccgcgggttctcccatgcagatccaagccatcatcgatgcgtgagtggcagtaatacccatgtcatctcacaataatggttcctgaccacttgatgccagtaacattgtccctcccctcatcaacatcctcgccaacgctgatttcaaaaccaagaaggaagcatgttgggccatctccaatgccacttctggtggtctccaggaacctaaccaaatccgatacctcgtctctcagggttgcatcaagcccatgtgtgaccttcttacttctatggacaacaaaataattcaagttgcccttgacggtcttgagaacatcctcaaggttggagaggttgataaggatgcggcgggtcccggtggcgtgaacaagtatgcgcagtacattgaagaggctggcggtatggttgctattcacaacttgcaacatcatgagaacttggaaatctacaaaaaatgcttctacatcatggacagtacgtttaaacatcagtcttaagatatcatctaactgggctgacgattgtttatagagttcttccccgatgaggaagaggaggaagctgatgccgccgcccctgccgtcgacgcttctggccagtacgctttccaatccgatggtatgttgccttaatctacgtttgacgtttgaagtcttccttttttgttgtatgcgcttaccctgtctcttgcagttgctgctccccagggtggcttcaacttcggcggccagtagagccaagccccttcaccttctctcgagcccgaggatttacacccgcactatattcctcactttttcggctcttgaaacatgtacaccgacttcaagtttcctattcatttttttacattcactgctaccgatgggcctcttcttcgtgaccatctttttatcatcttagcgagcttcacgtaatttccgcggattgtgagattcaaggaacgtttgccaccctttttgcgggttcctcccagcataccatcattatcttctttttgccaaacattcgtaagcgaggggcaactgctttattcagacccttcatttatgcgcttcctccattccccgttcacccatgacagtcacatacaagaaccaagttttcattagcatcgtttctatctcgtactttcattggctatggttttcgttagactagttaagacgtgcaagcagccttcttacaattgtctttttcacgctttttttttcaaaaaaatttataaacaaaaacctctttcgtatactaatcatggtacgaaattggcggatcttttatttatgcttctgcgatcgaagaagacgtgagtcttcgtggggcttattttcctgggaaatattttacagtgtgtacctccttatgtagtagggctatggggtggcaaggaaagagagaagggagggggcaattgatattcaagcttcgtttgataggcgagggaatgaacagagcacttgatatctttcacttttcgtacgtatttgtttcggaata

SEQ ID NO: 229 - DNA, 3867 bp, Cryptococcus neoformans
atactacaatattgccctcctccgtcgacatatcgtaaaaggcgttgcatccgtctaactgtactcgtagtcacgcatcccatataagaaagaagtattacgtaaagtatctaaacgcgtctgcagtaataatggctgccagtaaaaggacgcgtttttgagcctgtttagctcatgttcaatcgcgaatctatcacatcccatagttgactgcccttcttcgtcttttcgatccgaagccttccattcatatcaacaggtattggagggtctgccatgtcttcttccgacagcactgctcgtcaggagctcggtgaccgatttggtcgcgccgtgatggaccacccggatgtgatggcagagtgtaagctttcctcaaatccaagaaggcccctcctgagcatgtactaatcctttcgtttacttttctcgctgtgaaggcctctcattgatgcggctatacaacctcactgcctccgatctcttcttcaaatacgaggcgtttgtcatgtcgaggccatctggacttcgtgccaaattatcaaccataacgatcaatagtgtcaaggagcttcggacagaattgcaacgttctcaacaggcgaaggctgttgctaacatgggagccgctaatgtgccaaggctgaatggatctgagaagaaggcggctgtaggagtgaagaaagctaagggtctaggtgatctcgaaggcttgtgagtttgatttgaacgaagcgcattaggcacattgtttgactgtcataatcttctactcaggctcggaaacttgacgacacccaaccgtccaactaaacccaggccctctgcttcttctacaatttctcccagccactttgcgtctccggcttcgaccgtcaaggctactccttctcacttgaccactccccaacgtcaatcccctcttccccccacagcgagtagctatcggcccaatccatcgaagctcgcttcttcgaacaatgtcttccttgatacgcctatggataaaggagggaacggactgttggtaccttccagtcctctgagcccatctggagtgtcgccctcgttagtgactatcccttgcctgtagagtttattctgacccgtgacgcttagttcatctccccagcccagccagtcattcacgaaacaagccaactccaacactgttgtcgagaccttgaacattcacctgccccagttacccccttcccatacccgattaacgtcgaaaccaagagtcgaattgtcctcgacaattacagctgcagactacaactaccgttacatgtttgagaaactttccgagcgtagtgaggccctagacgactcgatcgatgaatatgccgatgctattaaggatgcctacggtctttcggaacttggcgatccccatttcgtctctgatgagagcatctacaccgtcgggagggtattatccaacacaacgtcttccaaaagcgataagactgctttgaaaaactctttccaccttcagtcatctcgactaatcggtgcaggaaagcgaatagctctcgaacttcccgaggagaaactcaaggttagaggaggagcgcctggcgtcaagggcttttcgttgtatagcggttgtttggtttgtgtcaagggaaggaatggaggcgggtcaaaattcgttgtcgaagaggttctcttggtaagagctttcaggctccttgaactaaaccacctgacatgctctgttcagttaccacctagtcttcttccccagacacccgcctctgaacttatcgatttccagtatggagataaactcaaaggggagcctttgtctttaatggtagccgcaggaccttacactctcaatgaaaatctcctcttcgaaccgtttgaaactcttgtggataaagtgctggaagaccggccggatgttcttattcttgtgagtggcgtttcgtgacgcgatgctatggggcctgtcatctgttattgatgattgatccatagcttggaccattcgtcgactcgcaacacccgattatcaaatcctgcgctgtgaccgaaacgccgcaggaaatcttccgcaaacagatttccagccgtctccaaaaggttgtcactcagagcccgtccactgtcatcatcctcataccgagtgtgcgtgacgtcgtatcacatcacatggctttcccccaatcgatgttggagaaggaataccttgggttgcccaaggtgcgtcttacacctcatccctatgaaccaaactaatcatcctgggcgttatagaaagtcaaagctctccctaatccttgcacattctcagtcaacgaggtcaccatctctctatcctctgtcgacatcctcttccacctaggtcaagcccatgcacctataagagctcaagaggccgatgcagatccaggcatgagcggcagccccgcccctgaccctctagcgaaccatatccgacaggtgcttggccagcgtagcttctatcctctattccctccacaagaagatgtcgctggtgaagtaaatttagatgtcacgcactaccctttgctcaagatggaccaagcacctgatatcctcatattgccaagtaggctcaacaaatttgttaaagtaagtattgtccttcaattctatatcgcattaagctaacaaatcgacactcagattgttgattctactctcgtcatcaatccctcccatatcgcgcgcgctcgagctaccggacactatgctaaggttatcattcatcctacagcccgagaagttttggaagaatctatggaagttgacggagaggaatcattatgcgaacatcaggtttacgaaagagcacgatcagagatttggaagatatgataccatgcatttgagaatcatgtattttaaatctccttcctcttgatagtggttgtctctacaatctcctcctccaccttttgcttcttggcagccggaccaaagccaccagtagagccaaaacctccagcgccgcggacggtagtttctagtgactgtggatggcgaatatcagtgacaaatctcagtcgagcagtcaagacttcatctagtgacttacctcgacttgtctgagcttgggaaccgagattctttccaaaatcagttgggcaatacggtctttggggttcactggatattgttactgtcagcaaaaatgtcaccaccgcgacttattgttgcagtccatcaagactcaccttcaaagtccacgtctgaatggttgaatagaagcaccattacaggccctcgatagtcagagtcaataacaccagctccggtctgaatgccatgcttagaagctagatgtctcaatcagctctggctcttgttactttaccttttacaacaaaaaatacttaccaagtccgcttcggggtgcgatacgaccataatgtccttgaggaaccgcgatagaaagctgaaggtccacaagagcacgtccacgggcggggataatcttgtgttcggcagcgtaaaggtccataccagcggcgaaaacagaaccgtgggttggtaaagttgcccggtcagacagtagtttgacgtccatttcggcgacaaatttggggagaagctgagcgaatgttagattggacaggatccagctaaaaaaggatcatacctgcgattggtccattttatatactgataggtagaggagttgcagtttgtgctgagtgaacgaggtgcgtgttttaattatatgtatgtgccgaaacagcgagtctgaacgaagcaatttatttacgcgtcttggcttttgacgcgtatctaggaacggaaggtcggaagcaaatttactaggaaagtggtgacggttggatatttaacatctttataggcgtgtgctat

SEQ ID NO: 230 - DNA, 3961 bp, Cryptococcus neoformans
aaagactggtaaagtgagttacataatggtaagtgcagttaatacaacctacgccatatctcgttgccaaaatcgactgccaaggaggagcagtttctactctgtattggtccacctccactgcttgtcccaagctgctcgtatggttaggaagccgacaatgacgtacggtagaagctcagtggaggcataaatcactcacgaactgaaccgaaacgggcggcagaggcttaatttttggggctgccattcgattatagaggtcgacgagcgttgcagcttagaatactgcagcgtaaagattacgagaaaaggataaagagtggatctttttcctttattccagtaaacggtgcaaccatgatgaatgatgacgatcaacgaaagcggtcttgtccgcccttcctttttttgttcctggcaagcagaggaggtgcaggagaacacaaaaactgacaaaatagcacagcctgcacgttacaaggaagaccaacataacacagaccatgcatgtcactcaccaaggttcatagatcagtagtagagagcatgccacatggggataagcgttttaaacaaccatctggtttcgtcaatagcttgctgctgccttaatttggtcacttgttggctgtggacattgcctcttggtatgtcagccattccgacgttttcccgcggtccttgtactggcaaggccatcttgatgctagacatgtatactttgcggaagccttccagaattgaagcatacatatgctggtatacatagctgtataagtagaacagaggcagcaggtgaaggaggaagtttgttaaggaggaggagggcggcgggggcgcggcggcagcagcagcagcagcagctaataagtgacgtgggataaaatggcgaaaaataattttgggattttcgtggtgcgtctctgtacgaaatccttcgttcttgggtacaaggagcgcaatctctctctaaacaaaaaagcccatattcacaagcatgtcaggctccctcacccacgtcctcttcgaggggccttctggctatggcctcttcactgtcaacttgcaggaggaagttgctgccaagtcaaaacaacttcaagactccatcgccgacctcggcatcttctctcgaatggtccagctcgcttccttcgccccttttacttcggccgcccaagctctcgagaacgcgaacgatgtctccgaaggcgtcctcaaccctcaccttcaggctcttctaaatttgatcgtccccgacgctgctggcaagggcaacaagaagcaatccggtgttcttctcggtgtggccgagagaggtttggctggtgccattcaaggcgagatgggtatcccctgtgacacttccgaacgagccttggaactcatccgaggtgttcgattacatcaggaaaagattttgatcaagggagggatgcaaaagggagatgtaaccgttgcccagcttggtttgggtcactcttactctcgaggcaaggtgaaggtatgtgcaaatgcgtatagtacttgagacattggacttatcggatatagttcaacgtcaaccgatccgacaacatgattatccaagccatttctctctccgaccaactcgacaaagatctcaacactttcttcatgcgagtgcgagaatggtacggctggcacttccctgagctttacaagctcgttcccgacgcccaccaatatgcccttcttgctgtccttatcggtgatcgcacagctctttccgaggactctcttgaggaaatgcaggaaattcttgacgacgacgagactcgtgcgaagaatgtcctcgatgccgcgagggccagtatgggtagtgacatcagcgaagttgacttgatcaacatcagcaacttcgcggagagggttgtcaagcttgctgagtataggaagagcttgaggagatacctcactgagaagatgaatgtcgttgcccccaacttgtcagctttgatcggtgagaccatcgctgccagactcatcagccatgcgtatgtccttttttcttcctttgaaacaaagatcaatgatttgttgacgatacattagcggttccctcaccaacttggccaagtaccccgcttctactgtccaaatcctcggcgccgaaaaggctcttttccgagctctcaagaccaagggtaacacccccaaatacggtctcatctaccactctacttttatcggccgtgccggtgctaagcacaagggtcggatttctcgattccttgccaacaaatgttctatcgcttgtcgtattgactgtttcaccgacgttcctaccaacaaattcggagaggctttacgtgcacaggtcgaggaacgtttgaacttcttcgaagtaagccgccatcatttctgaaagttagttgtgatacttattgctataatagactggtgctcccgtcggcaaaaactctgacgccatccagaaggccttggccgctgtcgcagctgacctcgatgacgaggacgacgatgatgacgatgaaggtcatcttaaggaagatgatgttgcggatgtatgttaccattctaatgatttgtttgccgtatccacgctaaccctttctaggctgtcaagcaggtagagaaggaccaagcagaagctgccgttaaccgaggccctattgaccccgaacttgccaaacttgcttctgaggctacatcttctacgtctaagaaggaaaagaagaacaaaaaggagaagaaggacaagaaggagaaggaggaaaagaagaagcgcaagtccgaagccatggacgtggatgtgaaggaggatgaggaggagaagaaggagaagaagagcaagaaggagaaggaggaaaagaaggagaagaaggaaaagaaggagaagaaagagaagaaggagaaagagggaagggaagagaaggagggaaagaaggagaagaagaagaagaggaagtctgaggcgtagagagttgctgtggcgtggagaggctgctagcaagtggtggggtcatgaccggggcggcttgcattctttcttcatttttctcatcccatatggcttgttctttcgttttgtctattttacatgtatacccgttcgcagttcgttgttttggcgttgtattggctaaagggtacctttgttgaacaatgaccaaggccactcccgagaaaaaagatcgacatttgcagcaagtgaaaagagaaacagtaaggccagctccccaagatcaataaaagcatatcagacagaatagtgaaaatacaaaagcgaggtgcaatgaactcttgagcaatttattgccgcgcacaccgctaatttcagtaggtaggttatcgtcactacttgatactctgaacttgtatctgatatttatatgtgaaaaaaaggtaatcaaacaaggaacaacagataataaatgttacgacattatgatcgagccattggttccttcttctcattcggccggatcatccgaggaagtcgtctcgattggtgattggtgacaccaggtgatgaggtcttgtttgtatgatttcgtctggagatgataccatgttgttgaaagtctatacagttggccacagcgtctttatcatgagtatgcaatagtgcgcaaggctaattcgagtcatgactcgtctttcatgacaagtgatgacgaggataggcgctagagaggagcacaccccaatgacaatgcacgacgacacgtttgggtgactaataatgtttctgttgtcggccggtctgaacgcgtcgcgacgacgcgttgacccacacaaagaacttacgacgcacatgtaatgtcttgcatggcgcatgacggatgacggacctcacattgagcaattcaaaattcggaaccagctggcacgactcacgacattactgctgtggagtattatttgtacgacagtcagagatagaataatagaagagacgtagtagtaatgg

SEQ ID NO: 231 - DNA, 4015 bp, Cryptococcus neoformans
gcacaagagagtgcacataccggccaagattgggttacgagcgacgtcgaaaagaatttcaggcagaggagacatgttggttgttagatggcgctattagaaagtgtgatgatctttagatattagacgtttgatgtattgagtcttactaggggaggcggacggatctctgaggtatatataggggtggagacccggcagggcctgcatgtcccgtgaagtcaaggcacctgcggcttgcacctggcacctgacgactgacgacactgcagcaccgcggggactaacgatccaattccagagttccagagtagtgtaaatgttttaaattgactttattatgctgatgatgtcatttcccaaaagcgatgggcggtgcttcatttctttctgctgccaacgtcatttttggttccaatcaagtatcacgttcatccttttcggccctctttctgggaatcttgtggcctgaattgacgatcatcccctccacccttccaaattcaattttagataagaagaatgaaatgatgcttgatggtttattaccttgcaacgtcacactcgccaccaacataaccggccgtcggctggtacccgtgaattattatgtaatgtggttgttttccttagcggtgatgtccggttgcaagattttgggcgggggagcctccaccggcttaattctctgtgacggaccgtttggaaatcctcgagtcctcataaccatcatattctgtcgtccaatttattccccaagttcaaccgccttgtagtttacagctttccatcaccgcaacaaactttagcatcaaaatgtctagacggccagatctcggctatatcgaccaagcttcagaagacccggtcaatactgtttcaacaccaatcggaggccttgagccaaacgccgacaaaggagtggaggctgaagcacctgaagaagattctggatcgagtatcgaagaagagtctgaaggggaaccgtttgaggacgtggatggcggcgatttcgatttcggcgcgttggatgttggtgggtcgggtgaagaggacgaggaggaggatgatggagattgggatgtggacgatgaggattgggagctggccaatggaggtatgtaagctgtctccaagtggagatgaagaaaggctcatataatgggataattattagattttaccaagcaatacaatcgagttcgacagcaacacgctgctacatccggctctgccccgttacctgcgcgaaacctctcccagcaaacaaaatcaaaattgtccaaatccaacccgacggccgggtctggcgtggtgacaaatccgaaagcagcgcaggataaacatgataaagataaaagcgatagggctactcaggagcaagtgcttgatagccgtactcgactggttttggcgggactagtcaatcggggggttatcggtatgattgaaaggtgtatcagtacaggtaaagaggtaagtttactatgtctatctattttcattggctgataaaataaaattcaaatctaaaaggcaaacgtctactattcatccccaggccgtgccgtcaaaatctaccgaacctccatcctcgtcttccgtgctcgacaaaactacattgtcggcgaacaacgtttccggggggaatacacttcctctcgaaatccgcgaaagatgattcgtgtctgggccgaaaaggagttgcgaaacctgagacggttggttcaaggaggtgtgcgtgcaccggtggtacatgaatgtaaggagaatgtgctcgtcatggatttcttgggcaagggcgaggtgtgagtttttcttcttcttctgtattatgtggatgagtaaacgaaacaagtaactgatcggacgggaaaatcagagcgtcgcctcgtttgaaagacgcagagattcccgaggacaggttacccgatctgtacgcagaaatggttatcgcgacccgaagaatgtaccagcactgccacctcgtccacgccgatttgagtgaatacaacattctgtaagcacaccttctcctcctcccagcttctggtatactcaccctttgatgtttcaaggctacacgacaaccacctatacatcatcgacgtctcccaatctgtcgaacacgaccacccccgcgcattcgatttcctccgttccgacatctccaacattgaagaattcttctcccgccgtggggtcgccacgctcggaatccggaaatcatgggaattcatcgtcaccgagaacattggtctttcccccactggctccgcctcgtcatcattggagatggagaagggcgacgacggcgaaaggcgcttggtgggtgttttggaagaatggttaaaggaaccgtcagacaagacggacgatgcggtctttatggagtcgtatatcccgagaacgttggcggaggtgtatgatcccgagagggatgtggatgtgctcaagagtgggggaggggacgagttgatttatgcgggtgtgacgggtttaaagttggctcatgagagtgcgaatgccaaggtgaaggaaaaggaaaaggagaaacagagtgcgagtgcgggtgcgggtgcgggtgcggatgatgcgaacaagcgtgaagaggtggatgcggatgagaatgtagaaaagggtgaaagagtaaaaggtaaatgtaaggatgagggcaaaaacgacaagacatcgaaaagcgtacggttcgaggatgaagtagacgaacatgacgaggaagatgatgcccaagaagcagaggagcaaggtgaggaagaaggaatggataaaaaatctagagggttccgacatgaagatcgtgaatctaaaaaggtacgcccttatccctctccgtctctccatcctgccgtttcccgagtcattttgctgatatttcgatattttggataggagcggaaaaaggcagtcaaggaagaacagagggagaaacgaaagaccaagatgccaaaagctgaaaagcaaaagttgataaaaaagtctgcttctcggcactagtcgattcagggcgatcattgtctttatgtatttggacgttgacaagtctatttttcttcgcgtgtgaaggatacccctttgcgcgtgggatttgtagagattgatagctgcgccgtgggacagctcgtacctgtgaaattgagatatcggtagtaacatagctgcagctgtatcggacccaacctacgagttgaaagagatgcaaaataaaactctatcgctttcgcagcctaaacaagtcaatggagaaacggaatctaaatcctgttggaaaaatggggccatatcaatctacatccaagtccaatcatcaaaccaagtcaaatatcaacgacctccagctgttctgcgagtgggagagggagggcgagattgtacgggtgtctgggggacgtcgctgttaaccgcaaaatggaatctcaatcgatggagctattgtttgacaatcaatatcagcaaggcccatctcggcgagagaacagcaaacgttgacgtacgacaggcaatttgggaaagaggacaaagatcaaagcggcaaagtttagagcaaagaggacatagtcgtagcgagtataatgcgttgatataaggaatctgcaaaaagtcagcaaacaaaaagtccttctgtggcaccgactcacaatcctataggcacactcgtcagccactttttggccggtgtatattgggcgcctgaatcgatttgttcccacagtgtaagatcgtcgtaagctccagaagtggtcatggtcgattcaaagggaagtccggtaacgtgatggaacatgataaaggagaactggcgttctgtaagcaaacgacgtcgcaacgcgtctagaaaggcagcgacccacggtgatatagctgagattgacaatcgtccagctgacatcttgtgtcatgcccggtatggcatcgatcaacagcttgccacaaaagatgagcacaggatgtatcaaccaagcaccttttgaggcgaatcacaatgagctcgtcccac

SEQ ID NO: 232 - DNA, 3935 bp, Cryptococcus neoformans
aagctagagcaaacaaggtgcgagtggagttgaatgccgagactgctgcaggaggcggaggtgactggattgcaggctgctgcgagtgcttcggcttcgaagggccagcgacaggttgacgtggagccattatgagggctgaaaacaatagtcagcacaaagctctacacaattctaaacgcaaaatcagaagtgaatggtagagtcagattgggtgcccggagaaatgggtttcgggcgtttacaccatggttttttgggtaagaagaccgtcgtgttgtgatcatcacttattacaaaagactagagtatgatggggtagagcgatagaaaataacacttactctaaataaaaatggataccccaagagagagaaactaaaaattttcgatcggtcaagagacctaacagcagtgagttagctcggtggtcatgtggaatccaaatcgtaacggagaatggaatgatcagtaaaaataaaacagccatgttttaacagcatgccaccaacctctggacgtattgctacgccgcagaaggaagatgtgctcaggcggtaattccctttcggggcatcattgtggaaacggagaaaaaattttcaaggggaaatgaactgacctggctctgaaagaaaatttttgaaagggagcttatcgctgacggccctcgctagatacttcaggcatgtcagctaggtcaccaagtctgcacgagacatccaacatgcgagcagagagaaggtatcagaattgtgcgtttatgggtcttcggcacttggcctaacagactctagtttgaaaatgaacacaaggtcatcctcgatgggatgcggtagaccgatgaaaaggatggaaggaaagacttactttattagtttacaaagaaagatatagatgcaatggagagaagagatcgaatgagaatttcgacagcgcagaaatttggctgggggtcccaggcacagacgggtcggcgatttgttttgcgtattatttaatggtgatgtttattccctggaaaaagttgcggcaaggtagtcttctttgcatgactccatctcacggtaacacacacagttccgcacaccgcgccatgtcatccacaaagcctcccaccaccacaaacaagcggaagcgcacctcaaacgcccacgacgaagccccccgcaaagcgtgtcccagaggcctcctcttcaaaagtcactctcgacgactcgcagcccgcccctgccacttcctcagatgctgtactcggcgcctggtccgctcctggtactgactacgagcgggtccccttctccaccctcaacctttctccacctaccactgctgccatcgagcgtatgggtttcgagactatgacagaagtccaggccaggactatccctcctctgttggccggtaaggatgtgttgggagcagcaaggactggcagcggaaaaaccatggcattcctgattcccagcgtggagcttttgagcactttaagattcaagcccgtcaatggtgagtcttaatggcctttggcaaatggcatgggctaatccgcccccttgaagggaactggtgtcattattatctctcctacgagagaactcgctcttcaaatcttcggtgttgccaaggagctcatgcagggccattcacaaacattcggtgttcttatgggtggtgcgaaccgtaaggcagaggccgacaagctggtcaagggcgtcaacctcatcgttgctactcccggtagactccttgatcatttgcaggtacgtgcatcctatgtctgttgacggactcgtgcttattgagatcagaacacaaaaggatttgttttcaagaatctcaaggctcttgtaattgacgaggctgatcgaatcttggaaatcggtttcgaagaagaaatgaaacagattatcaaactccttccttccggtaagttaccgtgctgataggcagcattcgcaagctaatctatccccccttagaaaaccgtcaatcaatgcttttctccgctactcagaccaccaaagtcactgatctcgcccgtatctcgcttcgcccaggtcctctctacatcaatgtagatgaaaccaaggaagcctctactgcagacatgcttgaacagggctacgtcgtatgcgaatccgatcagagattcatgctccttttcacattcctcaagaagaatttaaagaagaaggttattgtcttcttctccagctgtaactctgtcaagtaccatgccgaacttttaaattacattgatgttcctgtcttggaccttcatgtaagttcattcataaccacgctgaacattgctgaccagtccttgcagggtaaacaaaaacaacagaagcgtacaaacactttctttgaattcatcaatgcccctgctggaattctcctctgtaccgacgtcgctgcacgtggtctcgacattcccaaggttgactggatcatccagtttgatccgcctgatgatccccgagattacatccaccgtgtcggccgtactgcccgtgcaggcaaatccggaaagtctctccttttccttttgcctagcgagcttggcttccttcgtttcctcaaggttgccaaagttcctctcaacgaataccaattccctcagaaaaaggttgcagatgtgcagaagcagctggagagcctgatttctaagaaccattacctcaatacctcggcgagggatggatacaggtcttaccttcaagcctatgcgtcttactctctcaaaaagatctttgacgtcaacaagctcgacctcgccaaggttggcaaggcatttggtttcgctgtgcctccaaaggtcaacatctccgtcggatccgtcaaggcgaagaagagcagagatgaggatgaaagtagtgatgatgatggtcaacccaaaaaggcctactatagaaacaggggcagaaaataatcgtttttgatacagtcttttgtaattattctatgcatcttggccttttgtgtattggtaatatgacatcgcgattttttgcattactgtcactgcattactagtatgctacaacatatctctaaaactttcgaagcatctgatgtcccttatcattcccgtcgtctaccgcctccccggtctccaggcacatattgattaggacagttattggcaaagtggccatactgattgcacctctgttttggtaatcagcgcaagctattgaatcgtaacagtataagacttacgaaacaaagcactgtgctaagatctttttgccagccaccttttctctctcctccgctgccgcgtccaccctcatcatcattgtctctattcctcaacgtcggggatgcagaggcggttatcgagaaggaggagagtatgagtgtcatgggggatggtagagacgccaggagctgtggtaggatcagcgagccagtccttgaacagattctcacggtcataaccctgggcaatggtacgaataatctctggtgctgtcgatacttgaaatctcagtcgatattcctcttgttctaccgtctcttcccctcccctcattatctggtgttcgccttcgtgatgctcgccattgagggcagctgtatcagcacccgcatggatcaaatcaaactcaacacccgtatctacaccaacttccgagtatcctgacgtcaccctccccctttctatgattctttccccattctcccgaacctgaccagggggcgcaatagcatactgcatcgtaccgctcacctttctctcaggctgttgagcatatacggacgtgaccctcggactctggccggccggatgatgatgggcagtacttacagcccttgggcggagaggaaactggtgttgattctcaactaaagatgaaacagagagcgggactgggttgtccgacaataccctcccacctgtgaccgtgccgatgccgatgcccgtt

SEQ ID NO: 233 - DNA, 3859 bp, Cryptococcus neoformans
ggaatattgtcaatataatgatgttgacaataacttcctatactcacccaatggagtctctacaagcacgctgtgatacagctcttccacattggtggctacgcacaatgccggcatagtgtcgaaaactcccaggggatggcatctttctaacaactcgtgcgtatctcgttcatgcaacgtcccgagcgtaagcaagataacgttatcaatcatatacgcataggtgatgtagtccataaaagtcgccaggggctcaacggcattagtccgaaggtagtggaactcagccacgagtttttcagtagccttgtccgcaatggtggaggttgataaggggagaggctcgttggccaggaagctaccatagtcggtagaagagagctggagtcgaaagtctgtggattgtcaactgaaaccaacattgcaatgatcatcactcaccctcaaggttctcgcactgtgtcaagttgtggtagttggattgggtgagcaacgctcctttgtaccctctgaccacaccctcgaggtaaccagaggacatctaaagacagaaataggtcagtctatttctgaggcacatcgtaagatagctcacattgaagccgagagcctccatctttgttatcgcacactgtgatacgaaagcgccctgcaaaggatatcttgtggtcggtgatcaacgaagaatggactgtttaaagtatttgttttttgttgactcgcaggtctttattctggcagttattcgggctattggttattgaattggaggatacacactccttacccatcccagaagaccgtcgcggccaacaatacaccacgatacagcgcaccccatggtgacgctcgacgataggcaataccaataatttacgtaacgtgcttgttacataatttgctcccgtggacgcgtcctggggttctcgctgacactattcttcgaccgtattctgcgaagactcacaatataccatttcagaaaaaaacataaataatgaacgtattcgcggacgaggtgagtaaggtgaagtaggtcagaggaagtactgatcaatgatgttcaatccaggctactgaagaaaggggcgaaaacgctcgtctctcatccttcgttggtgccatggccttgggtgacttggtcaaatcaactttgggacctaaaggcatgaacaaaatcttacgtgggtgcgcaagttatagcaggtgtatataatctgactgtttgccagaatccgcttctaacagtaccatcaccgtcaccaacgatggtgccacaattctcaaatcgatccatcttgacaatcccgccgccaaaatccttgtcaacatttccaaagttcaagatgatgaagtcggcgacggcaccacctctgtctgtgtacttgcttctgaactcttgcgtgaagcggaaaagctggtcactgttcaaaaaattcaccctcaaacagttgccgaaggctaccgaattgccagtagggcggccctccaagcgctcgaggcgtctgctgtagacaacaagaacgacaacgccaagttcagggaggatctgttcaacattgctagaacaactttgagtagtaaggtactggcacaggacaaagattactttgcaaatctcgccgtggatgctgtgttgaggttgaagggatctacagatttggagcatatccaaattatcaagaaagtcggagggaagttgacagactcttatttggatgagggattcatcctagacaagactatcgctaccaattctcctaagcgaatagaaaatgccaagattttgatcgccaacacctgtatgttcttgtcatcaacttgttgagattttgctgatacagtatagctatggacactgataagatcaaaatttttggtgcgagagtgcgagtagacggtactgggaagcttgccgagctcgagcgtgccgaaaaggtaaaccattgtttcttgattctagatccaaggcactatgtactgacttttttgcaggagaagatgaaagccaaggtccaggccattgcatcccatggtatcacctgtttcgttaatcgacagcttatctacaactaccctgaatctcttcttgctgaggccggtatcatgtccattgagcacgcggactttgaaggtgtcgagagattggcccttgtcactggaggtgacattgcctccacttttgatgcccccgaaaaggtcaaaattggtcgatgtgacgttatcgaggagattatgattggtgaggacaaactcatcaaattctctggtgttgccgccggtgaggcctgtactgtcgtccttcgtggcgccacctcgcaaatggtcgaggaagccgagcgatctttgcatgatgccctttctgtcctttctcaaactgtcaaggagactcgtgtcacccttggtggtggttgtgctgagatgctcatgtcttgccaggttgaagaggctgctcggactgtcaagggtaagaaagcccttgcagtcgaagggttcgccagggctctcaggcagatgcctaccattattgccgacaacggtggttatgactcaagtgatttggtgaccaagttaagagccgcgcactatgagggacagtctgatgctggcttggatatggacaagggcgaaattgggtctatgagacaattgggaatcacagaatctttcaagttgaagaagcaggttgtagtcagtgcgagcgaggcagcggagatgattttgcggtacggaatactactatgacacctgttgtagaaagattgctgatcaccgttatagtgtggataacatcctgcgcagtgccccaagacggcgagaggctcactagagtggataggaaattgtgcacaataggcaaaaatatcggcgtttgttggctctacctatcccatgcatctttgcatgccaatcaaatgttacttactgattcaccgttgactgatcaagtatgcgtcggtggtccgtgcaatgaacaaccgttcgacgagggagtcgccactgtgtgccatcttctattacagcattcaccgttttcttcattcgagagacgtcttttcgaacaacttcttgaggtatcgtggactaatagcgtctccaactggataactcctcagcagccgacagtttggtacctccagaacgcatttttaattaatcaactagtttggaaccatgcgcttctctacatacttcagattatttcgacccttccctcaacgtaccctctctttggacggtccttcaagccagtcttacgaatctcttgatatgccacttgtgtcgcacaaatgcttgcatgaacgttgttactgtcaatcatccacaggcccaaagtgtctaagtccacgactccatgaactgtggcaatatatagctgtagcgatttgctcacagaaaaagcggtcaattaacgagtccatcaattcatgaacatattacaataatacagatggatgtactacgtgttggaaagcaagattaataagataaaactacaatatatcaatgtatgctcctattcgcgtatagcaaggatgttgaatctgatatgaatatatgactatgttcaaagtaagattaataagctaatgtgtttgttctacgtactggtccacgcaaaaccttcactacatattatattataaaccacaaagccccattttacaccccatcaaccactggagcgtcggcagccgcctgtcctgattcagttgacaagtttttattatgtcttcgggcttcccctgctccaaccatgacctctaaacccccttggttcttctgggcggtattttcgcctagagctggaagcacagccaactcgccctccgctgcctctgcaatatggcgtacc

SEQ ID NO: 234 - DNA, 3292 bp, Cryptococcus neoformans
cctgaaggtgagaaaacatctccagcggtagttacctctggcagtctgctaaaaagttctttgcctttggacgtgggagactggggagcggtgatcgagttgtaagagtcggctctagcagcttgtcctctcctcgattctcccggaactgcatgccgaccagataccctcatgcctgcccctcctatctttcctgggcccataatagtctgagtataattcaaaccacttcctctacgtggttcttctgcatcaccattcctcattccaggggccgaaccggagagatatccttcttctagtggtggggaatcaagtgcccgtttaatttctggccaccgttcgatgtccgacaatccagaagcattgatgtaagggttcgcagcaaaggcaggatcgagggagatgatgcgaggagttatatggtcgtctgttgttcggagggatgacaaacgtattgcttgcagcatgtaactgtagatagtctcgttagacccattacaatatgacaatctaataacactcactccacgtcagatatcatagccattttgaaggcttcaatgttcgctcaaagcgaagtccctaggagaagcggaatggcctgtyctttgtggtagattcacatgatttagaaaacgtctgaggagtgctaagatcaactcacccctcttatctctcctttatattgtwrggtctaatcaataattattacagagctgactctcatctaataacaatcgagctgacactactcgagtactcgtactccccacacaagtccaagatcagatcgcgaggaagtaattaagtatagtacgagtagtggaagaagaagtcactggtcggcccccgccgttgtttgttgctttaaagtggaagcataaataaatataccacctccactctttgtgcctggattggcttctgctgccagaatttcaactacaggattcattgaacgctttttacagcttcaccattgaaaagcccggaaaccatgtctggaacacttatttcttccctcgtatgggttcccagaggccgtgcggcggaaaaacccaaaaagtatcagctcgatgaagacgagatcgaacgtgtaggcaagctcggcgggcctggtgttctcgaacagctcaagagtgagatagcggctgtggaggatggtgaagagatggaaggcggtgatgaggaagaggactgggaggacgaggatgacgaagagggtaatgaggaggcagacaatgacgatgacgacgagaagatggatgaagacaaggagcccgagaagccatttgaccctaatgacctatcagctttcaagatggacgaatacgatgaagaggagtccaaaggcgttggtaagtatttatcgtatgtatcaattagtttaagctgaccgaatgcagcgatgggtgctttcgccaacatcaaaggtctgacatattatcgcgacaacgaggaagatccatatatcaccctcaaggaggttcgtgtcttgctgctgatgatactaccgacaattgcccatcggctaattcgttttaacaggatgaagaagaaaacgaggacgaggagcttgttctcctccccacagattctatgattatctctgcccgaacgacctccgacctctcatccctcgatttccatgtctacgccgatgtcgacgagaacctttatgcgcaccatgaccttatgcttcctgccttccccttgtgtgtggaatggctagacttctctcctggtcctgatgccaacggtgctgctcccgaaggcgctaagcccggtaactacgtcgctgttggctctttcgaccccagtattgaaatatgggatgccgacctcgttgatggtctttatccccgggctatcctcggcccatcaccttcgcttgaaaagccagaggccaaaccccttggtaccggtaagaagaagcgaaaacaaatggtacagcctgctgccaacgccgactaccatgtccagcccgtgctttctctttcctggacacccaatcaccgaaacctgctcctttccggttctgccgacggtactatcaaactttgggatttgactcgtgaatcacccatgggtgctatgcgcagctgggacaaggtccatggtggtgaaaaggttcaggctgtggagtggaacaggagcaccgtcggcggtttggacaaggtctgcctgagtgcaggttatgacaggacggtcaaggtttgggatgggcgagcggtggacgaagctatcggattgcaagtcgctagtgacattgagtgtgtcagatgggacccatgggagccttactctttctacgtacgttaagctcatcccgagctagagtatcagcgtgactaacttagtacattgtctaggtttctttggagaatggtctcattctctcttacgactctcgagtgctctcatcctccaaatcgtcatctcttgctacaggctcctccaagtcctctggcttccttactaccgctcaacctaaattcaccctctctgcgcacgatggtcctgcttctgctcttgacatcaatccccacatccgcgggtgtatccttactgcgggcatggacaaaactgtcaaaatttggaacgtccaagacgaggaatctgaaggtattccccgccgcaagagggaaatcaatcttgccacctcacgagaccttggccttggtagggtcttcgccgcccgatggtcacctgatcccgagacaccacttacagttgcggcagccggtagcaaagcgactttgcaagtgtgggacgtggcctccaaccccggagcaagaaaagcgttcggtgagaggctgagaagacatgggcgggagttaggtgagatcaagaagggtggcggtattgtggctgttgacggaggtgaagaggaagaatctgagggagaagagtagatgacttagaaactgatgactgatgatgtgtatgcaatctcgtgcttgcttgcatgttggagtctctggcatcattccattatggcttaaaaacaatgtaaagtaactttttggcgtataaataatgttttagagccagttctcgtaaatgaataacaatgccgacagtgctatatggagtaattgttcggcgaggcatggttgtactaatgaactacgcgtttcttatgtatttcccgacgccctagtgatgtttaaagagaatgctgcataatagtaataagaagaagacgttgaaagaagatcatccaacgttctcaatggccggcgcggccgtgcacttaccctcgtctccacctctgaacccttacccg

SEQ ID NO: 235 - DNA, 3962 bp, Cryptococcus neoformans
gccgggtgcgagcgatgaacatttacgcttggcaattggcgcagccgccgaggaaaacgaagctgcctttgcagaagcgtgggccgaggaacgcgaaggtcttgtctactccccttcaactcgaacttgggttgataaaacctctctttccccagaggagctatccgcatgctacgctgcgatgatcaacgcttctcgagatcgcgttattgccgaggctaccaaagccgccaaagcagagaagaagctcggtaagcagctgggtggttaccagacgctcaatgagaaggcaaagaaagccattgtggacgtcatggaggagattcaccagaccaaacgggatatggagacattccttatgcttaagggcatagaagaggctgcagccccggccaggttggagaagattagggaagaggttgctgttttggagaagagagagagagatctgcaggctagatatgcagagttgaacgacaggaggagggagaacctcgcagctattgaacaggtacgtcaatgtcacttcttgtcgaaattacttagaccaatgatatttcacagctcgaggaagacaagatcgttctcgctgctcaagtggcattggaagctcaagaaggagaggttgcagatggtgatgttgatatgaacggggcttagaagtgcaaacatattattggtatatcaatgcattgttgtcatattggttgtgtgatgttcgattaggacttgttgatgtgctatgcagagcctatcatcatgtaaaaactgctgagggcaagcggagctgtgttaaaagcttaagtgaggggttgatcatatttgtcacattaaataacccccaaattaaagagccgtttgagcggcggaggaagccgcgctgataaagatttattttgttggacatttttggaaggtcatgtaaattactccacgggaaacttgatatataatcaatagtcgattattcggcaaatacactttcaacaaagtatttaaaatggtggcaatggagtacaccccagatgcagcggggcaggagagctacattctatgtgccgactgtgggacagtcatctcaagtgccaacggcgctggactttgtaagaaattatctgcttgcgactggtacagtagctaatgagagttggtgaaaggtgttggttgtttgagaaatactgtggatattaccgagggcatccccaaagaagccacactcaacttttgtcgaggatgtgaaaagtttttgtcgccacccaatacctggattgccgttcagccggaatctcgagagttgcttggtaagtgaaatgattgttgttgcaatggcgcgagagctcatcgccatttcatagctatctgtcttaaaaaaatcgcccggcctttgatgaaggttcgactcatcgacgcatctttcatctggaccgaaccccactcccgacgtatcaaactcaagattacaattcaaaaagaagttctcgcccatactgtcttgcaacaaactttcgagcttactctcgttgttcacaccgggcaatgtccttcgtgtacaaggttagcagcaaaaaatacctggaaagccagtgtacaagttcgacagaaggtcacgcacaagagaacctttttgtggttggaacagttgatcttgaagcacaatgcccataagtgagtcttgctatgttctgctgaaaggctcatgctaataaaacgctgtagggacacaatcaatattgcggagaagagggacggcttggatttcttctattccgagaggaacaatgccatcaagatgtgtgaattccttgctggtgtcgtccctgttaggtacggcgtgttaccgacatcctgaaagcgatggctcatacatgatattgcagagtcaaatcgtctgagcagcttatttcatccgatactcattccaacacttccaactacaagtttacttattccgtcgagattgtccctgtctgtaaggatgatttggtctgcttacccaagtcacttgctcgtgcttggggcaacatttcgtaagttgcaactctatctcatctgagatttgatcctaacatgcctgccatctagtccgcttactatttgctcccgtgtgggcaacactatccacttgcttgacccaatgactcttcagcaaactgatgtagctgcccctgtctattggcgccagcctttcgactccctcaccaccgttgcggaccttgttgaattcattgtgcttgacgttgagccttcagggccagtccgaggcaaatatgtgcttgccgatgcacaggttacccggtccagttcgacaggtaataatgccgatgacgatggaatgggcgacgatggtatctaccacactaggactcatttgggcggtatcctgcaacccggagacactgtcctcggttatcaccttaccaacgccaatttcaactctgattcctttgaagcgcttgaaagcggtagaatccctgatgttatactcgtcaagaagacttaccccaacaggcgcaagaaatccaggcccagaaattggaagcttcgttccatcgcgaaggaagcggaggatgtgcaggatggtaccgtcggtcgaggtgccctgggaaggcgaggaggtgtggaccaaaagaacgtcgaaagagactacgaactattcttgcgagacctggaagaggacaaagagatgcgtgccgtcatcaatctttacaaggcagatgcgccagaggaaggagaagacgaggctatggccgtcgaaaagaagcccggctcgggtctgcatggtgggaagagaagaaatgggcttgcaaaacaagctcagcatggtatggatgtcgatgacgatgaggccgtgggagaagaggatgaagatgacgaggaagaggatttccctgaaatcgatatggacgagttgttggagaactttgaagagcttgacatggatgacggtgcagaggttctgtaaacaatcaatagtagtctttttgccatgtaccgccgatacccagagatcgcataataatgaagtatcacatttctactggctacaagaatctatttttaccctactgctgagagagggctttgctaatcctccgcacttccttgtcaatgtcattatagaattgctcatcatcggtgtacctagggttccatccaatactcttactcctgtccgcaacacccctagagttgctaccagaataataactcccattaaagtattggtcgatctcgtccttggtaaatgcggtaggggtagattcagtgccctcgggaaccgccttgtgagttatgagagactggccgacagcggaagccgcgccaaagagagtatattcgccagagataccaaagtaatatcctgctggaccgtggccgataataggcctagggacagtagccttctcccaaacaagaccgtagagcttgctaagatcggcgatacagacatgaggccagatgttagcacctaataactggtcagctctggtcgattaaccacaaaataaaggaaaccttacctttgccaacgacaccggctcgcttcctcttaatagaaatctcaatcaattgaggcatttgttgagatgtggggtgagaaagacccttctcgaaaacttctcctcgagcaaatccccaaatagtagaaggaaggatgatgtaagacttgattattccggcttggtcagccttgacgatctcaaggtcaacattacggtgaggagccgtgtcagccacttcagtgatagagtgaagagcagggccgaatcgggtagcaggggaggggttgaggtcggtgtagatctgcgcttgcatgaatatggaacgttgaataaacgagtgtcaacgtacagtgtcagtggggtattctccccgagcgtcatctgccaagacgccagtgccactggtctggatcaagagaggcctgtgaccactcttctccttcctcttcttcatacctt

SEQ ID NO: 236 - DNA, 4051 bp, Cryptococcus neoformans
ggtacgccagatgtcgaggccttggaagcgtacgagcaactcatggcctccattatccctccctccaccttacctcggccacccactccgcttctgacatcgaatcttacgctcagtaaatatgaggcagacgaggatagtgtgatgggtgaaaatggtgtcaagagaccaatgacgaaagccgagaagcaaaatgcgaaaaagaagagacggaaggagcgggaaagagctgcgaggatggaagcagaggcagctgccaaggcagcggaggatggcgtcgagaaagaacaaactagggcaaaagattcagtagttggtaggtggcattgctatcgtgcagcgatcattctgacttgttacagagtttcgactattttcttcttgccctatcaagccggtttcccttctgccagcctctgaggattatcccatacctttgtaagtctatacacctatcaatcgaagcgcatgctaacccctggccatcagaaatccgagacatcttccgctcccagaggctaaaatccaaaacatacggaaagccgctagtgaagctgcggtggaattcccctcccttgggggaccatcttgcatacatgagcggtggacacgaaagaacatttcccctcgcgaggttttgcgtgaatcgccatccggagaagatgcgccatgcatgttcattggcgttgtcacacgcccctcagcctcacatgcagattcggcaaacaccgtctcgaatggaaaatccattccggttgtaccgctcaaaacttcagaaacatctacgaaaaaatcgttggctatgaaacgaacccgacgaggccgccgtcgtaagactaccgcagcgccgcgtttctgggccccgccagtcggaatgggtggcaaagctcgaggatacgcgtttggatatcgcgacagcagggagggacgacgagaaggggggtggcatgggtatttgcgaaataaatagtgttgtatagcaatgtaatccagtgttgtaatggtagtggaaaaaaaaaaaaaaagttctagtgggtgcctggcggacgcactgatcgatcgtccgacttttgttcttttccccaaaacaactgagcgcgcaggaatttgtcaaaaacattccttgtttcttcttcttttccgcatcctgctctatagcactttacactccttacccgctcccataatccccattccaccgaaaatgtccaactttgacatccccgctaggcccagcaacgtcggtatcctcggcatggagatgtacttccccaagagggtgagtgtcgccactatcaacttactcctcttctgcagctaatttcggcgcatctagtgcatttctgaggaacagctcgaggagtttgacggcgttgccaagggaaagtacactattggtctgggtatgggccacatggctttcactgacgacaagtgagtttgtcaagtaatcgcgatggtcaaaatagctgacagtgcaatagggaggacatcaactctgtcgccttgaccggtaagcacaaagtataggcattgatgagacaatgctaactttttgcagtcgtttcttctcttcttaaaaaatacaatgtcgaccccaggtctatcggtcgcttggacgttggtaccgagacccttatcgacaagtccaagtctaccaagactcttctcatgaacctcttcgccgagtctggtaacactgacattgagggtattgattccaagaacgcgtgctacggctctaccgccgcccttttcaacgctgtcaactggattcagtctgaaagctgggacggaaggaatgctattgtcatgtgtggcgacattgccatttacaaggagggaagtgctaggcctgtgggtggcatgggtgcttgtgccatgttgatcggtcccgatgcgcctttggtggttgagcgtgagtgctagtcaagcccagagagatattgtttgccaactcatttgcagccgtccacggtacttacatggccaacacctgggacttttacaagcccgacctttccgcggaatacgtatgtgcaattctcatgtcgtacgataggtcactgacgctgctatagcccaccgttgacgggcccttaaccattgcggcatacctcggtgcccttgacaacgcctactctacttacgtccagaaggctgaggcttcccaggctcgtgccgccaagaagctctctcttgcttctgtgaccgctgccgtttccgaagttgctaacggtatcgtcggagccgtcaatggccacgccaatggccatgccgagaccaaggaagacggtatcgccaagtttgactatgtctgcttgcacagcccttacggcaagcttgtccagaagggtcacgcccgtatgttctacaacgtaagtcaatacattccgttcgaaccatatggaaactatgaagcttatccttttggcaggactacctccgaaacccctctcatcccgctttcgccaacgtccctgaggacgtcaagtcccttgacaagactaagacctataccgacaaggtcattgagaagacttttattggtatcgctggcgaccattataagtctgctgttatccctggcaaggactgtgtctctcgatgcggtaacatgtacactgcttctctttacggtgccctcgcctctgtcgtctcttccgctcctgaaggtatcgagattggcaagcgaatcggcatgtacgcctttggttctggttgtgccgcttctttctacgttctcaaggtcaacggttctaccaaggaaattgcggacaagttgaacttgaaggcgagattggctgctatggacgtcaggccttgtcaggaatatgttgatgctctcaaggtaactactcatgttcatttcttgttggggacaatgattggctgacgatgtcacagctccgagaggagaaccacaacgctgtcaagtacgctcctcaaggctctcttgacaacatctggcctggtgcctactacctcgagggtgttgacgatctctaccgacgaacttaccttcaaaagcctgaatctgcccaagtatagagcgtattgtttgttatagagggttattctgaaatgtggctagacggacaatctgttcggttgcttttggggactttacatgtagtttatataccgagtgcataatggatatcattggcatagtttggcaaatgcatgttaaaaacaaaactacaatgaaattcttgaaggtttctctcccctttcttcgccatcccgtactctccaagctcgccaaccgtgcacagtacccctaacttttttgtctccggggtcattttcgaacattgcaccggcccattcttctacaactttttcatatgcccatccgtttcctgattctgcgagacgggggaaaaaggccatatcggcatgtgcaaggtgaggtcggtggtgagtgaaaaagacaagaatagagggttcagtgaggggcgcagagggattggaggggtcgtatgactgtgtggatgaagaagttaatgtagcctcgacagttttgatcaaggcgtcatgcttttgtcaagattagtaaaaagaaatatacagcataggataaaaaagaaagaaaatgacgtacttgggaatggttgaagacaagatcgctcagaattaaaaggtcatacttttgacccttggggagatgacctagtaaagggtcgacggattggccccatacatgcccatcaacagctattctctccttttcctccccttcaaggttgacgtcgacattgaatcgaaggttatccagcagtccctcgtcggaataatctgtaacaatgaccttggagctgcctgcaaggacacacacaatagagggcagaccggcacctgcgccgagttcaagaacatggcgagattgggtgatttgaggtgtttcaagaaggtatgtgcttaatgtccgagcagtgttccatctatatcaaataaataaaaaatgtggtgattgattagcatttgtagtttcactgaacaagcgatgacttgcagatgatggccccagaggggatgactgccgact

SEQ ID NO: 237 - DNA, 3847 bp, Cryptococcus neoformans
gtaaggactcgatgagcttctgtagtggcagctgcccaggtagattctggctgtttagctggagaagaggagaccgatgagcgtcgctgtgaggtggaaaaggagaaggttgaggagatgcggtgcttagggaatgccctggttggaagggctgggcgacggagcatgtctatgtgggctgtgggtgctttttttggttttttcgtaacgatgaattccagcgaacgcgagcataattcgttacgatgaacgaaaggaaaacagccgtcatcgagaaagcggaacgtcccgaccaattacgtaacagatctttattattgatttttttgagcactcatcaaagaactgaaagttgaccacgatttacagttcacgcaagtctcgaagagcatatccgcatcatcttcggctagaatagcaagatgcaaggtgagtgacggaggatacagtgaggataatagcttacatagttgtagctcaagttccgaaatcggacaaatcgtcctcttcttccggttctgaggaagactactcttccgactacagttcctcatctgaagatgtcaccgaggatgaggagggcaacgaactcactcctgcattagatgccgctattttgagaactcttagcaaaatcaagaagaaagaaggtgtttatggtggagaaaatgttcttcaagaagagttgcggaaagctcaagagattgctgagcagagaggcttgaagagcaacatagtcaagaaggttgctgaaaaggtatgtaatctttattcacgaaaataattgtatgctaatataatgtagccctaccttcttgccgactatcaccgtagcaagttgcttgcgggcgaagatcaagatgaagactctgagtctgccgaacctcttactcacgtggagtctcaacgtcggctccgtcaagaggccgtttcagccttcaagacgcttgctgaagaatctgatgatgagtctgacgaagaatttatccagaaaagggaaatggacgctcaagaggtcgatgaagatgatgaagagtacaagaagtttttgctggaatttggtggcggtgaagaggaagtaaggaagatccttggtatgggtgatcagcctgccatcctcaaggtcttggagagtgaaggaggagaagatgaggaggagaaggctgcggtaagcaagatcgagaaggaggaattggaaaggcagaagcaagaaaaggaggcgaagaaggccaaggacgatgatgatttcctgatgaagtaagtcagttcccttgtatcctgctctcatgctgacgtctactaagctacatcctcaaccgtggctggattgaccgatccgaaaaacatgtccctacgtacgacgaagtcgtcggaccgtccaccgaagttgctgaagaagctgctgcccagaccaagtctaccaaactcaaatctagccatccttggggagagcttgatgaagaatccgattttgaagatcgtgccgaggagtttgagactgaatacaatttccgattcgaagagcccggatcctcgactattgccactcaccctcgtgacattccttctcttgttcgtagggccgacgatactcgaaagtccaagcgagctagacgagcagagaggaaggccgctgagaaggctgccaaggaggaggagattaagagagaaaagggcaagaagagaagagagatggagaagagaatgaatattttgaaacatgacctggagaaggaaggcttcaaggatctggaatggggcaagctcgaaaaggtgttagatggagagtgggacgaaaatgtctgggaaaagattgttggtggtatgttgagcaagggtgatgagcaggaggtaagttttgtgtcggtgacactgcaaagagagcgctgattgtaaaagcaggacggggacgacaacgagaagcccacatgggatgacgaactcggggatgccgagtacgacgaagaggagggagagggagatttccagtacgagtttgctgaaggcgagggtgagggtgaagatatggatgtcgacgaggacgaaggacctatcaacatggatgccgattttatcgacgaagaaccctccaagaaatccaaaaagaaagacaagaagaagaagaacaagaacaaggaacgctctccctctcctttgtctgaagatgaagagaaccagctctctattcccgagaaagctcatgctctcaaagaagctgtcgaatcttacaatgcgctcgcccacgaagacatcatcgaggacatgccgactcgtttcaaatacactccatcagcacctgcttcctttggtctcacgcctgtggagattctattggccaccgatgacgagctcaacaagttggttactatgaagggtattgcgccttacagaaaaggtggtatcggaattcagggtaaaggcttgggcaagagggtgagggaattgaaggacaagctgcgagagaggagatggggggaggaaccgtctcagactaagagcagagaagagaagaaggaaaagaagagaaagagggacgatggcgaggaacgcggacaagacgaaaggcgcgggaagaagagtgagggtgaggccacggagaagagcgaaaaggtgagaaacgggaagcgactgggaaagaaggaacgtatgagacttcaaaaggccgccgaggctgctggtgccgctcctgctgctgctggcgagcctgagagtgcacctgcggagaagaagagaacagtcgaatcaggtgaaatgccagctgatgccccggctgcgaatggagaggagggagctgataaaaagaagcgccgaaagaagaagaagagtaaggcggacggtgaagcttgagcctgatctagtcttggccgaggggcgttttgcttttgacgattctacatccattatacatcccatatctgtacatacaaaatgcatctatcacccaataatgtccctttttttcccaacattaatcatgcgcagtattcgcggtcccaatacgccgacatcgacatccacaacccgttgggcatagcgcaaacctaccgtcggcctctaccccatcgaccttttccaccggatcggcatttgcgccgtctgtagtagaaagcgtggtaaaattggagccggcgctttggttgtacgtagacgaggatgtgttgagaagagcgtgcggggtatgtgaagggtttgaaacgtttgtggatggaacggggatgagaggcgcttgacctggcgaccgcgtttagtaagtttgtcggaatgatagtgtaaaacaaagcaacaggaggactggaaacgcactgtgatagagccgcatacacgcctgatgacctccatgtccacactgtcggcatcccatccaaaggcccttgattatctttcgactgccaaaggggacattttagcaaaaaagaggatcacttgtttttgcacgtaccagatagcacagctctttgcccccgttcggcattttttacaccaccagaatatttttcctttcacctcgatatcttccaaattaccggtactcttcccgcacctttcgcaaaagaacgtatgagtcagaccttcatcttgcggggtgatttccaaagaaggtatgcctgaaaagcgtcggatgtaggcggcgaacatgaaaagacgatgttgttcgaggagttggacgtatgcgtgcgcgagacgctccacttggaagggcgggaatgtaaccagcggcgaggcgatgagggcgatggtggttgccaattgcatttcaccctggatgggaaaaaaaaaaaagattagccagacgattaccatttcaacatggaagattaacaaacattctcgacacagccatcccacc

SEQ ID NO: 238 - DNA, 3915 bp, Cryptococcus neoformans
ttttttgaggtatgcttcagagaacgggaatgacgcctgtgaaacttcatcagcacagtaatttgccttgactgccaaacgtatgtcggagagatatgtcatgcggaatggggaggaccggtagagttggacttacagtactacggcgaagagcgttaagcacttcatgttcaggccaattcgtctccttttgtttccacccgttctccacttcgctttgtacccagttctcgacttgccactctcccattcgcttctcagggcccgcctccttttccttctccccgtctacagcagcagccacacgcttaacgtgcgcacccaagaaccgacatcgccacccaaaaggacagtaccccaagtccttcaacaccgggcaaaccgtatctaagtcaagcgtcttccccaccacatcctcaccgcccaccaccctttccccttccaccacaaacggcgcctcaccgaccaaggaccaatcaggacggtaactgatatcattcggtttcacctcaaagtaaccttcccagctgtgagcatatcggcaatcacccttatctgcacggtcacagatacctgttgtttcccaagcacgacagatacggacagaggcttcccggatgacggggaagtggcggcccttattttgaccttttttgtcttttttgtcttgcttgttgggtttacgccgtttgttgtcgggtctgtcacgaccatcgcgggagtcacgggaatcggtacgaccctcggcggcatcatcggggtgaatgttgttgagctctgaggcagaggcagattcgacgataggggtggtgttgattagatatctaaagaatgaattttggttagtttgaggtacggtttgcgacgagatccgacgtactcggctttgatcggagcctgaccggaaaatgctggccttgcgttgacagaagtctctggacgaggtgtggctgcggggtcgtctgtcatggtgtatacagtataggaaagtcaatactcgatggcaaagatgtcttgtccgtacgtacgtacgggcaactggcgcaacttttgggtggaggcacgaggtaattacgtaaacaaattgccgtttgcggagtcaggtgccacgcaacgccccccgcccgctctttgctctcttgactctccacccgcttccatccacttcatcttccacatcccttttccctcggtctctatcttctcttgcaccttccacgatgggctgtacgtatattcttttcccgctgtgtcgcgtcctcttttgcccgctgacagcacatccccttgacagtccgtttccttgagctcgtccgacctttcatgagcatcctcccagaggtcactgctccggaaaagaaggtacgcgtctttcaacctctccatcccatctctgttctctgctcacaaacttgacgcgtccctaggtcgttttcaaccacaagatcgcctggacagccgtcaccctcctcatcttcctcgtctgctcacaagttccgctctacggcatcatgtcctccgactcctccgatcctctttactggctccgtgctatcctcgcttccaacaggggtaccttgatggagctcggtatcactcctattgttacttctggcatgatcatgcagctcctcgcgggtgctcagttgattgatgtcgactttagcctcaaggacgaccgtgccttgttcggtgctgcccaaaagtgtaagcactttgtcgttttcctaaccagtccagcaactaacgcgacgtagtgttcgccatgattatctcccttggacaagctaccgtttacgtcttgactggtctttacggctccccctcctctctcggcgcgggtgtctgtcttctccttatccttcagctcgtttctgcctccctcatcgtcatcctcctcgatgagctcctcaccaagggctacggtcttggttccggtatctctcttttcatcgctaccaacatttgcgagtctatcgtttggaaggccttttctcccaacactgtcaacaccggtcgtggaccggaattcgaaggtgccatcatcgccctcatccatcttttgttcacttggaacgacaagactcgcgccctcaaggaagcctttctaccgcgatcgtcttccgaacattatgaatctcctcgcgaccgtcgctgtctttgctgccgtgatttaccttcaaggtttccgaatcgagatccccatcaagagctccaagatgaggggccagaggggcacttatcccgtcaagcttttctacacttccaacatgcctatcatgctccagagcgctttgaccagcaatgtcttcctcgttagtcagatgcttgccggtcgattccctgacaacttgcttgtccgtcttttgggcgtttgggaggtaggtttacttttttttgttcttcttgtggttcgcgtacgatttgtactaatcatcccaacaaattagcccatggagaacaaccctactcaactgggcgccgtctccggtatcgcctactacatgtccgctcctcactctctcacctctgcccttaaggaccccttccacaccgtcatctacatcgccttcatcgtcaccgcgtgcgccctcttctctaagacctggatcgaagtctccggctccggccctcgagatgtggccaagcagttgaaggaccagaatatgactcttgcaggacacagagatgcgtctatttacaaggagttgaagaggattatcccgactgctgcggcgtttggaggtgcgactcttggcttgttgagtgtggtggcggatatgatgggtgctttgggaagtggaactggtattttgatggccactactattatctacggatgtgagtctttgattttttcacatcgcttactttctttgtgttgctggcttgctgaccagacgttttctacgtagactttgagttgggtatcaaggagaactctggtatcgatgccactggtctcggtgacctccgtgagtatttcaaggcccctcccctccctctcattgacctcggactgagctgacgtcaactacagtcttctaagttatccactctccattcaactccagttcctgcggatttcccattcttaaaaacagcgtctttcgttcttcaagtttagtcgagcttttggactcagcgctgtttttgggaatggtacgtctgagggtaggggatggtatgtgtataaggtgggctggtggagagtgtgcgtcgttgtagagagcgagtatgcaggaaaggaggggaaggatgaaaagaaaacgtaccgaaggtcttagaggaggagggttaggaatcggaaagtgggaagtataagaagtggaggaggaacaagtttgtggaagtgggaggagcgaggtggattcagcatatgatttttccttttgactaaaaaaacgttgttacacctctctcttactcaaaatgaaacattacctgcatgcgctttgcaaattacgatcttagcagagttcaatgtcttgttcttggtgcgattggcttcgaaggcatgacaaaacaagacgtatcgggacgagaagacgaaatcgaagaacgagtatgaaaagacgatgagaatggagaataggtgtgcagattggcgaatatctatgatgctgacctctgctctcatactgtactttatagtgagccttgactaacacctgggggaaagaatcaagatcgtaatgcccaattaggattaacgctgcgctggacatctgtacatctgtgtgcggaaaggtggataggatggagggatgactgccgttagcacatataacgcatgaatattgatggtcaatttgatccgcactgtaggaattagtcctgtggccgggatttgggctatgcggctggatatcactgtgtatttctgagttcctatcctgtctatctgtcgtagta

SEQ ID NO: 239 - DNA, 3762 bp, Cryptococcus neoformans
gcgctgttgctggcggcgtccttcaggtcttgtacttttttgcatgcggagaaataatacgaccacgcagtactcgtactgctggctactatttacgtacttcgtcgttatccttattaattatcatcatttataattaacaaataagcttgctaataattgactgatggtggcgacaaaggccaccttccgatgataagggcgtacattttgattccgtcaagcacgatccgaccaatcagaccgaaagctgcgggaccaacatatactatttacctgctgccgtagctgccgaagcacggacagatcatgggtccacgaatagcaccaaaaaaggctagtagatcagcgcttggcgcccatgacttatgcgctagtcacttccttcttccatctggctttggaatttggaatcgaacaacaagctgcggcagaggtggggcgagatgggggacccatccaaaacccctccggttatccccttgccggaggcaaaaaatcacctattttaggagcttctgaatagttccccctttattaaataatctagcttgtgtgcctggttccttgcagccccccagatatgatgctccgtacattaagtatggcatcgttgtcaaattccagaggttagaggttagaagagctgctagacgggggatgaataattcattgtttaacagatattgtatggcggcccaaggtggaagagcgaaggtaagaaaaagaagaggcaagataagctaaggaacaaacccgatcagtccgtctgggaccccacggtatgacaaacctctcgtattgcatttgccttcattcgtaagggaagtctgcacagaacagagaaagaatcgcagtataataaacctatccacttcaaagatccacatacttcgccttgtacttacacgccatccattaatcactagcgacctacaactaagccaatagccatagccgttcataactgcttcgccttgtgttcatcaaggatcaccacatgtccacctcacaccttcctcaccacgcacaggagcaaaagattcgccacgaagatgagtctgaattcgcccttccagcgcgccgctcctcttctatccgcgatcaattagcagcatggcacgccaacagaggggacaggtcctttttgagatgtatgattcccagtctacgacagcccgtcgctggagaagaacctgaaacaaagaacccttttaaaatcattcgagctgtttccccttttggatggttgatgtttttctcggtaagcgcaatatttcattgccaggagtgtcccagttgatctgtccgcaggggtggctcgcatggacaattgatggttacgactttttctgtgtttccctcacccttgactccttagcagagcaattcgatgtctctcccagctccattactactgccatcactcttacccttctatttcgttcattgggtgccgttatcattggtctttgtgccgaccgttatggacgaaagtggaccttggttttcaactgccttttgatcatggtattcgagcttggatctgggtttgtcaacacgtaccagcaattcttggccgtcaggtgagttgctcctttctccgctgtaagagctgtgctgatcgacaaacaggagtttgttcggtattgctatgggcggtatctgggggtgtgctgcagccacgtgagtattctattaccttcttgaagcgatgtactgactctgtatagtggtcttgagaatgtgcctcctattgccagaggcttgtgcagtggtattctccagcagggttactcctgtggctaccttctcgctgcaggtatgtgtcaactcttatttcgcacttattcattaagctgacttaccactttaacagtcatcaatctgactgtcgttcagcagagcaagtacggttggcgagcgatctatttcttcggtgccggtttctctctgctagccgctattgtcagggcttgtctcccggaatcccgacaattcattgtcgctcgagaagaagccaaggcgaagggtatttccagcaaacaggcctctaagaattttatccgagaattgggcaacatgttcagaactaactgtaagattttccaagaaaactggagggaaggatctgatagttcgcggcagggcttcgatggatatgggctgtctgccttatgactttcttcgtcagtctcttggtggtataccacagtcttaacaactaacatttagatcagaacttcttctcccacggtagtcaggacctttacccgacttaccttaagaccactaaaggtctttccagttctctcgcctccaaggctactatcatctctaagtgagttttgcagcccgttgtactttcctttctgctaacaagctgtatagctgtggcgctatcgtcggtggtactattgctggtcacgtctctcaatttgtaggcaggcggttcgcaatcttggtgtgttgtatttacacggtaagtgcacacttgcttcatttactgttcgctaatacgtgctcataaactcctaggcttgctggattcctctttggattcttcccgatagcttcgctggacttgctgctggtggtttgtaagtagagaccgtctggtctcgcagatcatggcggctgacagtatctccttccccagcttcattcaaagtggtgtccagggaggcatgttgacttgactgcgttgattgtgaaatcctatactgacgaatatcgtagcttggggtgttgtccctgtttacctcggcgaaattgctcctccagctttccgtgctctcttcggtggtctctgctaccaagtaagttgtctgattatttttgtggccttgagagagaagacttacaccaaccattagcttggtaacatggcctctgcaggttctgctcaaatcgaagccgatgctggtaaatccctcaagctggccggtaccgacatcccagactacgctgctatcaacggtatcctcatcggtgctgtcattgcctttggtatcattgtcgttttcctcggtcccgaggcggacggatcccatttcgaaaaggccaaggtcgctatcgagcgaggcgggggcgaagttgctcctaccgagttgtttgagaacaacaccgatgtacatagacagttcttggacaagcctgagctttcacacattgagaagtctgaggttcagcacaaggaaatggcttaaatggcttaaacacctgtcattgtcgccttgggttcaggctggcttttatcgtgtttaattagtttcgtgatctctaatgatatttgtataactattctcgccgtgtgacatgttaaatggattttgatattaagaggggtagcgtctggtgaaaaagtagtagaagattacttccgatagatttgttgggacttgggaaacctgaactttaaaatacgtaatgtaatccctccaataattcaaggagatgctaaaagtagattctcgtatttcgaaaagcaggattctcgctcgtatatcgaaatcctgagcagcatcttattaccgcgtgatacgtagcgggactgattacgtgcgtccccaacattacctaggtacgtatagcccatttcctcatttaattcttacttcacatctcagtatctacaacatctagcatctaacacccatgtcagccagcaacgaaggcatccattttgggttctgtacctttcaccaatatcacaccgttcacatttgtcgtcgcaacaagaacaccgaaaccccagcagga

SEQ ID NO: 240 - DNA, 4089 bp, Cryptococcus neoformans
cggactagggcttgggtagctctcgccttctgggccgtccctcaggccgcttgccttatctggaccggtgtcatcttcggcaagtatggcaacgccacaacagcttttgattataatctgtaagtttcgcttacagcttgtacatcaatcataatattgatccatactcttccgtgttctcaggaatactcgagagtgggctcaagcatacttcccttacttcttcatctttactactggatactggacccagctgagcatctattggatcctcggtaccttctccgcggacgttaaatcatcagcccgtaccggaggtttgttccgatgtttcgaaaccctcggtcaagccatcgcatacggcatcaacagtcatgtcggcgacgccagaatcccattctacgttatgtgcgccctttgggcgctggctgtgccttctatgattggcctcattcggctggttcccgaggttccagcttggaatgatgatgtggtggacggaaacgttgagcagacgctgagaaagacagagaacctggagctttgagtgcgggtatttgagaagaccttcgggaagttgcaaaaaccgccgtaacagttctgcctaataatttgtcgaatattttgtaggattcatagggttgtaaggtatatacctaactttcgtcaatatcatgtagcaaggaatcattgcatgagatgacaagggatcattgtaaatgtatggtcagatcaaatcaaaacaaatatatatctcatgaccgatgacagcgcacaataaacaagattattaagtaaggctgtactttaaaatgatttcttcttcattcttattcacattaacgttaactaatcggcggtggaggacgagtggaggttctgccagtcccataatcgaacaggtctactacatccgtcaacatttttgtaatatttgttgtttccattcctcaaatcttattttcatttcttatttgacgcgagcacgtcgccattcaccatgattcccatgatattatacgcttcagaaactggcaatgctcaagatacagcggagcgcgtggcccgcgctttcagagcaaacggcagagctgtgacctgtctcccaatggaccagttccccatttcagcccttccacatacctatcttctgatactcctcacctcgacccacggaagaggagatccacccccggctatgctccctctttggacagctttgttgcggtcatcattaccggaggacattctggaggatgtacacttcgctctttttggacttggggatagcagttacgagcgcttctgttacgctgggaagatgttgctgcgaaggatggagcaattgggggctacaaagatgggtgaaccagcttggggggatgagagatcaccaaatgggtatgtgaaaagtgggcttattcatgaaacaaagctaactttctgtagtattgaggacgcctttttgccatggctccagcaaactttagacctctatttgccttatctgccgttaatatctccaactcccaaaattattgaatccactgttttacctccgccaatatacaagatttctcccgcttccacttcgaaatccgtggaacacgatctatcgttggaacgcctttcgatctcattcccgattccgaatggcaaacctgctcccgtccgagtcgaagatcaagccagagataaagcttcaacatctagaaccaagccagatgattgggtctgggctacgctcaaaaagaatattagattaacgagcaaagattggtggcaagatgtaagggagatagagctggagtttgacgaccctgatacgtaagtgcagtaacttgggaggaaagcgatccgttcgcccacgttaaccatatctgccaggaaaccttacactgccggatcaatatgctccctacaaccccagtccagggaggatgatgtcaacatgtttttggagatgatggagcttacctcacaagcggatgaagtcgtcactatcgagtctcttcttgatggtgcgttcccgacttctttgaccacctcctaatcaattgctgacctttattttaagagcaaccccttccttcccatcttccaccagctggcactccgacgactttacgttcgttgctgacaaatcatctcgacatacggtattctccccgtaaaagctttttcgagtggctacgacgtcttagcacgaacgaaatggagagggagcgtctcgatgaatttatatccgatccagtgagtcttcccagtgtatctaaagtccatgacaagctgaccggaagaatttttccaggatgagatacatacatacgcgactaggccgtcacgcacgatagttgagacactagcagactttaggttcactcgaatacccatgtcgcatatcttggaaatactccctcctcttcgaagacggcaattctcaattgcaagctcatgggaagtgagtacctaaaatctggagattggcatcatgctcacactctgattctcgtttcttaggatcatccgggaaaagtacagctgctcgtcgctttgatcgagtacaaaaccaatctaaaaatcccaaggaaaggtctttgctcatcatggctcaacggactccctgtgggtgcgttccttcatgcccatcttaaacccttaatccagtgaaagttaatgagttctttgaatacaggtacgcgcatcccaatacacatcgcttcaccaactttgttccttcctcaagaccctgaagtacctatcatccttgtcggtccggggacgggtgttgcgcctatgagggctttcgtagagatccgagtcagacaaggtgctgccaaaagtgagtgccctcgtcttttcccacttccatgatagaayaatccctctgacggaatcgaatccattccttctatttcttctcttcaaatagatacgtccctttactttggctgtcgatcgtccaccacagattattttttcgaatccgaatgggatgtgcaccgcgaaaagggtgtcaaaatccaagtcgcggcgagtagagaccaggaagaaagaatttacgtgcagcatttgataaaaagggataaagagtatgtaaaagagtggatcgtagataagaagggatggttgttcatctctgggtgagttccttttccttaatcagctatgtaaaagaagttccgaggagagattgctgactgttacttctgctgtgtattggggataaaatagatcatctaatgcaatgccccgcgaagtaagagaggctgtagcttggtgtatttccaaagaaggtgcgggggatatgacagaagaagaatcaaaggcgtatgtggagcaaatgtttgaggataagcgaggtggcgaagaaagttggtaggtacagcagatccgccggtggttaaacaaaaagataaggcaagaagccagaagtgccatccatagtgcaaatcatttgaatggtctgaactatgcattatttgtgcatgcagtatgtccgtgaaccactaactaaggataaccagtaagtaaatcaagctccaggcctggatagcatctaatggtttcctgtcatctatttgcgttttacttcatgacccccattatgcgcgtcgcacccaaaacaaacaaggtagcctcttaaacccaccaaataacccagctgctttccaatgaggatgttatcttaaagtaccactggggccgaattcctccaaagatatgtcaattataaaggcaaataggaagccaactgcgccgaaacctaccttggcataacagttcttacagtaaggaatgccttctctatcagatacctttgagggatctaatgtcgtcttacacttgttacatttcaaacaccatctgtgccatttatggctaacagaaaatacctacggtacggttagcgtcctttcagccccttgacaccgccttgtatacagcctcaacacttacctgctccgcagcataaaccctcttcccgcatcctccacacatatcatcccctattatcctccctcccactttactccttgggctctcccctttcttcaataaccctctatcgtctagcgcttttgcacc

SEQ ID NO: 241 - DNA, 4013 bp, Cryptococcus neoformans
gaatggcgccaccgccggggtattatatagatggaaggtatgcggtcgctccacctccgccaactaatgggatgcctcatggaggatatgtgcagtatgatatgccagtgccaacgcacgatgggaaggatgaaagtggaagagataatgggaagggaaaggagaagagcagaaagagtaattcgaaggaagagtagaaaaatttcatcaaatagaggaaatccgtgttttagatcctctggagctccaaggtgtagacgatcattgtataacatttagtggtttcgttattcatttgtctgtttgggccatagtatatatccccccgtatagaatgacaagtttacgccaagccttctgtatcctttttttgtgttgatcatcgaatgcatctcggtacagcaaatgacagccatcacctcatcatatgcagcaacaacgagctggtttttcaaactgaatcttgagtgggcgtttcattagtagctgctcaccacaactgtggacgatcttctcgaaacctccccactgcgtttccaacgtcgtcgtattggctctgatctgtgggtaccgaactctgtggattactgtgctgtgctgtccctcccgacaagaaaaaaattcaccaagctcggatggcaccgctcccatccctttttgactgatgaattagattacaacgaacagtaaggatgattgcacgacggtacatgatcaaacgacagccccgctttgtatgcacgccccttccgtacatacccgcgtgggctcgcttcgcccatggatgcagacagtttcatagacaaaatgaaataaatgatggaggaaatcggacgcaggggacttagtgttttcaggaacccaaaacaaaatgtcgttccaccttgtgcccgcaccakcaaagtagtggtattttcatcgtcgaaccatctttcgtgtctttcacatttatttgtttcgtctttccactcccgttttacccccttcaactcacccagccatgtcggcaatcatcccccaggtccagcaactgctgggacaagtggcccaatttttcccaccgtggttcgctgccctccccacctccttgaaagtcgcgatcgccgtcgtcggtatccccgctctcatcattggcttgaacgtttttcagcaacttgtacgtattgcattgatgggattcagctctttccccatgctcattggattcccaagctgatcacaagctccctgacgcgttattcatccgtcgcagtgtcttccccgtagaaaagatcttcctcctgttgtctttcactacattccctggtttggctcagccgcttactatggtgaagatccctacaagttcttgttcgaatgccgtgacaaatatggagacttattcactttcatccttatgggtcgaaggattaccgtcgcgcttggtcctaagggtaacaacctttctttgggtggaaagatttctcaagtctctgccgaggaagcctacactgtaagcttatatgctttactggctcaatatggcttacttattatcgcttggtagcacttgactactcccgtctttggcaaaggtgttgtttacgactgccctaacgagatgctcatgcagcagaagaagtttgtgagtggataccattcgcagcttgattcgcaagctcactattctacagatcaagtccggtcttactaccgagtcccttcaatcgtatcctcctatgatcaccagcgaatgcgaagatttcttcaccaaagaagtcgggatttctccccagaagccttctgctaccctcgacctcctcaaagccatgtccgagctcatcattcttactgcgtctcgtactctccagggaaaggaagttcgtgaatctcttaatggtcagttcgccaagtactacgaggatctcgacggcggtttcactcctctcaactttatgttccccaacttgccccttcccagttacaaaaggcgagatgaggctcagaaggctatgagcgacttttacttgaagatcatggagaacaggaggaagggtgaaagtgacgtgagttgatttcaagttgttgaaggagaaaagtctgatttgagtagcatgagcacgacatgattgaaaacctccagagctgcaagtaccgaaacggtgtccctctctctgaccgtgacattgcccacatcatgattgctcttcttatggctggccagcacacttcctccgctacttcttcttggactcttctccatcttgctgaccgacccgacgttgtgtacgtttttttggagaaattttgaatggcgaagcataactgacgaggatgtagagaggctctttatcaggagcagaaacaaaagctcggtaaccctgacggtactttccgagactacagatacgaggacctcaaggagttgcccatcatggactctatcatccgagaaactctccgaatggtaagtcatcccgacttgtatttccgataccttactaaccaaatccacttctagcacgctcccatccagtaagccacggacgcctcctttataaactgtactaatatataatagctccatctatcgaaaagtcctttccgacatccccgtccctcccagtctttccgccccttctgagaacggccagtacatcatccccaagggccactacattatggccgcccctggcgtctcccaaatggaccctcgtatctggcaagacgccaaggtctggaaccctgcccgatggcacgatgaaaagggatttgccgccgccgccatggtccaatacactaaggcggaacaagtcgactatggtttcggttctgtcagcaagggtaccgaatctccttaccagccttttggcgccggtaggcacagatgtgtcggtgaacaatttgcgtacactcagctttcaaccatcttcacctatgttgtgaggaatttcactttgaagcttgctgttcccaagttccccgaaaccaattaccgtgtaagtctttgtgttccaatctatcattgggatgatttgctgattcttcattgtgtagaccatgattgtccaacccaacaaccccttggttactttcacccttcgaaacgccgaggtcaagcaggaggtatgaagtgcacgcatacataagaactagatggtgcgagttttagtacgaattgaaagaaaggtcatgaagtcatagacgatatcaatggaccattttcttctttttttctgatgatttacccagggcgaacatttcctcatcgttttgtttggtgatttttacgatgtccttgtccgatgcataattatattcatgaccaccacttcatatgtgtctttcttagcagatgatatggctacaaaattgaagtgctacactggttagatcccttgaccctttcctttttgttcttcgttgctaccgcgtcctctcattcccacgcctcatcataccccaactgacttctatcccatgcgccctccccgccaggcgccatcgtcgtcattatggcacccgcagctctcaagaacacactgccatcaagcttactcatacccttaaccgcctcctctttatcaaccccccttccttcttctttgtaggtacccggcaagccacctggaggagagttaccgaggagggaggcgtaatgtgcgagtgagcggatcgactttatcacgtgagaatctggcggattgtaatgttagtgtcaaaaagttgcgaatcagacaatgataaggtggtctcgaggggttgggattgatcttgccctatcggacggatgggtggcaaatatgaatcattcgagagggaggaagagagggaagaaaaaaagtgataaaggcaaacagaagggacataccagggtaaaccatcgcactctccaccaaactcaaccacgcattcctctcttccttctcccccttccccaacgccttatcctcttttaccaatttctttagggcatcttcacttccttcggtattgatggtagggtaaaggtcatacgacatgattagctccgg

SEQ ID NO: 242 - DNA, 3992 bp, Cryptococcus neoformans
aatcagtcagagaatcccactcagtcttatgaacttactggggatgtaaagatcgggcgcgttgatatcgtctctaggcgcctgccacccttcaacggcgccattgtcggttgaccgccgactttgtcgagaccaaggtttatgtctccaaggaaaaaggattagacgtaatttattcaaaacgtatgaattggttacagaaaaggagattttgatgagttgtagaggcaaatatctcgtgaactaatcaagacgtcagctactgagcgaccgctgacattgtaccaacatttttctccatatattcctgtgccagcagccactgcgctcttgccaaactgcatccccatttgggcagtcgcgtcattcatgccaggccaagcatatcctggcaccccatatccatgtacgccttgtactcccggcgttcccgcttggccgtatgtctgcctcgattgaaccggctgctgccctgtaggtgggggagcgtaggaactaaagcctgaagagctagctagtggctctcccgccggaggcgaagagtagcgaaggtaaccgtcttgagagatgcgctgggcttgggagtaaggggaggagtctgtggactgagctggagtgtgtggtggctccgggggcgggtaagcgatgtgtgttggcttggggtgttgaagtgggggcggagagtgtgacatatatggttgttgggccattgcgggtatagacataggtaaaacgcagccaagtcagctggatagagaagagtggtggtgatgatggacgttctggtggcatgatggtggtggtggtggtggtggtgatgataatgataatgatgtggcattccagtgaacaggtggccggcggccgccgccggtggtcgatttttcccaaaaaaagaagtcaactcgcatctaataatgagtaaatagcagtacttgcattatagaaagcaacaacaaaactttccctacgtccacactttacaccccaacacatttccatgacagaaaagcaacagaacagtcagcagccatcccagttggactcaactgcaagtatctcagcactcccgccacaattacagcaacctgccgccgggatcactggagctccaggaaatgcagaagctacaacatctgaaccaccttcaaccaagcgacctcgcaaagccatagagtcctcagagcccttaacagaggtgattcttcgtcggttgacgacgatcaaagagggtgatacagtccttttgcgattgccaagtgaccttgttaaatccgtcgttgtccaaggggacaagtaggtctctttagtcgatcacagaagttccgatgctgattgggaatagtcttgttcagctcggtaaatatggagcgtttcccgcctcccaactcattggtttgcattacgacatcacgtatgaaattgtttctagcagtggctctggagccagcactcctcaacctcaatctcttgacttttccacagaagaaactcaaagcaaaaagggcaacaagaagaataaaaacaagggcaaggacactgcagcagtatctaaaaataacccagggtggaataatatcttgaggcctctaaaaaggcagcttgtcgtggatgccgtcattggttagtcctgcagtcgtcctattgtgaggcatgacactgacattcattaaaagacgacatcgttgaaaccaacgaatttattgaggatctttcagaaactgaaaagacgacattgtctcatgacgagattgcggaacttcgagcccagggatgcacgccagaagaaattatccaggcgcagatcgcacgacatgagaaatttgggctcaaaacagatttcagcaaagaaaaatggagaagacggaaagaaaaaaagtatctcctttttctgtctcattgcctcgttgctttccataataacctatggctgtagattttaccagacagtccaacctctcgctccttctattcctaatgtcctttaccattacaatcttcggtctcctcagtctatccttcatctccgagatgacaccctttcccagttgctcactatggccaatgtccgacctgggggccgttatcttgtcgttgacgacactggcggtttgattactgccgccgtgctggaaagaatgggatccgaaggaagtattctgttattcaatgagagcgacagcccgcctgcctggggcatattgcaaactatgaatttctctgacagggagctggaaccgattaaatggttaaactggttggaagcagaggaagaatatcagaagcgtgggtaatgtagctctatgttggagtcgatgcgctaaccactgcgtaaagctgcccctcctgtccaagccgagcctcccacaaaccctattaaagccgctgccaagcagcgaaaatatgctgctcaggtagccgaactcaataatactcgaaatgagctgcatctaggtggctgggacgggtaattccagtgtatcatgataatgtaatagtacaggctaaccatttacagcttgatccttgcaacgactcttaatcccatttcggttgtcgcccgactcacaccgtatcttctcggttccgctccaattgtagtctactcaccttactaccaagtcctggctgagctgctcagttggtctaaaaaagatccgaattatcttaatgacaccctcactgagagctgggagaggacatatcaggtattacctggcagaacgcatcctatgatgacaacgagtgccactggcggttacctttggaatgccaccagagtgtaagtatcgtcataagatatgctgatgacatgctgacaaagactagtcacccttcacagttccaaccagaatcccatcagaggttcaaaagaagaaaaacaggcaaggctccagggaaagagcagctaagcagtgtggctaaagacgaggaagctgtcaatgaaagcttggaaatagatcccgaggagcttgcaaatgaaggagaatagtctctgtctcctattattaggtcgttgctttgttgtccatttgcatggtattggtactatcaaaatgatacatgcggctagtttgttacttggctttttatgctgccttgcctttggaaccgagaagctccatcatgtggtcgcacacctgagcaaacgcctcaatggccttttcggaagcgtccgggaagggagtgcctgctgaaagttctttaccgagagtctcgacgtaagggtctcgggcccaagagttgatgttgaactacgtaatgattcccgttaggaggccagaacagtcatgggtctcatgattcatgactgaccttggaaacaccagccttaaccaggtcttggaaaagagaatcaggaagttcatcagtcccatgggcgcagaggtagggtattctgcctctgaatcgttcctggaggtctttcaagctgtttcatcactgcatcaatttccatttctttcaacaggatggattatcctacttacatctcaagtttatatttgggtcccccgataaatttataactcccatgaaggtttccgtatgaaggcgcaagtatgtcggcaccagtcctgcattcacaaccaataatggttagttgctaaacgttttggccaagcaacaacgtacgccttcataaattcctcggcgttggcgggatctgtcaacatcgcaccagtgatctctctcaggccggcctcaccaccctccaatcggcccagctcgacttcggtagcaacgccagcggcgcggcatcgcttgatgtatggcacagcaatggcaatgttttcctcgtcggtgtcggcatgacttgcgtcgaccatgatgctgtcaaatttgatacctttctcagcaaggccaatggacagctcaagatgctcggggtcggttgcatggtcgagatgaaccgaaataggaacagaagcgttgtgtgcgctgccgaaaggtcaatataactcactaatgtagggcaaaataataagaacata

SEQ ID NO: 243 - DNA, 4023 bp, Cryptococcus neoformans
ttttccctctcaaatccaacgcaactctcaaaacgccaatctcttggtccgtcagggtatgctgcccagtctcatcgactgtagccgttataggaccggttgttgatattataggccccaccgtctttctatgtcgggtctctatttgggagagactgagcatgagcggtttgatactatttgctacagattcttttgggattctcaagagatctgctgcgaaccatttgagtggcgcgagtatctgtccatcagcaatgagttgaatgtatctagcttacctctggcaagtacaaagtctcgtagtaccgccgcctggcaaaatcatctgggggctcgtctctacagcttggtccgctgcacgatcagctcaatactttcgatccagagacttacgcaacattaaacggccattctttttctagcacacttttggcagattttggaagaggacacgatatgtctattatatgaggcaagggtaaaacctgggccattatatctggctgtccactagctgccttgtagtaatgttcgtccagcactcttcgcgaatgttattgccccttgacacgtcgttttaggcttgctcaaaaagaaatatcatttataggcacgcagtgacgtatttctcaaatcttgttggctgaaacataattttctcgcgcctatcgcctttggaccaccgaacaatagaaatccctcttttttttcgcctcccccgcctcaaatcatctatccctcattccgtcttcaaaccaattctttcaaccctcaagaccggcatcccacagcccacagacggcataagggtatccataacaaatcaccggtttttccgtcctctctactcgactttgaagcaaagaaaaagaccaggaaaacatgtccgacaagctcactcgtgtggccatcatctctgatgacaaggtgtgttatggaggatcatccacaaggaggcacatttgctaactttttgaccatagtgcaagcctaagcgatggtgtgtatatcctctacgatcatgcagctataactaataccacgcagccgtcaagaatgcaagcgatcatgtcccgtagtcaagatgggcaagctctgtatcgaagtcaatccaaatgacaagaaggcgttcatctctgaagagctctgcataggttgtggtatctgtgtcaagaagtgagtgtatcgcaattcagcaatcaactgacaccgtcacaggtgtcccttcgacgccattcagattcttaaccttcccaccaaccttgaatcccacgtaacccaccgatacgccgccaacgcttttaaactccaccgactccccactcctcgtcccggccaagttctcggtctcgtcggtaccaacggtatcggtaaatctaccgctctcaaaatcatgtctggcaagctcaagcctaacctcggacgatatgacgaccctcccgagtggcaagagatcctaaaacacttccgtggttccgagctccaaaacttcttcactaaggttctcgaggacgatatcaaggctgttaccaagcctcaatatgtcgaccaaatccctagaagtatcaaggtgcccaacatgaccgttggcaagatgtttgaccgacagtccgagttgcctaaccgtgatgggctcgagaaggaccttgaattgaagcacttacagtctcgagaagtctctcaattgtctggtggagagttgcagaggttcgccattggtattgcgagtgtcaggaaggccgatgtctacatgtttgacgagccttcatcctatcttgatatccgacagcgtttggccgccgcccgagtgattcgtggtttggtcaacgctaccaactatgtcattgtcgttgagcacgatttggccactttggactacctttccgacttcatttgcgtgctctacggtgtccccggtacctatggtgtcgttaccatgccttactctgttcgagaaggtattaacatcttccttgacggtatgatccccaccgaaaaccttcgattccgagacgaatctcttactttcaaaatttccgagactgtcgatgagttacaagcacccaagacccgacgataccagtaccccagcatgaccaagactcttggcaacttcaagcttcacgtcgacgagggagagtactctgactctgagatcttggtcatgcttggtgagaatggtatgggtaagacaacgttggtgcagttgttgggtggcaagatggagcctgatgagagtaaggacaaggtctcattgagagtttccatgaaacctcaaactagtgagtttgggttattcatgtatagaaaaaatgtgctgatgagcatttagtctcccccaagttccctggttctgtgcgaatgttgttattgaagaggatcaagggagctttcatgcgtgggtccagcttcacgtgtcacatagcaagaaactgatcttttcttcagaccctcaatttaactctgacgttatgaagcctatgaaccttgagcccatcatggaccaggacgtccagacattgtctggtggtgagcttcaacgagttgccatctgtctcgtgctcggtgtccctgccgatgtcctccttatcgacgaaccttcggcttacctcgactctgaacaacgtattgtcgcgagcaaggtcatcaagaagtttgtcatgtcttccaagcgaacggctttcattgtcgaacacgatttcatcatggctacttatcttgcggaccgagtcattgtctttgatggtcaacctggtaaagagtcctgggctagaaagtgagtttgttcattatatatattgcgaaaggcagtcgctgatgggtcattcagacctgagggtctcttgaccggtatgaacaagttcctcaaatctcttgacatcacattccgaagagatcctaccaacttgtaggtttgccctttctgttgttgaattcgtaacttacaactccatagccgaccacgtattaacaagatggactctttgaaggacaaggagcaaaagggtaagtcttgttgactatatttttgtgaaccgggctgacatcctgctatagccgaaggcgcgtacttctttgtcgactctgactagagcgatgaatcaaaaatctgcattagacatatagttatcaagccatttagtttgctgggctaggaatccagtttgagttttgatctgggaattgctattagcatgcatagatacatacccctttttgttatagctgctgtatgagagtttgaatgtcggcggccggggccaatgttatctattcgtgaccgactttttgttcgctccgggtttcccatcccgcttcttcttcttaattcttttcctttttgcttcttgtggatttttttcctaggctgcaatctgccactcgctgtaatccagccatgtcagagcccccgccaaccccgactcttcccaccactcatccgctcatcctcgaactctcttccctccgcgctcaactttcgcagtaccaatatgcctcccaccaaactggtatccagctccaaagcgctcgcctcgaactggcccttgcaaaagagagcgaacaaggccttctcaagcgtatagacggtctacagaaagagatcgatgtgcttcgagcgaacccggcccctccacctatcccgcccacgtcgactgctcttacagaactctcgcttgcccaccgacgattatcatccaagctagactttgcagaatcgcagttgacagagaattctctacagctggcacaggctcagcaggagatacagaggttgatgaaggatagggaaggagatcgggctgtaatcaatgagctgcggagggtagaggacgagagggaggaggaaatcgagtgggagagaaacgagagaaggaaggtcgaagagcaaaaaaagcttgtgtaagctgtagttttactatttctttatcctcgtccgtgagctgaccttgtgtagagatttggcgttgcaagagtacaaagaattggttcgtaagctggacccaagcgctgtaccaccta

SEQ ID NO: 244 - DNA, 4170 bp, Cryptococcus neoformans
gtcaaatgccttttcatcaggcagcttttctccattcttctccgccttttccctttggtccctagcgtccttaccggccctgaaccttcggctacgctgctggttcatctttgctcgaggagctacaccgtcaatagccatgaaaaatactttttgaggttttattttggtgaaaagatggtcgatataggcgaaaatggccaaaatcatctgctcctccgtgattcgaaaatgcgggtcgttctcagtcgatggggggtgagaacagttgtgaatgataccgttctatgataggtcaggaaagcatgctagtcaaccttggaaatgctaaccatatccagactgaagtgacttgggtcagcgccataatacaaaagcaaggttcgagcggcaacttactagagattatcgaacgtggggatagagttgggtgtgatcaactgagaggtaagaggatacctctctgagatccatctgaagaactagatcgtatggtcagtacgaaaaatgtttcctgcattcattacgatgcagaccaacctttgggatacctggaagacagttagcgacggtttccaaagaacgagaagagacagacatacccattgtcgttagtatatactactgtcttatttattgtacagtcaagaatgcaagttgatcagtgtgttgctgtaaggagcgtaaacactgtggcgggctgtgtagagatggaagtgcggtagtaataagaggagatgaggtggaccagaaacgaaggattgacggattcaacaaggccatccgtcggatcggctccctgctgcctccttgatcccggcgtcgactcggcggactacaagtggcaatagttacgtaagaacatcacctgttcctaggctgagacgctgagttcctacgcccgctcactcgaagcatccgcccgacctcgcacgcctctattatttattgacagctactatttctattacaccacgttgatatcgttagcaggatcaggatggtgttagcagacctcggaacacggctgcacggcgcttggaaccagctttcaaaggcctcagtaattgatgacaaggtgagctgctccttcaccgttcctttcggcgtactcttcatgctcaggttttattcctatgtaggtcatcgatggtgtccttaaggagctatgtgcagccttgttggaatcagatgtcaatgtcaaactcgtagcctcactgcgaaccaaggttaagaccaaggtgcgtcttaccacgtctatcgaacatcttctctaatatcatttggtgcaggtcaagaaaagcctggaagaaagtgaaaaggcaggaggaagggaagccaacaagaagaatgttgtacaaaaagccgtatttgacgagctcgtcgctttggtggatccgggaactgagccttacaaaccggtgaagggaaagaccaatgtcttgatggctgtcggtatccaagtgcgtttctggaatttctgtcacaatcgaaaagagctcacgtgggcttctatgtagggtgctggtaaaactacaacctgtacgaaacttgccgttcactaccaacgaagaggattccgcacttgtcttgtttgtgccgatactttccgtgctggtgcttttgaccagttaaaacagtgggtagcatgttttcgtcggcaggaagtcacagtggaattgacatgacaccccagaaatgcaaccaaagccaagatccccttctatggtagctataccgaaacagaccctgtggccattgcctctttgggtgtggagaagtttaggaaagaaaggttcgatgtgatcatcgtcgatacttctggtcgtcacaagcaagagtccgagctgttcgaggagatggtggccattggtgctgccgtcaagccagtaagttcattttgagatgttttacaatttgtcactcacctgcttcgtaggacatgacattaatggtccttgatgcgtccataggtcaagctgccgaaggccaatctcgtgctttcaaggattctgccgactttggagctatcattgtgactaaactggatggacatgccaagggtggtggtgccatctctgctgtggcggccaccaagacacccattattttccttggtactggtgaacatctcaatgaccttgaacgattcgcgcctcagccatttatttccaagcttttgggcatgggtgatatgcaaggacttgtagagcatatgtgggtattgcttcgatatcttggtttcagttgcgctaacagttcatacaggcaagacatggcccgagcaaaccccgatagacaaaaggatctcgccaaaaagcttgagcaaggcaagttcaccattcgtgactggcgagaacaattgtcaaatatcatgaacatgtacgtgtttcatctccctcttccgttgactatgcttactcgggatgcgcaggggttctatctccaagatcgcttccatgattcctggtttgccggcgggtataatggacggtaacgaggaagaggcttctgccaagctcaagcgtctgattttcatcaccgatgccatgcgtgccgacgaattggattctgatggtagcatctttgtgtcctatgataaacaagggaaccccgtcggcctcaacaaacgggcaaagagggtggctaagggaagtggtacaagtctgagggagttggaggacttgctggtgcaggcgagaatgatggctggaatggccaagcaagccggtggtcagaatggatggtacgtgactctagtgtaactgaagcgattacgctcattttaggtataggatgtcagcgatgcagaagatgcaagctgcggccggtggcaaaccccttggacccaacggtcagccctcccctgcccaaatcgaggctatgcgaaaggccatgcctccagagcttgtccgcaagttacgtgccgctggtcctcagggtgctcagaagatgatgcaagatatgatgggtggcatgggcggaatgcctggtatgggaggtgccggcggacctggcggtatggatttgggcaatatgatgaggatgttgggaggaggaggaggaggtggtggtggtggtggcgggatgcccgacatgagccagatgcaggagatgatgaagaacatgggcatgggaggtggcggcggtatgggtggtatgcctggtgagttgccgtaatgttcgtgtagaggtcatagactgaaagtttgttttcagatatgagccaactgatgaagatgatgggcggcagcggttaagggatgacaggcggtaggggttgcgtgtgggctcgatgatgattttcgctcgtgcgaaattatggaaatgtgtgactatagcgcgcgtccatctcatcagcacacagattagtggtgattgtcagtcgcccgtaaacaagaactaaggtccaagacctttataccacacaagcttaggatataatgtatgcatgggatatccaggaccctgatattactatacagatacaaaatgtgctattgattgattcccagtccagtagtagagctcccagtaacgttcattgctgggctgccaggcgccgcctgtccatatccgccagctgaaaccgataccggcgcctgcctctgggttgtcggttgcgggttgggcgtcccactcatcggtgtactgggaatgtttgatggttttagcgtgcggatttggaaagtacattgtgggagggaggacgattccggcggatacgacagcattcatgcctaacctgtgaagagcaccttgtataagagcttgagggaagatgagatgctatctacatgtcagtcttcgctacgtcagcttatagcatgctacgtactgtgttggctgcatccatatctgcagcactacctttgtacgatgataaaggcacaagtggagggaacgcattcgattgcaaaacgtagacgcctcgatgatttgttcgaaggttgtcaatctgtttggaatacacgtagaggaagaggtctttgcaaatgaacttgattatatccagatgagcagatatgggtggtctcgccaatgtcaatctgtttcggcgttagggcatcctctatggccggaagcgacgctcacttttcggcaatgaatccaccgaccattagaccaatcctcacaattcttttcgacagctcttcttctatcagcctg

SEQ ID NO: 245 - DNA, 4090 bp, Cryptococcus neoformans
aggctcggaaggcgagactatccgaacatcgtcagatacgtaatggcctatagggggacaaaggaatgacatactgttaccggcaatgagtactgacacaacgagaccatataccgcgataactatgggcatgtcagagggcaatgcttgggtatgggcatgttagaaatgtgggacatactaccggacatctacacgttggaggtcagatgggtgcgctcagatacaagtgactttggtagacttacaacgacaggaattaaagactgtcacagtgccaatcgagcagatcaatacatttccaatcacaaccaaatacaatagccagtacagtacacacccttcatgataaggtcgggcctgatgttcaacaatcagcatttcgggatgtcctcaattgttgtttcgagcactaacctaaaagtacccaagcccgcgatccctatgccagctttagaagtcccgtaagctgctccaactgtagaaaacactatctgcggcgtattatcagtattcattgatcggaatagggggatgggcgtactgcgcttgtgacgcctgcgaagctgttgtctgtgagcttaagagcgaaatgatatatttggctgtacacacccgaagaatggagcccatggggggcataattcagacatgatagcagctgctgtagatgtgatggagatggaccagtcgactaaaggagtaacaagtgtaatagctggccgaagttaccacagaccgggatcaaattcacgtgggaaagggcaatatgatgatagtgatccaccattttgcgcttcatactggaccacgtggcaatcacgctgcaaatgcatcccctcaccataccgccaccacccaccaccaccacatacgacggaagcaattccacgtcagagctctttcgcgcttgattcatccaccataacctcctttgctccttccactcagttccaaagttccatttctattccaaaacaaaacaatattcttctacacaatgcagggaagacttcctcaaatggtgagtccattggaatgttccatttccttgtcatgctaatttctcgcagcaacccacggtcgtcctcctgcgcggtatgtccagctttttctgcatcaccgcgcgtcttcgcctgctctccgattatgatcttgtgaacggcagctgacagtcttcgctcttcttcaatagagggcactgatacctcccagggtaccccacaacttctctctaacatttctgcttgcttggctgtcgcccagactattgctacaacgctaggaccgcgaggaatggacaagctcatcgtagacgacagaggtctggctactatctctagtaagtgtgctatagcatttctactagtctcgtttactaaggctgactgaactttccagatgacggtgcaactattttgaagcttttggatgttgtccatcccgcggcgaggacattggtagacatagcaagagctcaggatgccgaggtgggagacggtaccacaagtgttaccctactgtgaggctttcgctacgtacattgcataactttactgattatgagccagtgctgcggagatcttgaaagaagtacgacctttcatcgaggaaggagtctctcctcatgtgatcattaaaggacttcgagaggctaaaactttggtatgtccgagtcagatgcaatattctttttgcgtactgacatctaacataggctatacaaaagatcaacgagattgctgtgacaatagacaaatctgacccggcgtacgtcccgatcggctcgttcaacttttccgactaacgaaacttttagtgaattccgcgaccttctcatgcaatgtgcggctacttctatgtcttccaaactcatccactcccaaactccctttttctccaacatggttgtcgacgccgttctttctcttgatcaaaatgatctcgacgagtctcttatcggtatcaaaaaggttcctggtggcggtatgcaagattccaaactcatcaagggtgtcgctttcaaaaagacgttttcttacgctggtttcgaacaacagcccaagagtttcaaggaccccaaagttctttgtctgaatgtagagcttgagctcaaagccgagaaggacaacgctgaagtacgagtgaatgaagtctctgagtatcaggctattgtcgatgccgagtggagcatcattttccgcaaactcgaagctatcgtcgctacgggggccaaggtcgtactctccaagcttcctatcggagacttggccactcagtactttgccgaccgtgacattttctgtgccggtcgagttgcggatggtgatctcaagcgtgtcgtccaggccgtcggtggatccatccagtctacatgctctgatattgaacctcatcacttgggtcaatgtggcagttttgaggagaaacagattggtggtgaaaggttcaacttgttcgaaggttgcccccaggccaagacatgtactttgattttaaggggcggtgcggagcaattcattgctgaagtggaaagaagtctgcatgactctattatgattgttaagagagcaatcaagaacaattccgtcgtggccggtggtggtgcttgcgaggtaagcaatattttcacacatgtcagtttaagctctaatttggtgcgttcagatggagacatcaaaatatcttcgagctcattctcgaaccatcatgggtaaagcccagctaatcgtgggtgctgtcgccaaggccctggaaatcatccctcgccaaatctgcgacaatgccggtcttgatgctacggatatcctcaataagcttcgtatgcgccatgctcaaggagaaacttgggccggtatcgacgtcgatggtgagggtgtgcaggataacatgaagagttttgtatgggaacctgctttggtcaaaacaaatgccttgagtagtgcaatcgatgcggcttgcttgatactgagtgtcgatgagacggttagaaacccccagagcgaacagcctcaggcggggcctcctatgccgagaggagctgcccagcaggcaatgaggggcaggggtaggggtatgcctcgaagataaatgtagagtcgcgacagtagagacaactagcagtgttgatgcatacaggtcatacgataatcacaaccgttttatccttgtaatattgggttttagccttgtggctcgtgatgacttcaggtcctttgacatgtacatgcattccgttttttaacgattaataaaatatagacagctgcgttggacgtcgacatgctaggcgatgagggaaaagaactaacgaacgcatgaatgaatgaaaagaatcttgaatatttaccatgtacataaaccgatggacgatcctttatcatctcggacctcaaagtaccaccgaagtctcgatcggtctgacgctgtcattatcaccagccatctttttgtcagttttgtcggtagggtttgcaaatggactgccagtggaatgaggggtaacagcttcgttctcatcttccgttggtgactcggtaacgcccgaaagaagagaagcaatcgaatcggcaggcgacatcgccgatcgatcacctcgtcccttttcgttcgaggaatcttttacgatctgggtaagctcttccagagtaacaatggtcgcgccatcccttaagaggatcatttcagccttggttcgcaggccattacggtgatcattttcaccagcaggcgcagggctgtcccaaaggcgagcatggcgtgcgtctccgagagagccgaagccaacatcagaaagccaatcgcgaacccttatgtctagttcgagcttctcaggtagagattgaatatcgggaatgatagcagccggaatcgaagtgaaggagacggcagctggaagatcgacaagaaaatgacgggtggcagaagggaaagacgagctaatggctttgatgaagtgggtaatgatggaaataacacaagcggccgtgtagcgacctgattcctttgtcagtggagaattgtaaagtgacacatgaatttagctcaccgtcaagcctccacttgagctcttgcacagaccactttccga

SEQ ID NO: 246 - DNA, 3333 bp, Cryptococcus neoformans
ggtagaactaaactctttagcagccactccttattgagatgacaaagtaagccgtgaccgcgtcacctgagactatggctcaatgcgctcggaacctggaacaaaaaaggatgaaggatgatgtaagtcgtcgaagtcgtagtcgtagttgtgcgagcgaatatctgcaggacgacagaccgaatcttatgtagtatggtgtataaacgtgatacataaagtttcgataccttcatacaatcgtttatacttcgatttatcttccttatatcccttcgatcggtagttctattctttgtacatctgtttcctggccctttctttcttcttattatacaacaaactaataataagtacgtactgtaacaatatgcacgttataagtcaacagctattggcgtacgcatacaatattatatgtatggctcacttctcctgcagcttgaagtgttgcttaatggactcgatgcatagtctatatatgccgagcgagatcgatgcagcaacagatcatgccagtgatgatgatgatactatcatttactacaaggagtgccacactctgacgcgtccggccatttttaacgcgtttgcgttgacatgagtttcagctcgctcggcgcgttcatttcttgcatttcaccaccttcccaattacttatcttaattcaagttactcttcatttaccgaaaagccaccggcggctattggcaggatgtccacagtgacctttgaaaatagtacgtgccgttgatgctgtggagtgcagaagctgacgggactgattagtctttcacggtgattctgccgacttgggaagtgagttctgacgggcttcaaaaagcggtcatgggatgtgtatgcgatgggtgcactggcagagggggatttgttgctttcaggtggatttttggcaaggattggttgccgtggagctgtggagtccggatccggatggcgtggctttgagcatcataagtcgtggccggattgaccttgatgagcttttcaagaattctcgaccatcaccgtattcccaccgtcaaccacttaccatgatgtgctcgactgatttaaagacaaagagctgaccctatcttctagagctccgttttaaccccgttggatttgggtggaaggcgtaccagagcgaggacaacaaccccacaacttataatggttcggatatcaggcatgccacctggttccggtgagtgaatgtcgtcaacacgccttactgattgccatctttagagtcgcccgtcattttcagcttcgactgggtatgcgaaactctgaaaagcctcggatctcgtttgacggtttcaagagagatgtgagtggcaaattctgacgtagttattttgtcatagcttatacgtgcttctattgcaggacttggataagatcaagcggactctccaggaatatttcaacatcacgcttgagactagagatacgagtttgaagggatggaactggggtgaggcgcaagtgaaaggtatgtgcagtctcatccatcgaatctcgagcatgctaacaaattgatagggagtgatctagtcttccaagttcaaggcaaaaccgcattcgacgttcctctctctcaagtcgccaactccaacattgccggcaagtacgaagtcgcgctcgaattcaaccctccttccaattacaaatttgatcccaaagacctcaataagcgtcctcctgacgaaatggttgagatgcgtttctacattcccggaaagagtatgaaaaaggctggtagcgatgctggtagtggtggcgaggagacggaattggatgaggagggtaatgaagtcagtgccgcggatgcgttccacagtttgatcaaggaaaaggcggacattggagctgtcgtcggggatagcattgtggtgtttgaagactgtctaatcttgacacccaggcaagttctttcacttgctatctcgtcgaaacgatcgctgatgtatttgcagaggccgattctctatcgaagtttacgccgactccatccgactagttggtaaatccaccgaccaccgagtcccatttacttctattcaccggatctttcttcttcccaagcttgacgatttgcacgttcagctcgttcttggtctcgaccctcctattcgacaaggcgctactcgataccccttccttgtcgcacagtggcccaaggatgaggtcgtcaatgcggaactcaatctcacagagtaagctacattattattcccatggatatgtgctgatcagttttagtgaggagctcgcacaataccctgacttggagaagacttatgaagcgaccaccttccaggtcgtctctcgtgtgctcaaagcattgactggaaagaaggtgaccccccccggaagcttgagaaagtgagtttcttgccatctttttaccacgtaaacacaaactgattccctcctcagcgctcaaggcctcaacggtatcagagctaacgtgaaggccgtccaaggagaactctacttcctcgaaaaaggcctgattttcatctccaaacaacccattcttatcgatttctccaaaaccgatagtatttcattttcccgtgtcggcggcggtgtcgcttccgcccgaacattcgacatgcgcgtcgtatccaagaccggaggcgctgaccatgtgttcagcgctatcaacaagcaagaagtcggaccgatcagctcgtttttgcagtcgaagaatatccgactcaagaatgagatggaggaggcgattgttgatatcgatgagccgtttagcgacgacgatgaggagatggaaagtccttctgaagacgagagaccatcgaaggcaaagaatgacaaatcgaagactaagcctgtgaagaaagcagccgatgacgatgaagatgagtctggtaagcgctcccttcctctttccattttttctcatacaatgcatcgtttgctgacgaaaaccatgacagatgatgaagactttgaagatgaatcttctgacggcggctcaccaagtgaatctgactctgacgacgattctggcatggcttcagatgcaagcgaccctatgatggaagaactgcggaagaagactcaagcgaagcgaacaaaggcaaaggagacaagtgggagtggaagtgaggatgagaagccgaagaagaagaaggcgaagaaggatgacgatgaatagagggtatggggtagttgagaggggcgagagatgcctgtgtccagatgtatcatatgtatggctatagatcgttttggaaagtcaggcgagcccgagttgttccaattccacaagtcacattacattgcaaatcacatacatg

SEQ ID NO: 247 - DNA, 4161 bp, Cryptococcus neoformans
ccctagttccacccattgcttcggaatatcggaacaatagaagaaagcacgacgcgaccgccagagagtgggtcagaaagtgagttccaggaattcacaaagatttgatcgagtgctaatgtcgagacggtaaaggttcgcactacctaaatcgaatccaccacctgcgcagctcaaaccaaaacttcagccacctgcgttacgccgcacaatctcgcgctctctccctgattctacatcgcccgcgcctccaccgcagcttgccggtcaaaggcgcgtcattctagaagtgggagattctgacgatgaaggcgatatacaagtattgggagatagctcacggggaaatagcagtcaaccagcggctgtaacgacaaatggagcggggaggcaaaaaagggcaaggactagtggacaaggaggaagcgcaggggatgcgatcgtcattgatgagtagacacacgggacgtgacggatagtggatgatagggatagttcgtggtatggctgttatgctgatgtcgtaagccatttttgtgatataggaagaaaacgcacggatactttcgctacagtgtaattcatgatatgttatgattttttacgatcctgctggcctcatatgatagtacgtttcgctgatattatacagccttgagcccggcgttatttgaggatgccgatttccacggacgagccgaagtgtttttgtcgccatctggatggtgcattggacaaagatgataagtgcaacatcatttggactcaggcaaatacagtagtaaaataaaaggcgtacagcagagagcacgcagtttatttagatcacgtttgctttgcagccattgtttatggattggtaacgcacacagatcgggccacctctgacaaaatgtctccgacggaggaaagagtataatttttttatgttagaagtagtgttgtagtacatcattccaagcttctactctgctgaatcgtagtaactatttacgaactgatgaggcatgtaaatatgcaatcacacacatatctcttgtccgtgtacgatcgagtatcactgcccagaaaccaaatgccttaccggggtttcgggactatcttcgcgtggcggattgttatgacgctgtcgcgtcttcggtcaagatggaacgcaggcgtccatattcctggctctcatctccagtcttacttcctcttgcagcacgaacttgcgttcaacatgtctctcaacactagaaagcaggaaagagatttcacggccgaggtggaagcgctccaggctgaggcggagcagctagcaaaggttcgcacatttcacctgacgatggcgcctagctgatctgtcgacccagaatggcaagcttgaagaagccattgagaagattacagttttagaaaagcagacccgtaatgcgtccgacatgtcctccacctctactctcctcgttcttatcgcccgtttatgctgggaagccaacaatctggaccagctgaataatcaactggccctcatgtctaagaaacacggacaactgaaagaacctgtcgtgagaatggtagatgaagcaatggcgtggttgcctgcgttaaaggagcagaaagaacagggcaattttcggagtggaaaggatagatggttggagctggttaagacattgagagatatcacggagggcaaggtgtgtcaagtcgaaagatttagagctcccagaaactaacgacagatttagatcttcttggaacttcaaagggcaaggttgactgtcatgctctcagcgtatcacgaagcacttgctgagactgcgcccaaagaagctccacgtaagcacctctcactctttgcttcataccaatgtaactaacagatactcaacttcagcaacccctgaaacttcgccgtccactaagcctgaggacaaggacaaatccaaggccgagcctgttactgctaaagaacatcttgacgtcgcggcggacctcctgtctgacttacaagttgagacctattcaactatggataagcgtgaaaaaaccgagttgtgcgttcagactaaaccaaataggtcgaaaatctgctgacaatatactagcatcctggaacaaatgagattagagagtatgagaggcaattgggtgcgagtcagagttggatcgaggaagatcaaccgggtctatttaaaggacaaggacacccaggtgagacccagtattctcatcacagtttagagaatatccatttaacaattgctcaggatattaagttgcgatattatgatttgatggtgcaattggctttgcaagacgacgaatatcttgaagcttgtcaagcttatcaagaagtatgggatacagaagaagttaagaatgactcagcgaaagaactcagtgtgagtttataatatataacttattcggtcaaagctcatataagctcaggtcatcgagaatatcatgatttacgttgttcttgcatcctataacaacgagcaatccgacatgctccataagttgtatgccaacactgctctacaaaaagctcctcttcatttgtacgtttttctgtctttgtttatcacacactctaaccaatggctttagcgatctcctaaaatgctttgttacgaaggaactgatgcgctggtccggaattgaaggcatctatggccctgctcttcgtcagtctcctatttttgcacccgggtcaacactaggcaagaagattggcgtcaccgagaaatcccagaaggacgccgagaagtttgacaaccctggtgatgctcgatgggatcagttgcacaagcggattatcgaacatgtaagtgatacggtatgaaatcactgcggttactgaaaatttgtctttagaacattcgggttatagcttcatattacacccgcataaccatacagcggctcacagaacttctcgacctccccttactcaccaccgaacggacactctgcaagctcgtgactgacaagagtgtttatgcccgaattgatcgcccggcgggtattgtcgatttcagaaagaagagaaatgtgaacgatgtactgaatgcatggagcggagatgtcagcaaggtgcttgacttggtggagaagactagtcatctggtctccaaggagtacgcaatgcatgaggcagtcaagggtaaaaagatttcagcataggtgggagctaggaagtagatgtagacttgtacaatgcagaaaacatgctatcattaagagacaaaacatgcaatttttccgattactcgtactgcttgttggtatcttttaattcacctattacagtgatgatatcaggctcatgatggatccgactggtatcaagtgttcacatactgataatcgagataaataacacagggtatactaatgaacaagaatggcaccaaaaattggtagcattgataagaagatgaaagaagttaccaaaatgatgtcgtgtacaataaaaaaactggtctgcaatggtaatgatgatgaatgataatgctacactggacacgcatgaaccaacttttcagtctgtgcttgtctatttatggtgtcttcctaacttctttagcccgttccacttcttcttttccgtccccgctccgacttcgtctaggctaatcactctaccaccgcgccaatcgttctcgattactgtaaaatcaccattttcttgctcctcgtcgtcgctctcgtcgtcgttgagcggttgtccactaaatctatgtgaaaataacgaggcatatggtgtgggggctaaaggtcccagaccgatggcagttccaccagagttggcggccggggtgtacttgcgggtacctgctgagagacctttgcgggagggctgagggtggatcgatggcgggagtgtgtaattgtgagctttgtgtgatgcggtgctagcattagatcctcttcgagttcgttgaccaggctgaacattggacattaccggcacggggccggagatatggggatatcgttcttccccctcttctccctctgccttttcatcaccgatttcgcttgtcgtagctgaagtggggttgctcctatctcgaaaaccacctccatggatgctgtgacccatcggcaaattgccagatgccgatcgcaaacggcttttaggcccaacgtccagccacgtctcat

SEQ ID NO: 248 - DNA, 4057 bp, Cryptococcus neoformans
tctcttcttcgtctttggccctaccatggatccagaaagagataacaagatgatccttgcctgaagtggggttgcggataaaggtatgagcgattggaggagagcctctgacgggtgcagaggaatgtggggaatgagtgaatttaagaggaggcagaaggtacgcgtcaagcttgtggattgtcagtacggtttagaataaacatgttgatcagacgtacagcatttgaaccgcggatcatatctatggcatgggagtagagcacagaaggggagttctttgcaaacaattccgttgtgagagcaaacgtcaggacaacaaaaagggcgcctccgaaaaggatgacagtcagattaccagtctgctgcgttgtacggaccactgtattagacttcagttgagacgttgttggaactgcaagactgatgcttacgctttcctccaatgttcaagtcagaccatgacttccaagtcttcctacggccattgggcccaactccaagagggaatggcccgacagtgtcttgggtaccagaagatgttcccgtcttatttccgagccccttcaaaagatcgcttgtggcttgtgattgagaatgcggggaagccgtttcatggtgggtagcgtagaggcgtgtggaggatacaaatgggcgaaggacggcaggtgacggggcgaagcgaggctgagtagcggaaagaacgaggcgaagtgtggagatggggcggttcatggtgtataagagacagtgacggtctgtaattggtgatcgagagatgatgaagacgcagattgcacttgttcccttcgtcgtttctcttaaccggtgttggtcacgtgagagccatcctacgtcgcggaccatggcggtggaggtgaacaattatttgatcccgctggccacgctgagaccctttcgcctctgagcttcctcgacattcttcgcgcgtcaatcaagctgttctctacgatatcttatccctctataacaaccaaaaatggcctccacaatgtaccagcgcgaccccagggcggtgagtcattctccatgggactctttcatgaaagctgacaatcgtgctagggcctttttttgggaggtaccagaacaagtggtgccgaagttagggatgccaacggttagtcgattgtcagacagtacaaggaaggatcagggtgtaatagagagctggaactgatgaggtggatagtgatggcctgtcaaactgtttccaacatcctcaagtcatctttgggacctgtcgggtacgttgtgaaatctcctgattgatcatcgcgagtcctttctgattttgcttcagtcttgacaagatgcttgttgacaatgtcggagatgtcactatcaccaacgatggtgctaccattctctcgctcttggaagttgcccaccctgctgttagtatcactgtttcaatatccttgatgctcgactgataacgtttttaggcccgggtacttgtttctcttgcaactcagcaagataaagaagtcggtgacggtaccacctctgtcgttctcctcgcttctgagcttttgagaagggccaatgagcttgtgcggaataagatccatcccaccactgtgatcaccggttacaggtatgttgaatttcggcttgtgaatgctaatcacgctgaaactctgcaacagacttgcgtgcaaggaggcgtgcagatacatggccgaacagctttcaaccaaggttgacaagctcggcaaggactctttgatcaacgttgccaagacttctatgagctctaagatcctcggtgccgacgatgactttttcgcacctcttgctgtcgacgctatgcttgccgtcaagaccatcaacgccaagggtgaaaagaagtaccctgtcaaggctgtcaacgttctcaaggcccacggaaagtctgccagggaaagtttcatggttaagggttacgctttgaactgtactgtcgcttctcacggtacgtcaatgttcatactctcactagggcccagctaacaaaggacacagctatgaagacccgtatcactggcgcaaaaattgcctgtctcgacatgaacctcgccaagcaacgtatgcaccttggtgttcacattacaattgacgaccccgatcagcttgaagccattcgagcgcgtgaatccgagatcaccctcgaacgagtccgcaagattctcgctgctggcgcgaacgttgttctcactaccaaaggtatcgacgacctcgtgttaaaggagtttgttgaggctggtgcgatggctgttaggcgatgcaggaaggaggacttgagaaggattgccaaggccactggcgccactctcatctcatctcttgccaatcttgaaggcgatgagacctttgaagcttcaagcttgggttacgccgaagaggttgttcaggagaggattagcgacgatgagttgattcttgtcaagggtacaaagatcgtcaattctagttccgttatcttgcgaggtgccaacgactttatgcttgacgagatggagaggtctctgcacgatgcgttgtccattgtcaagagaacgttggagagtggaagtgtggttccgggtggtggtgctgttgagactgccttgtccatctatctcgaaaatttcgccactactttggtgagttgttagcaagtattttgttactgatgagctgacatttgcgcagggctctcgagaacaacttgccatcgccgaattcgccgctgccctcctcaccatccctaagactctttccatcaatgccgccaaggactctaccgacctcgtcgccaagctccgtgcataccataacgctgcccagaacgcccctctgaacgatcccaagagagggctcatgtattatggtctcgaccttatcaacggtgaagtgattgacaacaggcaagccggcgttttggagcccacgatgagtaagattaagagtttgaagtccgcgttggaggcggcgacgagtttgttgaggatagacgatagtatacaggttgcgccggagcagaaggaggaggttgaccctcacgggcattaggtggaacgcagagacagagagcgtctgtagtgtagaatgcagttcacgatcattagggctatactatttacaatttctgcatgattggacaacggtagctgggtatgagattgtacaacgaacgcggatatggttcctagaagatggtaccgtcactgacaatgtctatgggaggcccgccaccagctcgcttctccttggcaatctccctacctcccttccaggtggcggcttctaggacctgagcgagggccaggacgtccttgccgacctggagcttctcacatagcagattatgaattcgatccctgaagtagcatcagcttatcttgctgcgacctggttggcgaacagaaaacgtacaaggagatgacagtcacagccctccactcgatgacggcggggtgggaaggctcaaggacgggaggtttgtccttaccgttcggataagcattgcctccgagtgattcgggcttgatggtgagagctccaagatcaataaagagccctccattacggtactacaggagacaaagggcatagattatcagtcctgcaaaaaaaggcgaaagacggcctggtactcacctcgggcaatccggtctgtccgagacccttatcaactttccatcctgcctcactttcgatagcatctacaagcgagtaacacaaccattgagtaagcttgtggaatggcacaaagtcgtcgccttcttctctgtctataccagcttgatcaagggacctggaaagtgaagtgcagggccagacgtcgccgagagggtatgtggggtgggaagggagtgtgactcgggaaggccaaatgggaaggaggaggtcgaaaagagtagaccaaaagtctgagagagggagactgtccttgactttgggctcgaaatattctatcacggggttatcaacttccgtttggcaagctaagataagggtggacttactaagaagatcgcctggtcgtcctgtagcacacaggtctggccga

SEQ ID NO: 249 - DNA, 4072 bp, Cryptococcus neoformans
gcggcagcagcgtctcgagggtcgccatggtgtcgaggctgcgtgtggatgtcgagaatgtccgcggaaacaatgtcgcggattcttcgtttacttttccacatctccgtcaccgctcgactgtcatccgtctccacacatctcccacctctcgacttgccatcgtcgccgatccacactccgtcacccgcagagcttcacttgccacccgcagagctccacttgccacccctgcgactgcacaacgcgacgtaagcacccgtcccgtcgtcatcccactaacccacagccccagacccaccatgatctccgaccacgccctcgcagacctcgcaaacggcctcggtatcgccgccatggcatgcatcgttctctaccactttgtcgccgtcaacggcaagagaatggaggcgtagtgtagctcgcaagcggatgtagctgcggaagaggatgtattacatgcatagagattccaacctgtctgcacgccgctccaccgtctgcctgtcaacacctggcctcaccctcgctcgtctgctcttctcttggatgaacgctcttctcttggatgagtgactggagcgatgcgtcagtaggcgggctgtagatcgggactgaaataggcgcgtgatcatatccgacggcgatctccagtcgtcgctcaagattcgctcgagatataacggacactactcctgcatgacgcttccacgtctggcaagccggctcgcaaagaccatgacacccgccgacatccctaccctttcccagctctaccgccatgatctcaagaatgcactcaatcccaccatataccataaagtgtctgtcaagagagcagcctccaccaactgtgtgggtgtcccgatctagcgggagaaaagtggtaaactaattcgagaaaaaagatgcgttggacgcgttgttctccaccgtggtgttccgtcgtattccaaagcctctgtaacatataacatcctattcccgcaaatccgctaccatgtccagcatagaactcataaacccaaaagctgagagtttgaggaggacgcaggctctccaggtcaacactgtgagccattaaaacagcgagtatttttacgagtaagaactgacagaaatttctaggcgggcgccgttggtcttgcgaatgtcgtcaagtccaatctcggtgcgttctataaggttgtcagaaaatgaaagtgcttaacttttcgaataggtcctagaggaacgatcaaaatgttggtggacggctctggacaaattaagatgaccaaggtaaatcgcgcccgaacttttggcacggcatggcaggatagctgattcagccttcaggacggtaaagtccttctgtccgagatgcagatccaggtaggtatagtatgctattaccaataatgagtctcagctgaatctatcttttctagaaccccactgccgctatgattgctcgaaccgctgtggcgcaggatgagcaatgcggcgatggcacaacgtcggttgttcttctcgtcggagaacttttgaagcaggcggacagatacatccaggaaggtgttcacccacgagtgattggagatggtttcgacattgctaagaaggaagcgttgaacgtgagtgcggtctgtagtcagtgtgactgtcagctaatgcgcgggagtctagttccttgacactttcaagcaaacccctaaactcgaccgtgccaacctcatttctgttgcccacacctcccttgctacgaagctccacgccaaactcgctcaaaaactctccgcggatgttgtcgatgctgtccttgccatccagcctcctgaagtcaccgaacctggagcttatcgagaacccattgacctgcatatgattgaagtgatgaagatgcaacacaagaccgacacagacacccagttgattaggggattggttatggaccatggtgctagacatcccgacatgcccaagcgggtggagaacgcctacatcttgacgctcaatgtttcccttgagtacgagaagaccgaggtcaactcaggcttcttctattcctcagcggagcaaagggaaaagctcgttgagtctgaaagacgattcgttgactctaagcttaagaaaattgttgagctcaagaacgctgtgtgtgacgtggctgttggatcaaatgagaaacccaagaatttcgttgtgatcaaccaaaagggtatcgatccgatgagcttggatgtcctcgctaagaacggtattctcgctttaaggcgtgcgaagagaaggaacatggagcggtaagtacaagcatcaagctcgaatgcctgtcagcctgtcatgctaacaacgcttaagattacaatttgcatgtggcggtgtcgctcaaaattccgtcgaggatttgaccccagatgtccttggttgggccggtcttgtctacgagcacactctaggtgaagaaaagtatacttttgtggaggatgtgaaggaaccaaagtccgtcaccatgctcattaaaggtcccaacgcgcataccatgactcagattcaagatgctcttcgagacggtttccgttccatcaagaatgccatcgaagacaactctgttattccaggtgcgggtgcgttcgagctcgcctgctcagcgcatctcaattcttccttaaagactctcgccaagggccgagccaagctgggtgtccaggctttcgctgaggctatgcttgtaatccctaagactcttgccgcgaacggaggatacgacgtgcaggatgccatcgtgggtttgcaacaagagttggaggaggccggtgaggatggtgtcgtgggtttggatttgaagagtggagagccaatggaccctgttgtcgaaggtgtatgggataactacagagtgaagaggcaaatgttgcacggagcgtgagtagtctgcatatagttaaagttgagagtcagtctaatcttcggtcttagggcgactattgctgtgaacttgttgaatgtcgacgaagtgcttagggcaggaagatcatcgtgggttgcattgttcttcgttacattccactctcactgaccattcgtatgtaggctcaaagagggccctggtccttagacgagaagaaatatgaggtatataggaggcggcggctagcgtgtgtacatgcattaatcacattccctgtacgtcgataataatacagtcttaaaactgtcttcttgtgattcaagttggtccaccgcgtaagtccaaaggcgacctcttcggcccattatatcatgtccttaacaattaaatcatttatcttgactcatgatggcatctatgcatgctctgctcacacctatactgctacaaggggggcctcaaaacccgtaattgtacaaacaaaaacaatcctttttgacatgaacggtgcactctcttcattgctttgctcgataagcatcttctagcgcgacattgacacacaagatgcaactgcccctcaggtagttaggctctgtgtaaccaaggaaaccgaacattgaggcgacagcatggcgcaacggttcagcgttgtcaaagcgacgaagtctgaaaccggcgtagccagattattgccaatacagtgtttgtatatcttccttcgcgaaggccaatccacaggccgggcatttccgttgacgagaggcgatgcgctgctcaagacattgtttgcagaaagcttgactccaatgttaggatatctcccgcattggacaaattgagcaacttactgtgcatgcatttgacaataacctgttgcttgaagttttgttcgcaacaagagcatttgagcaatttctgagacaagtcaatatggagattgaattttcaaatacaaaaaaaatctcaccagcaacttgtctcgttcttgcgttatcgcccattcgtgatctgacatcccagtctgcgaggccgctgctaccgcgtcctgcctctctttcagtttctttattatcttcatttggccatccgcctcgtcttgcaactttgctctcgcttccttctccgcgattgcttcagcgacgcgttgatgcatgatttgttgtgcctctacgagagcgt

SEQ ID NO: 250 - DNA, 4021 bp, Cryptococcus neoformans
gaagaggattagactgactggacagggaagcccttgagcagctcgtccacttcctcatcagtcatcttctcgccaagctgggtgaggacatagcgaagttcaccggcaccgatgaacccgtttccagctttgtcaaagacctggaatcccttgataaactcgtctgcattttcatcagcatgattactccagaaggaaattcgcacgcaaggaggaagagaggaaaggagactgaccggcagtgccggcaggcttccatccatccggcctgttcaacaccgccaaaaattcgtcatagctgaaagtggctccgacagtcttctcgagctcggcaacctctgcctgggtaggattctgacccaaggaccgcaaaagttcaccaagggattcacggggcacgtggccggtgcctcgcttgtcaaagagggcaaaggcttctcggtattctgcgagggcggtcagctagtgggttggaaggagaagtggcgggtgggtggcgagtacggacctgcgttgttgccggactgcatgacggttagtcagcaacagggttggagctaagtcagccacgtaccatctctagtagtattgcaaggaaggaaggaacaggctaacaaaaacatgggcgatgtatgacactcgaaaacacgcacggacttctgtccaggcccgcgacgcgttctgagattattttatctatttatttaccattatttatcccaggtggcgccccaatgataatttgccaccagcggccatcgccccttgctcccactcgccatctttgaccaccactatttttattgcacaaaaaaaaattcttattaaatcttccatctctcttcctcatctattctttcattcaagaaacaaaaaatccatattcaccacagtcgctcttttctacaccaagatagagagcacgccacacagaaaacagcaacagcagatactccctttgtcaacacaagaaattcctttatcgccactagaacacattatggctgctaccgatgtcaatggactcgcgtcccaaatgagtaagctggtcccgcttcttcgtatcagagtggatactgacttgcccagactccgttaaccttaacggtgcctctcagaaacctcagaaacctgcctacgttcctcctcacttgaggaaccgtgccgctccccccgccgctgtccctcctgcggcccccgctgcctacaggccatctcccaccggtctccccactcccgccaccacccctcctaccaggcatattgtgcctgccgccgttgccgaggacgatgtcggtggatggggtgcacaacctcgtgttaggaaaacttttgagcatggtgcccctcccggatttggtagctggaagaatggccagcacgtcgtcggtgctaggaacacgaggatggagaaggaaatgtatggtgaagtgggagacggattgcaccaggtgagtcggaactccagtttttttgatgcaggaagctagtcttacgcgcggaatttaggccaccggtatcaactttgataagtacgccgatatccccgtcgaagtcagcggtaagggcgtccccgaacctgtgactgaatttaccaacccccctatcaaccccgtccttctcgagaacgtcaagtacgctcgatacgcaacccctacccctgttcaaaagtactccatccctatcgttgccgatggccgtgatcttatggcttgtgcccaaaccggttccggtaaaactggtggtttccttttccccatcctttcagctctcttcacctacggtccttccactcctcccgttgagcaggacactggctacggctacaggaggacaaaaaaggtctaccccaccgcccttgttcttgcccctacccgagaacttgtctctcagattcacgaagaagctcgtaaattcgcctaccgatcttgggttcgacctgctgtcgtttacggtggtgccgacattggctcccaaatgcgtgccctcgaccgaggatgtgaccttctttccgctacccctggtcgtcttgtcgacttgattgagcgaggcaagatcagtcttgctaacgtcaagtacctcgttcttgacgaagccgaccgaatgctcgacatgggtttcgagcctcagattagaagaatcgttgatgaggaagacatgcccggcgtccttgagcgtcagacgctcatgttctccgccaccttccctcgagagatccagaaccttgctcgatctttcctcaaggagtacatcttcttgaccgtcggtcgagtcggttctacttccgaaaacattacccagcgtgttgagtatgtcgatgaccaggacaagcgctctctgcttctcgacttgctccttgccgaacaatctggcggtttgatacttgtctttgtcgagacgaagcgcatggccgacactctctgtgacttcctctgttctcgtcgacacaatgccacctctatccacggtgaccgtacccagcgcgaacgtgaagctgctctctacgcattcaaatccggtcgagcccccattctcgttgctaccgccgtcgcggctcgaggtctcgatattcccaatgtcactcacgtcatcctttacgatcttcccaacgatgttgccgagtacactcaccgtatcggccgaactggtcgtgcaggaaacgtcggaacttcgactgccttcttcaaccgtggaaacaccaacattggtaaagatttgattgagctcctcaaagaggcgaaccaggaagtacctcagtggcttgttgaaatctcctctgagaggagttatggtggtggtggtggtggtgggtacaaaggaagtcgaggacgaagcactggtggcggcggcggtgcgaggttgggcggacgagatatgcgtcaaggtggcggtgggtacggcggtggtggaaggacttctgggtatggtgggggttacggtggtggtggcggtggtgccggatggggtagtggcggtgggttcccacccgcgggtggcgactctggcgcgagctggtggtaagctgccatgctctcctgctagtctcctcttcccttccatcccctcccctccttcctcattttctccagtctttgaaagaaaacagctcccaacctctcttcctttcgtcctcggcatttcaacactcttgtgttccatagagcttagaaatcacggacgatatatcatccccaccatccatcaccttcatcatcaactcaaaaaaaaaaagccgagatcttgtatccctcgcacttcgatgaatcgaaacgatccagaattatacgatattagaaggagacaagtttagagcatttccccacccaccgccaccccttgtgccttgggatatccattttcattcatgtatcaacaatacttttcccgcccccccccggcatttcttttgagggttcataccccctctagaatgctcttttttcattcattcatttcgatatcagtttgatgaccctttttttctttattttcgccttatgtggatagaccattctctctagcatcatagatatatgtttaatcgaacggcagcgaacctcttatatatggggagtattttattcatagtaactctacctttatcatttgtgtgtaacgactagtaagacaaacttccaatcgggtatacggaggagagaaacgagacagtagccaaaaagcataagggaatggaaaggaactttgggagtttatcttggtgtcgtcaagggtggagagacgtggagggttgcttcgtagatatgcatagccgatgcgcttgtgacttgttggaactctccttgatcatggaaacatttcatgttcgtcttaaagttctagaaatactctgccatagccattctatcacttctagagtaaataaccatccttccccctatatatactattcaatatacatatcccacttcttcctctgctcctccgagccttcccaatgaaaatttactgttttaatttcttcaaacccttcttccttcctcggctcttcaaacgcggtctc

SEQ ID NO: 251 - DNA, 4271 bp, Cryptococcus neoformans
tacctagtaaccttgggcttctcaatcaatacgttcctatggagcttatcccattgcactacgctcggaggattctcctttaactcttcgtcctcgtagtacgtgttgacgtagtatcccactctgacaaattccttttcacggtatgaagcggtgatgattataacagtcactccgagaatctcatctggctcgacggaggggagaagatggtgggcaggagcaggggctgaaaagtcgaaagcgtttataccggcggggataggaccaactgaaatacgaaaatgcatcagcattttgttggttaaagggggacggagacgtggaacttaccagagcagttatcaagttcttggtcaaattcctcagaagaagcgcttccaacgtagatcaacctccaatccaagtctacgcgtcccgacgtcagcagctatttacagcacgttcccgccctattaccacaggcagaggcgtgcaaggtcgcattacaaggctcgtccagttcggtacagattaactgaccttctaccaaaggtgcgatggcttcaaatttgatcctaaagttgtatggatcgtcaaacttggcggggttattaaggagctcgatgttgcgaatgtttacctggacgttgatcagtctctgtgaagctctgcgccgttgattatgctcacaatggactgcaagatatatatcagcttatgcacaggttactagaaggttacgtccttaccatgattataatattttctgggtgtgatagttgggaagacaaaagggataaaagaagttgacgcgaaatgggtgatggcgacgcgacttgatacctcatttaggacagaaacacgtaactatttttaattaacagggtcattttacgtaacgtttaacagcaactgttttctggaattacgtaaatatcaactcctctgaaatttcgaacaaagtaagaatgttgatgcaagcgagctggcgatcattgtaaacgggaaacatctttgcatgcctcgcccatcgttcggctcacgtcaattcattgcaacagcaacacgtatatcctcacgcaaaatgaccactcagccacgatacaccgtccctctcaaggaaccccatccagacaaccacagcctgcacacggaatcaacaacgaccatctttctcccaaatgaaggcgctttcctcaacccagtccagcattacaaccgagatatgagtgtggcggtaatcagagcatggaatgaaatgaggaaagaagaacttgaagaaaagtggagaatcagactggagagaagaggcggaaaacctaggcctaagaagaagaagaacaagaaggcaacagagggggaagccaaagccgttactattgatgctgaagaagagaaggcagagaaggaggggactatggaagttgagggtaatgctttggcagaggtgaaggaaggtgaggaacccgttgcagggccttcaaacggtgctggagttgtgagttacattaaaacgcccctagaattccggctgacctgtaattccagagcaaattccgggcgccttccatcaacattcttgaagctcttgctgccaccggtcttcggtccatccgatacgccaaagaaattcccaatgttaagtatgtccttgccaacgacctttcaccttctgcttgtgaagctatgaggagaaacgtagaatttaacggtgtaggcatggactacgaggcgcctgtgaaggaagagcaagaacccaaggccgaagttgttgaaatgcccagagacgaggcaaacgaggagattaaggagggtggagccgtcgagcacgtcgagaagaagcaagaagttcagcctgaagtgaaggatgaagttggtcgaaggccaggttgtagaggacgagtcaagattaacgagggcgatgcttgtgctttcatgtataaccaccgttccgccgttggaccctctgcccgtgttgacgttgtcgacctcgacccctatggtactgctgctcccttcctcgatgccgccattggctgtatttccgatggtggtctcctcgccatcacatgtaccgacctcgccgtgcttgctggtcaacagtaccccgaaaagtgttactccaactatggaggcacaaacgttcacgccgagtacactcatgaagctgcgttgaggcttgtgatgcactctctggcgagcgttgcggcacgatacgggagatacatcacacctcttttgtcattttcaatcgatttctatgtgagattgtttgtaaggatcgacaccaggccggaacaggtcaaacaccttgctaggtaggttttacgctgctgctcgcctctcgccccttctaaccattgttttgtccagccaaactggtgtagttttcacttgccaatactgtcaaacagctgtcaaccaaccgttcggcaaggtcatctctaaagaaaccgccaagggcaaggagatgaccgcatttaagactgttgcagggcccacggccggtaacgggtctgcttgtgaggaatgcggagggactatgcacgtaagtgtaatctctcttcaatctcgatcaaaaactaaagctgttatttagcttggtggacctctttggcttggtcccttgcaagataacgagttcgccaagcgtgtcatcaaggaaattgagagcacagaaaaggaatacaagacgtacaacaggatgttgggaatgttgacgttggcttctcaagaattgccccatccttggttcttcactgccaaccgaatcgccaaatctgtacacgccccttccttacctatgaacaagattctgtacgtcatattattgacacccgttgtaattgctgacctctcatgcagctccgccttgcttaacgcaggttataaaatctcccgttcccactgttcccctggtgccgtcaagactgatgcgcctcgttcattcatctacgacatcatgcgagaagaagcaaaggaaaatcctgtgaggatggataaaattgcagagggatcgcccgctaggaagatcttggcaaagcctatcactcacacgatcgacttcactccccaccctgacgcttctctggaacgacaaggtaaagaaacattttaccaagtcaaccccttaccgaattggggtcccgcgccgagggcaaagagccttggtgagaagaggaaggcggaagtggatgctgagaatggtgaaggggatgccgtagtaggaggggagggtgtgaagagaataaaagttgtggtggaagaggaggaaatgatgaatgcttagattcttcttcgacttaacaggaattttggttttggtcttggttggctgtgacattttgtggttattgattccatccttgtttagcatgcaacggctcactagtctgctacgatcctgttctagtcatgaaagagggaaatatcctaaatggatattcataggttagactcgctaaaggtaatcctgttgaaatcattgaaggtcatgttttacagagatcggatcataagtaaggttgtctatagacggtccagcattaattggtaatatttatgagctagatatccttctgccgcagctttcggagtattcacatatgttctttagacaaaggcctttcatcattagccatggacagacaccgataatttgaaaggctgctgatattaatcgaagttagaaggacgatactctcgatttactcaacgatgttccgcttgcatgagacagacgaccatcgtttcttaacctgccactgttatttaagagcgcgtaagtgataaacttaaattatagcatcttggccagacaggggtgacttccaagcccatttttggctgtttcacaacacacccttgagcactactagctcattctcacacaacgccacgaccacatcctttccgtccaccttgacacatcctacccccaacaacgctcccctctctccaccacttatgctcaaaacaccttgttgagcattagtcttgcttgtagctgggtaatagatgtacacatttccttgaccagcggatgatgaaccagagtcgaaagcgagcacggtggattgtaccggttcaggatcgatcttgggcttcttgaatgcggagggggaagttgggtcgtgggaggtgggggaggtgataaggtggcgcacaaaacggaggtcatgtttgctggagatgacaaaggcaagtgccgggttggtggagatatgggtccaaggcttcttgctaagatctgttgttgggcggaaaaccaatccgtcgacagcttgctt

SEQ ID NO: 252 - DNA, 3982 bp, Cryptococcus neoformans
cacttggcaaccgtcctatcgacctggtcgttcaggtctgaaaatgaaccggaattgtcaatgacagacgtggcgtaggaaagcttggccgaragtggtaactgagatgcaattcggcttgaagcttgggattgggtcaaaggaggattagattggcgaccgaggaggcgcgacagctggagacgctcattgctacacagacacccggttagaaatggtttccatgtaagccttggcgcgccatcaagaacatacacatataccacgacagtatcccccacccacttccacatacccgcttcaatcaatagcggcacatcgacgatcacacaccattccccatttagccaatatcttatgatccgtttgaccatttccttcttcaccctcgggtgcacgaccccattcaaccactttctttcctcaggatcatgaaagatgatatcacctatagctcctctatcgagcgatactccgtcttcctgcaagatgcggtcagggccaaagtgtgagacaacgagggagtaaccggatgtgccaggctcaatgacctcgcgagcaatgagatcagcatctataatcggaagatgatgtctttcagagagcagtttggagacggttgatttgcctttgagagatcagctgtgtgagaccggaaggccaagagcagccgaattggagagacgtaccggaagcgatgccgccggtaagaccgacgactgtgagttgtgagcagacggatacgatacagtggcattgctctgtgggccgactcactcaacatgctgaatgattcttgtattaaagcgggagagaagaagatgagcagagacccggaacggacggacgaaccagtaccgacatgcgtagtaatcaatagcagtcgagcagcgcggtggaggtcattcttacattattattatttcgctttcttcgacaccgatctgggaatctgcagtacattattttgaaccacaaccgcttgcataactcttcaagcatgcccccggatacgataaccatctcatctctcacacttcacctgccacacggcctaggtccgtccgcctttcacctcaccccgtcccctccctgtccagcccttctctccctcacaattcacctcgtccccaactctgtctctgccaccgccgcaggggactccatggcaggccttggagtaaattactcttcagtatccaaagcggtatatgcccttgcgaatgatgccgaaaaggtatggagcggaccatgggagctgatgcgcgctgtcagtgccatcccgctagggtttgacgatgtccagagcgtagatatccgtctaggccttccaaaggcactgctacatgctctagaagctgtgtacaaggcgtcctatgccaaaaatggcgaagaaaccggcaggagttgtacaatccgggacttgaaggtagtgtgtattgtgggactacatgagcatgagagaaaagagaaacagaggctggagttggatgtcaaggtcagaggaggcgactggaatgtttggggacacaagggatttgcagatgaaatatacgacgtaagttgtgctagcagcacttgtgctcaattatcttccatcactaacaaaacgtggtgacagtttgtgagcaactcggcttacggaactatcgaatcgctgaaccacgaactgggacaacatcttctgaagagtcgctatctgggggatcccactcaatctcatctagaaattacaatcaggaaaccatcggcaatacctttcgctactccaagcatcacgattcatcgctcacaggccgactatgcgccaagtctaccatctggcaccgcttgcaatgcaccacgcgaagcccttgagagggtattcgtggctgtcggttccaatatcggtgacagagtagccaacatcacaagagccgtaagccttttagaggaggctggatgtaaattgctaggtactagtagactgtacgagagtgaaccgatgtatgtggaagatcaggaccggttcatcaatggtgtcattgaggtaagttactgcggacgtatctgtgaagatatctgtttaacttccccgcagctagctacaccacttgagcccttggaagttcttcgattgctcaaacacatagagaaagctgtcgggcgtacaaagacattcacgaatggtcctcgagtcatcgatctagatttggtcttttatggtcaccgagtggttaaaattggcaacgaaactgatgaggaagatgaacatgggatcaaatggttagaatgccctcacaaaagactacgtgagcgagagtttgttttgaggccgctggccgagtacgtttaaaactgcttttttgaagatgaagttccagggactgaccatctccaaagcattgatccagagttcacgcaccctgcgcttcgccgatccgtcggccagcttctcgccagtcttccaaccacgtttccgccatctctttcacctataatccccttacactctcacgcttctccccttaggctttccatccctgcctccccatacatcatggccatcttcaatacaacaccagattcattttctgatggcgatcccgccaggacgaatgtcgaatatgcgctcgccgcttgcgaaaagctgttaaaaggacctgagcctccggctattctcgacattgggggaatgtccacgcgcccaggttctgaaccctgttcagaggaagacgagctcagtcgcgttatcccacttgtcaaagccatccgatcatcaagtgatcccatcgttgcatcgattccgatatcaattgatacttatcgaccgtcagttgccaaggctgctgttgaagctggtgcgtccatcattaacgacgtccgtggtggacaagagccaggaatgttgcgggtcatggcagaagcagacgttcctgttgttctgatgcattctaggggtgattcaaaaaccatgattgcagcggatgtccaggattatgatagtttcggtatctatctcagaggttgcgattgatataaacgtctactgtggacaaggcggagacaaacaactcttaatcgagctagcatggtcttatgttatcgagaaagaaaaagtaaaagcagggtcgacagcgaaaacgccgtggtggtcggactcgtcgtcgtcggcaagggagacgaggttagcgaccggcacggacgcggaggcgttgggcggggtggagggggggcgggttgggcagataaggcggtgatggccgacaacgcggcatgagaaacacgcgttgatgctttgaagataggcgcgggcagatcggccggcgtcaccgagggggagccgtttggcggggtcgagccagtcgagctgttgtgcggtgtagcccttcgtggtggtggagggggcgggggcgagtttggcaatgagtggaggtgcgagggcgggagcgatgacgttggcgacggttggtgggtggcgggggcgtgtcggcacctgaaggaaacgcgcctcaagcatggcgtcatcgataatgtccatcatgatctcgtataggtcggccgacgttgcggagagcaccgttttgccacgtgcgcagagagcagctttggtgcggtgagtaaccaaggcatcgacaccgtccaatagtcggcggttgacgtccacgtcgctgagggggtccttgaagtcatgaagaatgccttggtaactgataacaaggtgaaagaatgcatcgaacgcggcgggtgtggtgtccaagcagcgaagctgcatgaatcggtggcggagtttggactcccagccgcgggcgagaatgtgagacttaagggagacttgccatgcatcccaagtttcggcgtgtttgccatggagctcgagccacgtggtgaaccggccgcccgattgggagatcgaggtatttgccaccgaaatcttccacgcgtgctcagccgggccggggctccagtgtaggagggcgtcacggaaataggtctccaaggc

SEQ ID NO: 253 - DNA, 3980 bp, Cryptococcus neoformans
gggatagcgatgtgaaggtgaagcaggcgggcacatgaagagaagacatataaggctcgtcggagacggtggggatgggcatacagccaaaaacagatcttctacacacatacccagctacctgccagttgcaagcacagagcactcaccacacacaatgtatcccacccgctctgctcctcgtcctcctcgcgagaccgcttctctcccacccaaccacccatttgccacgagcttgaagccctttggctaccatgccaacagctctacatcctctctccactcctccagttaccaccgcgctggtacatacccctcatcgcgaagccgcgcacccacaaagccatgctgcgtcgcttgccagacctcctccaccatcgcgcattccccctccttgtcgtgcgatagacgatttcggttgtttctctcaaccacacggtgcatacccaaggtctaccaaacccactaccgagagcatcccacgtacatacaccaccctccctgtcgagctctccctcttcgaccctcgcccgaggcagacccttttgcaagatgtcgagtttattctcggcaagaagctccgtttccccttcatggagaagtgcacctcatcagacaagaaggcgaagagcaagggcgagaagggcaagaagggcaggggcgtccgggaggggaactggatataagtagtgtagcgacatagatgcatgtaccagtatgtatgcgaccgcggcatggacgcatctaaacatgctgctctaacggggctgctccgattggcggagggtggagtgccacatggccggcgttttattcgtctgcgttcttactggtcgctgcgtgcgtatacttctgcttccactccgctcgcttcttcaccacttccttccttcctccccagctcccaccgccatgctccccaggctcgccgccagacacatctccagacaggtcgccggcccttccagtcagtacacgcagacacgcatccgtgccgctcatgctaaccacagctgcaggggcccggctcttttcgaccaccatccccaagcgagcagatgtcaccctcactatcgacggcaaggaggtttctgtccccgccggcaccgcattgatccaggcgtgtgagaaagcgtacgtgaaataggctgtttgagcagggccaggcgctgatcttgtttccgtagcggtgctaccgttcccagattgtgagcgacgccgataagttggagctgcagcgttgttactgacccgactgtagctgttaccacgaccgattagcaattgctggtaactgccgaatgtgcttggtcgaggtgagcgacttcatttgaagaccgggtgtcacatactaaacaattcataggttgagagatcaccaaaacccgtcgcttcgtgtgctatgcccgtcatgcccggctccaaagttttcaccaacactccccttgtccacaaagcccgtgaaggtgtcatggaattcctccttgccaaccacccgctcgactgccctatctgtgaccaaggtggcgagtgtgatcttcaggatcagtctatgcgatatggctccgaccgtgggcgtttccacgaaattaccggaaagagggcggtggagaacaaggacctcggaccaattgtcaagacctcgatgaacaggtgtattcagtgtacccgatgtgttaggttcgccaacgacgttgctggtgttgaggactttggtactaccggccgaggaaacgatctccaaattggcatgtacattgagaagactatggattctgaaatgtccggtaacattatcgacctttgtcccgtcggcgcccttacttccaagccttatgccttccaggctcgaccttgggaattgaagaagacggagagtgttgacgttttggacgctgtcggtgccaacattcgaattgactctcgtggtatcgaggtcatgcgaattcaacccaagatcaacgacgagatcaacgaggagtggatcagtgacaagactcgatacgcctacgatggtttgaagtaccagcgattgaccactccccttgtcagggagggtaaccgatttgttcccgcgggctgggagcaggctttggagactatccgacatggtcttatcaactctggtgcgaagggtgacgagatcaaggctgtggccggtcacctggccgataccgaagcccttgtcgctctcaaggacttgatgaacagattaggctccgagaaccttgccctcgaccagaagcttggtgatcttccttctgtcgccaacgttgacattcgatccaactacctcttcaacactggaattgagaacgttgaggatgccgacgctgtccttttcatcggtaccaaccctcgacatgaggctgccaccatcaactctaggttccgaaagtcattcctttaccgaggtgctgactttgccgtcattggtgagaagtttgactcaattttcgagtacgaccatcttggtacctctgccaaggacgtcgctgccttctttggcggcaaggatgctgggtctttcagcaagatgtggaaggacgccaagaagcctttgattgtcgttggtagcgctgttttggagaccaaggatggtgccgctgtcttggctgaagtcagcaagcacgtcttggccaactctgacaagtttttgactcctgaatggaccggttactccgttctccagcgagtgagtctgctttttaaatccacgtcaaatgcaaaagcaagggaaaagaaactaacgaacctcaggctgtttcccgagccgctgcctatgacattggtttcaccccttccgcctctgcttcctctacaaagcctaaattcgtctacctccttaatgccgacgagatcgaccctgcttctatccctgaagacgcgttcgttgtctaccaaggccaccacggtgactttggtgctcaattcgccgatgtctgcttgccagctgccgcttacacagagaagagtatgacttggatcaacactgaaggcagaagtcagttgggtaggacagcggttcctcctcccggagcctctagggaagattggaagattgttcggtgagtgcttgtgcatttgtatatcaaatgaatagctgctaataaattcctgcagagcattgtctgaaattgttggccagcctctgccttacgacactgtccacgacctccgtctccgtctccacagcatctctccttcccttgtccgatatgacgaaattgagcgaccatctcctgaagttatcaaactcgggctcgaagccctctcaaaatctactgtcaaaccatcagctgagcctttgaagaagcctatacaagatttctaccgaacagatcccatctctagggcgtctgtgacaatggcgagctgcagtaaggcgtttacaaggaaggactatcacatttccaacgttgacgagagcggagcacaagcatcttacgcataaaacaaatgtgtagaaccaaaagagtgtagatgaacgtttgattgggtgtaggatgtagggatagattcggttttctttatttctatttccaatttttttgtaatcagcatgcaagatccagcattgataccttgatgatatatcgtctcgctgtccggcggcggcggtgcatatttcccaagtaaatattgtacaagtcaatccgctcttcatagtgttatacgatcccctgctagctagctagctaactagcttattgaccctgaggagtgcctcctctactgactctttcttcgaccctttgcttcatgttcccccataatctccctgctccatcccgtatcccacccgcaacttgatcaatctttggaatctcaaagctggctcccacttcacccggattggacctatacagcccagaacctgctgtcccaccaacagagagttcgtacccgcctgctcttagactcactccgcttgttgatgggcctggcgtgactgaattactgggcacggtggacgtggt

SEQ ID NO: 254 - DNA, 4146 bp, Cryptococcus neoformans
aaaacatctttaaggtatcgtaggagtctgtcgccctccccaacgtctttaacactggacacagccttcattactggcatttgtagagcagcgggaaaaggaggcacaaaatgtttggttgatgaagacgctggataggctctggcattgtcggtggcgataccgacagagggtggaggggtattctggttacgagcagaaaggggtgggtagttgctgacggactgatggggcggcatcttcttttcggcctctttgatagaatcgtaatatgtcagtccatcatgtgacaaccagcttccaaattgcatgatacggccctcaggtgggcagccaggacatcggcaacagacaggtgtcctatggctctgttacatgtacgtgagcgacaacgcacagatagacattggttttggacctacaatttccatatcggaacgtaaaatacactccgcttctactacaggaatgggccttctttgaattacaagtctgtttttccaaaaggggttcatcggtattagctggttcctcctacgaagtatcaggccgcttacctattcggcgcttggtggcgaactggaggcattctcaagaaccggttgagctgtggatgattgattgatacaagttcagagatatagaaagtctggaggacaggaggaggggctgtcagtgataataattagcagccaggagtacgatggaattggttgaggttaggcgtgatggcagggcggacaaccggaaagggagggtgaggttgtggtatgcgacgatgcgagtgataggacgctaaggagtgaactaaaagatgcacggtggcgagacagctagggagtcggggtgctgagtaagtgctcaatttttccatgcatagcggtgggtgggatatactggtgatacacgagataaacatgccatagcaggaaaccctcagataccggctgccatatccagccgcagagccaaatccccgcgacgggactaattgtgcrtgatggctcgtggtgtcggcggcaggagccgccagccgcgtttgttcgcgcggtctgcacggcggtggtggtcgagcgacattttgggcaagaaacaccataaccttccaacgtcttcctacccttttatatctcgtacactgaagaacaggatgtctctaaaagtacccaaggcctcaggccccgacctttttaagtctggctacaaggtacgcctctgctcaatttactgtgtcagccacgcctgcttggataaattgctgactatgcttctctaccatctacacagcacttgtctggactggaggaggccgtcttgaggaacatagcggctgttggagagctcagcgagatagtgaggacctcattcggacccaatggtcagtgatctcgtttgttgggcccgttgctgtcgaggatagggcctcttgttgccatcgtctcctcgtcttcgtcttaggaagcatgctgacacttgtgaatctaggtcggaacaaacttattatcaaccacctgggacgactttttgtcacttctgatgctgccaccattatccgagaaattgaggttgcccatcctgctgcgaagcttctggtcatggctagtactgctcaggaggccgagatgggggacgcgaccaatctagtgctcatctttgccggagagctgctcaaacgatcggaacatcttttgactatgggtttgcacccgtcagacgtcattcaggggtacgagatggccttggcaaagggacgagaagagctcgaaagtgagtagcgtgcatcccatacgctgttgaatactgacttgctcctgtcttccagctctggtggccgcacagatcacatcttctcccttgccaactgtcgacaaccttgcagctgcagtttcttcttcccttgcctccaagcaacctggatgtgaagtactgctctcaaaacttgtcgccgaggctgccttggcagtcatgcctaaaaaccctaaggatttcaacgtcgattcagtgcgagtagtcaaggttctgggcggcggtcttgaggcgagcagagtcgttcggggcatggtgttcggtagagaacctgaaggtccgttgtctcgagcgccagaatttgaaactgtttgcttacgtttatctcaggtattgtgaagaatgctaccagggctaaggtagcagtatatacttgtggtctggatatctcccagactgagactaagggtactgttctgctcaaaaaggcggaagatctgttgaacttctcacgcggtgaagagaaacaactcgagggcgtaagttacccccctcattatctctatcaaaatcagtgtttcttactgttttcatagtacttcaaagaaattgccgactccggtgtcaagctcatcattgctggttccggtattggtgaccttgccttacattatctcaatcgaatgggcattgcggtcatcaaggttctttccaaattcgaccttcgacgattatgtcgggttgttggtgccactcctcttgcccggctcggtgctcccacccccgaggaagctggtatggttgatgtatttgagaccatcgagatcggtggggaccgtgtcactgtccttcgacaggaagaaggggagaagactcgaactgccactatcgttcttcgtggtgccactgccaactaccttgatgacctcgaacgatctcttgacgacggtattaataccatccgcatccttttccgcgacggccggcttgtgcctggggccggtgccagcgaaattgaactcgctcgacgtatttccgcctacggtggcaaaactgccggcctcgctcaacattctatcaagcgatgggccgaagcatgtgaagttgttcctcgtacattggctgagaacgcgggcctcaactcggaagatgtcgtcagttctctctacaaagcgcatgccgacggacaggtcgatgcgggtgtggacattgagagcgagaaggagggtgtcagatctactaaggacatgggggttttcgacccatatgctgctaaagactgggcattgaagctggcgaccgaggcagctatcagtgttctcagagtggacagtatcattgtggccaagcaagcaggaatagctccccctaagcagcagggacactgggatgatgattagatggatatgtacaatgctacaatgcatagctgatgattttggatctccttatatcttcattaatcctttgatcactgatcaatttactactgtatgctgcaaatgggacctggaggaactttggcagcgggaggccctggcttggccactttatccatgacgatcttttcagttcccagccggctgatcagcatcgaggaagtcgctgattgcaactcacaggcaccataacaccacccggcagtttcgttccaagcggtaatatcataggaaagtctgcgacactggacattgggagcactgcacccccaggcagcgcagtgcctgctggtaggctagagattttgctcagtaaaaaacagagagtaccgactcttcttcacgtaatctgacctacaagacaccctcagtgctgttgagcgcgttcaacatatcagcgtgtctccaaagaaatgaattggttcaaaaagataggctgacattgtgtggtacgcgtggtacttgattccgtacccatctggtacgattgcattctgaaagaccccagagcattgtgagtcaatggtgtgctaaatgtaaatctttgagagccttacaggtactgggtcttcaacagtgactgcaaaggggtgatcaggtttaccagcccccacgccaggaggggcagcaagctttcgcctgtctgacatgacagctgctgttggtggccgtctttctcgctgttcacaatatgaatcaaactcagactttacgaagatttgaacgcatcagccagtccatgatcctctcctcgaaatcaagcaaagaagtccttgaatgaaaggaagtctttgagaacaggcagaagatacaaagggtcacttttgcaaaggaaaggctttttaacagcataagtagaaccaataaaaaagacctggaaattatcactacgttaaaacttgcgcatagaatgttgcaattatctgatgtaattctttctagcgatttatttgttctcctt

SEQ ID NO: 255 - DNA, 4082 bp, Cryptococcus neoformans
acatgttaatccgactttacgtagagagggtccaattgttcaaatttctaactcgactaataagttgtacgagtactcataagtagcctaatgctttttgaatgaatgaaggtaatagcggcgaaagccgctccagaaaaagaaataagtaataaaggaggaatttctttgtcgacgagtccgcaccagcaccttgtccccccacgagctagacttgttgttggtttctcttcttgacctttttctcttttcccaagcaaaaaacaattcatcatggctgtctctcaatctcatcccaacatcgtcggtacgcaatctgcgaaatgcttcttataagggacttggaaaagttggaactaatatgaatattgcagacggctggttcagggagatcaacacccaatggcctggtgagtcgatgtcgatcctttcatgaagagcttttactgacagccaacgataggtcaggctatgaccctcaagtgagcctggatgttatggagggaattgcgagtgtactaatgcgtctgcagggtcaaacaagtcttgcaccaggagaagtccctcttccaggtgagtcatatgttgcaatgtgaggagaaaacgctgacgtttgccttccaggatgtccttgtcttcgaatccgagacctacggtaatgtgcttgtcctcgacggtgtcattcaggccaccgagcgtgatgagttctcgtgagtgacgtttctaccctaatgcagagataagaattgttgacatcgaccagttaccaggagatgatcactcatcttcccatggcttcacaccctaaccccgaaaatgttcttgttatcggcggtggtgacggtggtgtcattcgagaagttctcaagcacaagtctgtcaagaaggtcactctctgtgacattgacgaggtgggttttgctcatactcaatgtcgcacgttgtctaactcaccgtttgccaggctgtcatccgagtctctaagcaatggctccctctcatgtccgactgctacaaggaccctcgagttgaggttcacattggtgacggtttcaagttccttcccgagcacaagaacgaatacgacgttattatcaccgactcctctgaccctgtcggtcccgccgaggcgcttttccagcctccttacttccaactcctcaaggaagctcttaaggagggtggttccgtctctacccaggctgagtgcttgtggattcaccttcccctcatcaagaccctcaaggaaacttgctccaagctcttccctgtcgtcaagtacggcttcaccaccatccccacctaccccgctggtcagattggtatcatggtctgcaccaaggactctacccgagacctgaccgtcccccttcgtgccgttcccgacaccaggtactacaactctgaggtccaccgagctgcttttaccatccccgagttcggtcgtgccatgctcgaggacggcgtcaacgtcttgcccaagttcagcggtgctcgacccactacgaccaagaagaaggtgctcctccttggttccggtctcgttgctggccctgctgccaactacattgcgcgacacaaccacgagctcaccatcgcttgccgaactctcgctagtgcagaggagctcgcttccggcctccccaacgccacccccatgtctgttgatgtctcttctgctgacgctctccgacaggctatcaagggtcacgacgttgttgtcagcttgatcccttacacccaccacgcccaggtcatggaggctgctcttgaggagaaggtccacgtcgtcactacctcctacgtcaacccccagatgcgtgccctcgagcagaagttcaaggatgctggtctgatttgtttcaacgagatcggtgtcgaccccggagttgaccacttgtgggctgtcaaggtctttgacgaagtcaagaaggctggtggtaagatcaaaagcttctacagcttctgtggtggtcttgttgaacctgctgtacgtatcttttttgcaatgattactgcatctactaataatgatataggccgccgacaatgccctcgggtacaagttctcttggtcccctgtcggtgtcctcatggccctcaacaacgacggcaagtacctcaaggacggcaaggtcgttgaggttgccggcaaggacctcatgagcacagccaagccttattatttcactcccgcgtacaacctcgtcgcctatcccaaccgagactctaccgtcttcagggagttctacggtctggaaggtgttcaaaacctttgccgaggtactatgaggtacgctggcttctgcgaagtcatcaccgcctggaaggaaattggtttgatgtccgatgctcaagtcgactacctcgcccagggtgctgctcccatcacttggatcaaggtcatctctcagttgctcggcgttgaggccaaggaggcgtaagtttaccatattgcatctggaaatatgctgaccagtaaatagtgccattattgagaagctcaagactctcaagtctttcgagaccgagtctagagtcctcatctccaaattccgagacctcggtctcttctccgaggagcaggtcgctcagcgaggttccgttatgcgagctctgtccgctcttctcgaggagaagtgtgccttcaaggagggtgaggtcgaccttgtcttgttgcaacacactttcgagatcatcaacgccgacggttccgaggtgcgttctctccggattagatcgtgaaaggaaaaaaaatgctgatgggaatatgctagcaaaccatcacttcctcccttgaggcttacggtgacaggaacggtgggccctctgccatggccaaactcgtcggtgtacgtgtcacttcttaatgacttgatttacctcgtgtgtatgttttcgcggcggtatgctgaccaaagatgtttgttaggttccttgcggtatggctgtgcagttcatccttgagggtgtcctcaacaagcccggtgtcttcgctccctacgacgaggagacctgcaagttattccgagaacgacttgagaaggaggagggcatcaccatggttgagaaacttgtttaaacagttgtttatagaggtttgatattgagtggttatgattgattatggtgtttattcttggattgtctttaagccttttgtctatccgcatggtacaaaacagcatgttgcaggaaatgaacgatcccaagttaagcgaaagctcgttgtccatgagtcattgatttgtaatcgatgcgttgccactgagtgtcagaggtacgatcgaagttccagatttttaatagcagacagatcgtccgccgttgtcctcttctcgtctcaacatctgatcgtataatataaaaggtcatcgtcaacttacaacatctcatccaccatattggtagtctccattacaaggatgatcttcgtgacgatttcattcactctttcactggtcagatgcataagagaggtttcctgaagtattcaagaattgcacaccttttgatgagaaaagatatattgctagtaatattcgtagaggaacgcagtatgatgaaatgaagggcggtattattattatttctccatcctgctcttcgttctcaatcactttcgcgacccagtcaatgtccacttaaatttgaatactacaccaatttccaatcgcgctctgcataaagccagcatttctcgccgctatttcaccgcgcgagtggagaatatacatacttccttccaagcgtttgtttgctgttagtgtttacatggtgatgatgatgactttgccggctagcggaatttttcagttacggcgtgtgcctgagggcgctatcttttgaaaccctgtctactgctattgtttgactgccactttccaattcccgccgtccagtcattcagtctcaagtccagtcagtcactttccaacttcccaccgacacagcaattcccattcctatcttccytacttctttcttccttctccatccatcaactcagtatcttgtaacagtagacaacagactgggcgcccaacgccagtccagtccgtatagtcatgcccttgtacgaa

SEQ ID NO: 256 - DNA, 4036 bp, Cryptococcus neoformans
ggtatcgagaagacacacaaaaggcgacggaggaaagagccactcacgtagattcggggagctccttcaaaccgataatgggcacgtcgacgggggcgctgggccaggtgttgtgagggacgatcttgcagccgacactgtggagcacagaaaacaaaatatcagcacacagatctcatgccaaacgcgagccctggacgcacgcctcgaattcgcggtcgtcaaagatccgctggggatccttctcgacgtagacgtcaaagttgctgtcgagcaatgtctttgcggtggtgggggtcagagccgagcggtgctcaaagggcttcttctcgcaccggagccagatgggctgtctgggacgggtgttggcagaggtggtggcggactcgggggcggtggcggccattgttgcagatacgagagtgagagatggatagagaagaatgaggatttgcagagtgagcgtctattaaacaccgttccgaatctcgactcggagctggtttttaattcccgactcgtattcaagtcccgactcggaatctaaattgggccgattaggtgggcagactggggatttctgcccggaaacgagagacgaaaccggggcgtgacgtggcatattctcccgcgagtcgaacaacagccgaactcttcctcggcaattcagttgtgcgccttcactcttctctgccaaaccacaatgtccgccgacaacgccccagtcaacgctgcaaaccccgaggtcgctcccgtccagtcttctgccgacgccccgacccaagaaggcgcccctgcgcccgccggcccctccaagtctgagctcaagaagcgcgcaaaggaggctgaaaaggccaagaaggctgcagaacgcgcagcgagggaggaggaggatagaaagaagcgcgaggccaaggagtctgaggaccatgcgaaacagaactatggcaagctgcccttgcaccagagccaggagaggaacggtgagtcctgtccttattggccagcgagtcgtcccgaagacacgccgtagtctcgtccactaacatactctataggccagaaacgactcaagttccacgaactcaacaaggaccttgtaggccagagggtcatcttccgagccaggctgcacaacatgcgtcctcaaggcaggtcatcgtctaatcacatcatcttgctatactaaactgacaaattgacggtcaaaacgattcgacatgaaattgaatacaataggagccaagattgtctttctcactttccgtcaacaaacacacaccctccaaggtgtccttgtcgtttccaaagagagtgacgagcaccaggtgtccaagcagatgctcaagtacgctacccttatccctgtatgtttccgtcatgaccattttttcatacagatggtggctgacgatgggaaatagtctgaggctatcgttcttgttgagggtgtagtgaaagaggccgaggtcaagagctgtactatccagaactatgaagttggaatccaaaaggtgtgtccgtccttgcatatcatctttactggatcgcgctcaatgctgacattgccgattagatcttcaccgccgtcgaggttaatgagcttccattctctatcgatgacgctgcccgtcctgaatctgacttccagcgagtaagtccaggtccccttttcttcatctctttcaataccaaatagaactgcatttgctgacatcgtttgatggcattttttttatataaattgatttgtgaatagatggagactgaggacgttcagtttgcgagggttgctttgcctacgaggcttgataaccgagtgatggatttgcgagtaagtcaacattaccctttccctcccccagccgcggccaaacaagctaaccgctccttttcacgtacaaacagacccctaccaaccaagccatcttccgcatccaatccgccatctgccaactcttccgtgaatacctcaactctgaagggttcatcgagatccactcgcccaaactccaaggtgccgcgaccgaatcgggcgcttcagtcttcaaggtcaagtactttgacagggaggcgtttttggcgcagtcgccccagttggcgaagcagatggctattgcgggtgatatggagagggtttatgagattgctcctggtgcgtcttgtcgtctcattccgctgcttgtgaacaaacgggacaaaacaggcagccagtaaaattgatactgatgtggaacgtcgaatagtattccgagccgaagactccaacacccaccgtcacatgactgaattcatgggtctcgatctcgaaatggccatcgaagagcactaccacgaagctgtcgatgttctcgacaatatgctcctccacatcttccgtggcttgcaaaccaaattcaagcatgagattgagacggtgaagaagcagttcccatgtgaggatttcttgtttttggagaagacgttgaggttgccgttcaaggaagggatgcggatgttgagggaggcgggggcgacggatggggaggggaagccgattggcgagttggacgatatgaggtatgtcgcgtgattcatgatcccgttattggattattaagctgatgtgccccccccgcccctcattttattattagcaccgaaaacgaaaagctcctcggtcgacttgttcgtgaaaaatataataccgattacttcatcctcgacaaattccctatcgccatccgtcccttttacaccatgcccgacccctctgaccccacgctctccaactcgtacgatttcttcatgcgcggtgaagaaatcctttctggcgcgcaacgtatccacgacccgacctttttggtggagaggatgaaggatgtggggattgacccggcctcgatggcgggttacctcgatgctttcaaattgggtgccccgccccatgcgggaggagggattgggttggagagggtggtgatgttgttcttgaagttggggaacattaggagggcgagtttgttccccagggacccgaagaggttggctccttaagaaaagcaatcaagctcgtgttgagtcttgatacctggtggtggtagtggtggtggttgtcgcgtgagatgggtgcaaaaaaaggacggttggtgtttgatataacacgccatgaggattgggaaaggagagaggatgtggaaatagagtttttttttttccccttatgcaagccgaatttgattagggtactcgaaatgccaaaaaaaaaaaaaaccgggcttatcgagaagcccatgtcattgagttttcccctgttggatgtggtttgaattgtgtaaaagtgctgttgggcagtgcaatgaatgttcatgctaggatgcaggaaaatgggctgaaagaaaaaatgctatgtacaaatgctgtgagattattataaccgtacaaccccccttcccctttccctcccggccccacctctaaacacctcctcacccaagcacgtctctcaataacaacgccgggtcttcatacttccaatgcaaattatgtttcctctcctttttaccatcttccccatcccttccgtccttcccgtcctttccgtccctgccggcgtgtccgcctgctttatcgagtttgaggagaccgttggccaagagttgggaggcgatgatttccgagcgggggggttgtctgcctgggatcgaggagactgggacggggccggggccgggggcggctgtggatttggatttgggatggggtaggggtggttgtgaggggatttttgagaccgagccggtttccgttgacggtgctgctccagctcccaattcggaagaggagggcataagaacagccgtgggcgcattgccattaacgttaacgttgatattggcattggcataggtgttgggatagggataaggattggcagcttcgagttctgcgagggtatgtgctgtcattagcctgtggatcgcgggtgagatgttggggtggaggttggggtggagagtgaggaggtggaggaatgtttcgaggtcgggcgggggga

SEQ ID NO: 257 - DNA, 4119 bp, Cryptococcus neoformans
cttcttggtaggttccagtggctttgagagctacagtggcaagcactaacaaaggcttcacttgcacatattctacaaagcgttatatgtataagcttgttgtttagtttgctagtccagcctaaatcgatgggcgattgattgcgactgtaattgtgacaatgaatatgacttacgaagcacaccccgtttcaggttcaaaagcacccatggatcactaacatccattggctgaagaaagatgtttacaggaaatggatgaggtattggtgggcgtccatggagtattataaggagagagcgttcaccaccaagatacgtaatgaggagttgaagaaaggtgtaaatcacaaacgcctaaagctgtgtaagctatctctagtcgccacagatagagaaagcatatacctcgtatagatcacgaatggcgtcaatgaagaatgcagcctcaagtgagaacaaagctatgagagaagatatggcatagaggggaaccctgtgacagacggaatttgttagcgaacttcatgaatattttgggtctgacgaacatcaccatgattctcactactgccctctgcaatgtcggctttcgataattcttcaattggagaacgatggacatcatagatatcgcagtagctacagcgacgttgcgggtgagtgacaagatgtcctgctgggaacgacgaggaggaagttacggaccaactgctgtgaatattccagacatggcgaggagccatgctgggagatggttccctgcacctgtgtctgtgtcgccttgctgtattgttgtggacatggacggtatggtgcatgctgatagagtgataagataaatacgggtcattgtcactgtgggctactcggcggccggggcggaacctgtttttggtcggtcctcttctcgcgacactcttcctcgctcgttataatatggaatactaatctctctttctcctgcacatctccgtcgcaacacccacaccagttccagatgattccaagacgacaccacttcaagccggctccccaaccaacagtacaagttctccaacctccggacgaagatgccccctcgctcacaatcactatgctcggcgcaggccaggaagtgggcaggtcctgttgtgtcatagagcacagaggaaagaagattgtatgcgatgccggcctgcatccagcacagcctggtataggagctctaccattcatcgatgaacttgattggtcgactgtggatgcgatgttgatcactcagtaaatcctgtccaaaatttcgagcctgtcacatatatgagctgaccgcctatttgttagttttcatgtcgatcatgcagccgctttgccgtatatcatggagaaggtatactttggtcttttgagatcatggtggaaacttgctgacagtatatcacagaccaatttcaaagacggtaacggcaaagtgtacatgacgcacgctacaaaagctatctatggattgaccatgatggacactgtgcgattgaagtaagttcaatctctcttttcgactcccatccactcctgacccatattatcccttgcagcgatcaaaatccagacacttccggtcgcctatacgacgaagccgacgtccaatcatcctggcaatccaccatagcagtcgactatcatcaagatattgttatcgctggtggtctacgtttcaccccctaccatgccggccatgtccttggagcgtccatgttcctcatcgagattgctgggttgaagatcctgtatacaggagactattcaagggaggaggaccgacatctggtgatggcggagattccacccgtgaaacctgatgtgatgatttgcgagagcacgtttggcgtgcatacattaccagacaggaaggagaaggaggaacaattcacaagtaagcaccatcaagaaaattaccctttcttcgtttgcctgactaacgcgaatgatcaataacagcgttggtcgccaacattgtccgaagaggtggccgatgcctcatgcccatcccctccttcggaaacggccaagaactcgcccttctcctcgacgaatactggaacgaccaccccgaacttcaaaacatccctgtctactttgcatcctctcttttccaacgcggcatgcgtgtctacaaaacctacgtccacactatgaatgccaatatccgatcacggttcgccaggagagataacccctttgactttaggtttgtcaagtggttgaaagatccgcagaagcttagagagaataagggtccttgtgtgatcatgtcttcacctcagtttatgagttttggactcagtcgtgatctgttggaagagtgggcgccggattctaagaacggggtgattgtcactgggtactccatcgaaggtactatggccagggtacgtatcatcatttttcccctttcttcctggtttcaatctgctcttctctgacaaaaaaaatcatttttagactctcttgagcgaaccggaccacatcgaatccctcaaaggaggcaacgtcccccgccgcttaacagttaaagaaatctctttcggcgctcacgtcgattatgctcaaaattcaaaattcatccaagaaatcggtgctcagcacgttgtcctcgtgcatggagaggcttcgcagatgggaagattgagagcggcgttgagagatacatatgcggccaaggggcaggagattaatatccatacgccaaaaaattgtgaacctctgactcttacttttagacaagagcggatggtcaaagtgagtattctctttccccttccttttgaaacacttcccccctcatcagataattcgttaatcactcaaattctccgccaggctattggctccttagcagctactcgccctgaacacggtacctccgtcaaaggtcttctcgtttccaaagatttctcttacactctcctttccccggccgatttacatgatttcactggcctctcaacgagcacgatcatccaaaaacagggagtggcgataagtgtagattgggcggtggtgaggtggtatctggaggggatgtatggggaagtggaggaaaggtgttgaggaagaggggaaagctgcttttattgtgagtattttgttctcatttatctaattatattagttttacaatttccaatatacatttgccttaaacataataaacttccttttctgccaatctattctggtctggtgagctgattgaaactatctttcccaatagataatgaacggagttcaagtggtgcagatatctccaaccgccgtagaactacgatggaagtcaagttcaagtaacgatatgattgccgattcggctttggctttgttgttgggtatagatgggagccctgctacagctaagcgtaagtgtatttttcttctattcatctatactgttgtatactacttgccgccaggtgcgggggctgatttgctttccgggggtgtttagtcaccgcatcaccaaacaaacacgcttgcaaccattccaattcccattcccataccgacctgtatccccacacctacccgggcgacaagtccgctaaagacgtagcttccaaccccgaatttgagagattacgcatgttcctcgaagcgcatttcgggcatgtagagggaccgaatttgagaccacctcttcctccgggagcggatggggatggaaatgatgataaggacaaagatggggacgattggttgactatggatgtgaagcttgacaatcagacagcgcggatagatctaatttccatggtaagtcttcaagcactgacttttcctttttaatcaacgctctgtcatgtttagctgacacttccgtctctctctctgccattagcgtgtggagtctgaatcagctgagcttcagaaacgggtggaaacagtgttggagatggcgttgacgactgtcaagtctctgtcacaaacgtttttgggaggggggctggacgttgatatggtgaaggtagagcctaacgagagcgatagttgaatgtagcatcgtttgcatggattccaaaccttccactgaggattcaacattgaatggattagcaaatagttaaaaacgatgaggatactcta

SEQ ID NO: 258 - DNA, 4149 bp, Cryptococcus neoformans
gaggagtcacagattgtttgtatatattcacgtatatgccagaagtatactctctgcacacaggacaggacaaggggatatacatcaaaggagcgacatctcgatcctcctgcctgcctttacaccttgccatccgcaagcaacaaccttccattgcacaagggacaattcgcgtgtctatcaccatgggctcacactaacagcacccgacactttcagcgacgtagcatgaccatacacaatacgagacggttgagcggggtatgaactatgcattatgttgactgctgacactgttattttcatctcgcatcccatcgtctgcccggcacgccctttcgagattatccaaaaacccaagacggtctacatgcttgcatgtactacacactagagagccagtgcttgtttactcgttgatcttggcgaggatctcggcgtccttgaagagatggaactcctacatatatacggtcaacaatgcatcccttcggcatacgccactacatgactgcatgttgtcgcgccgactaaagccataactcacctcttcgccgaccttgatagggctaccaccccatccaggcaaaagaaccctgtctccgggcttgacagagacgggagtgacgtcgccgtccttgttgcgagcaccggggcccacagcgatgacggtggcttcagggagaggagattgggtggtagaggaagggaggaagataccagaggcggttttctagtagaagcgtaagcgtctctgctcctgaggactgaccaggccgacgcagcacaggtagcggtgagcgtggagaaagacgtacggtctcgggcttgaatcgctggacgaggacccggtcgaggagaggctggagagccttgatgttcttgaaggtggcagcctgtgtggtgtcagcgggctgcgtgtgtgagatgctgccgtgctcaccattctgggtgtttttgtttcgcagagaaatgttcggagagcgagcgaaataaatacatgttccagaaaaaaccccgcaaagtcgagaaggtgctggaaatattaattaattattcccgcggtatttacgaaatagttaagcatcggcgagtactttttagggaatttcctctcgccaatccatttcccacttgctcatccatccgaaacaagaaaaaatgaaccccctccgctcccgcgctgctctcccccgccccggcaaggctcatccagaacgctgctgtccagaagaggggcttcgcctccaaggacgtcgtcttcggcaacgacgccaggcagggcatgctcaagggtgttgacgtcctcgcaaaggccgtcgctgccaccctcggccccaagggcaggaccgtcatcatcggtgcgtacttcttgcctggaagacatgcagtcgctgatatggaccacaggccagagcttcggtgggcccaagatcaccaaggacggtgtctctgtcgccaaggctatcactctcaaggaccccgttgagaacctcggtgctcggtgagtccttcgtggtatctcctccaaaactccctgttgacattatctacagtctcgtccaggatgttgcttccaagaccaacgacactgccggtgacggtaccaccaccgccactgtcctcgcccgagccatctactctgagggtgtgaagaacgtcgctgccggctgcaaccccatggacctccgtcgaggtgcccagaaggctgtcgacaaggtcctcgaggttcttgctgccaacaaaaaggttatcaccacctctgaggagattgcccaggtatgtcgagataactatcgcgggaagaggccgggttgagctgacgattcaaaatcaattctaggtcgccaccatctccgccaacggcgatacccacgtcggtgccatcattgcccaagccatggagcaggtcggcaaggagggtgtcatcactgtgaaggagggccgaaccattgacgacgagattgagattaccgagggtatgcgattcgaccgaggcttcatctccccttacctcatcaccgacaccaagaaccagcgtgtcgagctcgagaagcccttcatcctcctctccgagaagaagatctctgctcttcaggacatccttccttctctcgagattgccgcccagacccgtcgacctttgttgatcatcgccgaagacattgacggtgaggctctcgccgccgtcatcctcaacaagctccgaggtcagctctccgtcgccgccgtcaaggcccccggttttggtgacaaccgaaagtctatcctcggtgacattgccatcctcaccggcggtactgtcttcactgacgagctggatgtcaagcttgagaaggctacccccgacatgtttggtaccactggctccgttaccattactaaggaggacaccatcatcctcaacggcgagggtgacaagagcctcattcagtctcgatgcgagcagatccgagctttgatcaacgactctagcacttccgactacgacaggactaagctccaggagcgattggccaagctcggtggcggtgtcgccgtcatcaaggttggtggctctagcgaggttgaggtcggagagaagaaggacaggtatgacgatgctctcaacgctacccgtgccgccgtcgaggagggtatcgtccccggtggaggtaccgctcttctcgtgagtcgctttcttcgtgtaaaaaaagcatattttttggcaaaatgtgctgacaatccctacagaaagcttctaccgctcttgaggacattgccgtcgacaacttcgaccagaagctcggtatctctatgatccgacaggctatccgacgacctgtccgaaccatcgtcgagaacgccggtgaggagggttccgtcgtcgtcggtcgactcctttccgaggagtttgccgctcctgaaaagttcaactggggttacgacgcccagacttctcagtaccgagacatgatcgctgccggtatcctcgaccccttgaaggtcgtcaggaccgccctcgtcgacgcttccggtgttgctagcttgttgacaactagcgaggcctgtgttgttgacgccgaggagaagactcctccttctggtatgggcatgggtggtatgggcggtatgggcggtatgcccggtatgatgtaagaagggtgtgagagtagtattaatatgaaaaaaaaagtgtttttgggaatcttattgcataggtggttgttgcgatgcttgtacgcatagcgtagtgttcaaatgttcatggtttatggaatcacaactcagttctaaataaaagagacaagagtggaagattgaatatcgttgcgtcatgagtttattctaaagcacttcttcgtttttgttgcaacttggccaacgaacagcgagcgaacggaccaacgaaaagaagtctcgacaagatattaagttttattatactctgcactcgtctctacgcaaaacaaaaatgaaagatctcactgcagaagcggccatctctccttccgacgacaatcttcttccggctctcgcatcacttcgggaaggtcacccggacaagggcatactcaaacttctcgcccagcttaagattgatcatcccgaatgggccgtctctgaaaagcggttccgaaaagctcttcaacttgctccctgtcctggaggtggcgaggccgatccaaaagaaaaggcactcgtggccgatacaggccttgacccttccatcgatgtaaagagtatcgcgccgaaagtagaggtgaagatgtttgccggggggaagggaaaggggttggtcgcaaaagaggaattgaagcaaggcgagatgttgtggcaggaggagccatggattgtcacttctgatccgtaagtttcacagaatggagtagggcgcagagttaaggaagggaacgaacgggtgagaggggcggggtaggtgatggagatggaagcgccgatggaagacaacaaaactgatgtcgaaatgctcgggcagaggacattattctctcttaacccaatccatgatgtgctcccaatgtttttccctcttcgcccgcccatcaccacctatctctgttccctgcccccactgcacaaccgcccacttttgcaaccgtctttgctacaccaaatctctctcttcttcgcatccaccccttcttt

SEQ ID NO: 259 - DNA, 3380 bp, Cryptococcus neoformans
catttaattattaattttattggtcggggattaccgtctttgtcatcactttcgggggattcgggtgtcgacaagtcggaacgagtagaattacaaagattactgtacaagtagccatgctgcttttctacatacccattcgttcttgattttacagctccatctcttactttcgatacctcagtgagccgtccccggtaacgatttctackctacaatggctttctcaggtgctcttgtaagtttttcggaagctgctggttattgactttcgctgaccccccaacagactatcaccgacttggatgactttttaacgccatctcaagcatgtatcattcctgttcgtaataacaagaagccagcggaggatgaaggtcccgtaagttacccggaaaaattcaacatgtactctatctgacgccatgatctacagaccgagattcatatcgactccaacaacaattactacgaggtatccacatatccatcggttggtcacgacgatgacattggaaattccaagaaggcgctcgagaaggcagaaattaatttgaacgactgtttggcttgcaggtatgattccttctcctccgaagtcttatgtcttgctgatgtcagtatgtagcgggtgtatcacctccactgaatcgctcttgatcactatgcagtctcagaacgagatcctcgagtttatcaaaacaaaccccacagtggtagatcctgaatccccctgccacaagccccgtttacctatcctttccatatcgcctcagaccctcgcttctttatcggctgcttatgcaacagcatcctctcgacctcccattcctctcttggtgcttttacggcgtatccgtgcattcctctcccagccggagaagggatcttggagagtatgggacaccacttttgcccggcatatgagcctgagagaatctgtggtggagttccatgagcgaaaggacaagaaggaaaagggtaaggctgcggagatgccaatgttggcgagtgcttgtcccggatgggtttgttacgcagagaaggcacagggtgatatgttgcccttgttgagcgcggcaaggagtagccaaggcattattggagctttagcaaagtcttggtatggtcacaaattgcagcacaagtgagttcatctcttgtcgtttagatggagccgcccgctgacgattcggacagacccgatgagatttatcatgttactgctatgccttgttatgacaagaagctcgaagcctcacgatccgacttttattcttccctctattctacgcgcgacgtcgactgcgttctcaccactggcgaacttgaccttctccttcaagaacttggattcgacccccacgttcccatcgccaacgagtctaccccgtcttactcggctactgaagactcgccattccctgaactcctaactcacgaaggttcaagctccggctcctatctccagaccatcattcacgatgttcaacgctctcatcccaatcctactcgaatcattactcgtgaaatccgaggttcaacagacaatattgaataccttattcaggatactatcactggccaagtcgttttcaagggtgccaaggtttatggattccgtaatcttcaaaacctggtccgaaaagtggcaaaggagacgggtatcggtcgttccggtcgaggtgcaggtgccggtaagttaagtgctgccgtcgcagcccgtcggcgaaaagccaagacggcagcaccagcagcaacttctgctacaacttctgccgaagggacagatgtagagagcattgcatctctcagtctagttagcggagaggataagaagctcgatttcgtagaggttatggcttgtcctggaggatgcgtgaacggaggtggtcagatgaagccaactgtgcctacaccctcggctccggaagcgatggaagtagatgaagaagggtaccagcgacctcttcctgacgatggtgtagccgtcgctgtcaacgggggaagtaataatgtaggtactgggacggttgcagggatggaggaagggatgcggtggtcaacgaaagaatgggttgccaaggtagaagatatctattggacaggtctacctacccctccggcgtcacccccacttactgcttcaaacgtcaatggctttgcgcctcaagtcaagacaaatggcacaaccaatggccaagtcaataacggcgtagatcgtaatcttcaatctgaccagcttgccgaggaaatcatccatgaagtctgtggggacgatgcgtctaagcgatgggattttatgaggacgaggtttagaaaggtggagagcgatgttttgtcatcaggaggggttacccacgaggcggtcaaatggtagaaagaggacttgtaataatcacattctgtatcggcatttctggcttctcgagggcatgtgtgtcatatcttgtacggttcatattcacagcataatgcataactataaacaaagattgtagcacacaaaatagtattcgcaatctggacaccgaaacctcgcaatgattcgatccttcgagtagcgccaatctatctatttaaccttttcacgcattcctacgtttcccaatgtctcggtcctacattcacctttgtccttgcacttcctaccttttcagcctgagttgcagggctcgttggactgcctgggaactgcaaactcccaccataaccctgcgcattcaccaacatcactaccgaaccctgttgcgactctctcccaggtccactctgttcgttattcaacgacgaatgaggaggttgatgatctctactgcccctcgacaacgcactcccattccaccccacacttccatgcatactatttaccctcccaatacctgtcatatcagggacgaccaccgccggcctgttacgtttaggggagccgcgatctttcatggtagcagcgccgttagggttgttcacaggtaaagaagtaaattgaggagcgggcactatggtgtggcttattttgggacgagactggatagaaggggaaggtgtacgcatagggtgtccaagacgaaagggttgcgtgatatcagaggaaacaaaatcgtgaaaaccgcctatccctgtggtagtggaagagtagaggttcgcctgggggatgcggacattatccaaacttggacaacgatctttcccccccgcgactggcgggtcaatatacatggaatcaccgctatcttgagataagttggggtcgggtgcatggcctgtcccagggggaacaaaaagctgtgtagtaccaaactgaatgggatctcggttggtattatgacagagtgcaagaggcgcgttccacaagctttctgtgggaaaaatgcgactga

SEQ ID NO: 260 - DNA, 4089 bp, Cryptococcus neoformans
gaaatggaaacgtgacaagaagaaaagcttacagatatcatttttccttgtaggcttggcactcttaatctccttgtccataaacttctcagggtaccattctttccttagactcaggttgttgtggtaaacagccttcacttcaccgccagcgttgatgatggtttgagctgcgctcttggagtatcttgacagttcgagctttaagggggggagaggaagggtaggatcggcatcgccaaggagtttgatgccggacaggttggagagaccatgcacagcgttagatcggacaatggtaccgattgttataggctcatcgggcgaaatgcgggactgtgcgatccatgattgaagagtagcaatggaaaggggagcgtaggtcttggacgtgctaccaatatatcagctaccaccatagatttttgaacatatattaaacggacaagttgataaatcctctcttggggatctttcggtacaacggtgtctgaccaccctcgaaacccaatctcacgcccttgccattcctcgctttttgacccttatgacctcgtccagatgtaccacccttttgacttccaggacctctaccgtaacgtgtatcctacatatattgatcagtatgctaatgtagctgaccggagaatcgcgaagacgaacggtctttgtcgagccctttgcgggagtcaagtcgcctaagtgcacagcggttgagatagcgcgagaagacgatgctgaggcggggttgagaaaccttgctgtgttgttcaagagcgtcttgagtgggtttccgagcattgtgtttgtatgtatgaactgagaaacagtgtacagccatcccagatagtcaacatctttcgaggttctccgacttttccaagaagtagtatcaggcctctcgcggaatttccacgtcaggcataatttcgcgcatctttaactcgagcgtcgtgaatgttgttggatttcttgataacttatatcttccagattgtgcatgctcagagccgtaatccgcactgcaacctctaccagacaggccaccacctacgcccctaaattcaaaccccaaataccgctcagaagaacgttcataatgtctgcccctgccgctgaggccaacttgcacaaggacgaagttaccggagaaatgatctccaagtcgtgagtcagcaaccgtgggagaaataggcgtattcagctgaaacaactatagtgagctgaagcgaaggcaaaaagaacgacagagggccgctcagaaggctgagaaggctgctgctgctcctgccgcagctcagcctaagaagcaatctaaagccgacgccgaggctgagatggacgccactgtgcgtataactcggtattgcaatgaaaattaggctgatcaagatactaggctttccacgagatgcgatacaaggagattgccaagcttcgagagaccaagcagcccaacccttaccctcacaagttcaacgtcactcacgctgtccccaagtttgtcgaggagtggggcaaggaaggcaagttggaaaagggtgaaactgcccagcttaatgagcctgtaagcgtattcttgacgcatgctgcagccccgctgacagcagatagatttccctcgctggtcgagtctacactatccgcgaatcctcttccaagttgaggttctacgacctcaaggccgacggtgttaaggttcagattatggctcaggcccaaaacgctgcttctctcgaagagtacctcgacactcacgaccggattcgacgcggtgacatcattggcgtcactggtattccctctcgaaccaagatgggagagctttccctttccatctcttctattcagctcctttccccctgtcttcacctcctgcccggtagggaaggtgttgtcgacctcgagacaagatacaggaagaggtatcttgacttgattatgaaccccagcacccgagacatctttgtcacacgttccaaggtcatcaactacatccgaaagtaccttgacgcccaaggtttcctcgaagttgagactcctatgatgtccatgattgctggcggtgccaccgccaagcccttcgtcacccatcacaacgacctcaagctcgacttgttcatgcgtatcgcccccgagctttacctcaaggagctcgtcgtcggtggtcttgaccgggtcttcgaaatcggccgtgtcttccgaaatgagcagatcgatatgacacataaccccgagttctccatctgtgaattctacatggcctacgctgacatgtacgacatcatggacatgaccgaggaattgattgagggcatggtcaagtccctcacaggtggtaccaaattgactttccaccctcaaggtaaaggtgaaggcaagaaggtttacgaggttgacttcgccaggccttggaagaggtttgacatgattggggagttggagaagcaattgaacgttaagttccccccgggagaaaccttgcacgatgacaataccaacaagttcctccgtgaactctgtgagaaggtgtgtgcttcatatttataacgttttgcaggaactcatgttatctagcacaacgttgattgcgccgagcccaagaccaactctcgtctccttgacaagctcgttggtgagtatatcgaaaatcaatgtgtcaacccttccttcattgtcggccacccccaggtcatgtcccccttggccaagtacgaccgatctcgccctggactttgtgagcgattcgaggcgttcttatgtactaaggagatttgcaatgcctacactgagttgaacgaccccttcgatcaaagagagagattcatggagcaggtcaggcagaaggagcagggtgacgaggaagcccagggtgttgacgagactttcctcgatgcgtaagttttccatctttttgtccaaatctgtattgttgctaatcttttgagtagtctcgagtacggtctcccacctacaggtggctggggtcttggtatcgaccgtcttgtcatgttcctcaccgactgctccaacatcaaggaagtccttcttttccccgctatgcgacctatcgttgccaactctgttgaggctgttgctcccagtgttaccgctacggaggccgccaaggaggccaaggcttaaagagggtatgctacacagcagttttgatttagaggagttaatgaatctcggtatatatttggttgcaacaccggaacggacgttatacatggtattaataaaaggcacataaatcaagccaagtgtacaaaatagtttacaaagccatattcagatcgccatccccatgtgcgttttgtacttctcccgctaaccttctcatcgcttcctccaaactcatccccgcgatttcttcatctctcaatccgctgcctcctggtaaagtcaacaacgctcttgcgagactctcatgcgtggcagccagtgacgcaaagtcggtatcgacatggtcgtctccctcctccgccgaacccggtaaaccagataaaccagataaatccatagtatgggatgtgccgtgttcgtgctcagagtgtgtttgaggcgggagtgggttgtcagggttggatgtaggaggtggctggccgtgtggctggtgatgaaacgagtcagtgtggatactctggtcccggtgatctgggagcatctccatttggtgaccggtggaagaatcgacaagatggacgcttgtatctgcagtgttggagggatcagccatggagcgttgtagctcaggatcgataaatatatctgtgtcagacagatgacgttgtacagatccttgttcctgtacgtgcatttgctccgcattttcaatgccctcctcttgcccttctgtagccttccttggtctgcctcttctcttcttcttaccatcttgatcaccatcgatttcctcgccctctgcttcggatggctttcgcttgccttttttactactttcgcctcttgacctggaagagtcgctcttgggaggacggctttccttgatgggacctttgagtttacggtagcgattgtagatttcagagtatttgaatttgcttgcgcggacaagagcgatgg

SEQ ID NO: 261 - DNA, 4159 bp, Cryptococcus neoformans
gttttcaatgtatgggtcattggacaaagctgatcaaggatgtaggcttgcggacatgctcgctggcgttcacgttgggaaacaatagagaccatattggtttattttacatggcataggcgtatatgcaagtcgggtagttgctttgggttcttctgcatgtaacaattctcatattacctcatcgcgaattgcgagttggccgcaatcacttgtcccaggctgcgtgccctttctaagttttacagtcgattatttgtgcatatggcctccaacctccgccatacatcatctaatcttggtccattccgcctgccctgtctttgaactctctgttgtagaaagaaaatgttaaaggaaaggagcatagttgatattgatccacagatatgaggcaaagtggaaaaaaggggcagttcggcgtcgtcagcatcaacttcaatttccatctgcacttgtggccacgcaccttatgtacagaacattgttgcagcgaatgaggacttctcccaaagcaccatttgacttgccattctcaatttcttcagtgttagcaagctgtgacattttaatcagtattctacacgtctgatccgcggctgattgacatcatccgctgcaatccgcgcccataactcttgccacggagcacaagactcacttgcaagttcatgtagccatctgtagatacgagatagcccctgtactcgagaccccactttaatcggacatagacgaccttgcctgtgagatcttggaggaagggctttgggttgacgggctgtgaattggattgttggtagtgagcatagattgagtggtgtccgtgaacggatgaagactcactgcgatggcggacatgatatttgtgttttgagtagggtataagagagtataggcaacatataataagcttggtggtgtgtcgctgagagtttgcggcaggaaggcgcgctggcgggaagctgggcaacgcgcgcctacgtgaactaagtttgggatgttattctgcacttacaagaactcgagtctccattgcatctgcacactctctccgctgtctacaatgggtaagtatttcccgaccattcccttgctccgctcaccccttgtagccgccccaaaccccttcgccggcttcggctcaaagcgtgagtaccacggccccacctttcctgcacgctctgtcgattatatctgacttaaagcttcctcaatgtacaacgaactccattttttcttcatctaacccagcccaaccctccgcttccggcacctcactgtttggaaacacttcgtctcaacctgcttctggtagcggcttattcggctcgtcatccactacaaacaactcctctgctacccctgccgcctcggggggcggcttatttggcggtggggcacagacttctggcggtttgttcggaaataacaccaccggtgccaataataacaataacaactcaaacgcggcagctgcaaacagctcgactcctgcagcgccctctggaggtagtctatttggaggatttggaactggaggatttggaacgaacaatacggcgactgggtccacgactccagcttctaaacctgcttttggtggctttggtcaatccactacaccggccgcacctcctccagctagtacagggacaagcttatttggaggcgctgctaccggcacaagcacaggtggtggcttgtttggtgctaaacctgcagaaggcactggagcacctggcgcagcgtcaacaacgggtggatttacagggtttggagcaaagcctgccggcaccacatctgcgcctgcaacaggtggactttttggttcaaagcctgcagaatctacccctgctgcttcttcttctcctgcgccctcatccggtggtggcctcttttcattcggtgctaaacccgcctccactactacacctgctgctccttcacttttcggctctgctcctgccaaggatgcttcttcatcaactcctacatctggcacaccacccaccacttctggaggcggaccctttgggggtggggggctttttggtgccaagcccgctgctcctgctacagaggctcctaaagctgacaccgccaccactgccccggctgccccaaccagtggtttgtttgggggagtaggtgcctcaaaacccgctgaagcacctaagcctgctgctggagggttctccttcggtaacttgggagccaaacctgctactccttctaccactgaagctcccaaaacgggaggcttcagctttggagcttctgccccaagcgctgataagaaggacgagatgccggctgaagcgcccaagacgggaggcttcagttttggcgcccccgctgctgccgcttccaacgaagaaaaaaagactgataagcctgcagaggctcccaaaccgggtggattcagctttggtaacattggtacatccgcaacaacggcctctggagacgataaaggcaaggcgcctgaagctcctaaggctggcgggttcagttttggcggtcttggtgcaaagacagatggtgacaaggataaggctccagctgcgcctacgcctgctgcgcctgctgctggtggcttgtttggagccaagcctgccgatgctggtcaaagcagtaccgccgccccttcagctagcggtggtctctttggtgccaatcccaacactaccgcggcggcttctaccactacacctgctgtaccaaccgcccccattgcttccgccccagccaatgtggagaagcccagcgaacccgttcccaaccttcttcgtggcaaagccttggatgatatagtggaaggatggaataaggatttagaggagcaagtgaaggagtttgagaggcaggctggtgaggtgagggagtgggataagattttggtcaggaatggtaaccaagtgggtggtaaccttgttcgtgtcttggatacaagctgacacttctaatcctgaagattacagctcttagaagacaagtgttggaggctcagcagacccaagctgctgttgatgaaccgttgaactactttgaggctcagcaaaatcagctggaaagtatgttggatgtgtatgagaaggagattgcaaaaatgtcaaacgacagcaccaggccgttggcggcgaaaatgccggctgatcgagagcgggagaaggcgtgagtcttgactgatggtttattggaaaagctattgactgacaatcgctgaaacaagttacacacttgccgaggatcttaataaacagctcgatgacctgtctcgtaacctgtcacagatgattgaacaagtaaacaaaatttcgacctcccaatcatccctcgacgcaagcacgtcctctctcacgaaccgtcctgggacaccctccgcgtctgctgctgacgcagcttcacaaatgccagatgacccagttagccagctttctgctattcttggtgcgcacttgagggcattgagctcaatcgactccagtgcgggcaaactatctaccaaggttggagagttggaaaccaagatgggcagtagcgggtctgcccggggatggggattgccaaggagatgatatgttatgataagatagaaagtgtacgaatgataaaaggcagaaacagcggtttaatgtaaatttcctacatgcatacattgattattagacatcaccctccagcacatcatcttcggcaacctccaaaactctatcaggggacacgcttgggcttcttgagatatatctgtcccttgtatccccctcttctccgcccagctcactaccactcagtgaaggcgaacgcgaaacatagcggttacctgacgaggctgaagaccgggaacgagaccgtccacgagaaccgggtgatgatgggggtgtacgtgagggtgagcgggaagtgtatcgaggaggggacggagaccgggagccttctcgttcagactcttgatcctcctagtcaaatgtgtcaaatttaatttcgccgaaactggtagaaaagagatacgcacgaggagacttttcctgggcggtaatccttctgtttcctccagcacgctcctctgggttaaccggggaagaatgatatcacagacacgttcctgggtcaacagttcgtctatgaattcatcaaagtgggtcaaagaataacc

SEQ ID NO: 262 - DNA, 3339 bp, Cryptococcus neoformans
tggcggcaggttttgctatttggcttcgtgcttataatactgctaaacgatagcttttatttcatatgtggctctatgattgatcgctattgcccggtagaccattctaacccatctaatcgtcccgctgttgactgcatgaccccaatcatatcctgcaaacctatatccccaggcggcgcgattgcataaacaggtcttgaaggttgcagttgcaccaggtacggttcgtcgggtgcggactgctcgtttgttgtggaagccgagggtgtcagccgagtgatagagaggtggagcgttagaggtggagaggtagggatcggtatgggtaagtggaggagatgaccggtgagagtaaatgtatgcgaatgcctagaatccaaagtcaacgaggagcaatgaaacaatgaatatgtgacgtaccggaaccccaatgcttttacaaagtcttcgatatctcgtgaagaactcatatcctgtacttctacactcatcacagctctcacagcggcttccgagtactctgcacttcgtaacctcgacgaaacatatgcaagcgtatgcacccaatccccgtcatccttctcttttcctttccccttatcccgcacagtgcctgcaattcgtatggagcgaaaacgtaggttccgcgtttgaccagggagaacagggttagtggtggtgtagatacgttcgataaggtgaagaggctcagcgtggatcgcgaggagggagaggtgggaaagaatggacgtatgcagtgacggtgggaggagagagtatagggtaggttcgagaggtgttgtttgcgaggacgtcgaggccatttccaagtattctattatactgaaaatagcaaaatgcctatgtggtcaaatacaaggccaaatacatcaatccatgttcgtttgagcttgaattcaaagtgtcaatcagaacgccaatcacgtgaccacgacgcgtcctaaaagatgggtgtcatttatcgatcctctcgtccatggcattcttatccacacctctaccatcgagcgactataaaatgcccaggtcaacatacactgaagcccttctcggcccagaggtgtataaaaaggttagagagacaaaggttctcgtcgttggtgctggtggtattggctgtgaactccgtgggtcagctttagcatcgcgtctttcgtttgacttggagcgcgacttgctgaacatcaaagattagtcaagaaccttgttttggttgggttcgccaatattgaaatagtatgtggcttactagcgtcctgcatttctgcctatcaactaacacgttttaagatcgaccttgataccattgacctctcaaacttgaaccgccagttcctcttccgaaaacccgacatatctaaatccaaagcccttgttgccgctgcgacagctcaccacttcaaccccaactctggcatcaacatcaacgctaggcacgggaatgtcaaggatagtgtgaatgacctcgagtggatcaaggggttcggcttggtcatgaacgcattggataatatgggtaggtttcgagtaaaggggtagtttatgttttgatgaaacaaaatgggagctgatggtcgtgagcaagatgcacgacggcatgtgaataggctttgtcaggctgctggtgtccctcttatcgagtctggtactgccggttacctcggtcaggttactcccatgatcaaggtttgtccaaaatcaccatcctcttgaaggatcaataatcacaaggctgataaccctatacaggacgtcactgaatgctttgactgtgtacccaagcctgcccccaaagcgttcccagtctgcactatccgttcaacacctagtgaacctattcactgtatcgtctgggcaaagacgtacctttttggaaagttgtttggtgaagatgatgaggacatggacactgaagagctggacaaggctaaatctagtggggagaatggtaagttgatcaaaatccctgtttttaacgacgccatatgtccatgctcagtatgacttgtcagcggaggaaattgaaaacctgaaaaaggaagccgctgccttccgacaagtaaggaaatcccttagcgaagaggacggccctcggcgagtattccacaaaattttcaacgaagatatccgccgtctcttggctatggaggatatgtggaaaaaggaaggccgtgtaaagcctgtacctcttgattgtgatgccattcttgacgagacgtttgtcaccccaccactccgtacggttcctgtgacgaaccagcaagcggacagtgacagggcggctgaaagggacaagggtaaatccgcggcgctgttgaaggaccagaaagagttgaatttgaaggagaatttggaattgttcctggacaggtaggttacttatatatttgaacattgctgattgaatagctgcaagaggctttccgctcgagcactcgcctttcccgacacacctctgtcctttgacaaggatgatgacgatactcttgactttgtacttgcgacagctaaccttcgagctaccgcttacggtatccccaataagactcgtttccaagtcaaaggcaagttgcttgtcgcataggggaaaaaaaatcaatactcatacccgctatagaaatggccggtaatatcattcccgctattgctaccaccaacgccatcatcgccggtcttatcgtgatgcaatccctcaacatcctctctcgaatccactccacctccaatggcggcccatccaccgactccagcagcatccctgtccgcaacgtgttcctccgaacagaccctaccaaacccctcggctcatttttaccccaacatccagacccaacatgcagcgtctgtcgagacgtatacatcccgttcaaagctgatgtcgggaaatgcacgttgggtgagtttgtcgaggatgcagtaaaagactggcttgggtcagcagagtttgaagggcaaggagaaggggaggatgtggaatggacagtgtttgaaggaggaaggcttttggctgatccagactttgacgataaccttggaaggactttggatgaccttggggttggacggggtaagattctgacggtgagggatgaagatacaaagtacagacctgtacacttttgtgtctgccaaccgtgggtctcaaatatatattatcgtgtttgccaaaaaggcttgatcattaacaccattataatagggaccccgaagcgtcaaaagcctataccctccctgacgaaaaacccacaatcccgctcgctcccgccaaacctggagctgccgctcgtgaatcttccgaagaacccgagatgtcgc

SEQ ID NO: 263 - DNA, 4094 bp, Cryptococcus neoformans
ccgagtcacgatatgcaacctatgtttccacatgtctcgctgtatatattcatgtcagctcaaaccttaccgtaaccatcatcacctaccattgattatgcgttcctcgccagccataatgagtacatcgtatcaccatgcgacattcgtccgtcacttcatccttcgcttcacctccgacgcgtttgtcccaatgccaattacgtaattttctccacagctatgacgtgtttgggttgtggttcctgaagcgctagactgggctgaaaatgagtgttggcttcaagaatcaagaggctgaagctgcccattgctgcgacaccgttgccagctgcgagtatgtataattgcatgtatatgattcatgaggaatattgaacaaggatccaaaggaatcgcatagatgcaggacatatatccaacgagagacacttttgcagagccggtgaaaaaaccacaggaaacgcgaaagaaaaaatcacatctttttttgggctcactgtttccactaggctctttttaggttctgggcccagccatcattctcttcatggatatgcatgaggagagttgcgtggcaagtcacgtctcagatcacatgtaaggtatatggcatatgtacatagtatgctccactaagctgcaccagaagagaattgcggcgagacgaggagcaaataggaatattgcccagaatgcgctgtgtaaaaaatagctttccactcttggctcatcgcgttccgcatggaatgtagtgcgcagccgcaagaaattatccgagccccattccactttcattctctacatcgcctctcgtcttcccttctatatccattctccttctttccttccttccttccttccttccctccctcctatctcttgcataccgtatttcacgccggctgctatcttcccttttacccacgtcgactcatccgccacccacccagcgaccacccaccgccagccacatcgcggccgcacgcatcaaaagtcaatgcagtacggcagccaatcgcccactctaggccgtgaacccctgctcgcgtccgcccagaatcctggcatgtcccagcgtctctctgaatcatcctttacttcatacgataaccagtctagcatgtctcaccgtgtcggcgcaaattctcccactggcgcgtcctatgcgagtttctcttctggcaacagatttggtcccacagcgcatctcaaccctggccccgttgctggtgtcagcgaggcaggtgcgttgcctgcgggctcatatgcccaggggccgatagatgacgatgatgatatggacgaccatctgcatacctttaccgccgctgagaaaaaggatcttagcacgccgtttaatatcagttcctggcgaggatgggccaacgcattgactttggctgttttggcaggcggcggtgtaatgcttttcgcgggttaccctatcatatcgttctactacggcgataatagctctagcgggtctaacacatccgggtacaacctcggtggtatcaatgccagtggacaatacccttctatcactggcttgcccagtctgatcgacccagatacacctgagtacctgtacacaagaactgggttcgatgggaatgagtggacattggtattttcggacgagtttgaaaaagatggaagaacattctttgagggtgatgatccattctggacaggtgttaatttcaattattggccaactgggtgagtttgtccatcatcattaagttcagatcaatttcagtattaacctaacactttccagtgacctggaatggtacgatccttctgccatcactacggccgatggaaacctactcattaccatcactcaagaacccatcaacgatctcaacttcaagtctggtatgctccagtcttggaacaagttttgtttcaacaaaaatgcctatattgaattctctgcttctttgcctggcacgagcggtattggtggtttctggcctggtgtctggactatgggtaacttgggacgacccgggtatggtgcttctactgaaggaatgtggccgtgagtatcctgcaggttcttcttctgattgtgactgacccttgcagatacacttacaactcttgtgacgtcggtattcttgcgaaccaaacttggctcaatggtacaggccctgaagccgcactcaccagtggttccaacggcggtcagctctctcaacttcccggtatgcgtaccccgtcatgtacgtgtgagggcgaagaccatcctggtccagccgttaccgtcggtcgatcggctcctgaaatcgatatcattgaagcgcagatcatcatttccgaaaaccgaggggaagtctcccagtcattcaaaccgcgccctttgacgactcctaccaatgggacaacacttcatcaagtcactacaagcagtacgacactgacttgacatactggaacacatacctcggtggtacataccaacaatctgtctcttctcttacccgtgtacccagagatatctattacagccagcccggaggtggtggcgaatttgccatgtttggtatggaatacgattctgctcccggtcataaggaggatggatacgtaacttggtacagcgacaacaaaaccagttggaccatgtatgcggacgcccttgctgcgaatgaaaaggccggtattggaagacgaaccattcccgaagaacctatgaccctgatcgtcaaccttggtctttctttcaacttccaacctgtcgacttcgatcatctcactttccccaactaccttcgcattgattacttccgtgtgtatcaacaatcggacagtatctctatcggatgtgaccccgatggtgagtatcctttacatttaaggaactttttatcaccagaaactgacggcatgctgtagactaccccactgcagattatatctccaaacacgccgaggtatactccaatgcgaatttgacgacttgggctcaggcaggtacgtatacgcaccccctcttctttatgctatggcttgtactaatatatctttaaaaaggtaacaccttcccaaagaatgagttgaccgggtgttaaacagatgaggggttcgagtatggatatgaacgcgagcacgaggaagttgaggtgctagagagagaaggcagtggaggaatagagaaggacgaggaagtatttgacgacatctacgcatatattcgaaatgcctacgacccggaggaaacccaagcaatcaatcagttcccccaatcaactcgagagagtcaatcaaacaccggacatttcacatgccttcttattatctactttttaccttgcttagacgctatatttttgacttttttctctaggagtgaacgttttccctcctcattgtccatgtggattgaaatgcgacggtgtcgcgcggtgattatcacgaaaatcttagctttgacagttgatttttttatcgctgtcttttccatctcccttttttatttcaagtgaacttaggatacccctgcatatctagagaaagtatacccgaatgcatttttgctttgacgattagtgctatctcattgacaattgtggtgttttgtgcaaggaacgcggcaagtcaattgactcatgcgccatgaaaacagatgcttttttttgaaggtgtgccaatgtatagagcgcggaaggactgtcggcacatactgatgagatgacttattttccatttagagataagcatgacttaagacgggtcctcaaactgaaattttgcttcagattctcggcgtgttttgacagggggtgagcaacatctccagagacatggccgatgaaaatttggagcgagagaagaagatccgtctccatccttcttacaattttattagtatgatcaagcgccacattaataaaaagggacatgcatttggaccagccacgcatcattcgttaagtctcttcctttacaaccccaattgaatattgctcgactcttcatttattgatactgcttcttgtgctcctttcgcgaactgctactcctcgtactgtttgagatcttcatactaatacaaagttgcatgataagtcttcaatcat

SEQ ID NO: 264 - DNA, 4250 bp, Cryptococcus neoformans
aaggaggataaagagaatcaagacttacgcatcttcaaaaagatgaacaagaaaagcctctgctgcttcttgtaatgccatgatcgccgaactttgccatcgatattcgcccacctcatcagagcctacattcatggctacttctcttacctacgtaattgaaattcaaaaaagtctggtcagcttgatgttattactgaaattgccaggccgcgccagccccattggcatctcacgcgttcggaatggaataggaggaatgcgtatggggtatggtcgggggtatggacaaggataaaggcagggatatgggaacgtacgactcgggagaatgggagtttggcaatcaacaaatcagtcgatttttgataatgccgaatttcacgcagagcgactgtaccagggcggaaacgatgcttctttttcggaccagcgggtgatttaggatctggaggaggatttcgttgtactattggttttttgggaatcccttgtcagcatcacaaacacagcaacactctcatccaccatgtcgacatctctcattcccacttccactctataagagtaaacgtagaagtaagaggacaaatgaacaagaaggacgtacctccgctatgtctaggagctttgccacccgtactcttcctcgccgtgttcttggttttccggctcccttcgcctatacttgatcggccacctcctcgacttgggctcgttactgttcttgccatattccctctagttgattggtgtatttatccctatatctcttctccaataccttgtatgtcttagtatctgatctcttaaatctcgaagattgattgaggatgggtgcgtcgaaaagcttgagtggtacagacgcgtcgaaagcttcttgcgctgtatggaaagttggacgatagtctgtcaagcacgcgttgtttaggcgcagctcttgtccgtggcgtgtgaacggatatatcccagcgtcctgcgctggagaggaggatgttggatggtaaacgaaacgaggagacgatccgctgtaaaagtatgggaggaaaaagagctgcgttgtgactgggacgaagagatcagccacgcagagcagcacatctcattttcagggaacaccgtgttgattacgtacattttgggaagccccccgagactggctggggttggttggcttgcgcgtcgtgatgccatctctttcctccatgggtactccttgctccattttatctctacatctatacagtctgtcaccgccatggctaatcaaccagaaaagctcgcagacgcccagaacaaagacgctggcgagaaggtccaggagacagaagagaagactgtcgtggaagctgtcccaaccgtcgaagagggtatgtcttgttggccctactgtccaatgatgaatgtccatgatccgtcgctgacaatcgcttaccgcagaaatcctcaacaacatcgctttgatcggtcgggccgtcaccactatcgagcctcgattcactatccgtgttttgcgaaccttgacgtctttgaggaagaagttgacaaagaacgctttgaagactgtcttggacgatgctttccctaaaggatgtaaggaaatttgatcaaatggacacttctcaatcgtcaggcgtgctttggctgatactccttatttacagccaagactggtcaaactctcattgcctcgcccatcttttcctccctccccgaatctgcacccgccgctactgaacaacaatcagatgcgatggaaatcgactcttctatccccgctgctgaaggaactaccgcccccacccctaagaagaagtttgttccccccatatattctgccactggtgaccttttacctgaggggattgtgtatttgaggctgcttttgattctcgccaacctcgatgcagggcgcgttgtcgaggtatgttttttttttctattcattccaaaagagaagagaagacaagaagaagagtgttgatcagttcgttaggcaggagactttgcaatggagactgcagacctaattagctcttggaacagacggacaatggaccagcttgctggcaagatttggttctacgtcgcccgcgcttatgagcttcaaggccgtttggctgaactccaaccgtgagattcctttccatggctttgtttaccgatattgaccaattgctgttcagtcaattcatggctattcgacagaccgccgctctgaggaaagatgagacccttgaggttactgtcctcaaccttctcttgcgatcttacctcgccaactctcaatacgaacaagccgaaaagctcgtttccaagactcaatttcacggtgccgccaaccaggctcagactgtccgatggttattctacactgggcgacttcgagccattcagctcaactatgctgaagcccgaaattaccttcagacagcgatcaggagagcgccgaaagacgaagttgcccccggatttgtccagcttatccacaagtactttatcatcgttgtgttgttgactggtgtcattcccgaccgagccttgttccgcaagccagtcctcaaacaagctcttgccccttacttccaaattgttcaagccgtacgtatcggtgacgttgccggtttccaaaaagctttccaaacccatgaagccacctttttcgccgactctacccatttcctcatctctcgtttgcgacactttgtcatcaagaccgctttgcgtaccatcactcttgcttactcccgcatttcccttgccgatgtctgtatcaagctccacctcgactcggaggaggacacagaatacattgtcgccaaggcgattaaggatggagtgattgatgcgacgattgacccgcaaggtggatggatgcagagcaaggtcgcgaaagacctctatgagacggatgagccggcgaagcagttccagaagagggtgcaatactgcactcaggtgtataacgagagtgttagggtgagttttcgtctaattacattgatcattcgttccttgacgtgttgctgatgggattttctcaggcgatgcgatatcctccagacgctcaccgtaaagaactagactctgcggccgagtcgcgtgaacgagaccgagaaatcgcgcagcttattcaggagagtgacgagcctgatgacatggatgacatgggagatttgtagagaggaaagatggaaatagaacaattgcccagacagctcttttgtgtgaaggattcagcatgaattaatggcatgtagatgtctattcgtacacgaataaagaaggatatgaatataggatggagataagagatgtataaaggctcgtagactagataagccgtcaaagttcaccgctcctactggtcttgacgctcagaccttccccatctattctggattcatcaaggtcaccggcggtggcaacactgtcaaggtcccttacatgggtgtcgccgccaacatgaaagacatgcccatcctcgaccctacggattggtatctcggcatgaactcgcccgctatcatcgatgtggatggcaacgtccaacaaggcccggcaacatatacgtttagcaacgtgagctacccctcggtgcttttccgtcttgccggaggaacacctttgctcgtgattgacttgattgacgcaaatgccaaccttacttttactcccgattacaccactcgaaagcgttccccgacttttgaacaggaaacggagaacgacgagcgccgccgctcatttgagttcagcgacattctcgaatgggacgaatattcccaatggagattgtaaatgtgagtgtttttgccgacatgtgtcttgcctcaacgaaagggaagaaactgaaaatgctgatggtttctagtccttatgagggcgttgcacatcacgggggataacacgaacgaatcagattatgaatcttgcaagcctactcacctccagccgtttgtgagaaccttgtgctgatgacggcttggacaagagtttctcaatcattcaccgttgcccaataaactcaccatctctgcttttatgtgggtgttgctggtgtttcaagggcagttattatccataccgaacgggcatttccaaaccaaaggctgccatgtagttcagtagtataatacgctttgcttttgtttttctttttttccttcctggaatcttggacactcgcgatgagaagaaaaatagcgtcatgaacgatgaattacgcattgttgttgctagtattttct

SEQ ID NO: 265 - DNA, 4118 bp, Cryptococcus neoformans
aataggatctcgtcgtcatcactgccacaaaactggtatttctgagatatactactaagttcaatttcctgacaaaagatcagctcttttcagcttttgaatgcctagtataatatgacctgaagattccttcttctttttccagctttgctgatttgtcatggttttagcaattaactacccacagcagtcggccatcatacgtaattgtagttttgagatgccacgctaatactgggtgaaggcgatggcagaaaaggattcatacaaggatggagcaccatgagggacgataggatgagaggaaggtaaatgatgatgatcgagagaatgattaatcagctcatgaagaaacttggaaagatatacaagatagatgtttaaagtgggtgtttcatcataaaggctcctatttagtgccccttattggtctttaacccataccaattatagggtccagctcgactgcatcgtgtaaatttcgcatttatctacgtatatattctggtgaccaattggtgcagatagaggcgagcgaaacaaacccattagctactggatttaaatcccaataagagctcgaaataagccgtactagctgctcaaaataaccacagcaagaagctcgaaacgagcttgtaactgttcttgaaatgagccggaaattaagccacctcaaggctcatttaagcgccatatagggtcaaatcaagccagtaaatcgagttgattgaaacactttccacttaaaacaagccggcgcaaatttggcttgaaacaagccgccgcgggtcccacgcatagtagtcaacaagaagattcagtgaaatcggaaaacagctgaatgtacaattaatagagaagagagcaacatttgttccttgataatcatacttatccatggcatttggtagaaggtgtcagaatatacctgtgcaaagcaaacacaaagaaatagaaacagattttttttaccctgtcggttgattgaatttcgttgatggctggctatcttgtcagatctgcgccaagttgtcccgatctcagtccgttcccatatctcgcttatggtacacacagaattaatataattacacacacaacaattttcccacggccgcctttgtacatttcagaaaagttgaagacctttttgcatacgtacaaaaccaaaacagtcaatcatacatccacaaacaatccccattttcccaacatggacgccctcttagcagctgctggtcctcttccccagaagaaggggagaccaggcaaggtccatcagcgtactcctcatccgacctcccacaagactgtcgctcgtggagatggcaaggacaatattgattcctcgacgcaatccatcttgagcagcacacggttaccacactctttccaccgctccaacctcgctacaggatcgtcttcagcacctatccgacctgatggaactctcggaagaataggggacaagaaattgcgggcgaaaatcgcctcgcaagatgtgggcaacaagcgggccaaagttgagagggatgacgtgaacgagtggataaacaaggctatcggaggtgagagaggtgggattgaggtggatgaagatctaggggagaagacttggagagtcaaacaggaggaaattgtgaaagaagtggcaatgaacgtcagggggaaaaagtttgatttgaaaatggaggacatgggaagctacaaagtggattacactcggaacggcagacaccttgctatcgcttcatctcgcggtcatgttgctactttcgactggcaagccggtaaactccattccgaaattcacctgaaggagactgttcgggacatcaagtttctccattctgaggcgtactatgctgtggctcagaagaaatatgtctttatctacgaccaaaatggcgtggaattacagtaaagcttggaatctttgagacaggaaaggttaagaactgatggtcattgtagtaaactgaaacaacatatcgaccctacgcatatggaatttttgcctttccactacctcttgtctactgtcgtgcgtatctcgtctcaagtttttcttgagtcaagctgacatttatatcagggtaacgccggttatctcaaatatcacgacacctccaccggtgtcatgttaactcaaatccccacccgtcttggttctcctcatagcatgacccaaaaccctcattctgctatcatccacctcggtcacgccaacggtaccatgacgttatggtctcccaacatgactactcctcatgtcaaacttttggctcatcgcggacctgtcaacggtgttgctgttgatccaagtgagcacagtgctgggaggtacgttgcgacgagcgggatggacggtactgtcaagctttgggatgggcgtatgtggggtaaggaagtgcgagaatggaaaacgaggaaccaaatcacatcgcttgccttttccggcatgggtatgctcagtgttggtggaaagagcggtgtgacagtttaccaggacctttacaaaaacactcatcgcccgccatctccctacctcacccttcctcttcctagcttgacagcttctgccacccgtttctgcccctttgacgatctcctctgtgtcgggcatgaaagaggaatatcatccctcatagtacctggttccggtgaacccaactttgacagtgcagaagccgacttgttcgagactcgtacaagaaggagggaacgagaagtccgtggtgtcctcgaaaaggtccgaccggagcttatcacaatggatgccaactttttgggcaagattagtgaaggacggggtggggagactcatgaggagagggagggaaggagctttaggcagttgggaaggttggaaagattgcgccttaccggtaaggcggatgagcccgagcaagagggtgttgacgatgaggacgctgggctggaagatggtgaggctgaccctaacggcggagagaggtcaataagagaaaagaaggaaaggaggaagatgaagggcaagggcggtagtaccaagaggtacttgaggaagaaggcgaagaaaaacattgtagacaactccttggtaagtctccccaagtttttggtgcgatcataaaccccacaactgacgatctgtggatagttgcaaatgaaggccaaggtggcagcgcaacgagcatcagaggagaagaagagaaaggtggaaaggggcgagatcgtccaggagactggggcgttggcgagattcgcttagatatagggttttactgctcaatgaggggcttgtatatttgcatgtactgcatgtttatcgcatctcggatgcggcgttcgcttgaacgtattcactgttgcagattgtcacaaaagaggtctttctacatgatatgatagccttagaactttgttttgaatgaccctacttggaatgtgtacgatagctgagcgaagggtggtatggtggcgggctattcatcggcgtatcgtccaattttgtgctccttgccgataagaaaacgatcgacgaccgaactcgctcgaggtttcatatctgtttccatcgttccgcctttgtccaacataggtatcgcacacatttctcaatcctcccccataatgcggatattgcctggtagtattacttcaagtgaagcgcgcgacgcgtcgtctgcgtttttgtctacacggtgatgctatagagcgaaactagacctagagacaaaacaaggttaacaaccccaaattgtgccggaggtcgaaagaacccataaaaaagacatttgggacactgtaagagtaaagttgtaagcatatccagaaaattccatgcttgcatccttcacgcaatgagacgagtagatgctgtcagtcgcgcatccgccccccttgcccgtcgcccgagccaccaagggaataaaagtgtacaatgaagattgggacagccccaaaagggctagaaaaatgggcagtactagactgtcaagatagctagagcacacaaaaatgtatgtggaacatcactgcatcgtcgcagagtcaaagaagtatagcgaaaacgaagtataaaaagctaacactacaagaagcaacccccttacacctcctgagaagccttg

SEQ ID NO: 266 - DNA, 4321 bp, Cryptococcus neoformans
aaaccttgcggaagttggtaagagcgttagcttcggcatgggtgtttcctgcaatctggcgagaccatccgtcggccaggatgagaccttgcggttcggcaccgtctatcttggagaacaaagggaagcgggacttgagaatggggaactgtgaagaagatgaagggaggaagagggtggagccgacactgaaggcagtaggagacacttcgcaattgtaggagagctcaatgcagtgttccatgattgccacatcacgagcgtctgggatggtgatcagcaagttcggcagttcggattcaagtaaaattcttcacctgtggtggaaatcgttcgggtctgttctggttgttctagctgaaccatgacggctggaggaactggcgtttatggcgcaattactgatgatagaccaaactggcatgtcctccctctccttccacttccaatatgaagtcgcaagtgatgacgtcaatatttttctatttgaattccatattgctagcttaattaagtagcgtactatgtaggtgaagggaggaagtgtgagaagataggaagatgctgaaaaatcactgacgctctaaacagtacgttccagagtgcaggggtttatggaaacaagagattatatggatgaaaaatcaggggacagcggacgagaatgcatatatatatatattcgtggactggtaacgaatattaagttttagttaaaaggggaaaagagcggcctcgcacgctggcgcgtgttggggagatcacgtgacttccaagattttcagcgccgttggaattgcaggacgatgaacgctgcaaattcgattttcctcctgctttttatttcgactcttcattgatctttccttcgacacacctatttgccatctggcaccttaccgttcctttccctcgctggataccgcttcttttatcgtcttctcactcagcacacgtcccctatctcgtttgacgctggccaccctacttaacagcaatcatgtcttccgtcgcaggtcttcagcgcatcacgccggtgcccacatcggccgactttatcgatgtcgtcctcaacgcaaccatgaggaagacccccactgtcatccacaagaacgtaggtcgacttttgctcgaaaggcgcaaactgacaattgacgatgaaaattagttcaaaatctctcgtattaggaactgtacgtctcggtagccgtaatcacagttttagtgcaaggctgacatcgttacagtctacatgcgaaaggtcaagttcacccaggataccttcgatgagaaacttggcaagatcatctccgagttccccgtgctcgacaaccttcaccctttcctctcttctctcctcaacgttctgtacgacaagaaccattacaaactcgccttgggtcaaatcaacactgctcgacacctcatctctcaagttgccaaggattacgtccgtctcctcaagtttggtgactccctctaccgatgtaagcagttgaagaaggccgctttgggtagaatggcgactataatgaggaggcagaaggaccccttggcgtacttggagcaggttaggcagcacatttctaggttgcctgctatcgatcccaacaccaggactctcttgatctgcggttatcccaacgttggaaagtccagtttcgtcaacaaggtcaccagagccgatgtagatgttcaacctgtaagtttttctcatgattcgcggaatgacctcctgctgacagcctcggcgtagtacgctttcaccaccaaatccttgttcgtcggtcatatggactacaagtacctccgatggcaagtcattgatacccctggtgttcttgaccaccctctcgaggagatgaacaccattgaaatgcaatccatcactgctcttgcgcacctgcgaagtgctgtcctctatttcatggacctttccgaacagtgtggttacactattgaggctcaggtatgtttgggttttttccgtacgccatagcatacttattcttttgcagtgcaagctcttccagtctatcaaaccccttttccagaataagcccaccatcctcgtcattaacaagatcgacatcgtccgacttgccgacctctctgaggaaaaccgatcttatgtcgacactattcttgccgacaagagcgtcaccgttgttgaagcctctacttacaccgaagaaggtattatgaacgtccgaaacactgcctgtgatgctcttctcgcccatcgagtcgagcagaagctccagggttctaggattgaaatggtcgccaataagatccacgtcgctattcctcaaaagcgagatgatgttgagcgaaagccctttatccccgataccgttgcccacaaagtcaagtacgacaaggacgaccccagcaggcccaagactgagagggatatggagcaagagttggaccattctggcatgggtgtctactctgtcgacatgaagagtgagtgtgatgtctttacttcaatatgtttatatgtactgacccaattttgcagagagctacatgctcgcagacgactcctggaaatacgatgttatccccgaattcctcaatggcaagaacgtcgccgactttatcgaccccgatattctcgagaagctcgacgctcttgagcgcgaggaggaggcccttgaggcccaagggttctacgcttctgacgaggaggaaatggtgagtaatccatctggaatttagtcagctactatgactaactctctttctcagcttgactctgaggaggaagagttccgtgatgctgcccgacaaatccgagccaagaaggcagctatcaagaagatatctcaggagaaaaacactcttcaaaaccgtcccatcatccccaagaacaagaagaagctctatctcagcgacctcacttccaacatgcgtaaagctggtcacgatcctcgcgagctcgagaagcgagcggccaggttggccaaggagaatgacaaaattaacgctgagaggaagaaggctatggccgctcagcaggctgctgaggaggaggctggtggtatggacgttgacatggatgagggtgacgggtcttccaaaaacaagaagcgtggtgttgccgctgctgaccgtgcgcctcgtacaaagcgacagtacgccggtttggctaccaaccaacaatcagaaaaggccaacgagctccgtatgtttgctcagcgtctgcctaataggttggccaaggcctctgaaagtgacagacacgtgcccatcactaggccgaagtggatgttgtctggtaagagaaagggtggtacgactgacaggcgatagatgcacgttgttaaaagatgggctagggaagtttgggcttgttttctttgattttgtatgtactatgattagatatatacctttgcaatggattttctctagttctggacattcattgcatataaatcgggtgttgacaatgaatggtatttggcacaaaacagcgtacaagcttcctatagcaagatatctatgggtatataacgcgactaaagaaacccaatggacatatactctgccctctcgccccatgcttgaagctatatgattgaaaaagaaatctgaacgaaagactaactatctcaatctaaagatggttgcacccctggcactactacattacaccctcggtatttctggcggggccatgttctgcccgaccccgaaacctctccctaaactctcatcctctaattcttcctcctcccaattgtcaccgcggccggtttcagacttcagcggtgtgcccatactacgaccttcgtgttggccatggttttggccgggcgtatgtcggccaaagaagccagtcttaataggactcgatggtgatttctcatcgctgtgtcgggtgtcgcttgtatccgctcgctttcgagtgaggatagatccagctcgcgaacgaagtttggacatggaggatggcggttttgtttcaaagggatggttagagttgttgttgttgttgttgttgttgaatcgcggccatcgggatcgggacgcgtgcgacgacgtttgagacaggcgtgattgcatgcgttgaatcttgatataatgtcagcgattagtcaagcatggggataaaattaatcaacttacagcaacaccaccctcttccatcgtgaaaccgaaacctctagaaggaggctgctccaaaccagttgacactaaagagatggttagccgtatattaaacgatctgagcgaatgtaaacttactatccacagtcgatcctctcgcgcccgaatggatcccaaatctcgagctatccatactact

SEQ ID NO: 267 - DNA, 4257 bp, Cryptococcus neoformans
agaagcagcggggaggtggaagccacggaggatagagcgggagatatacggccaaaacgaaggatggtcccatgaatgcaaggtggacatgatttcgttaccgagttggttgtcaggtgcgacgtcgatttcgttgacccagtcgaggagttcttcacccacaagaccttcgcccttgccgtctatgggaagatagaggatttcggcaatgttgaaaatgttgtaagcatcgataaaccgatctctcagcccggcctaattcattgtaagctatgtccatatgaatacagcggtcaagaacttacatcaatatcaggcaatgccttgaggtctcccaattggtcgacatagaaatcagccagcctcctcatattgatgaccgtctctgcatcaggcggacccaacaatccctccactccaaagttcccttttgtatcccatgactctgcacctccattgacaccgaacccgacagacgacagccgccgtcgaccggaatcggcgacgatttgttgaagtgaggtgaacaacagatgtgactcggtatagagttggattagaggctgtggtaaagagttgatagacgcaaagatgatggcttcgtctgagactgttgggtcggcattggtgagctttgcaggcttatttgggtcgtctgaaggctatagcaggattagctcggtggatggtgcaagtgaccttacccttttagtgacccatactgctaattcaccgccaactggtccggctgcagcgctgattgtacgtcctgtggccttccacttttccttgccgcctcgaggataggcttctggtttcaggtaaagagtctgtacaggcgtctggtcttgcctttcggcgtccatagagatgtcgttgtttgcggacggctgcgaaggtctcgacaaggattgtgttggctgggaggaggagaacatggagagggttgtgcccacgttgtgccagtgcggctgcagattagtattgaaggtaagttgttatggtcagtaattattatggtgaataattacggtgagcagttgtggttcaatctttgcgctggccacctgatatccacgtgcatcccacatggcggccacgtgggagatcgggacaccacacaacaccgattgccgtttatgaccgccacaccggagaacgggccggacagcgatgccacggctctgggcgttccgtcatccgttacttatttacgctgtcttttcttccgtcttctattccaactcttcttctctcccaacttctcgtactactacaacaatggacggcaagccagctactcgtgcgtacgcagctccgcgcccgcacacaatgctcacgtccagcagaataccaggcctggaagaagctccagtctctccacgcctccaaggccgacaagctcgtcttgaaggaccttttcaaagctgaccccaagcgtttctccaacctctcaaagaccttttcttcttcttctcccaacgtctctctccttctcgactactccaagaaccttgtcgatgacgaggtcctctccaccctctttgacctcgcccgtgaggccaaggtcgagactttccgtgacgagatgtttgctggcaagcacatcaacacctctgaggaccgttccgtcttgcacatcgctctccgaaacccccctgctgacaagggcggcttcaagatctctgaggccggtgttgacgaggtccacgccgtcctcgcccacatgaaggagttctccgactctgtccgctctggcgcctggaagggttacactggcaaggccattgacaccatcgtgaacattggtattggtggttccgaccttggtcctgttatggtctgcgaggccctcaagcactacagcaagagggacttgaagacccactttgtctccaacattgacggtactgacatggccgaggtcctcaaggcttgcaaccgtgagaccaccttgttcattgtcgcttccaagacctttaccacccaggagaccattaccaacgccgagagtgccaaggaatggttccttgagcaggccaaggaggtacgtactacttttacgattctgattacacaatcatacccacacaccaccaaaagtctcccgcactgacgtacacttttcccatacgtagaaagcccacgttgccaaacacttcgttgccctttccaccaacaccaagggtgtgacggagtttggtattgccgaatccaacatgttccagttctgggactgggttggtggccgatactctctttggtccgcgatcggtctctccatctgcttgtctatcggctttgacaacttccaggagttgctcaatggtgcccacgagatggacaagcacttcaagaccgccaagctcgaggataatttgcccgtcatccttgctttggttggtatctggtacaacgacttttacggttagccccttacgtcattctttatttcacgaatcacgctaaacagtcttaattaggtgcccaaactcaagccctcttgccttacgaccagtatctcaagaagtttgccgactacttccaacagggtgacatggagtccaacggtaagagcgttaccaaggacggctcccgagtcgactacgagactggacctattatctggggtcagagcggtaccaacggtcagcacgctttctaccagttgatccaccagggtaccaagctcatcccttggtaagtcgtctcgtccatagattattgcgtcgtgaactgatggtatttccagtgacttcctcgcccctgttgagactcttaatcccatctctggcggcaagcaccacgaaatcctcctctccaacttctttgctcagcccgagtaagtcattttattcccttatgttttgccaactagtctaataacccttttcttacaaagagctcttgcctttggcaagactgaggaggaagtcatcaaggagctcggccccgagcaatccaagaactctgccctcgtcaagtccaagatctttgaaggcaacaagcccaccaactctatcatgttccaaaagctcacccccggtactcttggtgccctcatcgccctctatgagcacaagatccacgttcagggtgctatctggggtatcaactcttacgaccagatgggtgtcgaactcggcaaggtcttggccaaggctatcttgaagcagttgggtagcgaaaacgatgtccagggtcacgactcttctactaccggtctcatccacttttaccagaagaacagaaaataaaagagggagttgtatggttcatgtaatgaagtaattatttgtttcatgagatagaagatcaaaaaagaaaacccgttgttcacgtgggtcgtatgcagcgttatgggataatcatgattagatacaacaacatgtgcatgtggtatttgcaacatgaaacacagatgactttacttgattataaaggtaggatgaaaaccaatggatatttagaattataatctctatgactgtattatgattgcgcttccccttccttcttctcgctagacttgttccctgcgtgggcctctctctcggctttttgtacagctccaaacacatcccacacgggcgtcttcttcccttcccgcagttcacctgacctatccgcatgttccgccgccaacacttcctcttcttccccagtcgtcgtcgtcgtcgtcgtcgtcgtcgtcaccgcaggcgtcctactagacgttcccatcggtaccgcactcttactccacaactcgcccggaatcttctccttcccgctgccgccgcccttcccactgagcgaactgatagcccttggtcttcgttggtttcgaccacccatcccgcccaacgcgtacgaccacccactcccccccgtccctggtgcgccccccgtactagtggctgcagtaccgccgccgatattattaccgttggcagatgatgatgccgtatatgcggtggataccgtcaatcctcggcgtcgtgggccaaagggcgtcatgaccgtgtggtaaggtaagggtgatggaggagcgagtgtctcgcgaggtcctgtaagtggtgtaccgagcacagggagggcggtccgcgaaggtgtgcccgcacccgcacccgcacctcccgcagtaacttgactggaacttctcacccttccagcctggaccaacggcgccgatttaggtacggcgagtgcttcgccatcagaatattgaggtgcatggagtgaacgtgaaggaataatgggcatgtcggagcaatt

SEQ ID NO: 268 - DNA, 4105 bp, Cryptococcus neoformans
ttcaatctcgccctacatatttcagacttcacctctttgtcaatcaccctttcccactcgactacattctcgtactttctcatttctgcaatcctcctcctcatcaagtctttccgatatttctccagatcatctttataaatctggtacaccgagcaaccacactgccttccctacccccttcatcgaaccttcgtgcgaagcaaagtatgtttaaagacttgccccagcactccgaaggccttcggtcgtataatacctgtgtagttcgtcccagagcttcttatggaaaccgtgcgcgtcttcgcgcagaagcttgtcaagagattgcaggatttcgtggatattggatgcttgcgttttcgatgtttctttcatcgcagcgacatcatgatcagcaccaaatgtcgcgaagaagtatgctaggaactgctcgccggagcagatggggacgagatctactagtacaaatatcggatagagggatggaccgcgcctcggaacattggagaagagaataaggtaaacgacacttggataccgcttgtcagggatgtgagagatctgccaagcactgtcgttggattaatagtgctgagaagtatgagatggattggtctgtcgtagtaaatctggacatggtagaacaaaggcctgtgtatgtcgcttccggcatcgtccaatacttgtcctcacgaaaaatttatccaacaagtaaaggtctttcctttttcgcttcaccatttgatattcgttactcggatcgatgtcgatcttccccgctatataacaagccatcatcattaaccttaacaagataaagtatcttacgtaatgtcctgtggccgaccgccgacgccatctaacagcggacgcagcaacaaacgaagcaagtacaataaatgaccgcgagtgatgaattggaatttgattgttttcgacatccacaacttacttaaaactcataaataaacagcagggagtacgccgacgcccaaaaatggtcctccgctccacgctcatcgccctggtgacgcttttgtcactttcctcggcagctgcattctaccttccagggtctgccccacgcgattaccttgaaggggagaagatcgatgtttttgtgaacacgcttactcctatgctcaactctaagctcaagtcactcatatcatacgattactatgacagccgcttccacttctgttcacctgaaggaggtgctaagagacaacctgaaagccttggttcgattctctttggcgatcgaattctctcatctccttacgagattcgaatgttggagaactcaacttgtcagaagttgtgccaagctagtgtgccaaaagatgacgcggcatttatcaaccagaggatcaaggaagattacgggttgaacttgcttattgacgggctgccgagcagtgagatgaggagggatagcaagaccggagagacgttcttggatgcgcagggtttcagtttgggtaacgatgagatgaacccggacaagcctgctttgaacaaccattacgacatctacatccagtatcacatgcgtgatgagaaccactttagggtggttggcgttctcgtctatcccagcactgtcaattccatggttgccgggtcgaccgagcccgactgtttcaacaagcaaccattctacctttccgaagaaaacagcaacgagttcttctacacctattctgtatctttccttgaaagtgatatcccatggggccttcgatgggacgcttatcttcacgtctttgatcccaggatccactggttcagtttgatcaactcccttatcattgcgggcttcctcgttttcatggtcggcatgatccttttgcgatctatttcacgtgacattcaccgctacaatgccgttgacctgtctgacgaggttcaagaagactatggatggaagctcgttcacggcgaggtcttccgacttcctcagcgacccatgttgctttccgtcatggtcggcaacggtatccacctcatcatgatgtgcatcgtcactcttgtctttgcgctctttgggtttctctctccatccaaccgaggctcccttgctaccgtgctcctcatctgctggacactctttggttgtgtctctggttattcttctgcccgaacatacaccactctcggcggggaacaatggaaaactaacctcatcctcactgccgtgctctttcctaccgttgttttcaccatcatcggcatgctcaactttttcctcatcttcgcttccgcttcaggtgctgtgccattcggtaccatcctcgccgtcttgttcttatggttcctcatctctgcgcccttgtcgattgggggctacttctatggtatgaagcacggcgcctttatcaaccccgttcgagtcgcttccattccacgacaaatcccccccaagccatggtacctgtcaacttggcccgccgccattctcggaggtatccttcccttcggcgctgcatttgtggagctctacttcgttctttcctctctgttcggtaaccgagcctattacgcttttggctttctcttcctcacttttgtcatcgtcgctttaactactgccactgtcactgtcctctttgtctacttcttactctgcgcagaggagtacagatggcactggagggcgtttctgattggaggcggttcagcattttggctgttcgcttacggtgtgtggtactgggtttcgagactgtatttgaatgggttcacaagtgtggtgctctactttggctacctgtaagtttacgcccctcttataaattgcagtgtggtatactgatcaatggacaggttcttagtctcccttcttgacttccttgttggaggttcaataggttatgtggccacatacttcatgttgagaaggctctatacgtcaattagagtggattaaagaggtttaaggggagctatgtcttggcaagatcagaaagccgagcagtcaataattgtcggaatgaagggataggacgaaggaagatttgcgagcaaggagatttaccgcaaagtttacgactcaatgattactgtcccaaacttagagtaatagtcttgcaaaagtagtatcttagatatgtatgctacgccatttactgtttatcaacttctttgttcagtgactgggcattatacaacacagcatgcatcagcacggaggatcctcatcttgtaggaaatctctctcttgaacatccaagtttgagggtgggaataaaggaaaaaaaaaaatatctaataaacagaacacgaaccaccttctccttcttcttttccttgaacaattaattactgtacacattttcgtttacactctaaacctatatctttgaatgaaattaaatctgcagggagaggtttcttcaattactttgagctttgagcctgcgcagcgcggtactgcttagcgtaagcgataatttcgtggtcgccaatggtcaaaaccttctcgctcggagggttggcagcaagatgtgcgatacaggcaccaatactaaaatgaatgtcagtttattcgccgacaatgaagcaaaaagatcaaaaacctactcagcgccttcgacagccagactatccactggcagcccaaccttcctgatccccctgatcacacctttcaaaacaatctctgaaattcctctcgactccgccctgtcgccaagcaagacagcgggctgaaggatgacggtgtgatcaaagtcaagggctttcacagcatcttcgagctgacctttgatgcgtgggtagaaaaagtaagaggaagaggcggccccaagacttgaaacgaggatcaactaaaagccttcgagttagcttcaaaatacgaatagttggaggacaattgcttacagtacttgcgccatcctttttagcacgagtagccaaatccttgttcaaacccaaatccaccttttcctgctccgcagttccaccggcgtcggcccgggtcgtaccaagacaggatacgtaaataccgccctgttgcacaagagcatccttatcggtgggagcatcaaagagtgagttgtagattcgagtggtgagcttggtgagaggattgaccgct

SEQ ID NO: 269 - DNA, 4241 bp, Cryptococcus neoformans
tgagcggcgtcctagtcgcgtcatcgtttacaacctctattgctattacagcatatgaaaacaccacgccaagtcgcttaacggtatgtccaatgcaaaaggaagcatagaaagatagccgatttgagggttatatgagatagcatatgaatatgtcgccaaggagtaggaagaagcgcaaggtgcaattaaactagatggatcaagagcggaacgaggaaataataataggtccgtcttaaaatcctcgatgcacttgcagcacagagaaataagatagtcawttaaaattttatccagactatgacactggattctgatttgacttcagtttggtttcaattgctgtttcatgggtaggatatgttgagatctttgttaacttcgtaggaattcatggtgggaggcattaggactgtgaaggaaacggaacgagctagtaataagtccccctggacgcggtcatctcggcatggccacatttgtcgggattatcgcaccaagggcagcgccgctccctgaaatggtgcctttttttatacaagcgaaaaatggggggttgtttacattgtttgtgcgttgttgattacttccgcggctccgcgtccgtgtttgtttggatagaaattcgtaatgggagttgtaatttgattagaaataccccggatatggttgtgacggatttgtaatgcctgtcttacgaccggtggccgacgcatgtcttccccttgcccgcccagtcgtcctttggcggcccgcgcgcaccacccagacccctttacatcctctcatcttccgcttccttttcgcatcccgcttattagaagcttctactacctgtcttcctacatcttccttcttgcttcccaccagcgtaactggccagtcgccaccgctacccgttcttccttccttcccgctagtcgcgtcaactgtcgcgtaagatttcttacctccgcgagcagggcgaatttcctaccctcctcttacgacagagataatgggccgcaccaccagacgctcagcaaggccccaatcgggtacatctactccccccaacatctcctctccgccttcgcgccctttgtttcccagcatctcccttcgctcttcatcgcctactccacctacccacgaaaacctctcagcccggtcctctctcctcagcgtgctcacacgaccagcccattcagtcgcagcgacgccagattcgccagaggaagagctctcggatttgtcgacagtaagcagctatgcctcgagtgttatctctggtacacattcaaaggacatgaccgaagaggagattgcaaaggtatatgagaattatttggagaagccattcatccaaataaagactacaataaagcatagcgagtttggacattgtaacaatcccaattggcggtggaccagtcaggtaagtaccgccgagcgcgtagcacgacttgtaatgaaagattttgggttaacgatatcagtggaatcccaacgaagtgattcatgccgacgatgccagaccatcctacactgtgttactaagtacatacttgagttacatcctgcttatcattatcggtcacattcgagacttcttcggtaaaaagtttacaccagcctcatacgctcatttgatgccccagaacgtaagtccttgtctcgtttacgtggctaacatgtacagggctacgccgcgctcaactccgacttcgactctttctacacccgtcgattaaagaaacgtctcgacgactgtttcgcgcgacctaccaccggtgtccccggtcgaaccattgtctgctacgatcgttcctccaccgaccagaacaacacttttcaattgactggtactacaacgcgcgctttgaacgtttcctcttataactatctcggtttcgcctcttctacaggtggctgcgccgatgctgtcgaaatggccattaagcgatacggtgttgccagtgccggtgccagacatgaagcttctactaccgaccttcacttacaatgtgagaaactcgtcgccaagtttctcggtgttgaagcgtccatggtcgtttcgatgggttatgccaccaactcgactacgatccctgcgttggttggtaaaggctgtcttgtgatttccgacgaattcaaccacgcttctatccgtgccggtgtgagaatgagtggggcttcgatgagatggtacaagcacaacaatatggatgtgcttgagaacttgttgagggaagtcatttcacaaggccaacccaggactcacaggccgtggaagaagatattggttattgtcgaaggattattctcaatggagggtagtttggttgatcttcccagattgattgagctcaagaagcgttacaaggtgagtcattactgttcgtatgagatcattcacgctgacatatgtcagttctatttgtatgtcgatgaagctcactctatcggtgcgatgggccccaacggtcgaggtgtttgtgactatttcggtatcgacccccgtgaagtcgacgtcttgatgggtaccgtcacaaaatcgttcggtgctgccggtggttacatcgcgggtagcaaggaactcgtcgaccgtctccgtgtccgatcacacgctaccgcgtacgctgaatccgtatctcctgccgttctcacccagatcatcgcttctatgggttctatcatgggcattgcccctcccctggctgcccctcccacagaggacgacaagtccgagacatggtccatcgcatcccgtccagcagtgtacggccccgccccatcttccctcctccccccttggctcaccctccctcctcacttactcaacggaaccgagggccgcgaacgtctccgccgtatcgctttcaactcccggtacctcgcttctggtcttcgcaaactgggcttcatcgtctacggtaatcgggattcacccatcattcctcttcttatcttccagcccggtaagatgggttacttttctcgtatgatgctcgagcgtatcggccccgacaagacacccatcgtcgtcgtggtcgtggcctatcccgcgaccccactcatcacttccagagtcagattctgtctctcggcgagtcacacgaaaaatgatatggacatggtcctcagggcatgtgatgaagttggagatgtgttgaatttgaaatataataagcaggaaatgagtgtggaggaagtcattgccaatgctgaggagctggttgctgcttctcatgtttaaacatggggtgaagaatgagtgtgttcattttgcatatggaagggaacgatgaaggacgaactaaatcatacagcgtttaattattttcacacctcttttttcgtctttttcgtttaatccttctccattattttattttacaatttctcaacaagcaatttgaatcgtacatttttcctaatttgttttctatcaccttttttctcaccttcttgcaaagcaacaagcagcttagattgcttcaattgcgaaacaaagctagaatctgtaggagctagaacctatatagcctggactggattctagggagtattcgtctttctttttggtctggtttcttttgcctattatatgtaaataggataaaggatgtttaaacaattaatatcatcttcaggttgagcggacaccactgtacaagtacaagtacaatccagagtcgactattactgaattcatatgaaacgcctcccatgaatgggctcaagtagccgaaccataagcagatcctcttagccgctcttctggagcatcttctcaagtatcaagcccatctggaacacgaagtctgacaggtcaaacttcgtctcaaacttcgtctccagatacttgatgcaagtcagggccctcctagttgccatacaagcgtcaagttccatgtcgtccttgtgagctgatgtgacaaataggacgaaactcaactgacactgtgtttcgagagggaggatggtcattcacctgcacgaagaccgaattctttccgatttcgaagcatattttgcaacatagcttagaacttcatggggcgacttgcagaggttaaagtctgtgtttgcggcccatcctaataccagcactggactgaaagtatttaggtctggatcattgcattagacaacgatggtatgtcataataatgttgggtagtgcaacgacggtggcattagactcttttgttggctcctggaaggtctggcagcacgggttgtgtggttgtgat

SEQ ID NO: 270 - DNA, 4645 bp, Cryptococcus neoformans
aaaacataattttccatcattagctatcgtcgtcctgctcctctttgtgcacacaacaacccactttgtccgtcctgcgaggaccctcctcagcgcacctccatcaattccctcagtctcagttctttgagtcacagcgttcactcccgcttccgtcgccggttcccaaagcccgctttccgtatactgccaaattcctttccctttactcctcacatctcccctgcagctcgcctttgcagctcttaattcagagatatactctctctttataagttcgacaacagagatgagcctgggggcggtgataaggcatgcagggagaggggatttggactttggttggggtttgatcttgtcattatcttttttaggtgcgttggttgatgatgaggaagatgatgaggaaggggaggatgaagatgatggaagggtatgaaggacgacaggagttgcaggatcatcctatatcgsctctttgataagcattatacttgaagaaacacaagttcaaaccgaaaacaagtcgatcaagttcacatgacttacacgaagagacgcaagggcaaaggcgacgtaatgtcttattgagccgcctgctgtgattctcatcctgtgcggttctttggatgcggactgtggttgtgtgacggcggctggtgtggacatggcgagttgtattccttacaccaaactgtattcgagaccgtacgatcgaaatggtgtcaagccattgaatttcctcatattttgacgcgtaaaatgaagaacaacctccacctcaccctcgcatgcctatattttcagtccattacaagtcgggttaccaggcgcgcgatggacgtttctttcgcgtcgatagaagttcatcgtgcgtgttcgttgcagtaaacgtctttgtgaatccgcatcatcgtctactcagaaaacaaaagaagtaatcagatatgtctgtggaccaaataaacccaggtcaggctgtctatgcccaggatgaggtatgtctttttattcgaaacgacgtaatggtgtgaatatgtggtgttgaccagttttccagaacggacgaccgttcattattgtacggtaggtcaatacaggattttgaaggcttgagaatagtggaaagcctagaagaggatgtagagtggtcctgatgcttgagtgatacagggaacaaggaaggaaagttaggacgcacggcctggaagctatcagggttagtcatcccaattcattaaagcttttgctcactggccagtacgctgatccatctttgattatcacagagccacattcttgctgcccgatcaggtatgatctatatatgaataagtcttcccaccaaaccgttgacttttttcgtctatttctttagtaaccaacatcattaaaacctctcttggtcctcgtggtttggacaagatcctcatttccccagatggagagataactgtcaccaatgacggtgcgaccattttgggacagatggaagtggaacaccagattgcaaaactcctggtagaggtgtcgaagagtcaagatgatgagattggagacggtacaacaggtgttgttggtaagtcttccgggagcgctacaacagcgagaaaacagcaagacgctgacaataaaattatctagtacttgctggtgcacttctttcttctgcgctgtctctccttgacagaggtatacatcctatccgaattgccgatggttatgagaaggcttgtgaaatcgctgtcgccgagttggaccgcgttgcggacactgtgagtttcacatcgtgtgatttaatcgtacgatatcataagctgatgaacccaatttctagattgaatttagcaaggatgatgtttcaaatttgatgaagaccgccaagacctctttgggtagcaagatgtatgtctccataatccggacattcaaggctgtcaatgcggccagctaaccaaacttctgaatattccatagtgtttctatcgcgcacgacaaattcgcttccatcgctgttgaagcggtcctctctgttgctgacctcgagcgccgcgatgtcgattttgagctcatcaaggtcgacggcagggaacggaggttctctcgaagacacttccctcgtcaagggtgtcgtcatcgacaaggacatgtcccatccccaaatgccttctgttgttcgagacgccaagattgctattttgacttgtccctttgaacctcctaggccaaagacgaagcacaagttggacattgagagcgtggaggagtacaaaaagttgagagagtacgagaaggagaagtttttggacatgatcaagaagtgagacatctatctatatttttcatcatgctatagaaaattactaacgcgctgggaccagggtgaaggacactggcgccaatttggttatctgtcaatggggtttcgatgacgaggcgaaccacttgcttatgcaaaatgagctccctgccgttcgatgggttggtggtcccgaaaatgagggtaaagccaaaaaatcgcttgggatcccctcggcccctacccccccatgtggcaatattccgatttcaaaccttgattgacaatttatactagcttatcgccattgccaccaacggccgaattgtcccccgattcgaagaccttaccgccgacaagctcggtcacgccggtgtcgtccgagaacttacctttggtaccactagggataagatgcttgttatcgaggagtgtgccaactctagggcggtgactgtgtttgtcaggggtagtaacaagatggtccgtctttttcaatgacgtgtggaatcgcgacattgatgctgaattataatggacagatcattgacgaggctaagcgagcattgcacgatgccatctgtgttgctcgtaaccttgtgagagataaccgggtggtctacggtggtggtgctgccgagatttgtgcttctgttgccgtctccaagcgggccgacgaggtaagaacttttttcatttgcctctatgtaacgaattatattgatctaatcttcatagatccccacaattgagcaatacgctatgcgcgcattcgccaacgctctcgatgccattcctcttgcgctcgccgaaaactctggtttgtcccctatcgacactttggccgacgtgaagagtagacaggtgacagaaggtaacccaagactgggtattgactgtttgggcagggcagaaaatggtgagttctgtgtttctggcttgtgctgtggttttgtatgtgtatgccaccaagtttcgacgaggagaaacaacaaagatttgttttttggataaaatgttaccccgcatgggaaaagcatagatgttatgcggcatctgcgcgcgatgcgcaatcatttggcgatgtcatcccagtcagctagaggatcactagcacccatgggaccactggcgataaaagtgcttttaggaggataaaaaaaagaattaaagcatcaaactgacatcgtgaaaattttcagacatgaaaaagcaacacgtctacgatcctctaatctcaaagaggcagcagttcttgctcgcgacccaagtggtaaggatgatcttgcgagtggacgatgtgatagatgcctctgcatttggggacgagtaggaagtgatacagacacgatgtatgcatgatgtgtatctgggcgttcttcttcatacacaataaatactactactagctgtgtggaggcggagtgacgtgtacggtgctccgcataatgccgacagggaaatgacgtaccggcatgtctcggcccggggtggcccctcggctcgttcgttctctccattctccgtccgttccgtcaagagtccagtaacttaaaagaatcctaccgaattgtaaacacttttcaacaacttcttttcgtcttccaactgctttgcctttcactcacccacaggaaaacccccgaacactaccaaatatggccgctccccaagctactctcggcgccgatctcgagccccctgcgactgacttgatcacccttaccaggcatatcttgtcccaacaatatgctttgggtgagagcgctactggtgaccttaccatgcttctgatcgctatccaggtgcgttgatgcttctgctttgtcactctttcatgcaaattctttttctcgtgagtatgagctgacgactccttcgtctcatttttttccttgacgtcaatgtctcgtttaaatgtcccgtttaaaccccactacaggttacttccaaatacatcgcttctaatgttcgaaaagctcgtctgatcaacctcgttggtcttgccggtgcttccaacgtccagggtgaggatcagaagaagctggatgtgctttcaaatgacatcatggtcaatgctttgagcgccagtggaaagtgctccgtcatggttagtgaggaggttgacgaagctatcattgttagtggaatcaagggaacctagtgagtctaatcctgttcgctagattatgagccgttattgactttttatttagctgtgtcgtctttgaccctcttgacggctctagcaacattgacgctggtgttaatgtcggtaccattttcggcgtctacaaggtggtgcgtaatttccctttcttaacaagcaatgaaatgctaaaacct

SEQ ID NO: 271 - DNA, 4278 bp, Cryptococcus neoformans
gggcagtactgagagactcggtggcactgatactgaccgtagagtcggaacccgaagcactagttggcaacgagtcaggaatgacagtgacgactgaggtcacaaaggcagttgtggtcgacgcaatgcaagtaccagtcgccctcttaaccaccttggtcaccacgtctctcttcacagaatccaccttggaccgaccttgtttcttgaagaattctgggttgatccgttgagcttccgttctagagctgaggccacgcttggcaggcaagatgaagccactgtgtttgctggtagggaagaatgggttgtacgcatggggcccaggagcaggggcagcaagtagaacaggaaggaggaggaggaggagtgagagaagtttcatgttgatcagttgtcgcacccggcggaggttgatgttattattcttgccgctctcgtggcaaaagagctgaccggcagcaaaagagcgttgttgcacaaaagaaggtgtcttaggagagggtattcgctaccagagcgttatagtaaaacagttggtaaaagatcagtatcggacaataataaagaagaaggcggagagaataaatttgacaaggccagcttagatacaagacaggtggaattgtcacttgtcatcatcatcatgaactctatgttttgtgcaatgaacgatgtcggctattgttggctactgtccgtcttcagctctgatctatcatccctgacgtccggtagaaaatacaattggttcgatgccgttcgaggcaatagagcggaggatctgaactttcaaagggaaagtcttccgataagacccttgttggaatgacagtcgggatatgtaacttttcagaagatcagccgccgatgggaaacggcgaccgccgaagtgataatttaatatttttaaaacctttttttcttttaaatttgagaccttattccatctacaatacgtaatcaaggctgtcattgtgtaaacatttgaagtcacgtgatgtacctcgaaatcttcctcgcattgcagaagttacgggtgctgagaatgaagttgtgcgtgaattctgactctcggacgcttctgtaacttcattctgtaacttcactatcctcgtatctgcacataaaaagaaggtggaaagtggattacaacatgctttccaagagcaaccagccttccgacgcgctccttgagtgagttcgcttcacttctttcggaccatttgctaattcacggaaatgacagcgccgacttctccttttcccaaccccctttttcgacactcattgactctcgagtcctcgtggcccttgccgaccaaaaatttgcgcatccgactttagtacaggctaaggccatccctcttttgctcgaaggaaaagatgttcttgcccgagctaggacaggaagcggtaagactgctgcttatatagtcccagcagtacagaaaatcttggaggccaaggctgtaagttctgtgtgtcattagacttgaaatatgcttacttaatcataggatctttcccctgcctctgcggagtatcaagctactcgagcgatcattcttgtgcccaccaaggaattggccttgcaagtctcttctttcaccaagaacgttactaagtactgcgatggtcttgtgcaatgcgtagatgttgctgcaggtggggctagtatccaacggtgcgtgcgaagttgataatgaaggagccgctctgattcgttatttgcagagtgcttctcaatgacaagcccgacatcgtcatctccactcctaccaaacttctgtcccttttgcagtctaaatccctttctctctcgcaactttcgttccttgctatcgatgaggcggatcttttgctttcgtacggtttcaaagacgatcttactaggattatggaccctacctctggatggatccctaagcttggtgtgcaaggctgcctcatgagtgctactttgagtgacgacgtcgaaggcatcaagggtcttgtccttcgtaaccccgtaaataatactcctcaaagcttagtattatgctgatcagacatcaggccattctcaccctttctgaacccgcctccgcctcgtctctcctcagtcaacactacacccacacctccgaacgagacaagtttctccttatttacgtccttcttaagctcaaacttattcgcggtaaatcaattatcttcgtcaacgacgtcgaacgtggttatcgtgtcaaactcttcctcgaacaattcggtgtcaagtgttgtgttgtcaacagtgaattgcccttggcgagtagatatcacgtggtcgaggagttcaacaggggtgtgtatgatgtcgttgtggcaactgatgagggtgctggagccgacgctgaggaagaggaagatgtcaagcaggaagaaagcgaatcagagggggaggaagatgaagatgacgacaaggaagcggaggataaagagaaggaggccaaggaagaagcaaaacccgcccctggtccttccaaacgccgggcaacctctcctccttccaagcccaacaaacgagcccggcgcgcagaccctacctcttcgctcgctcgtggcatcgactttacctccgcatcttccgtcatcaactttgaccttcccctcacctctacctcctacatgcaccgagtcggtcgtactgcacgagctggtcaatcaggcctcgccctttcgttcgtcgtccctagagaaaattggggtaaagacaaggctgtatcaatcaagtcagcagagaaggatgagaaggtgtttgagaggatcaaggagagggtgaaaaaggaaagcgacagtgagatcaaggaatgggattggaaaggcaggaagggcgagattgaaggattcagatatcgaatggaggatgcgttgaaagctgtcactggcaagagggtcgccgaagcgagaagagaagaagtcaggcgagagttgttgaacagcgaaaaactcaaatctcactttgctgccaatcctctcgatttgtcttacctccgacatgatgctcctcttcatcccgcccgacaacaaacccatctcaaacatgtccccaactatcttatgccgaagattgcggccctcccaacaggtggggatgtaactgatcatgcaggcgttggattctctagacgaggaaggggaggtcatagagggcgaggaggcaggggatcaaagagtggtaggggcaagaaggttgatcccttgaaattcaagtagtggttctcgtgttcttcaaaactcgtcatgtatgcatatgatagatattcggtcagaacgtctggaagcaaactatacaactacagatcgacatcgcagggccccgcccatccctccgtaacatctcaccatagccaccgaacgacagatgagttagacttcgaagacatgggaagggccccacgatgcccacttgcagggtcaaataagaagtggacggagaacggtttaattgttgaaaccaaaaccagcgaaaactaagcgtgctgtcacaagtagaaaaggaaatgttgtaaatcttcaagatggaagtcactcatagcctgtggatgccagacagtccgtcgggtttctggttacccaagactgaagcagagatatgacagagatactaattaccgatcatcggatgcaccctcctgattcataccgtccacacttccaacagcgaccttgtgtatggcgagtgatagatagttgaagagatcatccagcgtatggtacagtctgcgacgtcgtccgtcgcacatgccatcgatcggaccgagaagttgtgaagtgaagtatgtcagatctggaagagataataggtataaatgaaaatgctgattgccggaatcggacttccacagaacagtcgataaatctcctggaggaatttatgaacgtcgatggctgatgaggtgagtatatatctattgtttgttggacgggtgattaagtttgagaattgcggagtgtgtggcaagacgattgtaagactaacgtgagcagagctcatatctatgtagaacaggagggtataagagatttccagaaagcttgagcgttaagagctcagtacctgtctctcccggcggacgagcataagaagcgaaagaagagctcattcgggagtaatcgctccgtatagaaaagaacgatgtatacggacttcttcctctctcttttcattgagggccgattcgcaagggagaagggcgacaatgactggagacaatcaacggacaaccaacggacaaccgaagttcacacaccgca

SEQ ID NO: 272 - DNA, 4547 bp, Cryptococcus neoformans
tcacatcaatggccttaggcgtagatgcatcccaaaatctgaaaaagaagagcgaaactatgtcattcactttctcatcacctgggccttggaagtaccatgctagcaagccttgaatagcaccaacggaagagaatctgaccaactgtatgtgttctgggatgtattattcgttatgagagagacagctgctgttaaatcagagccaaaccacccagccaacgggaaacagccaaggaatctatttctttgaagagctgaatcaagtcttgcttggtccctccgtattctgtatatgtcgcctcttgagtcaatatcgataggattgttgtaatggacatttaaatgcaccacgaaaacccraagatcaggataggaatctgtcagatcgtcaaagaagcagcctggattatattatgccatatcatccatgcccaattcagacagtcgttgacaactctccccgataggtgcaccaagacttcgcacggaaaactgtcagaaatctcgaagaccattaaagattatataccatagtcacccaatccatccctgttccagacagtttgctggaaaagccttgaaacatcgcgcaatgggtagtatccaaggggatgtcaatcagcaatagcttgtatcaatttgttggttatgcttttaaattgaaataatggatggcatcagtaggacctcagtaaacaacagacgcgggagtcgtccaaatacttgcgctcaatcccccacctcccaaccctgttagggttcgggctacaatcaaagctttcatgataggctcaatcgcgaaagcgaatttcccagagatgatagtaggtaactcttcaccttcatataacggtgaacggtgttagaagttcacgacgttcgttgttgcttcaagttgttatggaattagtacgtttcaaatataaatttccttatttttcattaccttatttcctgtcgcgccttatcttattttgattccgtttccttattttgtatggggaaaattagtacgtttcaaatatcaatttccttattttttcgacttccgcctatcttatttttgcggggaccaccgccgccaaatttgtatgaaaaataaggaaataattgatatttgaaacgtactattataaaaattatgtagcatcatatttgttgttgttgatctgtgacacgtgtgaggcttttaaaaacattacgtaatatagtaaaagttcgtcagctttcagcaatgttctcgagagttctggtggattcggcttcgtcgcatcttgtggcgtgacgtagtactttctcacgacttccccgatcttcttccagtttctgttacttacttgcctcctcccatatactatatataagccactcccgctatcttactattcccacttatccagaattccattcaaacccactctatcatataaaactacccactcgcaactcaacagcacatatacacacatccactaattcaacatgacaaaagcaatcggtatcgacttgggcaccacctactcttgtgttgccgtctggcaaaacgaccgggtagaaattattggtaagtaaaatacgtacttttactggcttcgtcagttgttgacctttgcgccagccaacgatcagggcaatcgaacaacaccatcatatgttgctttcaatgactctgagcgacttatcggtgatgccgcgaagaatcaggttgcaatgaatccttacaacactgttttcgatgctaagcggttgatcggccgtaagtttaacgatgccgaagttcaggccgacatgaagcattggcctttcaaggtcgtcgaaaagggaggcaagcctgtcatcaaggtggagtacaagggagaagagaaaacttttgtaagttgtcacatttgtttattggtggaagtaaatgaagttgacctgcccttaatcagactcctgaggagatttcctccatggttctcactaaaatgaaggagactgctgaggcttatctcggtggcactgtctctaaagccgtggttaccgtccccgcctacttcaacgactctcagcgtcaggctactaaggacgccggtgccattgccggtcttgatgtcctccgtattatcaacgagcctactgccgctgctatcgcgtacggtcttgacaagaagtctgagggcgagaagaatgttttgatcttcgacctcggtggtggtactttcgatgtctctctcttgactattgaggagggtatcttcgaggtcaaggctaccgctggtgacactcaccttggtggtgaggactttgacaaccgacttgtcaaccactttgtccaggagttcaagaggaagaacaagaagggtaagttgcctctgatgttcaatttgttgacgaaccaacactaatctgttatatagacctttcttctaacgcccgagctctccgacgacttcgaaccgcctgtgagcgagctaagcgaactctttcttccgctgctcagaccacgattgagatcgactctctcttcgatggtatcgacttctacacttccatcactcgtgcccgattcgaagagctctgtcaggacctcttccgatccaccatggaccccgtcgagaaggttctccgagactccaagattgacaagtcctccgttaacgagattgtccttgtcggtggttccacccgtatccccaagatccagaagcttgtttccgacatgttctctggtcgagagcccaacaggtccatcaaccctgacgaggccgttgcctacggtgccgccgtccaggctgctatcctcactggtgacacttctgaggccactcaggacttgctcttgctcgatgttgcccctctttccatgggtatcgagactgccggtggtatcatgacccccttgatcaagaggaacaccactgtccccaccaagaagtctgaggtcttctctacctactctgacaaccagcctggtgtcttgatccaggtctttgagggtgagcgagccaagactaaggattgcaacttgctcggcaagtttgaattatccggtattcctccggccccccgaggtgtccctcaaatcgaagtgtcctttgacattgacgccaacggcatcctgaatgtaaacgccgccgacaaatctaccggtaagaccagcaagatcaccatcaccaatgacaagggtagactgtccaaagaggaaattgaacgggtaagtctccgaacatgtcagcattgtcgcttgcttcactttgctaactccgctgaacagatgcttgctgaagctgagagattcaaggccgaagatgaggccgctgcagctactgttcaagccaagaatggtcttgaatcttatgcctactctcttaagacaaccttgtctgacaacaaggacaagttcgactccgccgatcacgaaacgctctcgaagaaggtcgaggaggtgattaacgctctcgacactatgcagtctgcttctaaagaagagttcgagagtttgcagaaggagctggagggtattgccaacccaatcatgaccgtgagtgttccgaatttctgacttatctaaaaagctgcagaagcttacatacaaatggtagaaattctatggcgcaagcggtggaatgccaggcggtgccggtgcccctggaggattccctggaggtggcgctggcgggggtgctgctcaagaggagggtccttcagttgaggaagttgattagattggcttgtgaaggaagaacaaatataaaattgactgtggttgtaactctttaagaaattagtcgcgattaagattaatcatttgcttgtacctcaggttgttcttttagtacttatttattatgcatttgacaagatggaccgaataagttggaagtgaaaccactcagagtcgtcccgtggacttcctacgtagctactccggctgaatcgcttcttccacttcgcaagctacttcatttgtctaattctcctatcagggttccattcggatctctcagaggcacaaacttcctttatcgtggggctttccgtagtgcgagagaagacctaactctccataacggacagggacgacggagcggacgggatcggagcgcccacttgtctttcaggttatgcggcacttccgtcgtctacgtacttgtttaaatttgtcctcagaggaggcccgggggtgggtttcttttcgggaacagtcatcgagattatccattatttccggatgtcgtccatttagagagacctctgcatagttctatagggtaaaaatgttagcgaattttcgtcgttgcccttgagagcatggtatatgaaagccataaaaagttataagtagatacgctagagatgtggcgcaccgagctaattgttgtatcgaataattgctgtccctgttgtaaaaaagtgttatttaatcaaataacacagccatcgggcccgggtgatttttttttaatcagctcattgatttcttctctgatactactgtaccattcgaggcttacaggctattacaagaccgaatatcttccatatttctgawcctccctggt

SEQ ID NO: 273 - DNA, 3708 bp, Cryptococcus neoformans
gagcactgagtgcggtctaataagccaatactgtagtaggtagtcggtaccagtacacctcgagtccgtctaaatgtttttgggcaaagttacgtaaaaatgacgaactcggtagcccacaacaaaaacctttgtcccgatccatgtgcgttccccatcgatctaccaccacccctttcttcgactgacggcgaccctttctttgttctttttcaaaggcccatgggaacatcggagcacgtaattcatgtcatctcgtatattagctcctacacgtaccgtaagcatgccatgcacacccgggtaagagaacattatggacggacgcatgcataaccaacggatttatggccgtttgaggttcggcggaatcaaattccccccacctgcttgacgtcagattttttttgtattgatccggggtggcgggcgtattaaaaaatgttcattagaagtatcttggcccgcgttcttcgactttctcattctttttttcacctgaaaaactcttttttacttataaaaatggccccctccgcatccaaacagaagcgactagcagaaaaggccgccaaggccgcgagcaagactggctcctccaagtcctccgtcactggtgccagcacccccctcacgagcgtttccgacgaccctactgatgccgcggagcagatgaagaagctcaacttggctaccgacaggagtgctgtatgtcgaatgctgttttctgggtgtaaaaatggtgctaataatttaatagagtggtgttttggtttccgatcccaagggacgagacatcaagatcgatcagtatatgctttctttccacggtcgactgttgattgagggtgcggagattgctcttaactacggccagcggtaagtcaatttcctttcgggtatttaatagcgctgaggcatcgtaggtacggtcttttaggtgagaacggttccggaaagtccactttcctccaatccattgccgaccgagacattgagattcccgaccacatcgacatctatctcgtctcaggcgccgtcgacccttccgatgttaatgccctcgattacattgtttcctccgctagagagaaggtcgagaggctcgagaagcttgcagaggacatgtctaccgccgacgacgttgacgagcttgctctcgacgccatctatgaggagctcgaggaaatggacccttcgacgttcgaggccaaggccggtgcaatcttgaacggtctcggtttctctcaacaaatgatggccaagcctaccaaggacatgtctggtggttggcgaatgcgggtcgctcttgcccgtgctttgttcattaagcctcacgtcttgttgttggacgaacctacgtcccacttggatttgggtgctgtcgtctggctcgaagcgtacctttccacttacaaccacatcttgattttgacctcccactctgccgactttatggacactgtctgtaccaacatcatggacttgaccaccaagaagaagcttgtctactacggtggtaactacaccacttacgttcgaaccaagagcgaaaacgaggttaaccagatgaaggcttacgccaagcaacaggaggaaatcgcacacattaagagtgagtcgaattttgtgtatatcggtattttactaataatgtggcagagtttattgctagtgctggtacttatgccaacttggtcaagcaggccaagtccaagcaaaagattatcgacaagatggaggctgctggtttgattgagaaggtcgagcagcctcgtcagcttagattcaactttgaggacgtcaagaagcttcctcctcctatcatcgccttctcagacgttgctttctcttactctggtaagaaggaggactacttgtatcaggatttgtctttcggtatcgacatggactctagaatcgccattgtcggtgacaatggtaccggtaaatccacccttcttaatcttatcaccggcgccctccaacctgtcgagggtaccatcaacaagcacactcaactcaagctcgccaagtactctcagcactctgccgatcaactcccttacgacaagtctcccgtcgagcacattgcttctctctacagcgaaaagttccccgacaaggacattcagttctggaggcagcagattggtcgattcggtatcactggtgctcaccagaccagccccatcaaccagttgtctgatggtttgaggaaccgagtagtgtttgctatccttgccatggagcacccccacatcatcttgctcgatgagcctactaaccatttggatatggtgagtttcccttggtcagctctttagattatttactaatcatttcaaaggcttctattgacgctctcgccgctgctatcaaggagttcgagggcggtgttgtgatcgtctcccacgacttccgtacgcttctgcccttttcgtataccagtttgatgctaacttcctatctgcaggacttatctctcaagttgccgaagatctttgggaagtcaaagacaagaaggtcatcaaccttaccaagcaggacatctccatcgttgactacaagaaggctcttgccaagcgaagtacgtcccattttctatgcagcctaatcagccatcgattaacaataccctcacaggtcaagcccagattgagaaggctagactcatttccaagagtgctaccaagggtgttgcgtaaatcctgttcatatcccacaaaactttccgtcctccgatgcgtccctaccacctcgccttctctatttccgcgccataccaattccttttgtcttcttcgaacgtcgagatatatagcactgtgtcaactagttttaaaaggctacttacttttccgtgaaggcttgttcattttatcaaaaatagaaagcatctgcatgctatacccgttaaaaaaaatttggtgcttctcgtcgtatggtgaagattcataagtcaaccttcatgatactgtggtctagtttaatatgtgtctgtttgaaaataattacaaattactagcatgtcgagaaacagtgtcgactctgcatacatcgcacggatgcacgtagaatctactatcaaaaaggacgcttttatgttcgaaggtacgaccttgtaataaatattccaattctgctaatgccaaaagcacttgtatgaatcgtccaagaaaggaaaaaaaaatgctacttcaataagaaaaccaaaaacagacacgtgtaggggctaaagagtaagcggtagtacgattgctagagttatacctgctatcaaaaggaatgacaaggatgccagagatgctatgcggcaagcaagaacggtgtaatttgagtgataaagccatcggggcaagtaatgtgtaatggtttgaggggtggtttccgtttcaggagtttgcgtggaagaatgaggtagaagccagccaccaacaagccagagaagggggagaaagaagccaaggataaagaacacaagaggagtgcgcgaacgaggtagagatgaaggtgacagggtgcccttctcgaggtctgayttagcggtrgggtgtggctgggtcactggcgcgacggcttctgwttgtgtatgtcccttctccacttcagctctcatggcttcgctcctgtccgttattcccgctgcaacgcttcccgtatcctcccccacagtcgcgatatcctccccaccctccgctgacatac

SEQ ID NO: 274 - DNA, 4440 bp, Cryptococcus neoformans
agaagcatccttccccttcatttttcggtttacctgcgggatccaccgtccccaatacgattttgacttctgcacacccacctcgatctccaaacgcaccctctttgccacctccaagattccagtccattacgtggcacggagaatcattcccaggctcgaacgagtacgcggtcaagatattttcactcacaaggctaagcgatcggctcttgagagagattcttggagatgaaccgacttgggtcaagagaaaggaatggaatagctatccaaagatggaacccactgcaagatacgctccagttacgctaacggaaggggtagaatatctagctggaatggagcgctgggtctcaacgtgagtagtcttttaaattattgtgcacgccgactcgtgctgacgaggcgaaggatggagacgcaaacaatctccgcaagagaggctgtagcaagggttgcgcacaaatggtggggtttaggtttaggagaatgtgaggatggggatagctgggattggacttgttcgtagtaatattactgtatccaatcattacttgtaatctttgtcataaatgtaccgatttgcgaactgggagttgcctgacaaggcgatcagtatggttttgggtaatagttggcaggattcggtggaggcattaagggtatcttcatgatgcggggtatctttcgtacaagcatatcttctccaccagttcgcctaattcttagttttcctgtgtaatcattagcgtctgggccgtctgccaatgcatgccatctactcacctgtaagtccaaggcctccttgtaggcgcaaactctcccaacttgtgtcccaccatctcctcgctgacagtcaccggaaggtagtctttgccgttgtggaccatgaacttgatgccgacgaagttgggaaggatggttgatgctcgggattttgtaaagatgggagtgttgttcttaagatggtgagagagggaagggaatgcggtgaagaatgggcctgcggactgtcaaaggagctcgaggtgcggagaacttacccttccaggtggagcgtctaagagcgagggctgtggggtgcattgtgggcgtgaagcgtgtgggaggacaggcgcaagtaaccaagtttttgagtcttttcactgcaagaggagaacgctacattgctgctgctgctgtgatgagcggcgctcggcgcgggatgatgttggcggaaagaatgacgtggaattactatcaccagacgcgctctcgtgtcttcttctgccacttctttccatcgattcttccacaactgcatctgttcccatacagcaccaaaattcacaacaagactatcaaaatggctatgccaggaggaatgcccatggttgtaatgagtaagtccataggcctgtacaaggccgctgcttactgttcacagacaccggcccagagcgccagtcggggagaaaagctcaaaccgccaacattgtcgctgccaaggtatgtcacttgtgttattcagctgcagcgatgctaacccattaaagaccgttgcagatgttatcagaacatgtctgggtcctaaagcgatgctcaagatgattctcgaccctatgggtggtatcctgtgagctccgcgacataccctcaaagctctgaccctgctgacattgccagtttgacaaatgacggtcatgcaatcttgagggagatcgatgttgctcatccagctgcaaagtccatgatcgaactgtcaagaacacaagatgaagaagttggtgatggaaccaccagtgttattattcttggtaagcttgcagtcatttgcatgtgattcggcgctaagactaaatagctggtgagatccttgcctattctttaccccttcttgagcgccatatccaccctgttgtcatcattcgagctttcaaagccgccctcaatgatgctctcgaaactattcagcgtgtttctatccctgtcgatatcacctctgagaccgagatgctcgctttgatcaagacgtctatcggtacaaaattctcttcccgatggtctgatttgatgtgcaagcttgctctggaggctgttaggaccgttgctgttaccgccgaggctgagaatggtttggtgggtagcggcgaaggtggggataaggtgaacatcaagaccgtcgacctgaagcgttatgcccgagttgagaaggtccccggtggtgaaatcgaggactccagagtactttctggtgtaatgatcaacaaggatgtcactcaccccaagatgcgacgacgaatcgataacccccgtgtgattttgctcgactgccctctggagtacaagaagggcgaaagtcaaaccaacattgagatctccaaggaagaggactggaacagagtcttgcaaatcgaggaagagcagatcaaggctatgtgtggcaagattatagagttcaaacctgatctcgtgttcacagaaaagggtgtttcaggcaagtcgtatctcttcatttcctctacctatacctatacactaactggctcattccatagatctcgcccaacattatcttctcaaagccaacatcactgcccttcgacgggttcgcaaatcggacaacaaccgtatcgctcgagcagtgggagctaccattgtcaaccgtgtggaagacctgcgcgagtctgacgtcggtacgcaatgtggtttgttccacatcgagaagatgggagacgagtaagccatctccttctccactgagtcgatgctaagatctcaaaaggtactttaccttcctcgatcaatgccaaaatcctaaagcttgtactattctcctccgtggtccttccaaggatatcctcaacgaaatcgaccgtaaccttgcagacgcgatgtccgttgcccgcaatgtcgtcttcaaccctaccctcacccctggaggtggtgccattgaaatggccatctcagtgtctctgggagaaaaggcaaagcttttgcctggagttgctggcgccccttacaaggccatcgctgacgcgttggaggtcattcctcggacattggtgcaaaactgtggtggtaatgcgatcagaacgctgacagagctgcgagtaagtgtttattttatttttgctcttattttcgttaggatgtgatcactgacagcacacttaggccaaacatgcagagggacaacacctgtatggtgtcgatggcgagactggaaaggtgacgaacatgaaggagtacgggcttcttgaatctgcgagcgtgaagatccaaacattgaagacggcaattgaggttagtaccgtctgattcatgtagttggtggcgccaatagctaaacttgatatgcagtctgccacgctccttctgcgagtcgatgatatcgtcagcgcgaggagacctggagaggaaggtggtgccggtgcaggagtgcagacaatgggtgaagctgggcccgagggtatggaaatgtgaagagttggtaggggggactcttgaggttcagcaatgatgcattagatactttgtgataatcagacggacctctgaaaaggagctactacgtctgtatgggattgtacgtttgctgttcagttggcaggtttcatggtttttgcatcgataccgtattctatactgcttttcttctttcctccaggacgacgacacaggatgcaggcaggatgcagcagcttgcagaactcaagaagaagaagcgagaaatcaaataattaagaacgacgacagtactcgtactcgtagtggtggaattattatttattcagataggcggacatcaccgtttacatgattgccatcatcatttattcattcatgtttccgacaagacgaagtttcatgaccaacttatttgttgttgttgatcggtcgttaaataattgctattttcattgttcgctggccttcggcatcaataactttcacctcgatatatctataatggcagccagcacgcctttacttagtcggggaaccctaattaagcaaggcgcagaagccgtacgtaacgactcccatttccttcagggcctctctcacacttgactacagaaagtctatgctctgccatcattgtttccggaaccaacgacatatcaccctggctcttcctcttccttctcagctgcttctcctaccccggtcatcttgaaacaccgtttcactaagacttatcgacaccctacgcttgacgcctatctcacttctcagcgccttacttttgaagctagggcccttgcccgggcggctaaagctggagtcaccgtaccgaaagttgtttgggtagacgaaaaagctggggttattggtatggaaagaatagaaggttggagcgtgagggaaattcttggaggaggggctgagggtgaagtagaggtgatagaagaacaagagatcgaagaagatgttgaaaataaagctgaagat

SEQ ID NO: 275 - DNA, 4341 bp, Cryptococcus neoformans
tggcgtgggtgagcatcacggaagatgactggggacaagatgagtatggcatgtattaaacgggattctgttatctaagtagtcgacttccttacccttattggatgttgacagttccatcatacatcgagaaagatatagaagggagttagggatatctgtttgcgattcgtccccactcggcggcttctccggtcatcctcatctggcccaatactacacttcatgcccagttaatttaggctgttatggcccatgtatcctcttcctcaccttcagattgtctttacatgagccaaacagcccaacccggctttattcggttaacccaaccaaacctgatgaaaatgcagacctcgatagtcgtccgtacgcctccgcgccttttaataattaatggaagctgagcaataggatgcgtgtcactaggcgctatagcgcgaggccgctacagccagcggtgcaagcgtgataggctggttgatagatgtgatcgagaatattgcgaggtcgggtatttgatatccagcgctaatgaagtatggaaaagggcgaattggggaaggtgaagcaggaaatggacgggccggtaatggatttttaccggatatacgatctgctgacggctgtatcaactgccggttgacgggccctcggtggaatactgcgaatgcgactggatataaaaacaccagaacttttgagcgagctgcagtctgcaaatccacaagttgtattcaggcatacgttgtagcaaggaacacccagaagtaccacaagtgacaggcgcaacagcaatacaagtattagtacataacttataggagaccgccgaaataccaatacgaaaggtaagccccccgctcccgaacgggtcaagccactctccgctgacaaccgtccccgtttccccaacaattaattccgccgcacacaacagcgcatattaactttattccgtacacgtgctctacgcaacatccacatatcagtagtcaacatgggcaagacagaagttgcacccggcgtccaccacgttcaccctctccccgactccgtccccgagtctgaggacctcttcgctccccctcctcgtatgcagggcaaggaaggccgcccgaagcctcaccttggtcccaattacgaggcctacgtcaatgaatgggccaagactgttggtcccaataatgatgagtggtgggccgcaaaggccagggagactcttgattggtatgaggacttcaagactgtcagggccggtggctttgagcacggagacattcagtggttgtgagtgaaatgtgggaacgctctgggtgtggatgatttgactgatgactttgcagccccgaaggtaccttgaacgctgcttacaactgtcttgaccgacacttctacaagaacccgaaaaagaccgccatcatctacgaggccgacgagccctctgagtcccgtgagatttcttacgaggagctcatgcaggagacttgccgagttgccaatgtcctcaagagctacggtgtcaagaagggtgacgctgtgtccatctagtgagttgcagccaggaaaatggattctttgaaaatcgagtctcagtagctgacaggctacattaagtcttcccatgacttggcaagccgctgctgcgttccttgcttgtgccaggatcggtgccattcactctgctgtctttgccggttttagcgccgagagtttgagggatagagtcaatgactgtgaatgcaaggttttgatcaccaccgagtaggtcgaatttttgaacaaatttgtagtatataaagctaatgatgttttagcgagggtcgacgaggtggtaagagtattgctactaagcaaagtaggtcgatctgttttattgtagaaattccaacttacacctctcagtcgtcgatgccgctctccagcagtgcccccttgttgagaacgttctcgtccttcgacgaaccggcaacaaggtccccatgactgaaggtcgtgacaaatggtgggacgaagagtgtgccaagatgcccgcttactgcccttgcgagaggatggcttccgaggaccctcttttcatcctctacgtgaattgtttcctagcttccaatgcagttttaggactaacgcttcgtagacctctggttccaccggtaagcccaagggtgtcgtccactgcaccggtggttacctcctcggcgccgcccttaccctcaagtacgtctttgacgctcacccggatgaccgattcgcctgtatggccgatatcggatggattaccggacatagttacattatctacggccctctcgccaacggcatcaccaccgccgtctttgaatccactcccgtctaccccacaccatccagatactgggactttgtcgacaaatggaaggctactcagctctacactgcgcctactgcgatccgattgttaagacgtatgggcgaggaccacgtcaagaaccacgatctcagctctctccgagtgttgggctctgttggtgagcccatcaaccccgaggcttggcattggtacaatgactttgcgggcaagaaccaatgtgccattgttgatacttactggatgaccgaaactggttccatctctattgctcctctccctggagccatctccaccaagcctggttccgccaccttccccttcttcggtatggatgttgacatcattgaccctcaaactggtcaggtcttggayggtaacgatgtggagggtgttctcgttgccaggaagccatggcctagtattgccaggaccgtctacagggaccacaagaggtaccttgagacttacatgaagccttaccccggctacttcttctttggtgacggtgctgcccgagactatgacggttacatgtggatcaagggacgagttgatgatgttatcaacgtgtctggccaccgactctccaccgccgaggttgagtctgcccttatcctccacaagggtgtcgccgagactgccgttgttggatgcgctgatgaccttaccggtcaggctgtgtacgctttcgttacgatgaagcccgagttcgatttaaagagtaccaaggaggcggatcttagcaaggagttggctatccaggttaggaaagttattggtcctttcgctgctcccaagaagattgtaagtgtcgccatccagtcgaaaaggttttttactgatgactattacagtaccttgtttccgatctccccaagacccgatcagggaaaatcatgcgtcgaattctccgaaagattgtcgctggcgagggtgaccaactgggagatctttcttccattgctgacccccaaattgtcgacgaaggtgagtcttcagccctgtttgatggattttgtctgaatgctgatccctattcacagtcaagcgaaaggttaccggctctgcttaatttccttacaggcggaaacagatgtagcgggacgtgtcacatgcgcaagggcataggaggataggagggaagaaaagaagtgcgaggaatgtactagtacgcatctttagtttgggctctcaatattctttcgtctgggcatatgtttcatattttggtcgagaaatccattatatggaagaatgcaacgtgagaagtcacttggatatgcaaaaccatcattctgcaccagtgttccttcccctcttgtgcagctgcacccggcgacttgatttggcgatgatgatttacaatgatattgcgggatacgtcgactggtgataagatgcgatccgattcgtcgagtaaggaagtattggtgggcatcgcacaagtgatagggcattaaagcaacaaacgataaacattgaagtcaaaatacgatcagattagattgctgaatgcaagtatcacagagtaataatgacacttggtggaaacttgcgctgcaaggtttgtacccatacctcttgtcgctcgcgtagcggggctttgccccgacctccgattattttgttgttctgatgtgccacccacctccagtcttctgttcagtgcaggaacaaaagctctgagatgttcacgaggagtactttagctcggcggttaagataaatcaatgaaagagagcgggcggcaggaattgatatggagaaaggggaaggtaccttggacgcaaggtctggccggcgtaagaggaaaaaagcagctaaaattgcataggtggcaaaattaaagcagtggaacgaagttaaaagagttcaatgcaaatacaagtagcccatatcagtacgtcattgaagccaaggtaatggagggaaagcttccaaggaatacgcctgacatattcgcaaagtacttcgcttgaattaaataatga

SEQ ID NO: 276 - DNA, 4190 bp, Cryptococcus neoformans
tcagtttactctcctaggtcttttgaacctacttaccagaccagcaacaatgaacaccaaaccccattctaagttggtgtcagtagatcctatcagtccaggggagatttatgagctcactaggtttgctcgaagaagtaggggtaacaggcggcggaggcggtatctcagtcgagtaaagtcgtctagtgcggatgacagagccacgctgttttgaatacgaaaatcagagctgaattttgacatgtataggctgcttacgagaggagagaatggcctcgtcgagttgtatattaatgaccatgagagtcgtgcgaatggctgttgcatgttggtcaaatcgttattatgcctacggcggtgatgctcgataagtgaaggactggttttcgcgggttgtcttttctgccttcatgaatatatatatgtctaatgagaatgattgagggaagagagtgacgtctacaaacccactcactcatcattgtggcacggctgtcaccgggtgtagtacaattatttattattgactcctcgtccacgatacccgcgtccgcaagttctccgcggcggtaaatgaagccgcgaaacgccaagacctttcctctcatcaccattttaatccttcttttggacagactttcgaaatatatggactactccaccttattagtagataaagctgctggaaatcaaggatgtggagtttctttttttttacgcaatatctattattctcatcatcattctgacatgattgagtcgccaaaactagagagataatacctcaatctaaaaagcaaaagtcaaaaacctcagtacgacaaccgggttccgacgaaagcgacggattcgattccgatcccgaattcgattcggacctccagtcagacatgggatcagatgttgacttaggctcggaagacgatcaaagtctggagtctgatgatgaggacgagttttcagggagcgaggacgacgtggatgtcactgctgcctttgatgacttcagctctgacgaggaaaaagacgagcccgagcgtagaaagcgcaagaagaaggaggaagaagccgagtatgagctggctggacgatcaagatgggctgctaagccggaggagcctgaggaagattctgttgaagtcggtcgtttgcctatcaaacttcctactggtgaaatccagatggtccaaggttcaacccgtatcgctgtccctcagcccaagaaaccagtaactaaggctgaaagtgaggacgaagaaacagatgaggttgatgaagaagaggaaaacagtgatgatggggcacaggcaatgaggatggcaagtcagaaagggaaatttggaaggatgggtattgcagagattgtaggcaggaagggttggaagaatgttcagagactggaagctgcaaaggagcaagtggcgcaactgggttctgaaatcctggcggggggagaacttgttgacatcgtatgtccatgatgtggagtatagggacgatatctaatgagaccttagggccccgtccttacaaggctgtcttccttcggcctccccactgtcccagcgcttgaagaagggcaaccacctctttccgtcccagcctctattcgaggtctagttttcctctctcaactggccgtttacaaagatcttattccaggctataggattcgtgagctgacagcacttgaagaagccgagaaggttagggatgaagtgaaaagattgagagaaggagaaaagatgttggtgaaaagctacaagggttatttgaagatgctcgaggcagagatcaagagtaagtcttcaatggttgcatgttggcaggtattaatggtcttttaaaaggcaaaacgaatctcgctactatcagtttaaggtgtatgtgcgagctcttgacatctgtcacccacttcaactttagcgagaacattatgggtgtccttgtcggtcgactcggcaggcgtagctgggacggtgactctgatctggtgcttcaaactttcattcgtgtgttccgcgatgacatctcggggcagcattctcaaacgcttgtccggttgattgcgcgaatgatcaaggaacgccatttccaagttcatcctaatgttcttttctgtcttcttcaccttcgtctcaaggatgaacttgaccagatgcggcgaggtaagaacgcaaagggcagcaacaaggaaaagggagggaaggacgagatcaagggaaagaagttcaaatcagagaaaaggaagaagtgggcgacgaagaatcagaaaaaacgggaaagggagatgaaggaagttcagaaggaaatggcagaagcagaggctgaggttgacaaggaagaaagggcccgagtacagactgaaactctcaaaaacctctttgtcttgtatttctccatcctcaagaacccaaaacgtacacctcttttgccggcagctttggagggtatctcaacttactcccatttcatcaacattgacttcttccgcgacctgcttgttgttcttcgcaagatcatcgcagatcagcagttatccgatgccactaacaagcaagaagaagagagcgaagatgaatcttcccagcaattggatgtcgttggcgccagccagcgtatccgaaacaggttactagctatcgctactgcctttgaccttctttcaggtcagggagaggcgctcaacattgacctttccgacttcatcaaccagcttttctctcttcttcgaccgttgtgccttgacactggtattgaggaccctcctttccttccagcttccacaaaatcctcttctggtgctgtccacaccctatccacgtccgcactcctcttccgatgcttaaatgcttcgttcttctctcgtcactctcgatcgccagctaatcgatctgcggcgtttgccaagagacttactgagtgtgctctgcatttccctccccgtaccggcaagcaagcgatagcatttgctcgatcccttctcagcaaggaacctaagatcgagggcttgttagatactgaggagaggatggcggatggagcgtacagaccagagttagatgatcctcaattggtcaatcctttcacaacaagttggtgggaggctggtgttttgggtagcaagcattgggaccgagaggttagacttgagatgagcaagttgagagatggcaaggttgtctagatgcgttttttttttgtgtatcatggtatgcatagcctattgtacaaaatattggaaacaatgcctgtcaccgtctaccgactgtctactcaaagctcgcccacagaagaaatacccagatctctccaaaccttcggtcgctcgttgtcggcatcagccgcgaaccaatttgctgcggagcgttgcgtagtgtcatctatcctgcatgttaagatcagagtcataatcaaaagtcgactccatgataatcaagctgaccatttactttccacaccttgtttatcgaggaggactttgacagttgcccacgaaaatctgacaatgcccttgtagccgaataccggatctatggatcccttaaggtacgcttgggtcttcgggtcggatggataaccgctgcctcttataacttcctcttcgtcttgtgacttgatatgggtagcactgttcaaacaggtgaacaccaagtttgcgatcagtggaagagacgaacctatggatgacatcctcaggatcaacccagccgtggacatatctatctcttgtgaccttggccacaatcgatgcagcaccgacgattttgaatagactgtcagctttggggcaaaccgtgaatttgatagtaggaaatattgcagtaagtctggcttgccattgaggggcagggccaagggcatcgacgtaacacttgagacatatcgtcaaccaacaagatgccgccaaagaacaggaaaaactcgcctcagtaacgttgatgcctctatttaaggctgcctggatcaggcccactgtagcatcctagcatcattgtcaggggtgctctatactttatgaaatatgtcgattacctctgcttgtctattgagatttatgggaactttacggagcatgttggatgaaatgtcttggggcgataaggttgacgaagaataacacaagggagggtggacgtcaaaagattcccagagggtctgccgagtttcagcggatagtgccttag

SEQ ID NO: 277 - DNA, 4350 bp, Cryptococcus neoformans
ccaaaaccttccataacgctcatctcaatagcgcccttgaccccatactcttcatcgcaccattctccaacgcctgcttcaatttcctcatcagtttcggggtcccttcctatccatatttgcagcgatccacgttctagcaggtagagagcctcttcgggtaagagttcaagactagtttttcctttgcctttggaaccggccgggggaggagtccgaacagtgatacccatagtgtccagcaaatgtccatgaacaactagcactcgaggaaatggcttcttgggtgtcaagagggcatgggatatagagttactacctgcagtcagtatgaaaaaagtaagcgacacttcggacttacttgtgacctccacgcacaccaatgagagcgttgaacaatgcttgtcggctcttttccaacatcatctcttgtagattgacagtctcctgtagaggctcaaagtccttttctccacgtctgggaatgatgacttgcggtcgagatgtcaagccatccacgctgtcggccgtaggcaagagttgaattttactgaatggttgtcagttgtgctcggcatgaagacagtcacacgtactcggcaaagctctgaataagtttaaaatccatcctctcttcaccctcctcctcttcgtctccctgtccacccgttgcagggcccgaaatagcttttgcagaggtgggtccagagtcgtcaccattgtcgttgattacaggagttgaaagggcggattttcttggtttcttctggagagtctgagaagccgccagcttgctcggacccgcctctatgtctgtggtgtgttccatagtgtttctgggtagaagtgagatggaaagcgcagatggaaaattgtatgaaaagggtgtccagcgattgggtgggtggaggcgatcggaggcgactcaaaatatttatcattttatcatcttttttttttcatcttttgttgacatcgccgacatcgcaaaccgtgtgcaatggtcgcaatcccacgactcgcaaggctctcagtcccagcatgggctcttagtgcaagaggcaggttctacgcaacagtctccaccccccagacgctcgtcgaaaagatcgtccaaaagtacgcggtcggtctctcagagggtgtcaaagttcgtgccggggactatgtcatgatcaagccagagcatgtgtacgtatatcttttcaaaggttctgctagggaatgtgctgatggcgtacttgaaggatgacccatgacaacactggtcctgtcatttccaagtttctctctctctcctgttccaagctcgacaaccctagacaacccgtttttgcccttgatcacgacgtgcaaaaccagtctgaaaccaaccagaagaagtacaagaagattcaggcttttgccaaggagcatggtgttgacttttaccctgctggtcgaggtattggtcaccagatcatcgtcgaggagggttacgcctggccagggaagatggtggttgcaagtgatagtcattctaaccactacggtggtgtcggatgtttgggtactgcgattgtcagaactgatgccgcgtgagttcaaagcagtatcctccccatagttaccaagctaaaattatgtagtggcatctgggctacaggcaagttctggtggcaaatccctcgaattgtctccgtttctctcgacggccgattgtctcctggtgtgactggcaaggacgttatcgttgctctcgctggtcttttcaacaaggacgaagtcctcaatgccgctatcgaatttaccggttctggtgtcgagcacttgtccattgacgaacgtctcactattgccaacatgactaccgaatggggagctgttgctggtgtattccctgttgacgacaagctcaaagagtggtaccaaggcatcctccgaaaggcggaattacggaagttcatcagccccaccgtcccttccacagtcggcgctaaggtccaccctcgtctcaatgccgcccgtctcgacgacgctatgaccaacagggtcgttgctgaccctggagcccactatgcagctcgcctttccctcgacctttccactctcgttcctcatgtctcaggtcccaactctgttaaggttgccaccgctctccctaagcttctcgaccctcccatccctatcaacaaggcgtatcttgtctcatgtaccaactctcgagcgtctgacattgcctctgccgctcaagttctgcgaggaaagaaggttgctcctggcgttgaattttacatcgccgccgcctctagccgagtccaggaagatgccgaagctgccggtgattggcagactttgattgacgcaggtgccaaaactctccctgcaggttgcggcccttgtatcggtcttggtgtcggtctccttgagaagggtgaagtgggtatcagtgccaccaacagaaactataaaggtcgtatgggtagccccgatgctatcgcctaccttgcctcccctgctgtcgtcgctgcctctgctgccaagggtgtcatttgcggccccgagtctatggacctcagccaacttccccagtatgaacagccaaagttttctatcatcaaggaaggtgctgctggtgaggagaagcctgttgaggttgacgaggcttcccttgagcccttgctcgaaggtttccctgcctactttgagggtccacttctttttgcccctcaagataacttgacaaccgatggaatgtatcctggaaagtacacataccaggatgacatcacccctgagcgacaagccgaagttgtcatgggtgagcgagatgttactcgtgtttttcttttgaagagagctgactgtttcgtttagaaaactatgaccccacttttgctgctaccgcccgcgaactccgtaccgccctccccactgcttcttccccctccactcttcccggcgccatccttctttctggttacaactttggtaccggttcatcccgtgaacaagctgctactgccatcaagaacgccggtatccctctcgttatctgcggttctttcggtgacattttcaagagaaactccatcaacaacggtctaattcttatcgaatctcctagcttgatcaaggacatgacggagagattcgccaaggacggagtaaggaacaagggtggcaaggatggcaagttgactgtcgtccctgagggctggagaatcaaggtggactctcaaagagggctggtgaccgttaacatgggtgaggaagaggagaagacctatcctgcggccaaggttggtaggagtgtgcaagaattatgggtcaacggcggtttggagggtttcattagggcttcattatagtagttgtttttcatgcatttgccacaaatatgattagagctaaacgaagcaagtggcgcagtgatttcacataagactctatgcatagtggccaggtctggcaatcgacaaaaaatcaacaacataatcgaattgctaaactatattcttgagggcgaaatgggtggtaatggagtgaattgctcaagagatgaaaagattggatgtactcgtatgtaacgctgagtacgcacgctaagctacaaattagtcactatggaaaagaaacgcaaaactggtatctagccatgtatattatggggtcatgatatataaacgtcaaaaacgagaaaaaaaaagaaatcatgacaatccttgtccatcgcccattcttcaatcacatgtctctctactcgccaaacagacgagcggtcgttcatcgcttagcttgcactctttccttttctcggagaactgccagtgtccatcaacatcatcgcatacctcgtaggacttgttggcggggcaggtgaccggatcgggtgaatactggatgtgggtgaaggcgcaaaatggtccttcagcctatccaagcagccaccaatctcccacatgggtgtagagagtaaagcactcgacgttggtggcggaagaccagggctatctcggaagacgacaggggtgacggtcgacatgcttggtgttttgcgatgatgtaagcggggagtctgagttttgtctgctgccgccgaagagcgggtaacaggtgttttgggaggcccacgaggatgtggaggggaagcgaggtgagtgtgagaatgtgggaattcatcctcctgcgcgacttgctttgtacgtaaagacttgggcttcaaatcaaatgccgcatcaagcatcggtctagcaggtgatgaatcgcgaggaggggtttgtgacatgtcgtcatgtgtccatgcctgttgcagactgctggggtggtgggttggacgggtaacggtggcaggcataggtggagatcctg

SEQ ID NO: 278 - DNA, 4284 bp, Cryptococcus neoformans
taatgacacaagtcagagaacggccattcactatctgcaaggatgacctacagaagatggagtaatcttccccagcaaactgaccgacgtaaggtacggagggatagtacgcaacaactgttccaggctcgttgggtacgaggtgctggcttgtctgatcaacggtaagtcatagtcagtctctcaaacttgtccggcattttgatatgaatcactgttgatctcgggggtttccaacccttgactgccctttgccaccgtctcaacctttgtctcccagccttaccaggtgcttgccagtttccgacccttccaaattccccgctcctcaatagctccgtccccttcggatccgccaccgtctgtttcttcttgacttttgaagcccaatcattgtttctaaatcgggaatcactcctcattgccagtcgatgtaaaatgctgggaaatgaacctgataccctacccgacagaaaggcgagaggtgattcaccgtcgtccaccgcttgggcaaattcgaggagatcggcaaaggcccgagactcggtgtcatcagacatctcctggtcgtcatcaaagtcattgccatcatctcgaatgatgtttccattctcgtcgaccattaaaccatcatcgtcctcctcatcttcatcgtcggtgtcatcttcgttgtaatcttcttcgtagagctcatatccatcatgaaggagatcgagcagtgcaacttcgggatcagacggctgataatcctcatcgtcatcgtcatcgctactgacaatgtaatgctgccgaggtggcattgcgaggtattcgattcgacaatgtggagatgcagtcaatgaatttgtaagcgtttgcagctaggagtcacggtgaatttagtacttatagtaatcgctactactacgtagactgtaaccgggtatgtggaggcctcgaagcacatatgacgttacgtaatatgagcctgatattaattcttttctagcgacttttggctatgaacaatgatgaacgtctcgagtatctctttcgactttgctacacatatccgccggtaacatgccacctaaaaagcaccaacaaaagaacgaaccaaaacaggttagtcattttcacagccatgaacaccactgacatcttgtttttacagaaggcggacaatgtggacgaagcccctctacaagccgtagtcctcgcagactcctacaaccgtcgctttgaggttctttgtacagaccaacctcgagttcttttgccgttatgttcaacaccacttttggcttggactttggagagcttgagtttgagtaaggtcaaacaagtgttcatcttctgtggtgtgcatgcggataagattaggacttttgtcgagtcttcgccttatagagcgatgctggacattcattgcttgtcttctcaaacagctcgatcagcaggtgatgctttgcgtgagctggatgacatgcacgtaagtcgtctgtgtattattgttattttccacttccaaagtgctaattggagtaggtcttgaatcctgataatccatttatcctcgtacattctcctcttatctccaactacgacctctccaaaattatagatgcccacaggaagcgccgtgacgtcgacaaaaactttatcatgaccatgggcgtcagtcgtggcggtcgtcctcaccccgagtcacccatcatgctcgtccacccaccttcttccagattattgcactatgctccccacccactttcacctactcaaccacgtatcagcttcccctcatctctcttcctcgatccattcccagctaccatcgacacttatgaaatatggtctggtacttcgccgtcatcgtccaaccaagggggataccgcgaccttggtgttgacatttgcgaggccgatgtacctgctctttgtactgaaaactttgactaccatgacctccgacgacattttgtcaatggtgtccttacatccgagcttctcggtaagaagattgctgttcatgttgtaggccaagaggaggaaagtctggatgctcgagctggtggcggcagatacgtggagagtgtacgagatacaagaacctttggtgaagtcactagggatgttttaaggagatgggcattcccgctcgctcctgatttgaacgaaccgggaggctcgcaatatgaattgagagctggaaatgtgtatattgccaaggaatcagtcgttctttcccgaacaacgacattgagtggtcctcttcttattggtcctagatcggccctcgcccacaacacacttgtccgtcaatcgactctgggagcagactgtaaaattggggcaggaagtataatcaggaagagctatgttttcgacgatgtcaagatcggggaaggatgtgtagtggaggagtgtatgattggcgaaggtgtcgtcatcggacacggttgcaagattggcaagggcgtattgctcggaaacggtgttaggcttggcaagggggtagttgttccggacttctcaagaattggaaggcagccttacagaggtgacgattgggattctgatgaggaaagggacgagttcgagaaagaggagattctttcattcctcggtgaagactctattggctacctctggcccaatgaggaggaggaacctccttcggattccgaggatgagggtgaagatccttacgagcatcctcgaaacaaaaagctcttgcaactcggccgccgcctgtccaacctttcttccccgagcacgtccatttccactctttctgccgcatcctcttctgccccctcgtctcctctctcagacgcatcttctacgtctctccctgacattccctccctttcactcgatgccgggccggacaaggcgttctatagtgaagccgccgcttcccttcaacgagcttacgaggaggatcacaagatcgaaaatgccttgctcgagttacgtacattggtcatgggttacaacgccggtcttgaacgtgctcgagaagaagtcgtcaagttttttgtgtcgaagatcgatgtacgcggccccgctacctccatcctctcttctgctgtcaagatcttctcacgatggggccctctaatggctaaccttacatcggaccctacgctcctcatccttgacgctcaacagtactgcgtctctaccgtcccttttgcttacattccttggtttggtatcattcttcgtgcaatgtatgagacagatttggttggtgaagacgagcttgtggaatggagggagatgagcagctcgcaaggtgaaggggttggtaagaaaggcaaggagggggaagaggaaaaggcgagatggagggaaagttgggcaaagggcaaaggttatgtggacgttttggagagtatggacagtgagagtggggaagaagagagcagcagcgaggaagagagtgatgatgcgtagttggagagattcgacattatgcatttacgagtaagtaatgagagccattcatacgtgaaagggttatcgtccgctatatcttcaagcgtaattataatttcaaccgcataagcattctcatatgagagggattaaagcagcgcattattgggtcattgatatcatggtgtatgtgataataaaggaagttctttaacccttcttcctgttatccaaagcccaacgcgtttcacaaacttataaaggaacagcagactacggccgcttggcaaaatacccctaaattgctgttcaacaccttttatgctcggctgaaagggggatacattcaaacatatcgcatacagcgagcgtctctggcgctgctgtccaggatagataaagctagtaggtaacagttctttatcccagctgctgccaggaaacaacagtgatacggacgacagtgtgtgctgaatcacgaattattaaggcattgaactcccaaggaagaagcttttatatagtgctacgagtgtttcaagatggtcaaaaagattcagcttgctgtgattataggaatcccattgttgggtgagttgcactttcttcaagatttacgggtgagtgccagtgactcacgggcgattcagcaatggctgttccggcgcccgattctgccacgataacggcttcttccgtttccagctctgctgcgtcttcctctgctacttccggtcctcttcttggtgaagacggcgttgccaaatgtaccgatcttcagcttcactccggtgccgattggcttgtcacagctttgtgtgccatctcaaaatgcaatcacatgtggcccgtatcaaatat

SEQ ID NO: 279 - DNA, 3775 bp, Cryptococcus neoformans
agtccaagaagccccctcagttcgctaaggctggtatgctggtctctgccctcattgagacttctgcccctatctgtattgaacgattcgaggactataagatgcttggtcgattcactttgcgtgacgaaggtgagtctcgccgttcagtcaggattatctcaattattgactgacatcgccctaggtaaaactgttgctattggcaaggtaaccaaacttattgaaaggagcgaggatatgcccgatgttgctgcgctttccttgaaggcggcgtcgtaaattggtgactagataaaacgaatgttgtagacggtgttaatctgcggctcgtaatgaagataatgcatatgcgcatagtggatttctatacaagttgatcaattagaggatatatattgttatatactgtaccatagagcagctctaggttaaaaggggcagctcgagattattctccgccacaaacgcgagaaaacgcgccttaccctgattttcgcgtgttgcactccgatagtaccatttcgttattgcccatatcttcttctcctcttcacttttcatcccacacgcccaagcatccacagcacagcggctggtttacgacgtcaaaaccggccagagcgaccgtatccatcctataaacaccttttgaagcgagaaaatcggttaccaagatggcgaccaatgatgccggtgccagtgttatgcccgtagccaacgtgcaggtatgtcgcgtcgctgttgatgtgcatagaacgcatcatcgctgatatgtttttaaatggtgtagatcaactatgaggaagaatctggtgagttcagctggctctgtacggtcctcaagcagtttactgacgcgtccacagccaagattgaagacttccttgcgagatatgtcgctggacctcgaccgcgtcgcgatcaaagcgcactccccgcggatgacgactcagctgccgaggacgcttctgaagatgaggatgatttgsccgatgggatgggcgggctgaacgttcaaggcgctggaaggacaaagttcaagtatttgaggatgttgagagaggttgccaacagaagacgagaggatattgtcattgatctaaaggatctcaagagggtaggtaaacgtgatgacctactgtgaaaagatcgaatccatactgacgggtatcgtaacccaatagcacagtaatgacctctcactccttcacaacatccaaaacaacacgcgtcgctacattcagctcttctcggacgtgatcgacaaaatcatgcctccgccggacaacgaggtcgactataccgatgatgtgctcgacttgattatgcagcaacgaagggaaatgaacgctcaagttgaggcgggagaaaggaatgcagacgccggaatgttcccaccagagctgatgagaagatagtaagcacttgctctaagctgataaggaaacgtcctaacgggaacagcaatgtatacttccgcccgcttcgatctgacgacgtccttgctgttcgagcagttcgaggtgcccatctcggcaagctcatcaccgtgcgaggtatcgttacccgtgtttctgaagtcaagcccctcctcatcgtcaacgcctacacctgtgactcgtgtggtaacgaaatcttccaagagatcacccaaaaacatttcgcccctctcactgtttgcccctctgacgtctgtgtcaggaatcaaaccaacggtcaattgcacatgcaaactcgagctagtcgattcaggcccttccaagaggtcaaaatccaagaaatggccgaccaggttcctgtgggtcacatccctcggtcgatgactatccatctgtacggtgctcttactcgatctgtcaaccctggagacgtcgtgcacattggaggtatcttcatcccaactccttacaccggtatgcgagctctccgagcaggtcttttgcaagacactttcctcgaagcaatgcatgttcaccagctcaaaaagcaataccatgccatggagtctacccccgaaatccaggaggctatcgctgacctcaagtccgatcctgccctctacgcgcgacttgccaactctatcgcgcccgagatttacggtcacgaagacgttaaaaaagcattgttgcttttgcttgtcggtggtgttacaaactcgaggaaggacggcatgaagatcagaggtgatattaatgtttgtctgatgggtgaccctggtgttgccaaatctcaattactcaaatatatcacaaaggtggcccctagaggtgtttacactaccggtaggggttccagtggcgtcggtttgacagccgcggttatgagggatcctgttactgacgagatggtgttgggtaagttcacactaggaaaaaggaatctggctgacagtgatgcagagggaggtgctcttgttctcgccgacaacggtatctgctgtatcgatgaatttgacaagatggaggaatctgaccgtaccgccattcacgaagtcatggaacaacaaaccatctccatttccaaggctggtatcaccaccacccttaacgcgcgtacttccatccttgccgccgcgaaccccctttacggacgatacaatcccaaaatctctccggttgagaacattaatcttcctgcagctctcttgtctcgtttcgacgttctcttccttatccttgattctcctacaagggaagatgatgagcgattagcccaacacgtatgctttgtccacatgcacaacacccaccctgaactcgactttgagcccgtcgagcctacattgatgagacactacattgccgagtgccgaaagattgaacctcgtgttcctcaggccttgtcagaatacattgtttccagctacgtacagatgcgcaaacaacaacaagaagatgaagcagaggagaagtctcactcttatgtttctgcccgtacccttcttgccgtcttacgtctgtcacaggcgcttgctcgtctgcgacatgacgatattgtccagcaaggcgatgtggacgaagctctccgattgatggatgtctccaaggcgagcttgtacgaacactctcaacagaggaatggcgaagatcagacaagcacaagtaagatcttcaggattatcaaggacatggcacagagggctgcggatgaggacgatgacgaagaaatgggagaattggcgatgatggatgtgaggaacagggttattgccaagggtttcacggagatgcagttaatggagactatcctcgaagtaagtttctatcgatgctttttcagttctatcaagctgacgccggttgtacagtacgagaacatggacgtgttgatgcgtaccgccaacggctccagattgcaatttgttactgtctaattttcggcattgtagatgacaggtgtttacgaataggtcatggttttgttctttttggggatatatacccggctataacgccattgttttttgtcccattggacatgggcatgcagcagatttcatcaggaacctttttgrttgaatgcataacaatataacaatatacaactatgcgggggtatcactcatttactcatgctatctatctcgtgtaatcgttactcttctttctccttctttcaaacatgcaacactttcaacgtggtgccggtaacgcaaccaacccagtcaccatcattggtgaaggcaagattgttatctctcccctcgcagtccagcccttagctggcatcatctctacggcgtctgcaggtgacggcgtacgttagaagaggg

SEQ ID NO: 280 - DNA, 4536 bp, Cryptococcus neoformans
ataaaaggtttacctcgtcgtccaactcggcccggtaggcctcaaatgtctgacccaaatgctgtctcctcgacaaggtcgcgagagatgatgatgattctgccaagggcatctcgacgtctgctgcggccattattttttccctttcagtgcttagtactggcttgttcagaatgtcaagatggaagctagtggtaaaaaagcaagggcagagttaatatcgcatggatatgtccatcgtcggtctgtgaatcttgcgtggttgctatataacggacgaaagattatgaaggcgggaaccgccgcttactttgcagcaccggccgccgacccgatgtttgtgatgtttcaaacagcaacaaaatacccaggcaaaaagtgctgttgttacagatgtagcggcaatcgagtcttttatgatgaccgcgtatgagaaagaagtaggcgatcgccaggggatggatattaatagggaatggaaataggtccgaaattcggaccattttgctggtgttgagaatcgatcgttgaccattttgcggttgggaatcgatcgtaaattgtacaaatgttgtcccgatctgtgtacgttcgctgcaccctttcgcacgtccatcatacatatatactgaagatgtagcaaccgcctttattccgggatgactagatggcatccacttcttttcctgtcctggctcgtaacaaacgcgctaggaatagctagcacaattgaaagtccgcagaatcccattatcgtctttcgtcgcgtcgtgcatgggcattatccggtcgattttgggtgcctgtttgcatctggagcacctgtgtcaggttgtattgtatactatcagcggtcggtggattggattgggtctgaaattagacagtcctgacggatgggaggaaaccaaacaaaccgaggagagcgtgggaaagaagcaagtcccccgcgcccgacctccacctgaagctactcggacgattgaagtttacgtaacgaatgccacctcgacgacatacagatgcgcatggcagccctggcttctctcatctccaccccgcgatgacccgcccctcgctgctgaacgcacagacgcacgcgctcctcacgctgctcaacctcaacaacccgcccccggcaaacccggcggcggccggcccgttcccccgcccgtcctcccccggcgccccgttcgacgacgccgcccagccgcccctcgtgtggaaggtgctgatcctcgacgacgccagccaggacgtgctcgccaccacgctgcgcgtccaggacctccgggagcagggcgtcactctccacatgtgagtcctccgtcgccacgccggccgtgttgctcatgcacccacaggcagctgcactcggcgcggccgccactcgccgatgtgcctgccgtctactttgtctcgccgacgctctccaacatccgccgcatcgccgaagacctcaacccgcccttatacgcctcctactacctcgccttcaccttcgtccctgccccgctcgttgctcgaggagctcgcatctctcatcttgtccaacgacccttccggacagaccggccagctcatcgccagcgtcacggaccagtttttggactttgtcgtcccctcaccgaatatgttctccctcttgccaaggagagagctcaggcaggatgccgacggcgcggcagggaaaggaaagaaggggaaggatgtcagggaggaatgggtggaagggcggggaagctacgtggttctcaacgacccgagagcgacagaggttgatattgaagaagaggttggacgtattgccaacggactgttcagtgtgatcaccaccatgagtatgtcgactagatgccaacggatggataaaggctgattattttggcagacatgacgcctatcatcaggtgtccgcgaggtaatgcggcagagatggtcgctcgtcgtttagatgccaagctgcgtgaccatatcgcatcaacctcttcccgcaatacacgcgatgcatacactgtcgatgctctccagcgtccccgtaagtcgccaaggtaacataaacactgttgctgacgaacgttgaactaatagtcctcgcgattatggaccgaaacattgacctcatccccatgctctcccactcttggacataccaagctctcgtgtccgacgtgctcgacatgaaactcaacagagtcaccgtctcttcccccgaaaacggtcgtctcacaaaaaaatcttacgatatcgattccaaagatttcttctgggccaaaaacgcgggcaaccctttcccagccgtggcggaagatatcgacaccgatctgagcaagtacaagacggatgcggctgaaatcacgaggtcaacagggataagcgatgtcaatgacgtttcccaaatcgactttacatccaacactgcaaacttgaaaaccgccattaccgctttacccgaactcaccgcgcgcaaacagattctcgatacgcacatgaacattgccaccgcattgttacaatccatcaaagaacgtggactggacaacttgttccaagtcgaggaaacagcgagcaaacagacaaaagctaccatcctctccgtcctgaacggcgctaccgacgagccggggcaaactgcctccccttccccgctcgaccaactccgcttggtcatcatctactttctctccacccaagatggggcgctttcaaaggaggatatgaaggagctcgagggcgtgttaaaggagcacggggcggatacgcgcgcattggaatatgtgaagaaagtgagggatattcatcgcatgtccacgttggcggtccagccggccgtggcggcccagagtcagtcgggaggtggaggtgaatggacaagagggttcagtgcgcttggtaaccgtgtaagtctttcccttcactctgccctgcatccacactcatcagatcattattttttcaacatagatcacggatagattaagagaaggcggtatcccaaccgtagggctcgacaacctcatctctggcgtcaaatccttcctccccgcacggaaagacctcaccctaacccggctggtggaagcgctcatggatccggcatcggcgtctagtcaagcattgcaggatacggatgattacctgttcttcgatccgaaaacgtctcgcgcgagacccggtcatgcaggtggtggtggcggtggaggtggtggcggtgccggtgccggtgccgggggagcaggcggaccagggggaggaagaagtcagtttagtgaagggctggtgttcgtagtaggaggaggaggttatgtcgagtatggcaatctgatggattgggcgaataggtcgggaggcggtgggagagatggcggcggcggtggagcaggtgccggcggaggagcgggggcgcaaggggtaacgggacaaggaggaaggaaagtgacgtatggcagtacggagattttgaatcccgaaaagtttttaaagagtctggaagagctggggagtgtctagctgtaggatttttatggagttcttagatggggaccattgatggatgtgcatgaataaaaaataaaaataaaaaataaaaagacgtagaatgttgacgtttgcatactcaatattaaaaaaaaaattaaaaaaggaacgttcatttcgttgatcgttatgacatcctaccgttgttcccccaaatctaacaatttctatccaaacatcttggcaaacgcctgcctttccttctccctcctcgccttcctcttcgcctctacatccttcaacaatttgatcaccccggcatcccctggtacacactccaacgcacccttcaaatccttctccgcagcttcgtcatccttcttgaggacatacgcctgagcccgcctgtaaagggccttacccttctcggaagctgagaggtttggcaaagtcaaggctcgggaagtgagggagacgaccagggaagatgtgttgggcgacgcggggagcttcaaagcgcacagggcagcgttggtgagaagtgggagtcggagagaacggaaggactcgaccagttcggcgggggagtcattggggagtacagggtggacgtcgaggtacctcaatgccttttggtacttgtccaacgccaccgcaaagtttcccgctttaaactcctttgtacccacttccttcagcttgccggctacgacaagcgcttcttcaggcttctcagcgtccacaccttcttcgtcctgaggccagtcttcccagatatcaccaccatcagagccggcttgtttggcttgacgttcagcctcgagctgggcgaactcgtcgggggagaggacgccggcggaagagatggtgacctcctggtcgggacggtcggatgtggtggggatgttttcgatgcggcggacgagggagcggttgtagatgactcggccgaacacgacgtgcttcccatcgagatgaggggtggggacgctgatataatgaaagcaaatgttagccgctgttctgtggtatcttttcgctttttcgtcaagaccagac

SEQ ID NO: 281 - DNA, 4462 bp, Cryptococcus neoformans
agcccttttaactcttttttgtgaacctttgaggtttcatgcgagaaaattgttcccaacgaggttgaaatttgttcgaggaaagacaatactatggactggagaaactttagagcattttccctataaggcgaacttaagtcttgtttttgaaacgtttgggatctaacacaccttccctcatcagaaacctggattccgtcctctatcagactctcagaatacggctcatctatcacaaagtcgttctcgtcatcgtcgctgacttcaaattgcgtttgtaatgatgctgtttgtgttgccggattacgcattgcttctgttcgacgtatcaattgctcaaatagagcttcttgcgcttcttcattgcggtcttcgatatcatgggtcgaagcatcgctattaaggtcgtctgctattaaagcccagacgaggtcatcctcatcaccagaatcgtcatctacctggatggtatctcgaccactgtcttcggaggaaccacttaggtctattctatgacatgagttttttccttccacgagtagaatatctttgtcttctttgtccatatggtgagcaggtgagccagagtaggaaggagaaggaagagctgaaaatgactgatgagtcggagagctttgagctaaggaaggcattgtacgaagcattcaacccagaaggacaaccgatcgtaaactcaaagaaagtgaggagtgatgctcaatttaaaaaaccttgaaggtgaatagtaaaaagacaaatggccgaggtcataaagggacgaaaggcggctagactcgacgtcggtatgcaggacgcagaaccaaacacccattcaagctacttacgtaatacttcggagcttcggaatttttcaaggtggcggctagtctggcggctctaaccgcctccacttgggcaagtgggcaagaattgaattttcgcaagcggacaccttgaacaagctgttcgacaacaacagacattaagagtataaatcatgggcaagtctacgaaagccttcaagaagtttgcctcttcgggcaaactcaaggataccattcaaaaacgtcgccaacatcagcaagccaagcgcaagtctgacgacatcaaaacccaacgcgctaagcagcgaggtgccgctcacgacccggaggacgagtctgaaggtgaaggttccgaaggggaggacgaagaggatgaaaaggaagccaagagaattggtaaacctaatgccggagggaaagctggtggtgtcgccaagactgttgaagatctgtttggcgccggtggacttgacgttgaggacgatgaagaatcggagctggaagagctgggatcagaggacgaggatgaggaagatgacggagacgacgaagaagacgagggagaaggagatcttctggatgaagaggccatgaagaaggccatgaaggatttggcgaagaacgatcctgaattcttcaagtatcttaaagaaaacgacgaagatttgcttgattttggccagtcaagcaaagcaaacaagggaaaaggaaagcaagatgaggatgatgaggatgacgaggatgaggaaatggaaagcgatgaggacctgcttgaagaagacgaggaggaagaggaagccgaaaggaagaggatcacggtgactttgaagatgcttcgacagtggcaagaaggcatgctcagagtgagttcatctgctatagagatttggtacaatctaatcagtacataccatagcaacactccattagatcacttcggaaaactttgatcgcctttagagcagcagcccacatgaacgaagacgacggtgatcaagggagtggtttggacactaaatacattattgacagtgctcaaggtgagtaatttgttcttgtcatgccaatgattggctcctaataaagtattagtcttcaacaaaatcgtggttactgcccttaaattcactcctgtcgtcatctctcaccacttcccatataaaactctgcctagcggtaaagtcaagctccagccccccaagaaaaccaaccaaaccctcaaccgacttatcctctctcacttctcgactctgctgcacctcatcaaatcactccccacgactccgtctagcgttgcttctaagaaggacgaaggtgccagtggattgctgttgacggctgttggcgagagtacaaagttgatcccctgggtccttagtgcgagaaaacatttgagggcatacctcaaggtactcttggatctctggagctcggctggtgatgatgttaggatcgcttcgttcctggcggtaaggaaattgttcgtcgctggagatgatgcggtcaaggatctttgtttacgagtgagttacattataatcatgctattctagactttgtgactgatgattttgcagaacatttaccgatcgctcccttcccctctccgtaataccactccgcataaccttccttctctcaacctcatgaaaaacactgcctctgagctttatcaactcgctccctctctttcttaccagcatgccttcggtttcatccgtatgcttgctgtgcatttgcgtaatgttgtgcggtcaagcaccaccggcaaggcaggtgacaaccagcaagccttcaagactgtttacaactggcaatatgtccactgtatcgatttctggagtcaggtattggctggtgcggctagcgtggagaaccagaaggcgaacgcgggattggaaagtcctttgaagccattggtctatccccttgttcagattgctttgggtgctgttcggtaagtctcaaaagcacggtagcgtatgagtcgatagttaacgaaaagtatagactccttccttcctcgcgatacttccctctccgattccacatccttcattctctcctccgtatcatcagtcgcaccggcacttacattcccctcgcccccttccttctcgagatcctcgattctaccgagttcagacgcgccaaccccaagaagggtactatcaagcctcttgactttgagtacatcatccgtgcccctgcggcttatcccaagactcgagtcttccaggaaggcttgggtgaagagctggtgttccttttgggagaataccatgccgctgtctcaacgcaaattgccttccccgaaatggttttgcctgttatcttgaccatcaagaagcacatcaagaaggggtctgctggttcccccaaggttgtctcttccctcaaggtcctcgttgagaaactcgaggctacccgaacgttcatcgagaacaagcgtcggaacgtctcttttgctcctagggatagggcggaggtcgacaggtttttggagggacaagggcctgaagtgactcccgttggaaactggatgagattgcagaggaagatcagggatcagaagaggtcagaagtagagaaggctttgcgtgaggagcaggacgaggatgaggacagcgagtagatcggcccatgatgacaagtagtagtaatgggttgcggggaatttgttgaagaattcagggctatttcctctaatttctcgatagacttttctaacttgatgacacgcatgtatactcccggtcattttctacttttcgctatactatatgcgatgtaagatacacaatatcccgcatgaccatcgatggtggagtaccactgttaaatgaccgctgacgagcttactcaagtatccgatgcgaaaattctctactggttattcctgatgtgatgatttttcccaccctgatcatcaggagtcgtacgttatagatagatgatgcccgatgccgcaaatcaaagaagaaagaggacatcatgcttttagttccgttcttcttttgacccgcttgttgaccctcaattttgtttgctgcttcactaccttcaggcggcttttctttccgctatgttttctctggatcactgaccatctaccaccactcccgtattccttgttttgacatgtgcccaatgtcaaaaaaagtggtgatgtttcagtacgtagtatgaaggatgatgaaagagtcacaaagatgcgaaggatgtgcctggactattgatagtttgtgttgcggggcgcctttttccgacgatcacactttccggaagacgtcatcatttctcaacgttttcctcttccttcagtctgcgttagcgtgactcatcgacacctatcctcatatagtatcctccctcccccctttcccttgcggcctccatttccaacctgcgcatgctccagacctttgtaagccattaaatcctcgtcgactctgaggaatctgtgggattttgccgtcaaggagccgcacgagccaggacgtaatgctaatcttcaccacctgacctgaacagccggataagcttcgccgttatcgatcattttacgcccttatatctagggaatgaatacgcaaccactgttgtcctttgcctcggtgcacatggcgccgccc

SEQ ID NO: 282 - DNA, 4569 bp, Cryptococcus neoformans
tttcccatccttcgggcgcaacacctttttgaatttggtctcagcatagatctctgctttggggtggaatggggtatgcagatagacggtggcttcaagagaaggggtgaagggctctgccggaggaatacggaggtgtgatgttgacattgtttgggtaagttgtatttgacaaggagcaacttcaaaattttgcgagctttctgataaggaagaaagatcctcggagagagggaacacgcacggagagatgagacaacgaaggagtaaaagtatctgtcatcgacggggacctcgggatctcggacgccatcttctcggtgtaaaaatcaaaaaataaatctttatcgacgttaaataaccgatatacggctttgtaaataaataaggacgccactgactataaaattatgaagcgggcaaggccttgggtcaatgaaataacctttacatttacttgattaaactatagcgtacatacagattggcaataagaagaatccctcagacattaccgaaaaaatgttatggcaaacatgaaaaccaatggcaaaaaaaaggtttctccagcagggagttgaaccctggtctaccgcgaaccgaaccaagaaacttgaggcctgagaagcggttatactaaccgttatactactgaagaattgcctaagcttaaatttaccttcaaaataaaattgttataaagcagttaagcaattagctccgtcgttagtcctggttgaatgttgcagcgtcaagagtagatttatttttattggcagctaactaaataagaaggtgaaaaacaggctaaattagctaaggtcaatcttagattcttagctacgtgttctggatatatttactcgttgctccatgctcacggtaaatcgccgctcggttgtaatttacctccgctccgcgaattgaattgaattctcatttcaacccaactttcgttcgttccttgtatacaaatctccaaaaaacctatagttataaaatgcccgacgttgtactacctctcgtgcagactcccccctttgttatcattgctctcgccgctttacagggtattcccgtcacctgggatgctcagtctggagaacagggtcagactacttacggtgatattgttggtgccgaaaacgttcgagctgagctcgaaaagggtgtcgacggcaaggaggtaagcaagaaaagagttcataacccattgaagtaataatgctgaaataattcaagatccctctccctcctctccctacccttttgacctcgaccagctctttccaagacgtctccgcggtcctggacgctttcgatgactacctcgcctatcgtacctactttgccggccccaagtttggtttcggcgatgctaccatttggggcaccattcgaggcaacaactctgccattggttccatcaagaagcccggacgaccccatttgcagcgatggttcaaccacgttgagactctcgatgtgcccaaggctgcgctcgagtctcacagacaggccaagagcgagatggagaagggcaagaagaccaagagattggaaagtattgatgttgttttgcctaacgctatcaagggcaaggttgtcgttaggttcggtacatatgctctcttggtcttatctgccgctcgatactgatgattattgtgtagcccctgagccttcaggatacttgcacattggtcacctcaaggctgctatccttaacagatacctggcagaccagtaccaggggcaagttcatccctccgtttcgatgacaccaaccccctctcagggaggaggtaccgtccacctctcacttgtgtatttgtttgaattgtgatgctgaccattaagtttcttttgattatatagggtgagttcgaagaggctatccaggaagacctcaaaatgattgaaatctccttcgacaagatagttcacacttccgaccacttcgacaaaatccaggcctacgctgagcaactcatcaagcaaggcgacgctttcatggacgacactgagggcgaaaccgtcaaggagcagcgtcgagcgatgatcccttctaaaaaccgagacctctctattgaagagaacttggttaagttcaaggagatgtgtgagggtacggaggaaggcaagaggtggagtttgagagctaagattgattatcaacacaagaacggtactttgcgtgaccctgtcatctaccgatatgttgagggctcgcaccatgttactgggtgcgttgaattccctctcccgcaccacgcacacgctaatcacacctatgttcagtaccaagtacaagtcttaccccatgtacgatctcgcctgtcctatcatcgaccacctcgatggcgtcactcacgctctccgcgccaatgagtactgggcccgtcatgagcaataccaatggttccttaagactcttggtttcgccaatattgagatctttgacttcagcagggtcgactttgtttacactgttttgagcaagaggaaattgaagtatcttgtcgagaagaatgttgtcaaaggctgggatgacccccgattccctaccgtccgaggtgggcatttctttccgtcttatgtgttgtcatctatttaagggtctgaggtgatgctaatctactcctttcgttgtttaggtatacgatcccgcggtatgacggttcaaggtctcaagaactatattctcggtcagggtgcttctcagcaagccgttcagcttgagtgggatggtatctggactgttaacaagaaggttatagaccccgttgcccctcgatactgggccattgcggaggacaggatgtacgtatctttcttcaaactgcaggccgggagagaagggtaaggcactaatccgtacatctagggtcagtgtcaatgttattggccgtgagactgaagagcctgaggttgtcagcaggcccttacacaagaagaaccctgaggttggagagaagaagttggtttttgctagcaagttgatcatggagcaggaggacgccaagacctttggtgagaatgaagaggtgtgtgctttctcacgcccctctgtgtccaagccatacagctcacgacgtaacttccttttcttaatagatcacggccatggactggggaaatgctttcgttacttccaagattaccaccccttccggcgacgtttcttctctcactatcacacttcacctcgccggagacttcaagaagacttctaagaaagtcacctggctcgctgcgccgactgatgccaaccctcttatccccgttgtcctcattgaatacgattacctcatcaccaagaagaagctcgaagaggacgactccctccctgaggtcctcaacccgaagaccgagtaccgcacctacgcgcttgcttctaaggaagttgaaggccttaaaaagtgggatatcatacagttcgagaggaagggattctacatctgccagggtactagagataaccagggcaggatggagtttggtttcatccctgatggacgggctgcgactgtggcgttgaaagccgagcccgcaaaggaaaaaactaaggtccccggaactgcgaaggggtcatggggtaagcccgggcccaaggctgtctccaccgctgctgctgctccttgagtagttgaggaatagaggtagagtaggaaggtacatcagcgaagtcgggcgacattcaggggagaattattcgaaaatcctttacatctgtcatgcatgaacttgttcatttatttgttccctcctctttctttgtatcttctaaaaaaaagtatcccctacgttcgatattaggccggtccctgctaaggtgcaggtttagatatgtaatcctcttcatatccttattctcccaggggcagtcttcatcttctgccgtttatgttcgatatcagttcaagaaccagtgagccgaaaggcagacgtaaaattcagcccacgcgaccacaacttctgatgcttttttttgcctaccatcgtaaacttggccacctgctgttgtcgagaatgtcaggactgttcgatccaacggcgaatccggcttcgacacctagtcaacattacctaccaccttgaggctttcaggtgacaggggcttatggcaagaacttgcctatcgacattgagcgtttgaatatgttcgaagtgaagcccctttgccactcttcgatgttttgaagagggcggtttttccgaatgtcacataagtagcttgggccagctgtgaatttactcttatcacgttagatggtttgcgaaattacatcgcccaaacgaaatcgtgaaagtgcatggctaacaattctaaacagatgcgaatacattaatggccatgaccttgttgtatttatacttgtacttcacgcttctctacacttaatcgtacatctcgttacgcgtctggaaatcgcagaacattaactacagtccagacatcgagaagtgaagggatacgcacagtaggagttgccggcttgagcataattcatcgctgacagttcatcttccgagaatttatcttggtatttctcgtgagtccgcttg

SEQ ID NO: 283 - DNA, 4635 bp, Cryptococcus neoformans
tctgtccgcttaccttcttctgtcggtctcgccggcgcgtccacttccctgagcaagcgggacgcatggctgcctagtaacacggatcccaagaagagtctctttgtgggcggtttagactatgcggccaaggaggaggatgtcagggtgttctttgaagagttggtcaaggctgagaggggtgcgaacaaggaggggagcggaaagtgggttactggtgtgaggattgtgagagataaggagactcagctcggtaaaggtttcggttacgttcactttgctgtgagtatattcccgaggaaaagaagaaaaagggtcttatgctgatattcaataaaataggaccgagaaagcgtggaagagattctcgcaatggacgctaaacaaatcaaattcgccaaacgaacgcttcgtgtgcagccatgcaagaccatccctaccgccaacactcttcaaaacactatcaaaaagatcgctgccggctctggcggcgcttcaaaggacaagaccaagaaagcttatgtccgaccgggtgtcatccccaagggcgaccctgcgctcggtgacaagctcaagaacctgtccaaggaggaacgaaagactatcaagagctctgacgctgatcggcaggcgaggaggttggcgaagaagaaggccaagatgtcgttggagaaggacaaggcgaagggtgcggtcaagttgacgttgacaaagagcgagagggagaagacgagcgcgtcaaagaagcccaaggcgaagaaggggaagaagagggcgccgtctgcggttgcaaagatgaagggttcaagggagtagacgtgtgtatttttcctgtgacttggattattctcgtgcatgatgtattggctttgttaattattaatggcgacggcttgttcggcctgttcggatttacgtcggcgatgtccgttgtgataagtgccgttttatatacgtacatttatattttgtggggatttttgtattcactccacacacaatgccaggcccgacaccgtcagcgcaccaggtgctcgtgtactcgggccccggggtgtcgccgctctccctctcgcacaccctcctcaccctccgcctcctcctgctcccccactacaccgtccagcccgcagccccagacctcctcgcactccagccatgggaaccgtcctgcgcactcctcgtcgtcccaggcggcagggaccttccctacgtcgacgagctcacgcacaagcggcccgtcacaaacaggatcagagagtatgtccagcaaggcggccgcttcttgggcatatgtgccggagcgtactttgccagcgccgaggtgaggtttgatgtcggaggcggtatggaagttgccgggaagagagatttggtgcgtttttttgcgatgtggaacaggtttcgaactgcgtgctgacggtgcgaatcaggcctttttccctgggcctagcagaggacccgtattccaaggttttcaatatgcgtctgaatccggatccagggctgtcgtcctcaacctcgaatcttccaagctcgagacactcaaccacatctattataacggcggcggccaattcattctcccttcgcctccccctccaaacgtccaaatcctcgctcgcttccaagaaacttgttccgacccatcaggacaacaacaacaacaactcgtcgccgccgtcttcacccaaaacggcaagggctgcaccgttctctcctctgtccatccagaataccctctctccgaccctccggcgagtaacgccattgctaaactggacgtgcggccgtcccaggtggaggttgagatgagcgacaaggctcgtttgtcgtgggtcgaggagttactcatcaagctcggtttgacccctcccgaacgtcttaccgccgcaaaccgggccaaatcctcagccgactcggagcacgaggatgaagacccggctctcctccttcaccccactcacccttcacccatctttttcttgtctcatcccaacctgccgcagttacccgaggcagctgtgaacaagccagaactcaagggcaagatggagcaaagagatgggtgggatgttttgagggatgcgaacgatgagattcgttttggtacgacggaagctacctcgcctgaacgagcagcctctgaagatggtatcacgcaatggcttgcgcaagcccgtcgtacccagcccgtgttcccaccttccgtcgaagatctttcgatacaatccgactctaccccacaacctccctctccacccgatttgcacgctctcaccaaaaccatcctccttccttcgccttcagtcgaatactcttccagatggactccattgttcaacttttctacttactgggatgagcttgatcaggcaaggaagaggagcggtagacgttcaggcgtgatgcggcagggatcggatggacagggcgagcggtgttcattgggtgactgtgtcttgtacggtgaaacagtgacgagtactcagacgatgcttgacggcaacccccttctcctcaccaatctccctacaccgctcgtcttcctcgcgtctttccaactttccggccgaggtcgaggctccaacatgtggttatccccacctggctgtctccaattctcactgcttctcgacctccccgcttccctttcatccaaaatggttttcatccaatacatcatggctcttgccgtctgtgaagctatcgatgaggatgggagattaggtgttagaatcaagtggccgaacgatatctatgccgaggttgaaggcgtgggtgggacggagatcggtagtggaaaaaagggcaaggccaagttgggtgggatcttggtgaacactagttttgtcggcgggaaatggagaattgttgttggtaagctttgcatttttttttgcaacccattttatcctacttcacccccttctaatgacctgtttctacaggatgtggtatcaacattctcaacgctcttcccacatcatccgtctcccaactacatgctttactcgccgccaaactttcttccacatcatctaataaacctcttccgcctgcacctaccatggagggtacctttgctcgcatcatgagttcctttgatgcgaaatgggagcaattcatcgaggagaagggtttcaaagggttcatggatgaataccacggaaggtggttgcattcgtcggtttttttctttttctttatccccattgattgttccgtttccatgatctcatactgacttttttgttaattattagagggcaagacgttctcctcactaccaccgaaccccacactcgcgtccgtatcctcagtatcaccccagaccacggtcttctccgctgtatccccatctccgacaaacctaaagcctccaccggtctcacacccctgtacaacagggacattgacgccggcgaggatgatcgtggttcgtggtcttcttctccctctgttcctaggtctggagctgctcgagcccaaacgcagaaccactcaccgtttgtcgacctccagccagatgggaacagttttgatttgatgagcgggttgatcaagcggaaagtataaggggttctgtgtattgtaggtataaaaagctcgacattgacatcctgtctttatgaaaggttgtactcctctttgcatggtttgtagtgaaaagctaatctctactaaccctcggctttccttgctgaccttttgccttctctcttctttttcttttttgctttttttatgtcattccttactcgatatcgcaactcagaaccgagcttagacacgtcggcagccaattatccacgctgccgatgtcacagctatcggaagatcaaaccctctcgttcatagagctttcctcgaccaatctcaaccttgccgtcatttcgatcggcgaggtgtggtagtcacctctttttttgggccctgggaagcttactatgaagccttttcccacttcatggtgttcctctacgagacattccgacatttattttggaaaaaaggtccactatatggtctgacagtagcggccgacagtgaattgatgtctctgcttctctctgtggactgctcttgccaggctgtgtattggatcttttttcttctttttttttctcatttcccttttagccataatttatcattattatccgaacccgagcttagacacgtctgcagcctacccttttcccccgctgccgatgtcacagctatcggaaaaccaaaatttctatcgccaaatgctcgcctcgtcgtggtggtcttttcgggcctactcgggaaatgtttactgtgcttcggtacagtggcagatccccacgaggcatacagagcaggaacctttcactttctagctcgggcaaattgcggacacatctttcaccttccttttttttgccatttttcatgcatcatgtgcatgcgtcagccgtacgcacgaggtctataatacattattatccccaaacctatatcttattaagcccttgtcgatctcgatgaccctttatccttctttcgcaatgaataatgcccattaaacgcgatcctaatagccaaaaaccttacatcgagatccgcgtgcgccccagccatgtgcacaatgctaaccactctgtgttg

SEQ ID NO: 284 - DNA, 3670 bp, Cryptococcus neoformans
gcttatttacagtgtaattaaaggggtggcgggctgaggattcttcgtttttcttctgcggatggattattgcaacacatctcttcctttctcacttgtttttctccttattcttgcgcaaaagatgtccggacagcagccccccagcttcaacccaggcgcattcgagttccgtccaggacaggcacctttcgcccccaggcagcagcagcccttcgacccgtacggccagcagcagggcggatatccccagtacggacagtatggccagcaacagggataccctcaatacggacagtatggcggttaccctcagcagcaaggctaccctgttcccggtgctcccggtgccggacctagggcttaccagcctccacaagccaggaatgtccaaggtttccagcctcccagcttctcttcatcgcctgcgccccctccggacaccaaagctcctgctggaaaacctgtctctttatccattggaggtggtggtgcacccaaagccgctcctagcttgtctatcggtggtggtggtgcgcccaaggctgctcccagcttgagtatcggtggtgcgcccaaggcggcccctagcttgagcattggcggtgctcccaaggccgctcctagcttgagtattggtggtgccaaggcggcccccagtttgagtatcggtggaaagaaagaggagaaaaaggaagagaaggaggcttcctcaaagtcttctcccaaacctgccgctcctacaccaaaacccgccgatgcccctgctgccaagtctgaggccgcctctgcccctgtctctgctgccgagaagaaggctgaaaaggctgttccccttaccagtgacgctcaaggcaaggttgttgctgctgagacttctgctgccagccccgccaagtctggcgctagtactcccgtcgccactgtcagcaccagcaccaccaacttctccaaggtctctgccaagaacgatgctgaagctatctaccgcgagcaaaaccttgctggtgacgctgctttgcgagacctgtacggtgagaacgtcaaggacaccaacatcaagtctcacctaaacatcattttcactggtcacgtcgatgcgggcaagtctactatgggtggtcagttactctacttgactggtgctgttgacaagcgaaccatggaaaagtatgagcaggaggccaaagctgccggtagggagacctggtacctgtcgtgggctttggacagtggtaaggaggagcgagcgaagggtaagaccgttgaggtcggcagggcgtattttgagagtgaaaaacgaaggtataccatcttggacgctcccggtcacaaaacctatgtgcccagtatgatctccggtgccgcccaggccgacgttgctttgcttgtaagctgctcttttcatcttcaatggaccacaatgctaaattatccacaggtgttgtccgcgcgaaagggcgagtttgagaccggtttcgaacgtgagggtcagaccagagagcacgctatgcttatcaagaacaacggtatcaacaagcttatcgtcgtcgtcaataagatggatgacactactgtgcaatgggacaagggacggtacgatgagattaccactaaaatcactcctttcctcaaggcggttggtttcaaccccaagaccgacatcacttttattcccgtttccgcccagattggtgagaacatgaaggaccgagttgacaaaaagattgctccttggtgggagtaagttgtgatttatcctttcacgttttggttccactgacattttgtagcggcccttcgcttttggagcatcttgacaacatggaaattatggaccgaaacattaatgctcccttcatgcttcccatctctgaaaaatacaacgagttgggtaccatggttatgggcaagattgaatccggccacgtcaagaagggcgacactttgcttatgatgcccaacaaggtaaatctaaacgtatctgcaatcgcctatgtgcgtacactaactacggattcccttagcacactgttgaagtcactggtatcttctctgaacaatcagaggacatggacatggcattctgtggtgacaatatccgaatgcgaatctctggtgtttctgaccgagacattacccccggtttcgtccttacctctgttcaaaagcccgtcaaggctgtcactgccttcaaggcagacattagtttcattgacaccaagaacattatctgtcccggttacagctgtgtcttgcacgtccacacccttgctgaggaagtttccgttactgtaagtagatctcaataatgtacaaataacatttaacattgttgacaataattacagtcattcctccattactacgagaaaaagactaggagaaagtccaagaagccccctcagttcgctaaggctggtatgctggtctctgccctcattgagacttctgcccctatctgtattgaacgattcgaggactataagatgcttggtcgattcactttgcgtgacgaaggtgagtctcgccgttcagtcaggattatctcaattattgactgacatcgccctaggtaaaactgttgctattggcaaggtaaccaaacttattgaaaggagcgaggatatgcccgatgttgctgcgctttccttgaaggcggcgtcgtaaattggtgactagataaaacgaatgttgtagacggtgttaatctgcggctcgtaatgaagataatgcatatgcgcatagtggatttctatacaagttgatcaattagaggatatatattgttatatactgtaccatagagcagctctaggttaaaaggggcagctcgagattattctccgccacaaacgcgagaaaacgcgccttaccctgattttcgcgtgttgcactccgatagtaccatttcgttattgcccatatcttcttctcctcttcacttttcatcccacacgcccaagcatccacagcacagcggctggtttacgacgtcaaaaccggccagagcgaccgtatccatcctataaacaccttttgaagcgagaaaatcggttaccaagatggcgaccaatgatgccggtgccagtgttatgcccgtagccaacgtgcaggtatgtcgcgtcgctgttgatgtgcatagaacgcatcatcgctgatatgtttttaaatggtgtagatcaactatgaggaagaatctggtgagttcagctggctctgtacggtcctcaagcagtttactgacgcgtccacagccaagattgaagacttccttgcgagatatgtcgctggacctcgaccgcgtcgcgatcaaagcgcactccccgcggatgacgactcagctgccgaggacgcttctgaagatgaggatgatttgsccgatgggatgggcgggctgaacgttcaaggcgctggaaggacaaagttcaagtatttgaggatgttgagagaggttgccaacagaagacgagaggatattgtcattgatctaaaggatctcaagagggtaggtaaacgtgatgacctactgtgaaaagatcgaatccatactgacgggtatcgtaacccaatagcacagtaatgacctctcactccttcacaacatccaaaacaacacgcgtcgctacattcagctcttctcggacgtgatcgacaaaatcatgcctcc

SEQ ID NO: 285 - DNA, 4632 bp, Cryptococcus neoformans
atgatctccaaggtccctagagcagagggatcaaatggggctagcgccgcattgccgcctggctcggttgttggtcccctggatattggggagtcgagcgctagtacagctgtggtggaagacaattatcaggatgatgagggcgaggaggatgaagaaatggagaatgctgatgagcattcatattgatgatatcacgaggtcttaagcaatcttctatacgaataatatacgaataccggcccggttgtctgtcttaatttgtagagtatgttacatacagtgttatggcgttcttcattgtttttgttcgcctgaatggagattcaacggtcatcattgattgacggacaacagttagtatcgttactatttcaggtcaacatgatcgaaggaaactcgtgctaaagatcacgcacaaggagtattcgtgctgcatagatatgtcataaacatgtacaagtgcttccggtttagtgtctcatttctcattttcgaagtatgtcgaaataattattatgatggacaaagacaaaaaaggaatggacaaaaagatttgttttggaggagctgaggatcgaactcagtacctcgtcaagtcctactgtattcgacagtgcaaatgacgcgctctaccaagtgagctacacccccgatctgatgatagacagctttgtgtttgcattcatatatcagttcaatgaggttaacaaacaccaatggcattgcatactcatgcatttttaggcatatatttcttttttgtatttgccagtgaagtaaaattgggcagaaaatttgtcccttatttgtggaaagggcaaaaaaacccgacttgtaagtgccacactttcccttttggaccttaaacgccggctcagcagcgtcagtcctctcgcgagtgcttcttcgaagtgccataacaaacctgagaacgtcgttgtgcccgactctacatctacatatccggacagaaggtcgcttccggggaatatacaccatggcaggaagagatccgagagaccgtgctccaagagtgcgcaacagagcacccgctgccgtacaggtctgtgcataatcccaagcgggctgcaaacattggctaattgttgcttgtagatcacagcggagcagcttttgagagaggcgcaagaacgacaagaacctgctatccaggcacccaaacagcgtgttcaggatttggaggagctttcagagtttcaggcgaggaaaagaacggagttcgagtcaaggatcagatactcaagggacagcattctcggttagtacatcgctattgcgtctgtggtcgaaagatgctgacatgtgttgaattagcatggaccaaatatgcacaatgggaagccagccagaatgagtatgagcgatcaagatcagtgtttgagcgagcgttggatgttgatcccagatcagtggacctctgggcaagtatccttgctcagtgccgacgtcggacgtatgctgacaataagtgcagattaagtataccgacatggagctgaaagctcgaaacatcaaccacgctaggaatctttttgacagagctatcaccctccttccccgtgttgacgcagtgagtgttattaattggctcttcccgccgtcaattgacaatgcgtagctttggtacaaatatgtctatcttgaagaattgcttctcaatgtttcaggtgctcgtcaaatctttgagaggtggatgcaatgggaacccaacgacaaagcttgggcagagttacatcaagctcgaagaacgttataatgagctggatcgggcttccgccatttacgagcgctggattgcttgccgcccgattcccaagaactgggtgacatgggccaagtttgaagaggacaggggtcagccggacaaggctcgggaggttttccagacagctttagagttcttcggtgatgaagaggagcaggtggaaaaagcccaatcggtatttgctgcgttcgcaaggatggagactagattgaaggaatttgaaagggcgagagtgatttacaaatttgccttagcaagattgcctagatcaaaatctgctagctgtaagtcctcaccgtgacgttttccgcaatgctgactagttcgtagtatatgcccagtataccaaattcgagaagcaacgtgagttggtgaacttgtagcaacaattatactaatcccgattaagatggtgaccgtgctggtgttgagctcactgttcttggcaaacggcgcattcagtacgaggaagaattggcctatgatcctacgaattatgatgcgtggttttctcttgccaggttagaggaagatgcctatcgcgcggacagagaagatggtgaagatgttgagccaatgcgagttcgggaagtgtacgagagagctgtggccaatgtccctcctgcgctggaaaaaagatattggagaagatacatttatcgtatgtgaagtctcgtttcatgctgctccgctaatgttcgtagtgtggttgcaatatgctgcatttgaggagattgacaccaaggactacgacagggcgcgggatgtctataaagcagctgttaaacttgtgccacataaaacgttcacttttgctaaggtaagctgcgtctgctctgggcaaacgaaagaatacttataacatcttcagctctggctggcttacgcttactttgaaattcgtcgacttgacgtctctgcggcccgtaaagttcttggtgctggtatcggcatgtgccccaaaccgaagctctttactggttatatcgaacctggagatgcggctgcgagagtttgatagggttcgaacattgtaccgagaagttcttgactgtgagttgtcttcactgtgtaagcatgtgactggaagctaacatctacgtagtatgacccctccctcagttctgcctggatccaatggactcaagttgaatctgccgtcgaagatttcgaacgtgttcgagcaattttcgaactcgccgtgcaacaatctctggatatgcccgagatcgtctggaaagcgtacattgacttcgaagccggcgagggcgarcgcgaacgtgcgcgtaatttgtacgaacgcttgctcgaacgtacttctcacgtcaaagtctggatttcatacgcactcatggagatcgcgacgcttggtgggggagaggatgaagatggcaatgagattgaaggcgaggctggggacgctgatttggcgaggcaagtgttcgaaagaggttataaggacttgcgagcgaagggtgaaaaggaagatagagccgtgttactcgaatcttggaagagtttcgagcaggagcatggcgacgaggagacgttggccaaggtagaggatatgttgcccacaactcgaaagaggtggaggaaggcagaggacgggagtggagagttggaagaatactgggacttggtattccccgacgatgaaagggaagcgaacccgactagtttcaaattcttccaggctgcccaagcttgggctcaacagcgtgctgggcagggagaagaaggcggtttatcctacgatttgccgtcagattcagaggacgaaaacgaggacggagacgaggacggggacggtagggaagaagagggaatggaccaggattagaccttgcgttgttctttatagtcagatatcataacatgcattacaatggatcataatggtctttgagtatatttgtagatttcacgctctccaaacttgaaaatatcccggtacaaaggtacgtgaccatcgacacagttccacaactcgctctccgtcatcctccatacgtctgtgcacttcaaataccatatttgcactgcctatttgctcgatctgccccatcttctctgctagactgtggagatattgtgcaacagctcctcggctcgagactgaggcagaaggcaatgtgaaattgacgtgcaagatcctgagagaagaaggggaaagtgcagggattgatagcatgatggacggatgtgtggcggtgatgtagagctcttctaagttaggcagcgactctaggatagccgacaaagtctctggtgaggttatcacaagatttataagtgatagcttgctgaggttcccgggaagctgaccctgaaatgtaatccaagtctcgaatggcagtaatggttttgaccccgaaatggtcaggtgtaaagctgacaatgaagggcaatggggtagagcaggaagatcgaagggcgagagagcatgagcagcagaagcagattcccgatggggtatagttatcgataaggaaaaagtgtgtaactgtgggagcggtggtgaagacgtcaggtctaacagattggaatgtgggagtgcatctagagatagctcttgaatgccgggtccaattctatccaacagcgagaagataccctccctggtgacatgagtacatccccagaatgtcaaacgtcggagatttctgagtcgaggagccattactttgagtatagtgtcgtctatcaacgaagagctctatgtatcttgtttagcagccccttgacatcgaaaagatgatgtatacccacttgacaaatgatatctagtcccttgagtcctccttgctctcgttcatcaagagctgtcactaaatctacta

SEQ ID NO: 286 - DNA, 4745 bp, Cryptococcus neoformans
tttcaagcagtcaggtcatattccaggccagtcttccctttccacaaatacatcatcaccatggcttccacaaaatcacttctccgctccactagagcattcccctgcatcacttcttctcatgtcaggtacattgccacctccgttccccgcagagagtcacaatccacaccaggtcagacacctccgtcgagcaagaccacccacttcggtttccgagagatccccgaggaacagaaggagacactcggtgggtatttcatttctacatgtaaacaaacttatcattattactaaatacaaatccctaaacgttcagttggaggggttttcagctcagtcgcatccagttatgaccttatgaatgactccatgtccttgggcattcaccgtctgtggaaggactctttcgtctcatcaatgcttcctcgtttgcctccatctttccatcgcaaccccaatgacccggtgaccgagaaaccagtgttcaagtgtttggatgttgctggtggtacgggtgatatcgcgttaagaatattggaccgggccaaggacaagtttgcctgtcgagatatcgaggtggagattgttgatttgaacgagggcatgttgaacgagggtaggaagagggttgctaaaaccatgtactacaacagtttgtctagttttctcgcacagctgcccacggctgacagaacaatcaagctcctcaaatcaagtttactcacggtaacgctcaacaccttccttcccacattgccgataactccatcgacttgtacaccattgcgtttggtattcgaaattgcacttccctccctgctgtcctcagcgaagcttatcgtgtccttaagcctggaggcaagatcggtgttttggagtttggtaaggttaccaaccctctcttcagagagtaagtttgtgtatgtatgttggtcaagatctgtgctgatggatctataggatctaccgacaatactcttttcagttcattcccgtaatgggcaagattcttgccggtgactctgaatcttaccagtaccttatcgagtccattgagcgatttccttctcagcccgagttcgccaagctgtaagtctcattggtagttgcaactctcaagcataggttaataaccatatcagtgtgcaagaagcaggattcaagactggccagatgagggaaggtcgaggtggtgcttggactgactacaccaacggtattgccaccgtttggacaggtgtcaaggtttaaattgcggagtgtatacctccatatagggctttgtttggtgttcaaacatcatacacaaagcaaaaaatcccatctcgtctctcctcatccacatccagcacaatggcagagcagctcaagcaagtatacgcagacaaaaaggcccaggtaagctccatctcctcatacaactttcgccgctgacaccctgcaggaccaggcgtacgtccacaccgcccgctcacccacctactgacatcccctcagcgcctttgtcacctttttgacagctggtttccctacccgcgatgccacagtgcctctcatgctcgccctagaggcaggcggtgctgacattatcgaactcggtgtcccattcagtgacccagtcgccgacggtccggtcatccaaaaggccaacaacgtacgtcttctttatagtgttataaaacggcctctgacgaacccacaggttgccattgaaaacaatgtccactactctgactgtatcgagtacgtccgacaggctcgtgcccaaggtctcaaggctcccgtcttgttcatgggttcgtaaaactgccttgatagtcgtcttttccaactaacagccattcaccccaggctactacaaccccatcatcgcttatggcgaggaaagagctgtcaaggacgctcgagaggccggtgccaacggctacatcgtcgtcgacttgccccccaccgaagccgtcgactttagaaacacttgtaccaaggccggcatgtcgtacattcccctcgtcgccccttctacgagcatcgatcgagtcaagttcttgacttctatcgccgattctttcatatatgtcgtctccaaggtacgctcgatcccgacaccgtgatagactgagctgacttttgttctttctcgtagatgggcgtcaccggttcctcttcttccgaaaacatctcagcctccctccccgaacttgtcaagcgtatccagacgttcaccacgatccccctcgctgtcggttttggtatcgacaaccgtacccactttgactatgtcacatcttccggtgcggatgctgttgtcgttggatccaaaatcatcaagctcatctttgagcacgccgacgacggtcttgcacccaaggtcgtcgaagactattgccgagaaatcacactcaagggccagaaccctccccctcttggccgaaagaatgctgctgccccgcctcctgccaatggaggtgacgtctctccccccctccccattccctctggctcacctctcggcgagtctcaagtcaaggtcaccgccgccggtaaactcccttctcgattcggtcttttcggtggcgcctatgtcgccgaatcccttgtcgactgtttgaacgagcttgaagctgcgtatgccgaggccaaggaggatcctgcgttctggaaagagtttgaggatatgtttgggtacatcaaccgacctagtgaactttaccttgccgagaggttgaccgaggagatgggcggtgcgaggatctggctcaagagggaagatctcaaccatactggttctcacaagattaacaatgccgttggccaaattctcctcgccaagcgattgggtaagcgaagaattatcgccgagacgggtgccggtcagcacggtgtcgctaccgccaccgtctgcgccaagtttggcatggagtgtgacattttcatgggtgctgaggatgtgaggaggcaagagctgaacgtcttcaggatcaagatgcttggtggtcgagttatccccgttaccgccggttcccagaccttgaaggacgctgtcaacgaggctatgagagattgggtcactcgattggactctactcattatcttatcggctccgctatcggtccccacccgttccccaccatcgtccgtgacttccagagggttatcggtcgagagatcaagtctcagatgcacgaaaagatgggcaagttgcctgatgctgtcgttgcctgtgtcggtggtggctctaatgcgatcggtactttttacgactttatcgaggatccgagtgtaagactggtcggtgtcgaagctggtggtcatggcaagttgttcttttatctttatatatgttactctgctaacaatctctctaggtattgacaccgaggcacactctgctacgctgaccaagggtgtcatgggtgtcgtccacggcgccgcttcttacattatccaatcaaaggaaggccagctcacccccacgcactccatctctgccggtctcgactacaactctgtcggtcccgaacactctcacctcaagtatagcggtcgagcggaatatgtcgtggcggacgatttgcagtgtctcaaggcgttcaagatgtgtaccgaattggagggtattattcccgctttggagagcagtcatggtttgtggggcggtatgcagttggccaagagtttgcccaaggataaggatatcgtcatgtgagtgcttttttgcaatttgcacttttgcacttgtaaaaagttgcagtggtttggacgcgactgacatttatggtatgaaatcagctgtttgagtggaaacggtgccaaagacgttgcagaggtgttgttgacgttgaagaacaaggagtgggcggacaagcttgattggcacgttgcgcagtagagctgcatgtagtatacgctatcgtagatattctcaaaatgggggcattcagtatgcatttgtgcagtgttcttctaccggcgaatggccgaggggggacaatcgccggcaaaataaatacgtcattttggcagcagcgcttttacgctttttacgctttctggaatgcaggggttcttggtattctcatcccctcgttgggtcctctctttccatttcctctgagcgttctgcaatatttttatctctcaacttgttcaagacatggcgcagtcagtggttacagaagaatgggtccttgggccggagggtactccgttctacaccaaacgcgtgcgcatattgtttccgatatcgcccaccttttttcccttggtagaaaaacagctgatctcttatgccctttctatacagtggtccccaagcaccggcgagatcaaagcctatattctctttgttcacggcttttctgaacatattggtcggtatgatgcatttttcaaccttcttgcgtctttggccaatcttcacattaccgcatacgaccaacgaggacacggtcggacatcgcaagcgcctctatcatcgtccagccccgaggtgaaaaaatggaaagcggaggggaaaatggtgaaagttgaaaagaatgggaagcggagaacgggtgggtggggtaaagtgtttggagacatggaatggtttttgaagggggagaacgtgagggctggggggaaacccctgtttttatggggtttcagtatggtgagtaattcagagggatgtggggattgcggtggttatggatgctgataaaggaggagggaatcagggaggtggacaagcacttgcttt

SEQ ID NO: 287 - DNA, 4072 bp, Cryptococcus neoformans
tgttgtaggatgttaggttgctatttgtgaggtggcgaaatagagaacgagttctcagcaacggtaacagaggatggcctttcgttcgttctttcgttgtaaaacacttaactgctactatactctgactgctgtaatgaacgcaagtgataaaactgctttgtcggcaaaattcctgcctcagaagttatgacgtggaagataatgggagaatttagtcccgagtagcccgaataaaagacgtcgtgctcgagcaagaagtaattaataatagcaactggccgcgcgactcgcacttttcctttttcttgcactgtctcggcttctttttctacttctcttcaacttacgactactggcacatatcatgtctgtccggaatatcagagaagccgaaggtctcctcatggaggtccatgacccctctaagggcccagtgtacgtcgttgaattgaaaggctacagatttcaagagctcgagctgacttacctcgagcctcccaaaggacggacaaagaaacgtccttatcacttctgcgttaccttgtaagtcacttttacacgtccttggtatactggagggtggagaaatgtgaatgacctggcgggtactagatgtgaacaacgtaccacaccttggcaacatcatcgggtgagcggccatccagttgcaaaccatgcaagtactggttgcttatcgttacagctctactctttccgcggacgtttttgcgagatacaatcggacactcaacgtaccgaccctttatgtgagcttgcgcctctgtcatgtcatccacagcatatctaatatgtattgtagatttgcggaaccgacgagtatggaaccgctacggagacgaaggtatagctttgaatctttaatatctctatctccctaacaacatcaggccttagaagaaggtgtcaccccatacgaactctgtaccaaattccacaaattgcatacagagatttacgagtacgagtctcctcgtgattattagtgcgtcactgatgatctatgctgtaggtggttccagatcagcttcgacaaatgggggcgtacttcgtctccggaacatactgagatcacccagggaatttacagacgtctccatgataacggccttttccgtctggaaaccaccgaccagacttattgtgtagatgacaagctctttttggctgatcgctttgtggaaggcatctgtcccaactgcggctatgatgtgagcaaacatatcaaatacatcacatttggatagaatgttaatcaagcgcaggatgcccgaggtgaccagtgtgacaagtgctcgctcaccttttcatcccytactcaactccttaaccctcgctgcaaacgcaacaaggcacacaccctctctgttcgaccctctactcatgcctgctatcgtttagacctgctccagcctcggctggttgagtggatgcaaaaagcccgtgtcaagggaaagtggggaacaaatgcggtcatcactgaaaagggtgagattgtggagccgaggatgctaggagaaggtttaaggcctagtgccgtgacgagagatctgaaatggggtgttgaagttccgaaagtcggagacgaagaggaggataaggccatggaaggcaaggtaatctgtaagatcattatcctcgtttgttgccatttgcttactcgcagtagacgtttggttcgatgctcctatcggctatccttcgatcacagcaacctataccgaagaatgggaaaaatggtggaagaatcctgacaatgtagagctctatcaattcatgggcaaagacagtcagttcattgatggatagtgactcaataacgctgacagcgtatagacgtctacttccataccgttctctttccggctatgctgcttggtaccgaagaacgctggaccatgcttcataacatctccagcactcagtatctgaattatgaggatacaaagttcagcaagagtaggaacgttggtgtgttcggcaacaatgctcgagagacaggacagcctcctgagatttggaggtattatctcatctctcaacgaccggagaacagcgactcctcctttttgtggtccaaattcattgccgctaacaacaatgagcttttggccaatctgggcaactttgtcaaccgagtgagtctgttatggcaaaaaagagagacttttactgaattaatgtcaataggtggtcaaattcatcaacgcgaaactcgattctaaggtacccggtccggaagatttcgccggtggcgaagttgctccccctgctgattctctagacgttgattttgtgactgatgtcaacacccgcctcaaagagtaccgcgagcaaatggatgacactaawcttcgcggtggtcttgcaacggcaatggctctttctgctsgtggtaaccaataccttcaagaaaattctttggacaatgcccttctcgcaagcaaccccaagcgatgtgccgaggttttgctcaatgctgtaaacctcatttatgtcctgagcgtggtgttccacccctttatgccaaacacatctgaaggtatcttgcggcaactcaacgctcctgcccgatccctgcccactaaattctctattgatattcttcccggacatgttttgggtaaagccgaatatttatttaagaagatcgataacgtcaatggagagcaggagaagaaatggcaaaggcaatacggaggagatgctgtggtagcagatcacgttgcgccaccaggtccaggcggtcaccccgaaggcgggaaagttccgaaagtcaaggataccgacgcagagtccaaaaaggctgcgcacgaagctcgcagagcccaacttgcgaaagaaaaaaaggctgctcaggctgctgctgatgcgaagaagactcctgaggagaaggagttggaggcaaaggtggaggctcaaggcaagaggctagcagcgatcaagaagggattagaagaaggtgacgctgagaaagagatgagcgtcgcgaagagcttgaaaactgagttggctgatttacgaaagaggctgaaaggaactaccatttaaatagtaaatctggatagaatagatataaagatgtcaatatatatgccaatgaaatcattcagtcccgtcgtggtttattctcgatgtttgaagacgagagcatgtgtattggcagtgatatgcgggcatgagaccttctttgtggacagattcctcgattgtttcgcttcttatgatttcataaaatacgatcttatagtgtatgagtaagtaaggtttcatataaaaagattctacacgacgcggttagttcagaggacagcagaggacagacgggcgcattattatattatgtaatgagggattgttatatttattttgacgcgccgacggacatcacaaacgatcaataaatactcatgcgtcagtgccaagcgtagaaatattgaagaactgaagctcctccttccccctttccgtcacttatcctcttgcattccgcacctcgtaattcgagtacatctcgttattcaacatggcctcaacagctcgcgcaaagagcgtgaggaacatcctcatggaggtacgttcgcgcttcctcatcttactccactatgtcgcattggtctcactatcattttcattcatgtagctaaggaaagtttgccaacacccgtatctatctgcaccagaactggaaatattcgatttacccttagaggagcagcatagacagcttctcaacgccagcgggaaactccagtttctgaaattgcttctgccgaagttgattgccagggggcatagaattctactctttagtcaagtaggccggtcattcatggtattcggagacataactcacggaaaatcatagttcaaaatggcactggaccggagtaagtattttggttcaacagaggcttttgcttatcattccggacatggcttgccagtccaagatttcctatatggcgaaaatgttaagcacctgcgccttgacggggatacccagcaagcacaaaggcaaaagtatatggaccaattcaatgcgcctaac

SEQ ID NO: 288 - DNA, 4649 bp, Cryptococcus neoformans
cgttctcaagaactttgccaaatgcatttgcctggcggaaagctcccctcgacccgagaaatccgttcggtagagtgacgtacacgaatcgacaatcaaaagcgaaaacctgcaagtctcgtcagcgtctctccgtaagcagccgcgacatacctagactcggccatcatggcactcgcttgcaccagcaactgcaactgatgatccgcattgtacgccctggcgtaggcgatattgtcgagcacctcttccccatcaagaccgtaccgttcggcgacagcaagcatacggacaggtcggaacgtgccttcggtatcgatgtaaagacattttccctcaccaccgcccatcgacacggggagctggaggaatcgtcagctgttgggtgcgagcacggttccaggctgagcttacttgacaagtaacggcaagcgtatgacagagctgagatttaccagtcctgaattcacctgtactcgtattagcaatcggcgatgcaacaagtgagcgcaaagacttgccgtaaagctcggtgatggcacccgtctcgatcccgccgcccaagatggtatctaacccagtcgaaccagtcgtgatatgcaccaactctgaccgtcttgaatggatctctgtagccgtcgtaaatcccataggcaccatcttacacgctaacgtcgaagcgaatcagccttggtccccgattttctttaataccccaccttcagcaagaatcttgtccgccttttgctcgctaatgcccttgatagtgcatagcgtcttcttgggagtgaacgctacggcctcgacagtgtggaaaccggcatctgcaagtttcttggtgtcttgcgcagagatacccgcttcctgatggccaaagaagaaaaagagtttagggacaatgactgaagctggcggcgacctacctggagcttggccaccagcataggcgccagagattcaaagtcttcctcctcggcctcttccccgtgctggttgacgaatgggtcctgctcctgctctcttgacatttcgtttgtgtctgctgcaaatgtagaggaaggaagaatgtaaaagcaggcggccaacaagacatgcgcggtggcggcggttgactggactttgcgtgtgcagcccgtctcacgcgacgcgttgtttacgtaagcgacgatggcggtggaggggtggatgttgaaaagttgttcttgtggaaacgcaagcgacgagccggccagcgcagagacacgatgagcgggcttccctccctcaatgcgggcatcaccgccgcctggaacacgagcgccccgccccagaagaagcggacacggcgggcgatccccctcaacgacctgcccgccccggcgtcccccctcgacgactcccccgccccagcgacccccgccgcccccccgaggaggaagagaccgcgggccgccccgtctgtgatcgccgcaaagtacgcgccgcccgacctcgacctcggcgcactcggcgggctccagccgcagatcacccagctgctcgaaatcgccgccctcgccctcttccaccccgagatctacctccacaccggcgtcccccggccgaagggcgtcctgctccacggcgtgcccggcggcggcaagacgcagctcgtgagatgcctagcgggcgtgagtctccccatgccggcgccgcgcacagagacgctgaccgcacagtgcaggagctgaagctgcccttcatctccgtgtccgcaccctccatagtgtccggcatgtcgggcgagtcggaaaagactctgcgagacacctttgacgaagccaaggtatgcagaatgcgttccctgtccggcgctgctgacgcgcccacgcagaaagtcgcgccatgtatcctcttcctggacgaagtcgacgccatcacgcccaaacgtgaaaacgcccaacgggaaatggagcgccgtatcgtggctcagctcctgacatgtatggacgatctcgcggcgagcgaagagcccgtcatcatcatcggcgcgacgaaccggcctgattctctggatcccgcgctgcgacgagcgggcaggtttgaccacgagattgagatgggtgtgccctcgcaagagggtcgagaacagcaagtcttttctttttatatcgtctaattgattggtctgattcaacctacctaggatcctcaaagtactctgctccaagctgcgtctctcgggcgacgtcgatttccgccaactcgcaaaggccaccccaggctacattggcgcagatctgaccgcgctcaccaccgaagcaggtatcattgccgtcaagcgcatctttgatagcggtttcggtatcggtagtggtaccgatacccctcatgacagcgaacaagggaccgtccccgaacccgatggtgcaggtatggaagccatggcgattgacgaccgctatacaccttttgccaacctgcccgacgacgtcaaggagacgcccatcgccaaattcctcatgtcccatccaaccgccttgacttccgaccagctgtccaccatctccctcacccccgccgactttcttgccgcattaaagatcgtccagccttcggccaagcgtgaaggtttcgccaccatccccgacgtcacctggtctgatatcggcgcgctcagtcagacccgagatgaactgcacatggccattgtgcagcctatacggcacccggaactgtttagcgtcgtgggtatcgatgcgccaagtggtgtcctgctttggggaccccctggctgtggtaagacacttttagccaaggcagtcgcgaatgagagtcgagcaaactttatctccgtcaagggcccagagttgctcaacaaggtgggttttttagtttttttctagattataaagccaaggggctgacatctttcaattaaaacagtatgttggcgagagtgaaagggcggtgaggcaagtatttgctcgggcacgatcatcttccccctgtgtcatcttctttgacgagctggacgctctcgtgccccgtcgagacgattctatggcaagtttcatttcttttttcgattcatgccgactacggacttgtcgctaaaaagactttatgctgtatagtctgaatcctcggcaagagtagtcaacacgctccttaccgaactcgacggtcttgatgctcgtaaagccgtctatgtcatcggcgccactaaccgtccggacatgatcgaccccgccatggtccgacccggtcgtctcgacaaactcctctacgtcgacctgccttcaccttccgaacgtttcgaaatcctcaagacccacaccaagaagacgccgatcaacgaggattcatggcaagcgatcaaggaaatcgtcgcttccgacaagtgcgatggcttttccggtgcggacattgcggcgctcgtgagggaagctgccacgctcgcactccgagccgctttggagagtataggcgcattcgaaacaccggcagaggccgagccggaagggatcgagcgaaagacggattccgtcagggtcacagctgaacattttgcccatgcagcacaaaagacgttaccgagtgtctccagggagcagagattaaagtatgagaggatgagggacaagtatgcgggtgtgcctaccagagggagaaggcagcgagaggctgaggctgaagctgcttctgttgctgctgctgccgccgccaagttagcaagtgccggtggagcgggaacggaggccagggtggaaggagaagggatggatgttgatgagatgggcggggcgagaggaggaggtgtgaaagaaaaggcgtttgtcgcttagattttatcgttggttattatagtttactaccctaccgctttgcatttagtctctcgatcctttgtgcatgtgccaggccgatggaaagggtatccatcccgcctccgacttcccacgcatccgtcggggctggcatcatcgatcgttgaaaagtgaatgctcggctgcgccagttgtgagcggtaaaatgtgttcaggagctatgcatgccgtaccgtccctatgcaacccttggtcttccttttggcctgcccgtccatccatacttgtagttgctattatcgccatcgaagccgaaggagtataacctgcccacactaccactttctttcggcgcgatcctttttccgcgcgtcgtgtggttacaccactccctttttccctcgctcaattcaccatatccatatcctctttccatacactccaacaatgagacccaaggtccttgagatcgcgtgagcatccatccctctccaaccccgaccgtaccccgccgagctgaccccgccacgttaacagctggcacgaaacacaggcggtttactcgtgcgatttccagccgctcccgctcccccagttgaaacgtctcttggctgcgtccacaaccagcgagagcgaagaggacagggacaggatcgaaaagggcagctcttcggcagctactgcagctggaggaaggcagtacaggctggcaactgccggtggtgattccaaagtgcgggtacgtcttccatccttcttcccccctccgactggttttgggacaactcaccaaaggtaataaccgctgggcacgtgtagatatggatggtttaccccaatatcccttccatccccccgtcc

SEQ ID NO: 289 - DNA, 4733 bp, Cryptococcus neoformans
ccagagcactgtcattttgaggggtagtggcggattcggtggaaaaaagaacggtaaaggtgggtgggctatggggtaattgccttgttatttttgctgatgatttcccatttcaagatcgtggtgctgccacagctcttaatgtcccacctaagaggaaacccgacgccgttatggaagaaaaaaccacactagaccaagctgccatatatcgcttgtccggcgattacaaccctcttcacattgaccctgactttgcaagtatgggtggcttccccaagcctagtaagctcagcatgtcttatcgggatgattatcttaacttattcatttccagttcttcacggtctttgttccatgggcatcgctggcaagcatgtccttaagacgtttgggtcatactcagatatcaaagttagattcgccggtaccgtcatacctggtgagaccctcgttaccgagatgtggaaagaggggaacaaagtcattttctgtaggtcttaaagaagtacggaaagcttcaagtattcctgctaataaggaacgcagctgccaaagttaaagaacgggatgcgcctgctttaagcaatgctgctgttactctcataggggcagagggggctgtgaaggcgaagttgtaaagcatttatgcgcctttaagaatcaggttgtttttttgaatttttgtagcttcgattgtgtcccgacaaatgccttgaatttgattgaagaatgaagtgaagagcgcagaatgtaaatgtttctacaaattattacgtattgagcctagcaactgatatctggtggcaaaaagtcacgtgatctgaggatgtagcagttggcaatttgccgaggtttcgcagtgggccgacccgtcttgcttctttgactcttttcttccattccctgtccgctatccccttttgctccctctagatcctccttcacctagcgacggctctgattggaaaccgctatcctatcaggtacacgacattgtatgctctttggctcggtatctacccggtccatcacctctcacttcaagttcgcccctcgcctcctttcaaaaacctctttcactgtttctgcccagtcatcatcaaagaaaatgggtgtcaacgataagcctaccattcccactaccgcccctcacgcttggccttcccctgaggattggcctgctgccaaagtgaggcagacgtttatcgattattttgtcaaccaacctggattcgagcacactttctggccctccagtggtgtcgttccttttgacgatgacacgcttcttttcgccaatgctgtgagtgtaactttaaaatagatagcgccagttgccagatccctcttcatatccatgttctgatatacttttatctatagggtatgaaccagtacaagcctctcttcctggggaccgcagaccccaagtctgaactttccaaactcatccgtgccgctaacagtcagaaatgtatccgtgcgggtggaaaacacaacggttggtttatctcgactcgatttagagccgtcctttgggtttatcgccagagagatgctgataggacacgccacatagaccttgacgacgtaggaaaggacacttaccaccatactttctttgaaatgcttggaaactggtcattcggcgattatttcaaggtatgtattactgaatctgcccggcataggtctttatgattgagtggcgattcaggttggagctttgaccatggcctgggaccttcttactcgagtctacggattgcctaaggacaggctctatgtgacctacttcgagggcgatgccaagcaaggccttgaacccgactctgaggcccagttagttgctcttttttctctcttcatttcatgactcacaattcgtttttaggcaaatttggagagatcttggcgtgccagagagccacattcttcctggcaacgcaaaggacaacttctggggtaagtgtgacaattcatggatttcgtggcgtctttctgacgagacatagaaatgggcgctactggtccttgcggcccttgcaggtgcgtataattagcttccgttgaaatgagcgttagcttactaggatttacagtgaaatccattttgaccgaatcggtggccgagacgccgctcaccttgtcaacgccgatgaccccaatgtccttgagatctggaacaacgttttcatccagtacaaccgtgagccctcgggtgaattgcgaacacttcctgccaagcacgtagacactggaatgggtttcgaacgacttgtttccgtactccacaacgtctctttcaactacgatacagacgttttcactcccatattttccaagattcaggagcttactggcgcacgaccttatgaaggcaaacttggtgacgaagataaagacggtatcgacactgcctatagagtcatcgcggatcacatcagaactttgactattgccatctccgatggcggtattcctgataaggacggcagaggatatgtccttcgacgcgtgttgcgaagaggtgtgcgttatgccagcaacaaatttggtgtcaagattggtactttcttctcctctctcgtacccactgttgtcgaatctcttgtaagtgtcggatatcacttcattaagcgcattcactcatgcatactgtgtagggtcccatcttccctgaagttactaagaagattcccgagctcaccgagatcctcaatgaagaggaagcctctttcgctcgcacgctcaacagaggtgaagctcttttcaataagtacgccaccactgccattgacgagaagcgaactgttctttctggaaaggacatctggcgactgtacgacacctacggattccctgtcgatcttacgcagatcatggccgaagagaggggattgaagattgaccaggaagcctttgagaaagccaggctcgaatctctggaagcgagcaaggccggtggcaaggaaaaggctggtgccctagtcaagctcgatgtgcacgacttggccgctttggaggctaacgacgcggtgcccaagactgatgattctttcaaatatcgtacgtattatatggtcatcttactcatggcttttactgaccagcctgtttagatttggatgacatcaaggctaatgtcaagagcatttaccatggctccaagttcctcaactccacttctgagcttcctcccaatactacattcggtatcctgctcgaccgaaccaatttctatgctgagtcaggtggtcaagagtatgacactggtgtgattgctatcgatggcaaggccgagttcaaggtggaggatgttcaagtttacaatggttatgtgttgcacattggacggatggaggagggtgatatcgagatcggagacgaagtaatctgcacgtacgacgagcttcgtcgatggcctatccggaataaccacacaggcacccatatcctcaactttgcccttcgagaagtccttggcgaccacattgaccagaagggctccctcgttgctcctaccaaacttcgatttgacttttctcacggcaaatctattgcggtcccggaattgatcaaaattgagggcatctgcaatgactggatcaagagaggtgtcccagtatatgctaaggatatgcctctggccgaagcttacaaaatccctggtcttagagtagtaaaacctttttcctcactatttgaagtaacaacgcagcatatgtagcccgctgcagaagtgctagggttaacagatgggaatggtgactcgtcatctccttaatcctccgttctctcccgggagccaagaaaagagcgactacgagtaactatttctatgctgtatctattctatcttcctacttatgctttcgtcctatgaaatggcacacgtacgcgccgcaggctatacgcgatagaatcacggcaacaattttaccttacattttttcaacactctaattacgagctaacaaggttcgtaatagatgatggctcgatcccccatcatgacacttctgcagcagatagatagcagccctctgttgccttagttttgggaagttttaggtgcttattcataacatatctattcccacgtataatgaggatgggtgcatcagcagacataattgaatgggtaaagctaattataattagtcgcccgacgataagtggaagagagcagagagagggcttaaaaaaggagtagtgatagaaggaggtggtcaggtcaaacgtaataatgtcggatgtcatgatgaaggcagcccaaggagacggtgataagtgctgaagcgcgaaaggatgaagtcggatcaggtcgcttgccttctggagtgaagatttacattttgctcttcctacatcgcgcgattgcgatacaatcattgcacgcggtcttcaatcaacaacgtcgtactgtagacggaacgcaccagggcttttgaaggtaggaaaaaagaatggcaagaggaaaatgcaaatgcttatttaatgcttgatgtagaactgagcagaactatgggtcttcatacacgtagattaacaacaagctgtaagaagaagaatagtgcgtcgtacgaagttgaaacttcacaaaggcacaattgatttctcatattccacattttcttcctcttggtgtcgtttcacatggattcagggatcaaaagttcaggaacatactattgtgccgcatataatccaggaacgaggaaccaaaa

SEQ ID NO: 290 - DNA, 4796 bp, Cryptococcus neoformans
tcgtccatgtcacaaatagtgtagccttctgtttaactttttgcaaatgtcgtagatgccttcacacaccttgccatacgcaggattccatctgcttcttcctcgaggataagaaaacaggccaaagaggtgtattcactgggtaggttccgatggaagcagctgttcatgcttatgacttaccagataacagagacactctattccttgctggatgcggtcgattttttgaaggtacgatgtgctgtccaatgtccatcacctgtctgtgcattcaggaagttaactaaagtctgaaggtacccccgaggagatgcatgccgccctcaccaaactctctaaccttcctgaagatacgatcgtgtacaacggtcacgaatataccaaagggtcggccaaattcggcctcacgattgagccagataaccagcacctcaaggagtgagtctgaccaactgtacatctacattatagcgacatgtcattcatccgaacatagacttctcaagaaggccgaaaatgactcgtgcaccaccggcaagtcaacaatcggcgatgaaaagaactggaacgtgtttatgagactcgacactcctcaggctaagtgcgtagtatgccaggcggaagagatggtcatcgaactttcgtgtataatgctgactggactgcccgtcacagacaagccactgggaagactgaagctgtagaaataatgggccgcttgagggagatgaagaatgctatgtgaaacaataagttactagacacgacaacagggacgaaacgatgtcaaagtgtaaattatgcgatatgtttatgcatggtgtcgcaagtgtaacttaataggtagggacaagtggagtcggagcctgatgaataagttataagtacgggtatatttgtacagatagtcgtaaccaactgcccgacgcccggcgcccgaggacatcgcgatgaagtggaggaacatttcaggtgggacgataattgccgacgtgggatgccaacaataaccaacacattcatttctttcccacctttcaccgatacattcatggcccagtacacacccccagcaactgacctcacagcatggaggctcaaggtatccgaagactcgcatggccaacagaagtgggtgtacctctctgatcctgcgcagaggaaggaatggccccagatgaacattgaaaagtactggcttggcttggatgtggtgcgtcttattttcatatcctccatcccggaatcgcaagctgacaacaccatataggaggtgcccgagttagaagaaccaaagacaccccttgacgcggcacgtaacggctacaggttctacaaggagcttcaaagcgaggatggtcatttctctacagagtatggaggttagttcaaatgttattgaatatccactatgtactgacacccgacaaaggtccactattcctcatacctgggttgatcatcgccctctacgttactggccagtcattgcgccacgaacaagccattgagatgcgccgctatttatttaacaaaaggagaaaggaaggtggctggggattgtgagcttttgattgagtttcggattgaaaatgagactaatataatatgacaggcatactgctgcaccgcccaccgtatatggaaccgtgatgaactatgtcgcgctgcgaatgctgggtatgggccctgatgaaggaccgatgacggagatccgatcgttaatacataagatgggcgagttgctaccattcacactgcctggcctgcggctgattatctattaggaggggcaaccggcattcctacgtggggcaaggtctggttgagtattttgggagcgtacgagtgggacggcgtggggtcggtgcctcccgagttatggttgctgcctgattgggcaccattcgctccttggagatgggtaagtgtggcttgcaaagacatcacgggacactaacgagcaaacggtgcgcagtggattcatgttcgacaggtttgtgagtgcctgtgcacaacaagtatttgtggctgaatgtattttagtcacccctatgagcttcctgtatggtactcggtttgttggtccctttactcctcttgttttcagtcttcgtcaggtgcactcattttgcaacttttcatgagtggagctcagcttactacaatgctcaggaactctatgtcgagccgtatgagaccatcaactggccatctcaacgatccaacatatcatcttatgatatttactctcctcatcaccccatccttgacatggctcatcagctcctggcggtttatgaaaaactaccacatgtacccattctctcttctaggctccccctacgcaaagtcgctctggacaaggtttatcgaatgatcacttatgaagacgagaacacaacctaccagactgttggtccggtctcaaaagcctttcacatcgtttgtcgctttgcccgtgaaggtcccaacagtgaggcgtttaaatcccacctttccaggattgacgactttttgtggctaagcaagagtggtctgatgatgatgggcaccaatggttcacagatgtgggatacgggatttatggctcaggccgccgtggaaactgggttagcagaggagtccgagttcaaagaaagtgtaaaggggatgctggactggttggacaaggcgcagatgagagagaatccaaagtggtacaaagagggttatcgacaccgcaccaagggtgcttggccattctccactcccgagcaaagttatacagtcagcgactgtacagctgagggactcaaggctgtgctggcccttcagcacctggattatacgccaaagcctgtcgggctggataggatgcgtgacgcggttgacactctgttatcgatgcagaacaaaagcggtggttttgcaagctatgagttgaccagaggcagtaccaagttggagtggttaaatgcagctgaagtcttcggtgagtaggcaaatgtgataaacgaacgaacaactcccatgtacgggtgctaacaatgctataggagacatcatgatagattatacgtacccggagtaagttcatttgtccttggtgccttcctcccgtcagacatgtctaattgcttttaggtgcacgacctctgtattatcggccttgaaatacttttctaaagttgatacagagtatcgagcagcggatattgagtaaatgagtttgcttcgcatatgtatgatgcgctgactagctcctacagacttacgatacgcagagccattcaatacattcacgatatccaacgtcccgacggttcgtggtatggttcatggtaagatataaacactggtggtgggtatggtattaatgcatgactataaataggggtatttgtttcacctatgccactatgtttgcacttgaatcccttggcatagcgggtgagacctgcgccaactcggacaaggtgagacgagcttgtgactttttggttggacaccagatggaagatggtggatggggtgaaacttacatggtgagttgttccaatttgtctgtcggcatccggttgagtatcgcgcagtcgtgcgtaactggcaaatacgcccaacatgaccagtcccaggtggtccaaacggcatgggccattcttgctctcatctatggacaatatcgcgacaaaactgttattgaacgcgctgcgaaacttataatgagccgacaattgaaggatggtagatgggaacaggaggataccgagggtatattcaacaagaactgtgccatagattatcctggtgagctgacaagaaatcccacttggcattggggcttatccgattatgtagcgttcaaattcgtgttctgtatctgggcgttggggagggcggacaaatatttgaggtcatagagattgaggatggcaggggggagtataagatgtcattctgtccgtatgtatgaaaccagccttatagagtagtttgcacggaggattattgagggacaaattgaagagtgattgttattaaatggaaggaaaataaggaataaccggggccaggcacgtcgaaactacctgtacccgactcaatccgataaccccgatttctaatgagcagggtcaaacgattacaaatttcacaatggctttctaatcccaattaggacaggggcggaacgccggatggaagaaaaaagtcggcgtggtcaccttgttagaacactttcttggccctcgtcccatctcctcttttcccaaaaaaacatctatacttgcaaccggctcacctctccagccctcacattgagatcactcctgctctccagtacctcaaggcgactctccacaaaacacgctcctggaatccctagcttccgagtgctctacaaacaagacctagcaaaaaaacatatcacaacagaccttcaactaaaatggctgtcgaatcagtccccgtgcagccgcaggccgtatctcctactgagatgcacattgagaaggacgctctcaagtcagcctctgccgccgtagaggagaaaaaagaggatgaggtcgaagctttgcaggagcaagttgaagctgtcaacttggggaatgtggatgatttgcacgctgcttgtgttgagggtaaacttcaagacgttagggcattgctgagcaaggggactgaccgattagagactcttggtgagtgccatgattgcctactgtcagcccacggtgtatggcaagggtgttttgcttgggtagaaaagttaatgtatgctctgtagacgtcaactctgggtgtactcctat

SEQ ID NO: 291 - DNA, 4780 bp, Cryptococcus neoformans
gagaagaaaacgtggaagtcacttgacgaactggacgccggtgtatgtgatggcatgacgtacaaggagattgagcaaaagtatccagaggattatgagagtcgagatgacgacaagttcaactatagatatcgtggtggagagtcatatcgtgatgtcgtggttcgtcttgagcccgtcatcatggaacttgagaggcaaaacaatattttgattattgctcatcaagccatccttcgatgtctatatgcctattttcttgtttcagtgccccaaccaagaactgccatacattaataaaggtcgtgtgtctatgtttccttgaatacatctgctgacagtatgcctagatccccctgcatacccttatcaaaatcactcctcaagcttatggctgtcaggaagaacgctatcctctccctatcgctgcagtagacacccaccgaccccgtccgtccaaggggagaaatactgccggtatttcagtcgccgaagggacttctatggccgatcaacctgtcaagagagattattatggagacacccaacaaggtgtcgggtatggcttgaagcccgaggcgatttcacaggctttggagaacgagatggagcaaggaaagttgacaccaagggctgcagggggtgcgcaattacatcacgagtgatgaatcttaatggaagctgtaagcgtagaattagatgtagcaagaagcccagaaatgaaatgcaaggcatgtaatataatggagtctttccaccttcgatgtatgctctggtcgcgtaacgcgtacagatcgggaccacgcagaagaatttcccggttatttataaattgttggcggacggtaacttatcaagcggcgacgaccgccagttgaaaaattatggtccacccctattgtccatcgaccacggacgggattgttgattctttgactcttgacttggtttctgttttatcgatcttcttctcgtctatcatttcaagagtacgagcaagatgcccaagccgaagacagcgaggggtatcctcctcacttccaacttgccacagttgcagaaccttatcaaggtgtgtctccgtttattaagaagcttccttcaagatgccggcttacaagtttcgcagcgtgatcctgagggttataaggaagagtttcttacccaatacaatcactacctttccctccttcgtcttcattccgtcgcatcttctactccttcttcctcgaatgacaaatccaatgagctcttcgcagacttgatcacattcatttctcaagtggcgcagtgttatccggaggcgaccaaagatctgcccatgcaattgagcggcttgttgctgggtggggaaagtggtacctctaatgttgttacgggcgatctgcgaaagacagcggtcaaaaacttggtgatgttgaggaataaggaaatcatcgattctatccagtatgtgtagccctcaagtgaacctgtaaagatgtgctaaacatgttgcagacttcttcagactctcctcccccttcttcccacagtcccatcgactctccgttccatcatccgccacaccatcctcactgacattaaaacctccaacgctaagacgaagaaccaccgtctgaaccgcgttgttcagtccctcttgtttggcatggtcgaaagcggtatgggtgccgaagtagttggtgacaaaggaaggaacaagggcaagggacgagagaagggtggtgaggccatgtgggctgtcatgatggtcaaggagttatggaggaagggcgtctggacagatgccaagacagtatcgatcgtctcccttgctgcgttccaccccaacaccaaggttcagtccgccgctcttcatttcttcctcgggtcagagaatgaggacgaggatgattcagaagatgaggatgaagtgggagaggccagaagggatgtgagaaagatggagcacaggatggaggtttcgcgaggaaagagaaagaaggagaagcaggttaagcagttgaaaagagaggcttccaaggtaagctattggattatattcaccgtttttacaatggctaacgttactgtgcagaaacgtaagaagagggctgaaggtgcgggtgtcactcccaacttccccgctctggagcttttgcaggaccctcaaacctttggcgaaaagctctatgacaacctccacagacatggtacgtgcttttcctcatctcgaatagatgttggcttactctcctttagataaaatctattctctcgaccacaaagttctcatcatgcagctcctctcccgtgtcatgggtgtccacaagctctgtgttcttggcttttacagctacattatcaagtacctcacctatcatcagcttcaagtcactcttattctcgtctccctcgctcaatctgtacacgatcttaccccacccgacgtcctcacgcctgttatccgcaaactagcgcaagaatttgttcaccccggtgtcggcgctgaagtcatcgctgctggtttaaacgcgatcagagaagtctgtcgaaggcagccgtggtgtatggaggaagacttattgggtgatttaattgagtacaggaagagtaaagataagggagttgtgactgcctcaagaggtttgttgcagctcttcagggaagtgaatcccggtatgctcaagaggcgagaaagggtgtgtcttatccttaacataataagcaagatggctagctaacagtgtcaaatagggtaaagccgccagcatgggtctcattggttcccaagtccttgcctacggtcattctgccgatgccgccgagggtatcgaaggtctcgagttgctcgaagaacactacgccaaactccgtaaggaagccaatggcgatgtcggtgacggatccgatgttgagatggatgtcggcgaggatgatgatgaagggtgggaaggctgggaggccgagtctgattccgaagctgattcaaatggatgggaaagcgttagtagtggaggagaagatttggagatcagtgatagtgaagatgagtcagacaagaggagggataagaaagataagcgggagaagaagaggttggctaggggtaaagggaaggccaaggctgaggatggagaaactgatgaggatgaagagatggacgatgcggtctctgtggcggccaccgaagctaccgaggcgtctcaaaccaccaaaaagctgtccttactcgctcagcaaagggtgcgtttgtttgacgtctatgctaaaacttatactgatcctcctttacatagattcttacacctgcagactttgagcttcttaacgaactccgtctcaaggcggccaaagagctcgctgctgccggcggtggctccgctgccaagcgcaagcttgctgctttggaagcctccaagcgacatgttggcgaagacgaagcggaccgattccttaccgaggctgagattctgggaccgagaaagaaggccaaggcgacttgggaggagaggatggagagtattcaaaagggacgagaaggcagagagaagtttggtagtatgaagggcaagaagaagaaggcggcccctagcagttctacaaacaaggaaaaagccaagaacaagcctatcatgatggctttgcagtgagtataattgatgatctgggctttgattgttgaactgacagcatgatagctccaacagggttgtttccaagaagaaagcttccttgcgagacaagcaaatcaggcttcgtgcggctatcgaaaagcgcaagaaacaaaagcattagtttctggcatctctttttggtgttttcatatatttctatccgctgtggcatgcattacctgtacgaacgtgtctagttctttttcaaagatgggatcatcgtctcataatgctcaactgtttgctgcagctcactggccctttctcgcaaactatcaatagcacctttggacatgccaccgttctccgcgttaatgatgatagactgaatagcgctaaagttgtcagaagcttctttccaggcattgtagtcgtccccgggtgtggattcagtagtaggctggctccgacgagagccgtccaaagagatgagttctgtgccttgggttgagcgatctgtgtcttgggacatagctatgctttgatggcgggtgtggggagggctattgcatagctgctgtctggttttatatgcatcaatccattatggcggagtgcaacatctttcgaagtcgtcgagagaaaggatgttgtggcatttgttgtttacgtgtggaattgcccgaaatggcaagaaccgatgttccctggcggcgcgctacatcagcagatccgggtcctcctatatctcctgttattattgctacaccaggaaggaaggaagaacgcgcaggaaggaagaaagaacgaacgagagaaagaaagaggcagcagaagaaatgcccacaactcacacagagccttccaccgaggcacccgccatgagtccacaaaacacaacccccggacccgcacacacaacatccatcgaccacaacaccgcgacagcaaccgacactcaacaaccatccaccggcttgcaaccttccatcctgccccctgtagctactccaacgacacagcatccagtttctgctgcagaaatgaccaaggacggaggtgcaactgccgcccagccttccacggctcagacaactctgcctgaatctggtacaacatctacagccatcaagtctacggaaggagagacaggcaaaggtactcccctggagaacttgtct

SEQ ID NO: 292 - DNA, 4636 bp, Cryptococcus neoformans
ttccctttgcctgctcttcaccagcatcaccagtcacatttgcacccatcgccgcaaccctattcaagacagcccgatgagaggcatccgccgcctgtgcaagagtttcggcatccccaacccatgaagtcgcgccacttccttcaacgcccggcctccaaaatctaccttcggcccccgaaggaaccacggcacccacaagagaatcatagcttacgtcgccatcgccctcctgctggctgacattttccaaggcgtcctttatggcttggatctgcgagtcactcccaccatgttcgctcattcgacctggtgtcccgggcgcgtgaagaggtgggcgagagatacgtccatatcgggtttgctgcactggcgtggcaggaggctgtccgcccgacgagccagagagaagttgagtgtacaagctcacttggcgatgaccttttttcgcattgtattctgcgatcagactgacgacggcggggttggccaacaggcttgagatggtctctacggggttcgatgtgtctcccgattcattctgcattgcatcaaggcgaaaaatgtcagcgtcaggatgcgatgggaagtggtgacgtcgtcgagagacctacgtgtaaggcaggatcgatcatgtccattgcgatgttatcaggctgctgtcggcggttctttccagcagagacagatgacgcagcggctacgagggcgtctagcccgcccatggtagggtcatttgtgttatccatgttttggtagagagtatagtggttgtttggtggaaagagtaaaatgggaaatgtgatgacgaaaatgacaatccaggtgcagcgggattatttttttgtttgttttttaaattttatggcaggcagcattcgagagtggaggttcaaggtttttacaatggaagaagtctggagattctattaacgcagcaaaaaaccggtcaagatggcaccccaaccgctcaagggtgggaacttcaaaactgtccaagatggtcaaatcagccccaaaaaccgctggaaagtcaaagaagcgagcagtagagcaggtgtcagaagagagcgacgaagaatttggggaccaagggagtggaattgatatgagtgatgatgaggaagaggttgatggagacgatgaggaggatgaagatgaagcttttcctgaattcgacagcgaggcttgaggataatgatcaagaagaagccagtgatgaggagcaagatgaacaggatacgttctgacgaaagtgaaatcgtggaggaggacagtgactctgagtcaggttacaacacgtctgacatcgagcgaatgtacgcttctgatgatgatctctcgtccgaagagaacaaagacctccctgtcgacgagaagctctcgagacttatcgccaagaacactgtcaagcccgacgactctattggcacagatgacaaaatcagtcgtgcaaaggaaggggtagggagattggtgcccagcaaacacgtgaagggatcatttgtgcgagagtacgacgaatatgaggccggatatggcagtgaaagtagcaccgaggatgtgagttacatctcgctcgacaagacccagctgacaatagcagaaccccaatactgtcggtaacattccgatggagtggtacgatgaccttcctcatatcggttacgatgtcaacggtcgcaagatcttccggcctttgcaaggcgacgaacttgacaagttccttgccaatgtcgaggatccgtccgcttggacctctgccgaagacaaacttcttcaacaaaatgttcagttgtcagacaaggagctcgatatcattaggcgattggagagggccgaaaaccctgatgccgactttgacccctatcaacctactattgaatggtttaccggcgaaggcaaggagagagtcatgccgcttagtgcggcgcctgagcccaagaggagattcgtgccttccaaatgggagcataagaaggtgaattcactttgaaactgataatatgccaacgctgactcgtttgacagattatgaagatcgtcaaggctatcagagagggccgaatcatccccaacaaaccttccgccgaaaaacctcgcttctatcctatctggtctgacgccgaccagcacaaccctcacgtcatgtatatgcccgcccctcaacttccccctccgaagacggccgaatcctacaatcctcctgaagagtaccttcctaccgaggaagagaaggctgagtgggaggcgatggacaaggaagaccgaaagaccgatttcttgcccgagaagtatgatgcccttagaaaagttcctggctacaagaacttggtgcaagagaagttcgagagatgtcttgatttgtacctcgcccctcgaactcgacgagtcaagctcaacattgacccagactctcttattcctaaacttcccgctcccaaggagctcaaacccttccctatcgcttctactgtccagtaccgtcatcccggagacactcgtgtccgatccgtttccaccagccctgatggtcagtggattgcttctggctcagaagatggtgtggtgcgagtctgggacctgggtaacggtcgtgaagtctggagatgggatttacacgctggtcctattcagtacgttgagtggtcaccttctcgtgaggagtctttgcttgtggctcttgtcgccggtaagatcgctgtgctctctcctcttgctctcgtcgctcctcatattgccgcccaaaccctcacccactccaataccgcttttgctactagttctgcgacgacaaagcaaggtgccggtaacgaagttaaaggaattgagtctgtcaaatggacgagaccgagtgagagggaaagagaaaggggtgtcttggtgtatgtggaagttcctggtactcctaaacaagttacatggcacaggaagggggactactttgccacggttgcatccgacggttagttcaatgtcgtaaaatggtacactactaatacaaaatagccgctaacaaatccgtccttatccaccaactctcccgccacggcagtcaatcccccttccgtaagactcccggcacaatccagcgcgttgcattccatccttctaagcctcatttctttgctgccactcaacgttacatccgtctttacgaccttgctgctcaaaagctcattagaactttacagtctggtgtcaaatggatttcatccatggatgtgcactccggaggtgacaatttaattatcggtagttacgataagaaattagcttggttcgacatggatttgagcgcaaagccttataaaaccttaaggtgggtctattcagtttctttttgtggcaatgttgacagaagatcacagataccacaaccgtgctcttcgatccgttgcctatcaccctactctccctctcttcgcctctgcctcagacgatggcacagtccacattttccactgcaccgtttacactgatctcatgcaaaacccgctcattgttcctctgaagatcttgagggggcataaagtaatcgatggtatcggagttttggatttgagatgggtgcctggaaaaccgtggttggtcagctccggtgcggatggagaggttaggctttggtgttcgtagaatgtttagataacgggttaagagatctctggagatgtattcatatattcacactcatgtttccttgatttattgcatctcgtatactacatcagcgtgtatcaatatctgacatgaagttcttgcgctcaaaattcaaggatttccttcaccttgtcattctgttcggcccaagattcgaagtcccacgcaccaggagcattgttgatgctctcttttatatcccttttaacagtgctgaaatagcccattatcagctctctatataggacactttattggttaactcaccctttgtaaaaaacgctaaagttgtcccacaattccttgccgaccttgtcaataaatccttggctttcataaatctcgttggaaacaccgttggatttaacgttcttgccgctcagcttcgagagtttagccgccatctccttaagggagataaagtcagtacacgcttgcaggtctttgcctgagcgattgaatcagagctgtttcgcatcctgagatgtatgagcctaccgatccaactatctgggttttcaagggcagtcttaacccacaaaccagtctgggcagcagagaatccccaaagcttcacatcctctgccaccgccaagtcaaagataaaggtgtgggggtcgtttggtgaagcgatccgtaagttcttggaactgaggttgtcaaagaagaaggagaggacgagattggttaaaggaacgttattggccagcccccatttggaaacatctgctttggattgccaatgtgaaacaccagtcccatcgtccaaagtagcgtaaacaatatgctttaatcctgcctctttgcaggcttggagagctgcaataccttgcagggtttcttctgcttgggtggcagcaagatcactgttcttggtaggaagaattgaccagactgatcaggaccatcagattaattacttcacagtagcaattcggcaatggaaccccttacagtcggtgttgacgaaagctcc

SEQ ID NO: 293 - DNA, 4982 bp, Cryptococcus neoformans
gacaaaaagatgtctttggagtcgatggaagctggatgggcttgggaaggctctctggtgtgggaggcaccactgttgaaggtgtagattgcgcctttggatctcgaatatcatcccacaagtctaaccagtcgaaacaagtatggtctctcgaaagaccagtactcggggtttgggcaggagtaggaaggtgagatgtctggactcggtcgtcgagatcatttagaagagcagtccagtcaaagccaacgtcagacagctggtcgtcgtctgccgcatctgagcacatgatggatgccgaccgctctaccagagagcgaataacgacggtcgacgagtcgagctgttgttaaggacgttgttgttaagatgaggtgagtatatgacaagtcaacttgagggaaatagaggatctcggcgggacttcttgccccactggccagttaccgcggtcagcatgagtttgaggaatgagatatattagtacgcgagatcatttcagctcgcctaccgcaaatttcccatggtttccataacttcagtcggtggttaggcatgctacattatattatctctgcaatttacgtcctattacccatcctatagggtcaatgtcagtgaggttagcttgaaatcggcccttgcattagtattttgcgaagatacagagggttatggtattttttggtggaaagaggaaatgggcggaatgacagctttccccttttgcgagagcagcagtgccgcgaatgatgacgtcgaggaggcggcgctgtccgcccggttatcttcttcttcccacgagtaataagtaaataagaagtgtactcgtagtgccgaaagcgagaaatgaagcattattgagttcctatgacggccagttgctatcataagactctcaactagggaactctcttctttttttctctatccctatacccatcccagaaatgcatctcgttacagtagcaacgtgagtactctttacaagctcttcaaaatgatgcaaaatgagctgacctgggttttagctggtatgtctgctgccatctccccaactaatctatcactcattgcgtaatttattagtcaactccgacaatggtccctggacttcgaggtatctatatgcgtattaaggccatcgatatggcgctgatgaaaagatagggcaattgcgaacgtatccttcgttccattgccatcgccaagtctcgtggagcaacacttcgagtgggaccagagctggaagttcccggatacggatgtttggatcatttccttgaaggcgagtataataaatccatcaggtccagttggatctattgctgagccaaactgtaggtgataccatgctccactcttgggaagtccttgcgaaaatcttgcagagtgaagaggcaaagggcattgtttgtgatatcggaatgtaagtttgaccgctgtatctctatggaaatcaatttgacatggatccaaggcctctcgaacacaagaacaacaattataactgccgagtcatcatctttaatggcaagattcttttgatcaggccgaagatgtggatggccaacgacgggaactatgtaagcggcattcatgtcgaaaagagagctgtgcgctcatcacattatagcgagagctaaggcacttcacaccttggcacaagcataggcaggtcgaaaagcattccttgcctcatatgatcaggattgtcaccggacaggtgagttgctcacatatatttagcggtgataagttgcgggctgatttgtttagacctatgtaccttttggagatgcggtaattgccacagaagatacagtaatcggtgtcgaactctgtgaggagctcttcacccctgcctcgtatgtatttgttytggacagtcgtgcgcattatgactgacttatcggcaggccccacattcttatgggccttgacggtgttgaaatctttaccaattcctccggtagtcatcacgagcttagaaagctcaaccgccgtgtggagcttatcaaggaagctaccatgaaggtgagtcgcttgtccttttgatattgtttaacccgttaatcgatcgtgtagctcggtggtatttacctctatgcaaaccagcaaggctgtgacggtgatcgtctctactatgacggagcttgtctcattgccatgaacggccagatccttgcccaaggccctcaattctctctttccgaagtcgaagttgtctccgccactgttgatcttcgcgctgttcgagctcacaggacaacaagtagcaggaggatgcagagtgcacaggccgaggcgtatgagagagtcgtggctgataccagactcgatggtggtgagcagatcaaggtgggattacgggagactaagggtagcatggatgtgaggtatcacacccccgaggaggagattgcgtgagtccggcggttttgtgtgatttaatccgtactgacggcatcttcagtcttggtcccgcatgctggctctgggactatcttcgtcgatcccgtactcaaggttacttcctccctctcagtgggggtatcgacagttgcgcaacagccattatcgtacactccatgtgccgtttggtcgtggaggctgctgcaaagggcggtaagttgtgctcttcgccgagtacgatataatatctgacgacacctttgtagatgagcaggttattactgatgctcgacgaattacaaatgagcctgaagacagcacctacattcccgaggatcctcgtgaattcgccggcagaatcttccacacttgttatatgggtacggagaactctagtagcgagactagggaaagagccaagaacctcgctgacgctatcggcgcgtaagtattggctaaccatttgaaagttgaggyggctaactcataacgatagataccacgttgatttgaacatggacaccgctgtgagtgccgtcaagggtatcttcagcttcgtcaccggcaagactcctcaattcaaggcgcacggtggcaccaatgccgagaacttggcgctgcagaacattcaggtaaatggctttctcctttgaccagatcacgaaactgacagcatgatacaggcacgactgcgaatggttgttagctacatgtttgctcaacttcttccgtgggttaggggtaagaatggcggtctcttggtcttgggcagtgccaacgtcgacgagagtctgcgaggctatttcaccaaatacgagtacgtaacgcttcatgtttgtcgtgaaaggctgtgatattgatatggtctttagttgctcaagtgccgatgttaaccccatcggtggtatcagtaaggtcgacctcaaaaggttcatcgcctgggcccaagtcaagtttgacctcccgatcctctacaagtatgtacttactctttacgtcccgtccaacatagatctaacttcccttagcttccttcacgctgtccccactgcggagcttatcccgatcggccctgacaacatcatccagtctgacgaaatcgaaatgggcatgacttatgacgagctttcggtatacggtcgtttgcgaaaagtggagaagtgtggaccgttcagcatgtttggcaagttagtgcaggagtggggcagtttcttgtccccgaaagagattgcagagaaggtcaagcacttcttcttcatgtatgccatcaacaggcataagatgtatgtatcactttcatgatggtatgaggtatatctgacgcaccatataggacgaccatcactccttcagtgcacatggtacgttttcctgctggaattaatgggttagacctgctgatgtagccatacaggagtcatacagtcccgacgacaaccgctttgaccttcgaccgttcttgtatccctcccaattcactcatcaattcaggaagattgatgaacttgctggaaagttgcctgacatggcacagaagcccaaggttgacacgaatgaagttgattaaagtgtgtttgaaatgaaatactgagaagatagtcaagaagtatagtagatgcatgtggttatgagtatagtacaacgcagtgtaacatgaagcgtaaagttgtgaaagcatggcaggtgaaaaaggcatgtcccccctgaataacaagcacgagtaagcctatgacggccggagaccggctgcagcgaagttgctagcatatgttccagcaagattcgtgaggtttgacaacaatcctccagaagttgcttgaactttgacctattcatgacatgagtgaagcttcggacgagcaagtgcgccatgacttaccataattgtaggttcctctggctctccaatatcctcctccttggctttccttcttaatgtctccataatttccttgacaccatctctatctaaatcatccctcgctttcatcaaggcttccgcaaattgtaattgaggaccatgtatcttggcgaaattccagtagtccatgaagaccatttcgggagatgccgcgagcatgttcacaatcatgtttaacacttcaaagttttcttcgagacccggcgagggtttgtactgggagaagaactggaacgcggatgatatgtcggatttgatcttttgaatggcgatgggcatacgaagggagttggttgaggctcgtcgaagggcggagaggtaagatatgaggaaggcgtcgagaagattgtcaacgaggatttcgaaaacggacggatggaggtgtgcttggtaatcactcatatagtctttcatcgtctccataatctgacccatgagctgttcagtgtaccatgcgggggtgatgagcgctttagtggcgactcgtacgtcatggaacacaaactgaacaaggcaagacaaacagcgcttggcaacgtcaatgtagccatcgatcgcctcgttaagtcgagctgagataatttccttgtacttgtcggataccaagggttccaagcgggcagatagagcttcggcatagtcggcg

SEQ ID NO: 294 - DNA, 4659 bp, Cryptococcus neoformans
tcgcagagttttgtatggttctgtaacgccatctgcaaatggcaacatccctccgctcaactcgatgagatgttccgaacagtaagggccactttcaaaatttgccaatgtgtaaccgttgacattctctattagattttgcaagggttcaagaatggtcttggtgcgcaatgggacgcccaaatgtccaacttccctcccgtcatcagacagcgtctcgctgagcgttacggcgtctaaaggaactctcttcttgtcacgatgtttcgtttttgcccttttcctcgaccatacagcgtccgtcatataccctcattcgattaggcatctcagcatctatacccctacatagcattgcgtttcacgacactctctatcttcaattatattacggcggagcctttggcggtcgaatttgtgtgcatttggatagtgctcaagtctagtagggtagttcaacaagtaaatagatatacatagcatttttctgttttgaataagtttgcattggaagccttgccttatgcaggctttacatcatggttacgaaagtagatagcaacaatagtagataggcattgaatgaacgtcgaaagtcacgatcgagtatacgagtgccacaagaagataataaggatcgcggagcggcgtttcggcgttttgtggtatggcacttggtgcgccattgtcctttgaagattcattccagcggaggcagccaaaaatacaaaaaaatacataactgtttctacatctatactccacaacccgtcagcaatgtccttcttcgcaaagctccagggttcagactctgaatcttcctctggctcagaatcggaagagtccatcctctccggctctgagggcgagcgacaggacaagaagctcgcggcccagaaaaagcaacaaaagtccaaggcttccatgttcttgaacagcgaggaaagtgaaagcgaggaggagagctcagatgaggatgaggaggagatgagcgatagcgatgatgagagacaggtgcgttgtcgtgtggcggcggacggtagaatgatgttgaaggaattgctgacgatgtgaacaggccgttgcaaataaattcttgaacgacgcagcctccagtgacgaggaaagcgaagaggaggacaagatcattgttttgagtgccaaggacaaaaggtatgtcttgttgcattcgtgactggtgtcataagaggagaacatactcatacacttgcaggttcgccgaaatggaagccgctatccacagcatccaaaacgcggtcaagaacactgactgggtccttgcctcttctgaacttgacaagctcttccggtttatcgctcgacacctcgtcaccattgtcgcctcccctatccctgctgaaggccacattcctccccgattcctcgagaccctcgtctctcttgaagctgatgtcgccaagactcttgccgcggaaaagtctgcacccaagaagatggctcccgctaaggccaaggctgtcaatggtatcagacagactctgagaaagaggagcaaggaatttgacggtgttttgaagacttacaatgaggtttgtattattggctcttggtgcgaaaggagtgtgtaaactaatgttgatgtaggaccccgaagcgtacaccgctgcttatgaaaaggctaacgccgcccctgctgcccctaagcctaagaaggccgctgttactacccctggtgagggtgaggacgacgagttcatgaccatcggcaagggaggaaagactcttaaccttaccgctgacggtgtcttcaagactttgagggaaatcttcgaggctcgaggccgaaaggttcgtcagttttttgtgatcaccattgcgttgactaaatccttgtagaacaccgatcgtgccgagactatcaagattctcaccaagctccttgaagtttctgaaactacctaccagaagattcgagtccttctcgcgcttgtccctgctcgactggactactctcagcacctcgtttcaatccctcaagaatcttgggttaccgctttgcaagagtttgaccagttgatttctatcttgatcgctgagcccgactacttggtccaggagaccgttggcgagtatgatgatctggtggagaggactcctgaggttgtggacggtaagaagcaaaaggtcttgattgccggcagcttaatcagtcttttggagagcttagacagcgaggtacgttttttttttatatatcgcaaagtgttagactgacatttactcctccagctcaccaagactcttcaacacactgatgcgcacgagaagggtgatgagtacattgatcgactcaagcacgaggctcctctttacaccactattgtcaaggctcagaccctttttgagcgcgaacagctttccgacaacattgcccgtaccgtcatccgacgtctcgaacacatctacgccaagcccgacatcatcatcgagcacttcgaaagcaaggctacccaggccgctgctggtttgaagtccgagatcactcctttcgatgtcaagcgtgacgccagcggtgtcatccacgacctcgccgtgttcatctaccagtccgatgcccccgttctccgtgcccgagctatcctttaccacatctttaaccaggctctccacggccgataccaccaggcgcgtgaccttctcctcatgtcacacctccaagacaccatttctcacgccgacgtcaccactcaaatcctctacaaccgtgcggttatgcaggtcggtctcgctgctttccgactcggctttatccccgagtgccagactattttgtccgagatgttctctaccctgcgacagaaggagttgcttgcccagagtgtgcagaggtataacattcaactttctcccgagcaggaacttctcgaaaaacgaagacttttacccttccacatgcacctcaacgttgagcttttggaagccgcttacctcacttcttgcatgcttgttgagattcctttgcttgctagcgttgatactgaggagcagagaaggcgagtgactagcaagaccttcaagaggttgttggatatggccgacaggcaagccttcatgggtcctcctgagaacactcgagaccacattatcaaggcgagccaggccttgcaggctggcgaatgggagaaagctagggacttgattgtttccatcaaggtctggagcttgttggacaacgctgccgaggttaaggacattcttgccaagaagatccaggaagaaggtcttcgaacatcccttttcacctacgctgcttactacgactccctttctctttctcatctcgcctccacattcaatctccccgtcggccgaatcacttctatcatctctcgaatgatctacaccgacgaactcgccgcctctttggaccagattgacggtgtcgtcatcttccaccgagtcgaacaatctgaggtgcagcgactcgcccagcaactcgccgagcgaactgcctctatgcttgagcaaaatgaaaagacgcttgacgtcaagttgggtaaccagggacaaggacaagatagggacacgagggcagtaggtggggagggaggtaggcaacaaggagagaggaggggcggcaggggaacataccggggacgaggtggaagaggaggtaggggaggattcaatcaaggattgggaacaactatggggagaagagtgacggcgcagtaaggagggtttctgttagacgcttattgatttgatctggacgtggtatgcacttatagcattgtgtagtatgaacgtgatttggctggactctattttgcagcaatagtcaggacaagcttggagctgtccagtacttaactgccatgtgaccgagcttcgactgcgtgcagtagtcgtgcgaaagtatttgatgatgaaatcaggcttcaaggagccaatacgtatacaaggcgttatatagccgtgacatctacgtgtactagctcccttataaagcaatgcgtatccggctctacatcgacaacagaccgtcaacaagacgcatcgcttatcaccagtcacaaagcaacccgctcaacaacaatgacaaagggatttgctggctgctgctggctgcatcattatgaatcaagctttttgagcatcgggggcagcacatgctgcagaagtcgcacggatggactccagcagccggcagacaacagattctactcccaaagtttccattaaggtggttaaacaacatgcaacagcatgccaacatcctggcaacaagcacagaaaagcttcgtgacagacgtaaggttaacataccgtccatacaagtgatctgcaggttgcaggacgtattatcgtagcacacagactaaggacacataagaaacagacacagcaacctcgtatctcgtacctggtaccscatgacccttgctcactatcttcctgcccttttgcctctgtgtacggcccacaatgaacgccaagttgatcgcacatggtccactcatgttaagtgttcggacacaaatatggtccagtggatgaagttgtgaacgagtcgttaaggaaagaaatttggacgatataaatgggcaagtgttgctgagatgggcacaggaagtgacagaaggagttggttacttattgagtacagtgctgtag

SEQ ID NO: 295 - DNA, 4694 bp, Cryptococcus neoformans
gcaggagttggttcaggagcgyaagaggaagagggagggtactcattggaaccttcaggtcgctccatggcatcctatgcaacgttagctttaatcttccattcgtttcagcatgtacgtacaatgtcaatgcccatcaaaacacccaaggcagtcagagtcctggggtctcccatcagagtggacatattcctgccaccgctcgcctgcaactggagcatgttcgctcggaaggtagcatctttcatgagggcactcgtcttggggtggttctcgagcttggagatcatgctggggtcactgaagatcttgccaaggcccatatcacccccaggggcgaaaggagaggatgagtcggtatccatggcccgcttgacttcggaaagacccttgacacaggcggcgttgttgggctcagcctggagaccggactcgtaagccatgacggcgtcagggaatctacggagaccgtgaagggcagcacccttacgggcgtaacccttggagaaggaaggatcgagctcgatagtctgctcgcttgtcagtcgtgcacctatgaatgtggacgcatcttaccttctcggcatcctccagagcaccttcgtagtccttcaagccggccttggtggcagacctgttggagtagaggacgtggtttgaagggtcgagagcgatggcatccgagtagagtttagcggcagtggtgtagtctttggcggcaaaggccttgttggcttcggctttgagagcgacagcctgagaggtgtcagcagacttaacacactatatcccaagtatacgtacgtctgacatggtgggtatgctgatgtttattgagaaagaagaagaaagagaagatgggatatatatttatctgtgaacattccatcatcgaagtctcgagaaacgcgacctccaccagccaccgccggtctcagagaaataacacgtcacatttacgcgtcgcgtccctgaaatcttcttgttcgacgcgttcataatgaataactcacttctccatcatccatctatctcctctttcatcccgcgtactctcaccatggcagaccagcaactttcccaggggaatctgcctgtctttatcgatgacctcatcgctgacaggactcgacagttcgtagaattcctcgacgatgaggtgagtgcctttttgccatttgcaaaatggcaacacgctaagacctcaactagacccaagcagcgtacaattatcgtgaatctatcaaacgcatgctggacgatgagcaggtccgattgattgtcgacatcaaccacattcgctcttacgagcgttcatatgccgacggattgttgctgcagcccatggagtacgtgccagcactggatgcggcgttgatgcagctcgtccagagtttacacaatcccacgaagcataagattgaggacaagcaatgtgagtatcatagactgtgtcatctcatatgtatacgcagctaaccttgaagcagtctacgtcgggttgattggttccttcggtcaacaacactgcaaccccagaacacttagaagtcaccagatcggcaaaatggtcagcttggagggtattgtcacccgatgttctcttgtgcgaccaaagatgctccggtccgtgcactggtcaccacgaacccaaaagttccacgctagaacgtacaacgactccaccatcatcgccccttcagccaaccttaccggcacaaccactgtcattcccaaggacgacggtgatggccaccccttgcttatggaatacggactttccacttttagagattaccagacaattggtatacaagaaatgcctgagcgcgcacctgctggtcagctgcctagaagcattgaggttgttcttgcggacgatttggtcgattgctgtaagcctggtgaccgaatccaacttgtcggcgtgtacaagagctctggtggtggagctggtgccagaggtttcataacctccattattgccaacaacatcatccttctctcttccaaacaaggcggcggtattgcccaaaccccgttgaccgatactgatattcgaaacattaatactcaagctcgacggaagaatgtcttccagctcctttcacaatccctcgcgccttcaatcttcggtcacgactacatcaagaaagctgtattgcttttacttctcggtggtgaagagaagaatctcgacaacggtggtcacattcgaggtgacatcaacattctcatggttggtgaccccttcaactgccaaatcccaaatgctccgattcgtcctcaatactgccccccttgctatcgccaccaccggtcgagggagttccggtgttggtctcaccgctgccgttaccactgacaaggacacgggtgaacgtcgactcgaagcgggtgcgatggtccttgctgatcgtggtgtagtctgtatcgatgagtttgacaagatgtccgagattgatcgagtcgccattcacgaagtaatggaacagcagacggttaccattgccaaggctggtatccacacttcgctgaatgcgcgatgcagtgttgtcgccgccgctaaccctatttatgsccaagtgagcttttgcagttcattgtgtataagcgcgtactgatggctatctagtatgatgtgcacaaggatccccacaggaacattgctcttccagactctttgctctcccgtttcgatttgctctttgttgtaaccgacgacaccgacgaacaacgagatcgtatgatttccgagcacgttttgaggatgcaccgatacattcagcctggtgcggaggaaggttggtctgacctgcattgcccttagatggtgaggatcgaacagctaatcgtttcttcgtcccgtaggtgcgcctcccattgagaacctcgagcaaaacctcgatgtcggcggcgacgctgttgaatcgcgtatttccgaaactcccgtatttgagaagttcaaccctcttctccactctggtgtgacgaccacttccggtcgaggtgccaacaagaagaaagaggttttgagtatcgcctttgtgaagaagtacatccagtatgcgaagagcaggattcatcccgttttgaccaagggtgcggccgactggatcgtcaacgtttacagctctttgcgtaatgacgatatggcagcgaaccaaaaacgtgtacgttatcgatctccctttcttttgaggtcataacactgaataaaatgtctatagacttcgcctcttaccgcgcgtacccttgaaaccctcattcgtctctctactgcccacgccaaatcccgtctctccacccgagttgacgagcgggacgccatggccgccgaagagatcctccgatttgctctcttcaaagaagttgtccgtcccgagcgccgaaaacgtcgaaagattaatcacgccggccagtctgtcgaggtagattccgatgaagatgaagagggagaagaggaattgcaggcgggtgtggagagaatgtcaatgaatggggatgttggtgtgacagagtctcagagagaaagagcgagagaaaagaacagacgggtggaaagacaagcagcaggccccgtgccagaggacgacgaagatttcgagatgcgagaagccgaggaatcacttgctttgcaagaagcccctcgttcaccacccacggcgcccgaagttgctgtcgaactttctaacgaacgactcgacctcttccgttcaaaattatcacacgtctttgaagaaagtcttgatgacaacggtgccattgaatttgttgagttaatgcccaagattaacgaaggtatggccgagggagaagttttcagtgttggagagatgaagcaggctttggtacgaatggatgagaagagtgaagtcatgtttggagaggatcaaacgatctataaaatttagtggtctcttggatctgtgttcaactggttttaggtatttgttgmttatcttctgttaaaatgcattaatcattcggcaatgtcaaagccaacaggaatcatgttccatataagaacactcagacccaaccaacccatttcctaaccatactctcaccacatccccttttcccgccaagatccatatgttctcctggacaatgctctagtcgcaatccacctttttcgtctagacctttgagcccaatccaatcttccttgtagagaggttgttcatgaagagggataatttcagtcttgttgttgggtgcgtaggttgcaaagtgggaagactgggcgggggagaccgtccctatattgtgcgaaaggaggagatcagcagacttttcagataatgctcagatacgaaactcactatcttcatcgaaaataatagctacaaggttatccagcccctttaggccttttccctctcctctcttgccttttcgtcggttgatttcttcgatgctgttgcgctctgcgaacggtcgttccccgttgagatcccttagaaattcatttacttcataaaactcatccagccgttctgtatccctaaagtaggcggcctgcaccaagtggtcttgagcccagggtctatatataccagcacgggccgcccgagctgcaagcaaacatgacagggtggggggagtagggcacgggatgagagcggagatgccgtagtggggcgttccgaaagtgatgagattatggaccggaggaccgttacagtact

SEQ ID NO: 296 - DNA, 5033 bp, Cryptococcus neoformans
gcgtcttgacgcggtatatcctctctgctcaaatcctggctaacaccgaatatgaatccgcagctaagaagatcaagaccgacttgattcaacgtgccaaagtcaaaaaacaatacgccaaagtccttcgcgctgaagggatggagagtgagcgactaggtgacggttctaggcgacgcaatgaacgggaagaaagcgataacaaactcaaggggaagacaggaagctttaaggggaaggaaaggcgggagagggaagagagaggggaagaggatccggatacggctcggattcgtgcccgtgccggcccttcctcttcttcctcttctttctctcgtcccaacaagccattcaacaagtcttacaacaataagccttacgacaaaactactcggaagtctcgagtcgaggaagcaccccctaaacccaaagtccgcgctctttcgccgtctcctcgcccttccgctccttcctctgaaccgaaaccatccttaagaacattgaagaaagaaggtttttcaaaatatcatcgggcgaaggatgcaacgggtttatcaaaagggagaggtcagccgaatatgggcgctaggatgggggtgttgttggagaagatcaagaggatgtgaagagtgcatcagatagatggctggcaagcaattgtacgataagtggatatgcgagcatgggatcatgcagtgttgtatgacattgactagttccggccgagacgaaatcaaagcttttcatagtgcaagacatcactttcatgttcattcgcactgtttatgctcataacaaaacgtaaacactcttggccagatggatgtttgaagcttatgtgttaattcatcaaagacaacgaagataaagccacatgtattaacgcaggctattcaagctttctcggatttcttggtatacttctcaatgctctcatctcgcacgcaaatatcctctgtctttcgttagaagataatattagcaaagtacgctcggccacatgatggaagtgtcgaaatatgaaccttctctcgaaacaaacaaggggcgaaaaggtagcttttcacgaatctgtagctttggcagggatgatagatatccagccgaccgggtctgtccacatactagtcttaaatatgtactagaaatgcaatcccataaaatggacgggtgctctcttgtgcaagcaaagtgggggattagatacaagcaaaacaaagttcgtcgcgaacgcgctcgacgcgtaaattgaattcaggttcttcatgagatatccttcaatttcatctctatcccctctttcatccttacttttcgcaccaacccaaacaagcaacaatggaagaaggccgtatctggtccgttggcgtcctcgaaggtgcagagcagcaaaacgccccctctgaaattgaacgactcttctacgactttcttcatgggttccgtattgaagaccaatggacgtaccgcgacgctctccgatccgccttgcttttgaaacaccacactttggaagttgatttgagagatcttgtggcatggaatgaagagttggcgcagaaagtgcaggagaaacccggagaaatgattcctctagtgagtttttttttcttattttgaatatcgcttgctctttacgtatttttatacgtatccaaagtactgatgaagttcaaaatagttggaagctgcactcttgaaatacgcccgtgatttagttcgtccgaccagtgaagcagacagggaacgagaacgcgagcgagctcagaatggtcagcccagtttggccgctgaggaggtgcctgatatgcaggtggccatcaagtctggcatgaacctcttacaattccgacaactcaatgtaagtgcttcttatctcttgataccatccgataaatatctatttaactaatttgatatttacaggcgaacaccctgaccaccctcgtcaggttaccagggattgtaatcaacgcttctcaactcacatcccgagcgaccgaactcgctctccaatgtaaaggctgtcgaagtgtcaagcacgtcaaagtctctggcgctatcggtggtgaacgtgccgctcttcctcgacgatgtgatgcgtaagattcatagcctttcctgctgtcactaccaaaactaacgaggaactgttactacacagcgaacccgtagaaggccaacgcaaagattgtccccttgacccctatgtcatcctccatgaccggtgccgctttgttgaccagcagaacatcaagctccaagaagcacccgatatggtccctgttggtgaattgccccgccacatgatgcttcatgccgagaggaacttgaccggtaaggttgttccaggatctagaatcattgcaaccggtatctactcaacttttgctcccaaccacaagagtgtaagcgattcatttgttatgcatttaataaatacaggttgctaatatgatactgtgttcagcaaaagacatcaggcgcacctgcacttcgtcaaccttaccttcgagtgcttggtatcgagcttgacagttctgctgccagctctggaacccgtgtcttcactcccgaagaagaggaggaattccagcaactcgctaggagcgatgacttgtatgaacggttcgcgaacagtgtcgcccctagtatctacggaaaccttggtaagcacataatcaaatgttggccgtggaaactgtactgatcttcctttctgctccttttagacatcaaaaaagccgtgacttgtcttttaatgggtggaagcaaaaagattttaccggacggtatgcgtcttcgaggtgacatcaacgtcctcctcctcggtgaccccggtactgccaaatcccaactcttgaaattcgtcgaaaaagtctcccctatcagcgtctatacatcaggcaaaggttcctccgctgccggtctgaccgcttccgtccaacgtgatcccgttactagggaattctttctcgaaggcggtgccatggttctcgccgacggaggagtggtatgtatcgacgagtttgacaagatgcgggatgaagatcgagtggctatccatgaagccatggagcaacaaaccatttctatcgccaaagctggtatcaccacgattctcaactctcgaacctcggttctggcggctgccaatcccgtgtttgggcggtatgatgatatgaaatcccccggtgagaatattgatttccaaacaaccatcctttctcgattcgatatgattttcatcattaaagatgagcacaacgaacagagagataggacgattgccaagcatgtgatgaatatccatatgaacaggcagacggagaatgaggcagtaggagagattgatatcgaaaagatgaagagatatattggatactgcaagtcgtgagttaattcttccctcctttcaatcaaaatcattgtgctgatgttgggattaaaattaggcgatgcgcaccgaatttgagcggagaagcagcggagatgctcagctctcactttgtcagtctgcgaaaggaagttgcccaagttgagcgagataacgacgagcgaagctctatccccatgactgtccggtaagtccttctttcttccaagtcgcttgtgggatacgcgtacaagtgctaagaccaaattccatccttctcatagtcaactcgaagccattatccgaatctccgaatcccttgccaaaatcacgctctcccctcgcgtgcttcctcaccacgttgaagaagctatccgcctattcaaattctccaccatgcacgccgtttctgtcggttcgggcgtcgagggtctctcccgtacagagctcaacgaggagattgacaggatcgaaaaggaattgaagaggagattaccgattgggtactctacgagttatcaaagtttagtgagagagtttgtttccggccaagggtactcgcaacatgcgttggagaggtgtctgtacatcctggagaagagggaagttgtcaagtatactggcatgaggagggttgtgcagaggataggtgtctagagagggctgaaacgcgaagctatgcttttttcccttcgagaatgttttcctttgtgtcttgggttcggattaatcttttcatgttttcttatactttgtaagtttgttaatatatggtaatgcataaacccttgacccgttctcaaaatttgtcggtcacttgtacagtgaatgcaagattgatgcaagattatgtaaaaaatgctacttgaagtctactacatggacaatccgtcccgctgcagcaatgccaacattgcctgcactacctcctcgtgaccagtcaaatctgcggcatggggcgactcgatttgctcagataactgcgcgtcaagaagccgtctgttgaacagtgcacgtcagtatctccaacagatgtttagacacagtgaacaaggtgaagtgaatgacatacctcaattgagaacacaaaacacctatacgcgtgtttgctcgtatcttgacatggccgtctgtaccaagcataatacctccagcccaatggttgattgtgatatttcctccgaagagcaaaagcccgtaaagcggcaccttcagttttcgttcattagcattactcattcgactctcctagagccagcaaggtaatgaaaacaaaggtggcttacttctgtggcatctctcaaaaaaactttgcttgtctcattcttcgagaagtaagtcagatatccggatttgaaaccggattctgtaaataagatagagctgggatgaatgaatacacgaccagattgatcgtagagtttgacctcttttgcttcgtgctattcatgaacaatcgtggatcagcatcctaattagaagggacgtgattgtttggctggtgactctacttacatccttttgcactgttccctgctgcactctctcaaactgagctttcggcatggcaatcttgacaactcgcggataaagaccgccgacgacaactcctttcacgaggttgtccaccttggcgttcacattatatttggcgagc

SEQ ID NO: 297 - DNA, 4887 bp, Cryptococcus neoformans
cgaagaggaaggggatcccatactgagcactgattcaacttcagatctgattggtttacagaaaaaaactgagctaattataccgtaacaaaatgtaaagaccaactaaacagagacaattgtagcagcagtaatatcgcgtacggttttgcctgtaccgaccgtcggtggacggtcgaacggacgatagattgaattgccctccacgccatcattttctttattgttcattttgattccgttcctcgacgactttgccgtttcccttttattactcacctcctctacgtatttgttaactccacatcccatcttgcacatccagaaatgcctagatcaccgtatagatcatcgaacaggagctatcgcagcccctcgccttcccggtacgaccgatctcacccgagctcctcttctagacgtcaagacgaccgaaaagcctcgaggtacgacgacgattattcgagggaccgagagagagatagggaaagggaaagggataggactagagactacagggatagagatagggattatgataggaggcgagataaggacagatatcgtgatgatgaccgagacagacggaggagagacgataaagatgacaggcggcgagaagagagggatcgaggttctgaccgcaagagagattctgagaggagatctcctatgtcgaccattcgtgtggatcctattgtatcattagcttcacctgttccggaaactgaagaggagaagaaacgaaaggcaaaagagagactggaaacttggaagcgccagcgtgccttgaaggagggcaagtctgcagctgcaacacctgagccgaagagcactgcacctccccccgttacctgtgagtgcaatttggcctccctctgttggatccattactaatcgggatactgtagctggcctgccgcctaaacctaccgccttttccctctctcgtatcggtctcccactcaaacccacaaatccaacgccactcaaacgtagcatggctgctcttgacgacgaagatacatctgaccgcaaacttcagaagctcgatctacctgattttgatcctgaagtccagtcaggagacgcggctcaggtgggctccattggtgcagacttggcagtggcggatggagatgaagatgatgatacggtggtgaaaaaggaggaggagaaggaggagaagatggatatagacaagaaagcggaagaagatgaggaagaggacccgttggatgcgttcatgagagacaacgtgcagcaggtcgtagaggtgaacaaggcggacgccaagcgaatggggttgcgggttgctgaggatggcagcgacgacgaaaatcagggacaagtcgtggagaaggataagcttgccgaagcggaggcgttgttgcagtgcgtttcatttttctccaaaccaaagagcatatgcttacaactcattgaagacaagctgcggctaaatcacgcaagaaagatcttcctcctcctgaccattccaagatcgactatgaacctttccgcaaggctttctacgtaccgcctgttgaagtattggagatggatgaggaagaggctgagttagtgcgtttggaaatggacggcatcaaaattcgaggacaggatgctccaaagccagttaggaactggggcgcctttggcctgcctcaggggtggtaagtctatcatcttattgtatgcgaaatacaatattctgacgtttaatagcctcgatgtaatcaagcaccaaggttgggaaacacccacgtccattcaagctcaggctatcccagctataatgtccggccgagacgtcatcggtattgctaaaaccggttccggtaagactgttgctttcctcttgccaatgctccgtcacgttcgcgaccaaaggcctgtgtccggtagtgaagggcctattgcggttgtcatgtcacctaccagggagttggcctctcagatttacaaagaatgccagccctttcttaaggtgctcaacattagggtaagttcaggtcttcctaattaaagactgtcgagctaagttttgcatgtaggcttcctgctgcgtcggcggttcgtcaattagtgaggatatcgctgccatgaagaaaggtgccgaagtggttatttgcactcctggccgaatgattgaccttctcaccgccaataacggccgagtcacaaacgtccgacgcaccacttacatcgttatggatgaggccgaccgaatgtttgatatgggctttgaacctcaagtcatgaaaattatcaataatgttagaccgagcgcccagaaggttctattctcagcaacattccccaagacaatggaatcacttgcgaggagaattttggtgaagcctttggagatcacagtcggaggcagaagtgttgttgcacccgaaattgaccagcgtgtcgaagtgcgtgatggtgatacgaagttcacacgtttgcttgaaattcttggtgagatgggcgaggagcacaaggacgaagatgatttccgcacccttatctttgtagaccgtcaagaaagtgcggatgatctatttagagaactgctacagagaggttatgtctgtgcttcactgcacggcggtaaagagcaggtcgatcgagatgaagcgatcaaaaacttcaagaatggtgatgtgcctataattgtggcgacttcagtagcggcaaggggtttggatgtaaaagagttgaagcttgtcattgtgagtttctcgtttgtccatcatgaggctgtatgctgattcttcaaaagaattatgacgcacctaaccatatggaagactatgttcatcgtgctggccgaacaggtcgtgcggggaacaaaggcacttgcataacatttatcacgccggagcaggaaaggttctccgtcgacatcgtacgagctttggaagcgagtaaggcattcatccccgatgacctgaaaaagatgtcggattgtaagtagactttttacccttatgatgaaaatcactgatggtaaattagcattcctcggtaagatcaagtctggcaaagcccgagcagctggtagtggatacagtggtaaaggtctcgagcgaatcgaacgccgtcgggaggagaaagaccgagctgaaaagaccacctacggcgatacgtctgaagccctgtcactctcctcgcgtgagggtgctgtcatcccctacaaagccaagacgaatgagttcaagcctccagagacctctcacaagggtgaagcagactatacattcacagaaatcaaggttgatatcgtcaatggccctgcgccggaccgcgtgtcctctcaacctgtatttaacccgaagaacgccgtggcctctttgccagcacaaacactggcggcactggagaaggcaaagaaggaggggccgaggcgtagatgcggcgaatctggcaaatgtggtggccaaacttacccaatctatcgaactcaccaaagccgagaaacttggtctggcggcagccacctctgcacctcgtcttgctcctggtgcgagaacaaaagatcccgacgctaccgactggcatgctattttccccatcaatgattaccctcaaaaggctcgttggaaggctaccaataaggagcaaatgactttgctgcaagaagtttcaggagcaagtatcacaatgcgaggcagattttacccgcctggggaggaacctgcgttgggtggtgaacccaagttgagtctgttgatagagagcaacgacgaaatgagagtgagggctgctgtagaagaaattcgaagggtgctggtcgaaggatcagtacaagcacttaatgcggtcgatagagcgggtgcgagtggcgggaggtacgctgtgtagaaaaagtgcttttatcgagctttccatgatgtatgcatgcagatttttcgtttcgaaccttctgacggctacggcagtcaagatcagccttcttatgatctcgtcagtatgaagcttcatagtccacatgataaataagagatcggtaatagcagttgtggaagagtgttatactgcataatatcaacagcctaacgatagtctagaagttgatgattcgaacatccagtatccagattgattataaaatactttcaccagaaaccaaaccaggtatttgttaggaaatcgatctgtacgtcgggcgtagccttgaatctactacttgtgctgagtcaacgattaatcttctcttctcagtgctgataagcacaacacctatagaaagataataacatacgagcttgaatgtgcactgaagaaaatttaaaaacaaaaacatgaaaaggtatctggaaaagatgatgcaaatcgaagtgaataataatgacgggaaggtgccgaggttaataaaaggtgtaaaaaaaggtgctagtgagtacgaatcagatatgtagatgcaggcttttgctaagaatcggaaggaggtcagccaagcatgattcgcgtccttcatttaataataccatcaatatttaacttccgttatactgcagtagatcataccggccatatggtggatagtatagaacgactccgaaggtatttacgctttggtttgagctcctggtacgacccttcctgcttctccagtcttcagctttccctttcttctccttcccatggtgttctcattgacttgactcatcacaattacgtccaccccgacatatttcattgcatttccccttttctctgccttcatgtcaccccacggcttgccttcctccttcctccaactgaggaccttcgtaagttccttctcggccttaatccgatcaacaggtattgaacgtgggcgaggcatgatattctccggcggtggagttgtgaggcgaggagacggtgcagaggacccagtacggtacg

SEQ ID NO: 298 - DNA, 4784 bp, Cryptococcus neoformans
ggcggaacggtagaaccctttaaatggcagagcttagttcatgacgtccgcaagacaagaagagaaaaagacgaaccgtcttccacgaggccaaagttcataggtggtactatctttgccatgatgtctcttgtgtgaacgtatgcccgacgctaggtttatgcgaccgagaacattgctttcttgttcgttgtcttcgcattcgttttctctatggacacaatccgctttagtcacgtgatcttgagagtctgcttaatgaactgccgtatctttctcttctatggcatgtagtggaccagaggttatatttatacaaagaaagcccaagacgacatgaattgcaacagttatcaagcactgtttcatgtgcaactctggttaacttatgaagtcatgctcggtcacccatctcgcctgttggtccacgggcccgtagtaacaatctatgcaacgatgctatatgtttcactcgtcgatcccccactctagctccttgtatgagccgttccgcaacaatcttcatgcaaaattctcagccgaataggacatggaaagagatgggccaacaaatgccacacacggaatttgtgtcggcatcaaaacgcgctcatttcgacgcgtccgagcttccctcgacgcgtccatctttcatttccgaactgcctcttcttacttacctttcttccttcctacccacagaaaaacatcgccatgtcctcgccaccatccaacttcaacttcccctcttcttcagctcccatgggctcccttcgccattcttctccacccggtaatagacccattgtcgaccctctcgctttcgaaaacgtgcacggcctcgccggttctctgcccggcgctcgtaatggtgatgttgacggctccgaggctgaagaggaaggcgccgtccagggcggacgtggaaggagacaaggtagaagggggcttgattttgatgccatccccagagtgaaggacaccacggggtgaaaaagtgatggaaagtttcatcctgttcttggaaaagttagtgatgtctcattccatttatgaaaaagtacttacacaaatatctttgttagctatacagaaagcatcgctttcccagaaactcctgggtctgtcgtaccaccacctacaggggatgagtcaaaatactatgttgagcaggttcatctgatgaagatagatgagaggaccactctttacgtcgactttggccatcttctcgaacgtgaagaaattctcgctcgagctatccaatcccagtattaccggtgagtgacattcgcttaatagtgatccgcgcttacactacatagattccttccttatcttcggcgggcggttcagtttcttgtgcgtcgttatgagcccacttggctttatatgtcaacatctgtcaatgcaagcgagaccattcctagctcttcccttactattcgagaattcaacgttgctttctacaacctccctctcacatcgggtatccgtgacttgaggatggacaagatcggtcagttgatgagcatcagtggtactgtcaccaggacatcagaggtcagaccagaactggttagcggtacattcgtatgtgataactgcaagacagctatccatgatgtggaacagcagttcaagtacaccgaggtatgttttttctcatgtttttcatgcttgcagctaacaagaggcagcctatcatgtgtcaaaactcaacctgcagtaaccgtaaccaatggcaacttaacattgaacaatcaaaattttccgactggcaaaaagtccgtattcaagaaaacgccaacgaaattcccaccggtagtatgcctcgatcactcgacgttattctccgttcagaaattgtcgagcgagccaaggctggtgacaaatgtacctttactggtaccttcattgttgttcccgatgtttcgcagcttggtcttcctggggtgaatgcggagatgatgcgagaagcgaaaggtggccgaggcgatggtggaccggcgagccagggtgtaacaggtttgaaggcgttgggtgtaagggacttacagtataagactgcgttcttggcttgcatggttcaaaatgctgactccagagtaagactttagctctacggatttgaatcaagctaatttcatgtaggctggtgttacagacgtgcgaggtgaagttgaagacggccaagaagaccgagaatcgttccttcgttcacttacttcccaggaactcgacgagttgcgaggcatgctcaactctgataacatctaccaaagtcttgtccagagtattgcacctaccgtctatggtcatgagattgtcaagaagggtatccttctccaacttatgggcggtgtgcacaagcaaacacaagaaggcatccatctccgtggagatatcaacgtgtgcatcgtcggtgatccctctaccagtaaatctcagttcctcaaatacgtttgcggtttcctccctcgtgcggtctacacatccggtaaagcctcctcagctgctggtcttacggccgccgtcgtccgagatgaagagtctggcgagtttaccatcgaggctggtgcgctcatgttggccgacaatggtatctgcgctatcgatgaattcgacaagatggacattgccgaccaagtcgctattcacgaagccatggaacaacaaaccatctctatcgccaaggctggtattcaagccaccctcaacgcccgtacctccatcctcgccgctgccaaccctgttggcggacgatacaaccgtaaaatgagcctgcgtcagaacgttgccatgtcagcgcctatcatgtctaggttcgacttgttctttgtcgtattggacgagtgtaacgaaaatgtcgatttgcacatcgctcagcacatcgtgaatgtgcatagattcagggatgatgccattgctccagaattcagcaccgaagcgctccagaggtatattcgatacgccaggacttttagtccaaaggtaaattttgtccgattaccactatagacgtatatacttatctgccacagttgactcctgctgccagcgctgttctagtcgaaaagtaccgctccttacgtcaggatgaaggtggtcccggcaagtcgtctttccgaatcactgtccgtcagctagaaagcatgatccgtctatccgaagctatcgcccgagcaaactgtcaacacgaaatcaccccagccatcgtgcgcgaagcctattctcttttgagacaatctatcattcacgttgagcaggacgacatttctttcgatgatgaggatgagggcaatggacttaatggacctgatggacctggtggtgatgatggtatggatgaggaccctcaactgagttcggcggaccttgcggcgttggatgaggcagaatcaagttatcaaagaacatcctctgctcagcaacaagagcaacaagcgcgtgaaaccagcgttgctactactcaaccgtcgaagaggaagatgcgaatcacttgtgagcaccctttctttctcccatgcctgaatgaactgataacctatgcagataaccaatacatggaaataatgaacctctgtgttctttatctctccgaggttgaacgggatagcggtactggggttgatcgagaggagttgatacaatggtatctcgaacagaaggagaatgacttcgaatcagaggaggatatggagtatgagagggaagtgatagggaaggccttaactaagctcgccaaggtgcgtttgatggtttaatgagactgtgccagtagctgataacatgataggactcgtacttgttagaaattcgaggagatgtcagagaaggactggttccttcgagcgaattggagtcttctgctggggatggcaacaaggtctactatcttgttcgtaagtatagttcgtcaccgctcctgcagattagggctgatgatttgtcgcagatccccaagtcgatttgtcagacttgtcttcctccattcccgcataaggcattagtattttcgattaatcttgggtttggtgtttgtcttattagcttagatgtacggtgtatagatgcattttctgctgtccccacaatgccgcatgtgtcatgcccctcctcatgcagatccttctttctccttcagatcgttctccaatccttgcaacgtcctgactaagcttccaccagccgcctggttcaaaacgcccacaagactccttccttgtccctccaaaagaccaaccaactgcgctcgcaacgtatcaagttccggcaccttgcccaactcctccaactccttctgacccatcaccttcccgccctccactaaacccgccacaagttccaaagtcggttgaatggcagagttctctcgcttgatagatttgaccgttctagagagagcggtaaggattttgttgagatatgtgggggagagagtggagcaggtaagaacagcccgctggcctgtgatatgaggagtgatgggggacgagcaagctttggatgtcgcgacgagcacaccggatcgtacgaccatcaactgcgctggttcgatttctgctctttccaattgctcctccttaggcagcctggggttgtaagggacaatcggcctcttgattgacccaacagcacgccttagtttggaccattcagccgcagatatgtttgcatggtcgaaaaccagaacaagggatgatttcgttaagacttggttgtacaagttccagaggaacgtttttcgagcagtgtagactcgcggggctgacggttgaggg

SEQ ID NO: 299 - DNA, 4922 bp, Cryptococcus neoformans
aataggatggaacggcaagagcgggagataaatgtggatggaagaaaatttccagtggcgaaaggaaggaataatagagggatgtcttatgttgggataggaagcaaggcgcgtcgcgtctcgacgagcagtccagtcagctttctgacgtggcatttaagaggatgaggcggcggcggcggcggccggcggctggtgggcggccacaaccgcagacgagcgaagaacgaacacagcagctggatcacatgcgatgcacatccgagaacagtcgcgtggatttccctgaaaattgaagtacgatgacgattgcgactcctgaatgttaaagggagaaatccccgcaaaaggaagacgactccagagcgcggccggtcacgaggcgaatcctgaattattcgaaagcactcccgttctgccgcctcacgaatataaacacttcccagccagctctttctactgtgcgctgtcgcttcttcagttcctccgcttccctctcactcctgccatagctgtctctgcttgatctactcccttcgccctttctgctctcgaacacccgccccgtgtcctcgaccagcccgtaacacctcccccaacgcatcacattccaatctttttctctgccacatcacacctttagaatttggcggttctctacatttaaacacctgtgagtcgagtttctggcttgtgtgtgcgccgggaaagactagaggcaagactgcaccatgactgtacgctgtggcttgtggaattttgctatgcccgtgtagcgattctgccgcgccgcatagctgcaatcgttttcttttggatatcttgccgtatgctgtatataatcagtatgggcgaaaatctctatcttgcatttacaaacaccttttacaagttgtgtctttgtgattcctttgtttcatgactttttcctgaagcttgttaaagaatatgctgacccgatttcgttcttgccgtttttctcacttcgcctccaatcgtcatgactcgtgcatgccacaaacgccacctcgcatcatttttatcgtgtacccattccctgtgtggcatttcttggatcggcttgcttgcttcatcccctcgtcaatccgtcaacgcgccacgtacacaaacaaaacaaactccttcgctgctgggtcatcaaccgccatctcatctcatcgcaaccgcaactggcctctttacccctcctttggttttgttccacgcctcgttcaacttgtctatttggccactccatctccattttaaccttaattgatttcattcttgtgtcttttaacttagttcttccttcattcactcaagatcacatgtgtggcaagtatcaagtccactatgacgttgttctctgctgacttgccgtacaggaatcttctcttattgctctttcctttgcgaaaggaaccgcaagtacgtctgcgatgttctgtgcaacggtctcgcgaggcttgaatatcgtggatacgacagtgccggtatgtcatcatcgcttctcagtgttcctcacaagctgatggcaacaaaaatgcaacccatcaggtatcggaattgatggcgacagcaaaggttcctctatgattctcttcaaggaagtcggtaaagttgctgcgctgaggaagcacatcgacgaaggcatcccctgtcccttgcccggtcaagcgccctcgaaggagaaggttgatatgtccaaggttttcctcagccagacctcgatggcacatacccgctgggctactcacggtgttcccagtcctggtaactgtcaccctcacgtcagcgacgtgcaaaccgagttcagcttggtccataatggtatcattaccaactataaggagctcaagcttgttcttctcaagcgcggctatactttccacagtgacaccgacaccgaagtcgttgctgtgctttgtaaatatgtctgggatagtcagcccaacaagcggctcaacttcacggagcttatcaagactgtcgtgaaggagcttgtgcgtagatattagacacttcattttgttatatagctaactctgttataggaagggtccttcgcattcgtgttcaaatctactcatttccccgatgagattgttgctgcacgacgcggctctcctcttttgatcggtgttaagacagacaggaagcttaaagttgattttgttgatgttgagttgcccactgctgaggaacgaggtaggtcaacgcttttctctcctttctaatgtttatgcttacgttgaagcagtgaatgacgtggatgccagtggtctccttgctgtaccggctgctgttgccgagggccctggtcccaaacttcgccgatcccagtctcgcgctttcctctctgaagatggcatgccccagcccattgagtttttcgtagcgtccgatgctagtgctgtcatcgagcacactaagcgtgtattgtatcttgaagatgacgacatcgcccacatcgccgaaggcgagcttcacatccaccgcctccgtcgcgacgataccgtttcttctgtacgtgccatcgagcatctagagatcgaacttgcggccattatgaagggtcagtatgaccacttcatgcagaaggagatttacgaacagcccgagtcggttgtgaacactatgcgcgggcgagtcaacttcgacactcggtccatcatgcttggcggtctcaaagcatacctgcctgtcatccgaagaggcaggaggttgatctttgtcgcctgtggtactagctaccactcttgtatcgctgttcgacctgtctttgaggagctgaccgatattcccgtcgctgtcgaacttgcctctgacttccttgatcgcagaactcctgtattccgagacgatgttgccatctttgtttctcaatcaggtgaaacagccgacaccattctcgctatgcgatactgtctcgaacgtggtgctctttgtcttggtgttgtaaatgccgtgggctccactctctcccgtgaaacacactctggtgttcacatcaacgctggccccgaaattggtgtggcttccaccaaagcatacacctcgcagtatgttgcacttgtcatgattgcggtgcaattgtcagatgactccatcaccaagacagcaaggaggcagcaaatcatcgatgggttacacgacattcctgcccagattcgaaaggttttggccatggacaaagtgctgcaacagatggctaaggatatgttgtccaaagagaagagtttgctgatcatgggtcgtggttatcaatgtgagttcagcgcaacttattgtgatctttgctgacattatctagacgctacctgcttggagggtgcacttaaaatcaaagaggtttcttatatgcattrtsaaggcgtaagtcgctgtttattatgcagaaagactcaaatcgtctgacgcttcctactagattttagccggtgaactcaagcatggacctcttgcactggttgatgagcaccttcctgtcattttcatcatgactcgagactctttgtatcccaaggttcagtctgcgcttgcccaagttacagctcgaaagggtcgacccagtgagttttccttcagctgcttttattgccttgacgaagcttacgatggttagttatcatctgcaacgaggacgatgacactgtcaacgacaacgccaaggtcatccgggttcctcagactgtcgattgtcttcaaggcttaatcaatgtcattcctctccagcttttatcttaccgtgagttccatctctagttgaaataattcattctaacaacctttcagaccttgccgtgatgaacggcgtcgatgtcgatttcccccgaaatctcgcgaagtcggtgactaccgagtaacatggactgttcataggacttttttccttccgtttttattaatcccacattaagaccctcattttggctcacgatgacccatatactattctacgtctctcgctattgcttgaactgtttttatatactctgggcacagcaggaacgtatagtcctttgtcccactcttctgcttcatgattcgcgcgcattttttggtatgtacataatgaagtcttaaatacaaatatcgtttttgcattggtccatgtacgttactcgtcatttgaatatattgaaagacgaaagatgagcaaggtgctgatgcttaaacgatggtgtataatgactggcgttcgtactgtgggtgttcatgcagcctttcacaatacaaatatactctaaccttgaaatttatgtgcgacggccttaactctttccagtgggcttcttcaagaaatcggaggtgaaaaagtctccgtttaggctaagaagattggcaactcgagtatgtacctcgacatggaacgattcaaaggggaaggcttcgccatctatacgacaaggtcaaaaagggtctgtaacagaacgatagggtagaggtaacttaccgatggtaaaaagtggttgattctccgtgtccaagttctctgcgatgaactgtgaaactgcgctctgtcaacccagcagaaactttacgtccatccgaagaaggcacgctcacccttgtagtagtactggcaatccatccaatatgtctctcctttttcggcgccggcaatcgcatttgccatagtcagcctcggtactacgctttggacaactacatctatcaggccatctcctgggatggagacaggccattgcatcagatctcgagccacccaacgcatcattccagcactgcggagagttaggcattggcatctgtatcgcggacttttaagagttgtggacacatactagaaatatagaatctcttgtccgtcaacccacttgttttgtgctgaagccttgcgtagtgccttcaaactctgaatagactttttgggcttgatggatgacttcttcggg

SEQ ID NO: 300 - DNA, 5044 bp, Cryptococcus neoformans
aaacgcgtccgccactatctcggtttgaatcctctttcattcctccttactttcttggtcaaactcatcttgggtcttgggcagcactcggacagatgtcttcaaaagcagattctcccaagaagaagcctgccaacaaggctgatgggccggctggcaaggacattcgtggtttcgtacgtcttcctcacggcgcgtacagctccagctgaccagtgccgcgtattagtttacttcaggagtatgcttttgacgcaagacaatatttcgttcgaatctgacatgatgatgtagaattcgcagaagactagtgtaacaaaacaagtagcaactaaaagtggttcaggcaagaaaccgattacgatcaatgacagcgacgacgagcctgaagaggtcgtaaagacgcaatcgtcttccaaggctgttcccccttcatctgcgccaaacagcactgcatcaaaacactttggatccgtaagtctcgttatcatctgtccaaaccagggcaaaggctaatgaacccaaagaaggcaatcgtgctctcgtcggacgatgaacctgcgcctgccagatcaaaatctgtcaccaaatccgcatccggggctgcctccaagccagtactgacacgaaaaccggcattggcaaagcgtaaaatccttagcgactccgagtctgaggaagagtattacaaaccgcaacggaagagacaaagtctaggaggaagagctggcaaggaatctgatgatcaaggcacgaagagcaccaagaaggggaaaacgaagaacgacgacgactttggcgtaagtcgtctgtgttttgagttaccttccactcactatcccgatagccggtggatgttgacaatgaagatgagtataatttcgatgatgaagacgagcctcgggaaaagcccaagccaaaatcaactgcaaacaagtctcctgctgctcctaagaagtctacgtcagttaaaaaaccggcggaacctaagactgctaagatggaagagccagagaagaaggaagaaaaaaagtttgagtgtgtcttctgtctttcttcccatgatgccatgcccgtaaactgattggatacagctggcgagcggcagcggcagcgcgtgctgctggtcctaaagccccaggatccaaggaaatccctgagggtgcgcctgactgtcttgcagggcctcacgtttgttttcacaggagagatggagagcctgggaagggaggatgcgcaggagctcgtcagacggtattctgggtgagtatctttttatcatattatactaactcgaatgctaaggctttgggtatagaaaagttaccacggccccttctggaaaaacttcttacgtcgtagtgggcgaaaacgctggtgtctcaaaactcaacaaggtcaaagagaagaaaattcctatgatcaacgaagatgaattccttgaacttattcgtcaaagatcttctggcaaaggacccgatggaacggtagataaggcggctgtggaaaaagcgactaaggcaagggagaaggaggagaagaaaatcttggagcaggctaaagagatggaagagagggaaaagaaagaggaaaaggagagaataaggaagcagaaagctctggaaggacaaggtatggctgtcaagtgagctttgtcatatttccttggtgcatctctggcactgactgctattcagaaaaatgggtcctgcatcagcccagctgtggacgaccaagtatgctcctactagtttgaaggagatttgcggtaacaaagctcctgttgaacgcctgggtcaatggctgcaagactggtaagagtacaattaatgcttgatgtatcatggctgatatagtcacaggcaaaagaattacaaggcaaatttcaagaaacccggcaaagatggtatgggcatttatcgcgctgttctcatttccggtcctcctggtataggcaaaacaacttcggctcatctaatggcaaaagaagccgggtacactccattagaactgaatgcgagtgacactcgaagcaagaagctaatcgagaatgaaacaaatgtcgacaacaagagtttggatgggttcttcaagggtcaaggcgttggtgtaagtcatctaatgaagttcagaaaaggaaaggccactgacgagcgtacaggatataaatgccgcggggttgaagattgactctagaacctgcttgattatggacgaagtagatggaatgtccgcgggtgacagaggtggtgtcggcgctctgaacacattgatcaagaagactaaggtaagtggagcgcggaatgttcttcagactattcattgattattgttttggtagatcccaatgattttgatctgtaacgatcgcacattacaaaaaatgaagcccctacagagcacgactttcaacatgacttttaggaggcaagtcgtctttttgtattatattatgctgtgagctgattgtcaaggcagaccccagccaaacgagattcgctcaaggattatgtctatcttgcacaagtacgttaagttgtaagctaatcagtaacgagttaatattgcttaatagggaaaagctcaagattccacccaacgtcgttgacgagcttgtgaagggagttaattctgatatccgtcaagttttgaacatgctctccacgtttaagcttggtaagagtgaaatgaattttgacgaaggaaagcaattgtaagtcattttgatgtttttggaccttgaattaagctcattcgcgtctgtagggtcaaggtcaatgagaagaacacaatcatgacgccttttactatcatcgatagattgacaggcccatatgctttctccaaaaatagcaaagaaacgttgggtgatagaatagagctatacttccacgatttcagttttgtgcctcttttcatgcaggtaagttgcgaggaacttcacgcagacaagtagagctcatcgctgtatatcaggagcactacctcaaaacgaaccctactgtcttaaacaacctcgacggtcccgagaagaacctcaagcaccttgaattagtatccaaggctgcggactctatatccgacggtgatttaattgatcgcatgattcacggctctgagcaacattggtctcttttaccgctgcatgctgtagcttccacggtaaagcctgccatgcacgtgtatggtgcaatgaggagtcagggtggtggttggggcagctggggtcctgctttccctcagtatgccattttttcttctgccgcctatcgaatacgagtatgatgctaacagtgatctagatggctggggcaaaattcgaagcagaacaaacttcaaagacaacttacggatattcagattcgtatgcgtttgcgggtgtcaggaagcagagaggagattagagagcagtacatgcctctcttggccagcaagattgtatctcctctcattgatcgtggtgctgtaagtacctcgttagtgcgctacttcactattgctaattatcatgcaggcggctgtggaagagacgattgagtacatggacgaatattatcttggaaaagacgattgggatgcatttgtcgaacttggtgtggatacgatgcgggatgaggacatcctgaaaaaaatcccaagcgccacgaaggcctctttcaccagacagtaagtcgtatgtcgttcgtgtcaacaacagaaagctgatctttgcgcaggtacaacaagactgatcaccccatcgcgttccacaagggtgacatgtttgcgggggcaaagaagaagattgatgctggaccagtgccggacaatgaggatgtttttgaagtgcgtttgtcctgtgatccgacgggctatcatctgacttttcgtttcgtataggaagacgagcctgtgccggatgagccggaggaggatacggacgaagaggaggatccgttacaggataaattggtcaaagctgtaaagccgaaaggtaaagccgcggccaaatctgcatcaaaaccgacggcagccaagggagtaaagtcaaaagctaagaagtaagggaagatccgtagactctccaaactccaggacggagagattaaatatgtaacaagtatcgggtttcacaattttactgccttctaattatattgggcgaattgatattgcattgtttcttcgttcatttatgttcgttcgatcctcgatctttttcattccatccctcttcttgacgcattctgttcctcgggaatgaagggtcgggcacggagatgtttacagtgtccgcttcaaggaaacctatcatcaagctattgccgagttctttcatgcctattttctcttgaggcagagctgctgcgctgatgatgatatcactacacagcatcgtatggcatcagctgttggtggcaactcgttggcaacaccaatacctttttgacagcaaccagtagcagccggcacgactcacacttctcaataatatatgtctatcatgtactcagactggtgttcggcaaggtcgaagcacggatgggacagaggcctgaggagtgaacagctggatgagcaattccgatgattgagtcacctttcgccactcgccaaggcgccaagccctgagagcatcctttgatcatcgtcatgtcggtagacggagatgtccttcttccacgttctggctgctcccttatcaccagcctccaccggcacactattgccactaagcgcccgctggctcgatataataaacctccattcttcccataacaccccttctctttcttccttccttcctcttctatttctattttccagttcagttcttacaagactacaccgccaaacgttcaatggcttcccttcctatcgtcgagccagaacctgaaccagatatagagggccataatccccaacaacagatacatacgaacacttctacatcttccggctatccttccaataccggtgacgccacaagtcagcagcagcaaaatgtcttatcagaacaggagcctggtggctcagcacctgccatcaagcaacccaccacttt

SEQ ID NO: 301 - DNA, 4836 bp, Cryptococcus neoformans
gcaaattcacaaaggagggtggtgagatttacgaattggttttgaggatgcaaaaagtgagtgaaggccggtagtgctaagtgacatcattaatccggcaataaataggaatgtgaagagctggttaaaccaggagttcactgggacactattcacctccatgctcacaaagtggtaatcgatggattgctctcccttggcatccttaccggatctccagaagacatccttcagagcggtgtcactgccgccttcttccctcatgggcttggtcactctctcggcctcgacacccacgattctctgcagtatctccgtcttgttcacgaagatctcccaccaacaacaacttccaccccttcgaagctctacaaattccttcgtatccgcttgcccttgacgctcaacatggttctcacagttgaaccaggctgttattttgcccctcagctaatggaagagcatggcgtctggacaagcagattcgtggtccaggacaaactgaaggaatatgtgggtattggaggggtaaggattgaggatgtcattgtcgtaagggaacagggagtagaaaacttgaccacggttggaaaagagagagactgggtcgaagcggtctgctctggagccctttgatcagtggtttcaaaggggattattttgtagcagatatgcatatactaggaaagtggatggtgtcgaggagtgtgaccatgcatttaaccataggacttcaaacagtaagatttttttcgcaatagttatgcagcggaaaacgagggatctcttcttctttgtattcactcagcagtgaatgaggcaacaacgttctttatgacggcgatgtccgcctgtcaaaatattttcagaaaatgtgggtcagcgaagtgttggttgtggacagagaagtattcggctgccattctgccaagttcaattcccatttccagcattatctttccctatactcttctgtcacctgccgtgcattccattagacatgtcaggccacagccatcgtcccactctcaaacaggttagtatctctctccacatccagtcaatggtcttctgacattgctatagtcaaacaagggcttcaagtcaaagcatgcttcaaagggctctttgaaagctgctgccaaaggttcttatcgtttacaccctacagtgccttatactgatacatattctttgcaggcaaagtttctagttcggcccattctcatggtaccaaaaatgccctcggcaactccaaaaaggcaaggctcaatgccaatgctcagaagaggaccgcgaagagacaggcagtcattcaggatcaaaagtttttctcaactagcagcggaggaggtttgttcatctattcatcaggcgactcctctttgtgctaacaataataggccacgttcctcgaatcgtgtctgttgtccctcttctgccttcgatttctcctcgaactttcattgcgaaccttttgccttccttgggtcttgacgaatctgaactgcaagagatttctgccgcactagctgactatggaagctaccttcttcgagcgccccgctacaagacttccctccaaatcaaccttttgccgcctctttcagtctaccctacactcgatgctgcttttgtcagtgactacattgtgcttctgatgagtagtgtggatgaggttcagctgcagggtgaaaccattttaaggtcattgcagggtcaggttggaggcgcagagattgttgcttgtgttcaggtgggtttgccatggcatgagttaaatcacgctgatgtgccatctgtaggcacctgaatcaaaccctctccgtcctgatactcgacaactcatccataaatcactcctgtcgttcactcgatactttttcccatctgttggcaaaatatattcatccgacacacctcaagaatctttgttacttgcacgagcgttgtgtgaggcagctcccaagggtatgaggggtgatgatgggcgcgcctacatcgttgcggagaaccccaattccatcagatggacaggcagtggaatactgacagaagatggtcaagaaaaggggcaattggaaatcattggcactgtcagaggaggaggcactctgaacgctgatagattagtacatataccaggaagtggtgattatcaagtggcggcggtatgtacatcgggtgtacgtggattgcaaccttatctgaccttcccgaacagattctttcagcgccgttaccttcaaaaagacaacagactcaaatcgctacaaacgacactctctctgtaccaactgaagatgctgatgacctcactgccaccaacattcctgatctccttgcgaacgaacaaacatggcctaccgaggaagaaatggggggcagtatggagcacacagttgaagaaccagttgtgaagaaaagggtaaagagagtgcccaagggaactagtgcttatcaggctgcttggatcgtggatgatgatgaagaggtcgatgcggaggatctgagcgacgatgagagcatggccgcatcaggcgacgaggctgcatccgctggagagagaagcgctgcggaagacgaggaagaatttgaggatgtcgaggttgattctagacaagaggttgcccacaaggatcttgatccggaacaagaggaagcagagtaggtttgtcccgacagagagtagttcttgactgatttacgtctgcccagctatgaagcttacttgaaggaacgttctaaggccgatagagaagacgccatgttcccggacgaagttgacactcctcgtcatattcctgccagaacaagatttcagcgttatcgagggctgaaaagcttccgaacaagcccctgggacccctacgaggatctaccgattgactatgctaagattttccagtttgaaaattttgcggctacaagcaagagaattcaactggagggagcacgagaaggtgtcaaagtacgttattccctccaaagcgaagaaccttgatcgattgactgatgacatgtgtagactggaaccagggtcatccttgttcttcgtgatgtgcctcgttcagtcattgaggaccgggaaactggtattcccttcatcgtgcatggtcttttgaggcacgagcacaagcaatcagtcctgcatttcgttgtccaaaggaacactgagtacgcggaacctgtgaaggctaaggtaagcgaccgtctgttcatccaccttccaatcgctgacaactcattttcaggaacccttggttttatgcgtcggtcccagaagatacattgtgcggcctttgtactcgcagcatgttagaggaggtggaaaaggtgccaacaatgtgcacaagtcagagaagttcttgaggccaggtactgccaccgtcatgtctgtctttggaccgatctgcttcggcaagagcccctgtttgttgatgaaggatcgaggtatcaaaactggcaagttcattctatctcatatagacgcctattctgacctgcacccgttgtcagttcctgatctggtagctatgggaagcttcctctcgtccgatccaacgcgcatcatcgccaagagaatcattctcactggtcaccctgtcaagatccacaagaagactgctaccattcgatacatgttcttcaaccgcgaagatattgaatacttcaagtctgttcaacttcacacaaaatacggaaagatcggtaacattaaagaacctctcggcacacacggatactttaaagcccactttgacggacctattcagcagatggatactatctgcatgagtttgtacaaaaggcagtatcccaaagtgagtgaatgacatgagaatgacatgatatagtggctgaatgttggttttccagtggtctgaagagtttcgtcctcagttggctgttggtgcgattgaggaggctggggaggatgttatggagacagatgagtagcgagttcttcgtctacttgcaaagaactgctttgtacttcatatgtaatgccttatgtcttactgttctgatctattgtccattgcatcaccgcttgtttactgccgccacattggcgattcttctcacgtatccgtcattggcaacatggatttaaacataggtttccacatcgtacgtaggcggccggagaaaaaaaagtagtcgcgtgcatttgataatatagcagtatttggcgacgcgcagggcaggcaggaccttgatggctggtcagaacaggctgcttttcgctgtgtctttctcattctgttctggcacaacttatgctcagtggacaatccagatttgacacgacagaggccgacgacttaactgagcgtagccggactctcgtctttggatcatgacgacgcccttctccgaccgagcgcccgccaaaatccaacaaggaacttcgccccccactcttcatcacaagacgttgtcggcgtactatccttacatctacactctctccaagttcatatcttctcgtctagaaggttttgaaagtcaaccgcacgcttctaatactacagcgttcagcacatttctcaaaactaccctctgtgctttcaggaatgaggacgaactcaatcgcgtcgaacttgacaaggatagacgtgtcatcttccccactcagcaggaggctatagataaagctttgagccatgttgcaaaggcgagytccggccccggaaaggtccaaacttgttgctttttcgcacatcgtcgaaggtatgtgaaaattaggtagattcaaagttattttgaagttcatgcgggctgtagttgcacatacaagatctaccgatcaacatgtctcgcccatcggtc

SEQ ID NO: 302 - DNA, 4744 bp, Cryptococcus neoformans
aagtcgacgagtgtctgagtatgtcgtttacggagcgaatcgagttcgttctgtgatgatagatgcgatgattgaagtatgtcaagcttttcttgcaatttcacgttttgcagcttcagattctcaatttggtcctgatactgcaccaattctcagtgatttacctccgcagtggcctaaactgatttaccttaattttcaaagctgaatattgatccgtcatgtcctccaactttctctcaaggtcaccagctttggaatgtgtggacggctgttgagttcgagacaatttcttgatggtttcatccctcctttctatcttcgctttagccctctcaagctagaagtggttgtcaatcatgggctgctacttgggtgatgcgtcaaaccaggacatacttgatgttttgcttcaaacaaatgcctttctaatgacttcacatagtcctttgtgtcaccttgagtcacattgatatgcatcctatgctccttcctgatcaagaatcagaaagcacccttgatgtcagacgttacaacacttacgggtgtttgttattaacatcttgatttggcagcatccgctcgccaaaaggtcgacgaaccttctgctcttccgtcattcaaattgtattatagctatctattgtaaaagggaaattatagaagcattaatcactgagatggacggtgtaggaatgtggaggtattacttatagatatgtcccacgcattacggactcgaagtcactactcatgctgtatgttccgtcgttcgttcgttgtttggctcattcgaggtcaggcgggaccgaccgccaccgtgggaaattgcagaaatatcgttgcggccattcccgcccgttgaaaatatcttcgaactcttcttcgccttcgcactttcgtcctgcctttgagaattgtatccttagcagctcatttagaaaccatatacatttcttcatcacgtcactcaggattcaaggaacgatatccagtggcaatgaagtccaacttcgtctttcaaaatctctgcggtaccgtttacagacaagggaatgttgtctttacgcccgatgggaactctgtgttgagtccggtgggaaacagggtgtctgtgtttgacttggtgaagtaagtagtcacgggtgtgctagatgatctccggctgatctccgcttcagtaacaagtcaaggacattgccctttgagaacagaaaaaatatcgcttcaattgctctttctccagatggcaatgtactaatttccatcgacgaaggtgaatattcctatcgtcaattgatgtatcttatctgacaccctggatgctttagatggaagagcactgtttgtgcacttccgtaaagggacagttcttcaccacatctccttcaagcgcaaagtccaccacgtttcattttctcccgacggcaaatatattgcgataacgcacggtcacatggtgcaaatatggaacactcccagccatttggtccgagagtttgcaccttttaccctccatagggagtatactggtcatcacgacgaagttgttagtgtctgctggtccaaaacctccaggtgagcgaccacaaatgatgtcttgcaaaacggaagttgatcagaaacaggtattttatcactacctcgagagatatgactgcgaggctatataccattaacccacttgaaggtttccaacctaagcaatttgggggacatagagatgttgtgttgggagcgttcttttctcaagatgagaagactgtaagtcataatctctctcagtcgaggcgacaaattgatgttctatagatttacaccgtttctcgagacggtgcagtgtttgtatggaaagcaaaaaagggcgtctctgaggcggactccgatgttgagatggacattctcgatgctcccaccacttccacctctgccgccaaccttgcccttgagcacgccgtcgcctacactcgatggggggttcacgctcgccacttcttcaaccaacctggtacgaaagtgatttgcgctaccttccaccccaaaacatctctcctcatcgtcggcttttcctctggtgtcttcggcttgtgggagatgcccgaatttacccccgtacatacgttgtcgatctccaacgagaagatctctagtgtggcagtctccgcgtcgggagagtggttggcatttggggcggccaagctcggacagttattggtttgggaatggcagagtgagagttacgttcttaaacagcaaggtcactactacgacatgaacaccctggcgtttagtcccgatgggcagaacatcgctactggcggtgaagatggtaaggtcaagttatggaatgcttcaagtggcttctgctttgtgaccttccctgaacacactgccgctatctccactgtcgaatttgctaagcagggacaagttttattcacagcgtcccttgacggtactgtccgcgcatacgacctcatccgataccgtaacttccggacattcacctctcccacccctgtccagttctctgccctcgccgtcgatccttcaggcgatgtggtctgtgctggatctcaagattccttcgagatctacatgtggtcagtccaaaccggtaaactgcttgacatcctcactggccataccgctcctatatcaggcctcgccttctctcccaccggtaatcagttggcatcttcctcttgggatcgttctatccgtttatggtcagtcttcgggcgatcaagagccaccgaaccgattgagctttcgggcgaagcgactgcgttggcgttcaggcctgacggaaatgagatctgcgcttctactttgaacggggaattgatctttatcgatgtggaagaargacagattaagtctgttattgaaggccgaagagatatttctggagggagaaaggtggatgaccgacttacagctgccaataacgccgcaagcaagtatttcaacagtgtcatctacactgccgacggtgcttgtgtcttggctggtggaagcagcaagtatgttgtgttgtatgatcggacggaaggcgtgatggtgaagaagttccagatcagcgaaaatctcagcttggacggtacgcaagagatgttggactcgaggaagatgacggaggcagggaccatcgactcgtttgatagacaaggcgaggaggaggacttggaagataggttggactcgacgttgcccggtgccagcaagggtgatctttccaagagacggtatagacgggaggccaggaccaattgtgtacgtttttctgccactggtcgaagctgggcggcggcgagtacagaaggtcttttgatatattctctcgatgagagcaccacttttgacccctttgacctctccctcgatcttacccccgaatcagtgatgcagaccgtcgtcagtggtgaccaccttatcgctctcattatggctcttcgtctttcagaaaagcctcttatccagagggtatatgaatctatacctccttcatcaatccgactcatcgcccgccagttgcctagggtgtacattacccagtttatgaaattcatcagcgaccatatcgagaacactcctcacgtggagttcgatttggtgtggacagctgccatgttgactagtcatggaaagtttttgaaggagaggaagggagagatggcttcgacgttgagaggattggtaagagggttgatgggtttagagatgagtgttgccaagatgtgagttaacaagcaatataattaatcgggatttataataaatcgctgacgattctcatttagatcggatgagaacacattttccctcaattatatcctttctcaggcaggcaaggatgatcaaatcgaatttgaagaaggtgaaggggatgcgtttattttggacgtcgatggcgcatagacatagctcatgagaatgtataatatgatcttagtgtcggatcggatccttccgcctcatgattgcaattcgtttactctctcgtcctttgcagacagattaggctattgaaagatggcctggcgaactcggcagaattcaaccccgatccctatttctgggtcgtggcctgctgatagcaagcagatgaccgcgatattcaggtttgaagtgcaaactcggagatacaaaaaagatttcatatgatcttgctataggtcttatgcatggagcagttttcttcaacacattaagtatgccgttttatcgtcatgtgatgcatgttaaaccaaaatcaatgaggctatatgttgtgcgaactgcaccctatgatcgtgtacgttttcagctttatattattcggcgacacaggctgggtcgcgtgtccagcacatagaatagtaagcaacgaccatgagtagatgaatacactttgcgtgggaatacaactgtaggctttaaagtcccttatttgtttcttcttcaatctatctacctaaaccttccagtgtcgcctgaactcatcagcctgcaaccggaagttaggagtctgattcttctttctgatgtagcactcactttttggctaaggacatcccatccagtacctctcccatttaacacaagcagaaacttttcgatccgtcctggtttcacttccggtaaaaggttatctttaaggacaacaggtgatggagcatcggctggtggtaatgggagagaagtgaagtgtaatctaccaagctagatacaggtgtcagtttgaacatttgagagggtggaa

SEQ ID NO: 303 - DNA, 4795 bp, Cryptococcus neoformans
ttgggtgactaataatgtttctgttgtcggccggtctgaacgcgtcgcgacgacgcgttgacccacacaaagaacttacgacgcacatgtaatgtcttgcatggcgcatgacggatgacggacctcacattgagcaattcaaaattcggaaccagctggcacgactcacgacattactgctgtggagtattatttgtacgacagtcagagatagaataatagaagagacgtagtagtaatggaggaggcggaatgcgaaatgcggtctccttactgtatatactacaccttcaggcagccttcagtctggtctacagtagtacccttacactgctcttcggttgaaccacaacaactcacaacaacaacaatcatcagcagttccctgttctgttgttgttagttgtcgcttgcgatctattgatgaacaagcggccgggaagactagctaaattgtccctgccagaggccagacacgtcggatccactatttcaccttctacacgtgtcgctttctgtgcgaatagaggcacacgacctgagatgaccaagcaagacacgaagcggcccttaattctgcccctagaaaagcgcctcaacgcgcgaaaagacgcgtaaatttaatttttctattaaatttctggttttcgcgacgcgaatattagaaaaaagtacgtttacgtaatgttttagacctgaacgcgtcgaacagtagaaaaggaaacggatgtccgtggtgttttctcttttccctcttctttcgcgattcttaccaacacttttcttcttctacagacaatccacctacgagactctatatagggtcctagcactgtaaacagcactcaattacggctgtaagtgcttctgtctcttctaaatatggtgaacgtaactatctccgccgatgagctcaccaaaggcaacgcgacgctcttagtcattgtatctccgtcctcattttatctcaatactttttacgtagttatctcctttcagtatggtgatgtggatctacaagcgcgatgggcgcaaggagcctggtgagtggcagtcattgatgcgttcttctcaaagccacgctgacagtacttacagtggcttttgacaaggtatgtctcatagtgtctttcaaaatcaaggcagaccgctgcaaaatgttctcatattctgacatttgattttgcgacgtttcaactaggttactgcacgagtgagtgattgctcatttttttgtcctggacgcgtcagtgctaatgtttggtaaatagatcaacaaactttcatatggtcttgatcccaacttcgtcgagccggccgaaatcacccagaaggtcgtccaaggtatccacgctggtattaccactgttgaactcgacgtaagttcacgtgtttgttcacttgacgcgtcatgcatcgctcatcgcctgccatagaatctcgcagctgaaactgccgcttaccttaccaccaaacacccagattatgctattcttgctgcccgaatcgccatttccaaccttcacaaggagaccaagaaggttttctctgccgtcgtgcatgacctacatgcatgggtcaaccccaagaccggcaagcattctcccatgattgatgatgacgtctataagattgtcatggacaacaaggatattctcgactctgccattatctatgacagagactttgcctacaactactttggtttcaagactcttgagagatcataccttctcaggatcaatggcaagattgtcgagcgccctcagcacatgatcatgcgagtcgccgtgggtatccacggttccaacattgacaaagtgatcgagacctataaccttatgtctgaaaggtatttcacccatgcttcccccactgtaagttattcaaccagttgtgaaaggtctgttgccgacaaatataacagcttttcaatgccggaactccccgaccccaaatgtcatcatgcttcctcgtggccatgaaagatgattccattgatggtatctacgatactctcaagacctgtgctcagatctccaagactgccggtggtattggtcttcacattcacaatatccgtgcgaagggctcctacattgccggaaccaatggttactccaacggtatcattcctatgctccgagcttacgatgccaccgcacgatacgttgaccaaggtggtaataagcgccctggtgccttcgccatctatcttgagccttggcacgctgatgtgtttgacttcattgacttaaggaagaatcatggtaaggaggaggtacgagctcgtgatcttttctacgccctctggatccccgaccttttcatgaagcgtgtcgaatccgatggagactggactcttatgtgtcccgccgagtgccctggacttgccgacgtatacggagaagaatttgagaagctctatgagagctacgagaggaaaggcaaggggagaaaaactatcaaggcccagaagctttggttcgccatcctcgaggctcagaccgagaccggtgtcccttacatctgctacaaggatgccgccaactccaaatccaaccaaaagcagcttggtaccatcaaatccagtaacctctgtactgaaatcatggaatattcttctcctgatgaggttgctgtctgtaatcttgcttcccttgctcttcctgccttcgtggaccttgaacgtcgcgtttacgatttcaaaaagctgcatgagattaccaaggttgttaccaagaacctcgacactgtcatcacccgtaactattatccagtgcctgaggcccgtaactccaacatgcgtcatcgacctgttggccttggtgtgcagggtctcgccgacgctttcatggcacttcgcatgccgttcgactctcctgaggctagagagctcaatatccagatcttcgagaccatttaccacgcagcgcttgaggcctcatgcgaactcgccgaggagtttggtacctatgagtcttacgaaggttctcccatttctaaaggtatccttcagtacgacatgtggggtcgtgttcccaccgacctttgggactggactgagttgaaggcaaagatcgcacaacacggtgtgaggaactctctgctcgtcgcccctatgcctactgcctcaacttctcaaatcttgggttggaacgaatggtgagcaattccatgctagccattttcttgctgtactgattatacttttagctttgaaccttacacttcgatgctttacgctcgacgggtactttctggcgatttccaagtggtctgcccttggttgttgcgagacctcatcaaccttgacctttgggacgacaacatgaagcagcttatcattgccgccggcggttccattcagtccatccccaacatccccgatgatctcaagaagatttatcgaacagtctgggagatttcgcagaaggctgtcatcgaccttgcggctgaccgaggagctttcattgaccagtcccagtcccttaacatccatctctccaatccctcgttccctcagctcacttccatgcacttctatggatggaagcgaggcctcaagacgggttgctattaccttcgaacccgtccttccgccaacgccatccagtttactgttgatgcttccactctcaagactgcgaagagcctcaactccagtgccaaaccctctccgaccccttctcctgctcccggtgcaagtcgtgccactgcagacagtctcgtgcaacccatgaggaaggtcaccattgccaccactgcttcccatcacccccctcagcccgatgaaacaaatgactcaaggtcccgtgacagaagccctcaacctagcgaggaagaggagatcacctacgaagaggcgaagaagcgcgctgaagagagagccgaagcggcgttgcaatgtagtattgagaacaaggacgcctgtgtcatgtgctctggataggggcgtgcaggtcgcgcaaggaaagattaaaagtaagagtaattcagttttgttgtaccttgttctgtttattttcttcttttggactatcttatatcttatatacagtttcggcatagctttgtgatgcacgtagtttgcgatccattgtataaaatcattctcgcatgtttttttactgcacaactactgcgatacacaggcaatgggtatgatgtcagtagaaataactattatacattattgtcgttcacatgtagcgtctaacggtagtaatctattgtctagaatcggcaaatgatcctaaatgcgctgcaaaactctgacgctgaccattactatcagcccgacgatgaatagctcttgtatgccataactcctctcgctcatttttgaagaagcccatgaaatgtgatccgaaaaaagcacgcttccatttgatccagcatactgcacccctaattcatttaatgctcctgtgcgttcttgcttgccgctctcggcgaacaacgtatctaaagcgttaaccccttgctagcggattgtttcagccctagatgattgcgatgactgggaaggaggagtccccagcttaccatatcgtacattgctccgaaccaaaaccatcgttcaacccagctcacactcttcatataagcggtggccacgtccatgaatcgttggatctcggtgtagatggcttgtccgtcatatgtgccagtagtcgtgttataaactgagaagttttgaggtgcaaattctgtgaaaggcggtcagcctgaagcctgacagactgttgggaaaggactaaagacccaccagtcacccagatgttcttgccat

SEQ ID NO: 304 - DNA, 5074 bp, Cryptococcus neoformans
tctcttctttcactggtgcctttttggcctgaggctttactccctggtggttggctaacattgcctcaaacttctcagccacaccttcgaatcctccaaagaaccccccatcaaactccttcaaagcctcaacaatctccgccgcatccttccctccctgctttggtctaaagcccgccgttctcctagctttccctgattctctaggcttgcgcttttgcacctccactctaaactgcaacggtgcatctttccggccagaaggtgagtcgtcgattgtagagttgaagataggttcttcggaaaggacgcgagatacgtcgctcaaactaggacctccgaggaaatttgactctgaggaaagttggggagagggtatttcgagtaagagaggcttgtccagcttggctggtcggagagtctcgatgaagattgtagggcccggttgcagagaatcttgctgcttgggcatttgaatgttcagcacagaggtgcctagtttggattctacggccttgacaatggaataggcgtgaatgagtgaagggatattattgaaggcgcgaatagcaaaacgggtgtggccgtttgaagggtcaaggtctgggtgggggaaggtgatgtgggtgcgcgatgtgattggggttatgagagtgggaacagcccgacaaagaacagatgcttgtgagaagagggtgcgtgggttcataatgggtgttgtggactgcccttttggtggttttgagaagttttgtagacagttacgttaagctgctttcgttccaacttttccgaagtgagagggcagcggcgggatcaaatgtcggaaaggtggatcggcgaaatccgccggccatcttagtcgcatcagccagcacctcgcggtactttgtgctccgttccaggagctctcgactgtccctcatatttcgttctttacatcttcattcccacgtcgactcccctgccatctgctctagaatctccgatacgccagaatatgtccgcatcggcttccggatcatcttggacagagcccacaaaggctcaggctcctcctaagtacgtcttgtgatggacttccggccctttatgccctagctgccgctacattcctatattttagagtggccagtgatgaaatgcgaaggccaagagctaacaccatccatctttagagatgcggacttgaaacaagcttgggctttcctttctgtcggtgttgaccacattatgaccaggtgagtcagctgctgctttaacatccgtctctcatctgaaatgccaagtgctaacccaaaataggcttagctttggaatgtcttactcttactacatcctcctatataccgccatctacaactactgtactcagccaggcaagactggtctcccttcattttcaccccaacggggcggagctagtcttcaaggcgccgacctccacagaagcttgcacaattggttatctgctcactgcaagtccatgcgagaggttcgtggattgtttatgtcataaaggtttggtatcaaaaggctgataacaatttatctgcccttacgcaggaggccgagaaacttcctgaccaagaacttctcaagtattatgctcgtcaatgggacaggtacacccgaggcgccttgtacgtcaacaagcttttcaactatttgaacaagcactgggtcaagcgagagaaggacgagggtcgaaaggacgtttatcaagtgtacactgtgtgtaatttttcctcgctcttccgccactttgctgacagggcaatctaattgttcagcttgcattggtatcttggaagaataacttcttcgatcatttcactgacaataaggggaccagccgattaactcaagctttgttacggcagatccagcagcaacgtaacggcgaggaagtcgattctggtcttctcaagaaggtcatcgacagttatggcaagtgtttcttgtcgctataagagatggtttggctgatgtgaaaatctagtctcccttggtcttgacgaggccgatgctcaacgacaaaatctggatacctataggaaacatttccagactcaattcctcgaagccaccgacacctactaccgtgctgaatcttctgcatttgttggttccaactctgttgcggactatatgaagaaggcagaggcgaggttacaggaggaggcggacagggtgaacttgtatttgcatgataatactaggaacgatgtgagtactcttgatggggcgcacttttcggtgctgacttctctgtagttgaagacaagatgtgaaaaggtactcattgaagagcaccaagccattatgtgggatgagttccaaactcttcttgatagcgaccgggttgacggtaagttatatatatatatatatatatcaaactggtactgatgcaaattttagacttggcaaggatgtacggacttctttctcgcgtgctcaacgggcttgaccctttacgagaaaagtttggtcaacacgtcaggcgtgctggtagagcagctgtggaaaaggtccttcctgccccaggagctgtcaatgaagctggaaaggctgagtctctcgtaagtccgcctcaattgtgaaatatagacatcattaactgtttgcctaggatcctaaggcgtacgttgaggcccttctcgaagtacacggcaagtatacctccatggttgaagggcccttccgaggcgaaatgggtttcaaccgtgctctcgatcaggcctgtggcgacttctgcaactccaatgctgcttgtactgtctctacaaagtctcccgagttgttggctagctactgtgatttattgttaagaaaaagcaataaggactctgatgctgaatctttggaagcttctttgagcaaagctgtgagtttgctttgattttgttgttcgcctttgctaatggacatcgtcgtagatgatcattttcaacttcattgatgacaaggatgtcttccacaagttctatcagaagaagctcgctcagcgacttgtcggttctctttccgcgtcagacgatgcagagagcagcatgatcaccaagctcaaggagttatctggtttcgaatacaccaacaagttgtctaaaatgtttaccggtgagtctgtctttgtgttgtatcgagactttgtactgatcaggaacagatgtcaatcttagtaaagacttgatggaacgattcaacgaaagggagagagagaagggcatagcctccgatagtgagttttggtacgaaagctaggtcaggcgcactaactccattcaacagtcgatttccaacccttggtccttggctctaacagttggcctttgcaccctcaacaaaccgactttgccattcctcgtgaaatccaggccctctatgatcggttcaacgccttccacggcgaagttcatcagtacgttagtctcaatttctctcgtcacacggcatcctgacatactatgtagaggccgaactctcaactggttatggcacatatccaagaacgaactccgcaccacctacctcaaccaaaagtacattttgatgacctccgcctaccaaatggctatcctcacacaattcaacgtttccgacaccctttcttacaaggatattgaggccggtaccaagctttcccccactgtgctcaagccccagctcggcttactcgtcaaactgaagattctcttgaacactaatgaagaatattctttgaatacgggcttcaagagcaagaagattagggtcaatttgaaccagactatcaagtctgaggctagggctgagcagaaggaggttatcgctgctgttgatgaggacagaaagtttgtttaccaggcgactattgtaaggttgatgaaggggcgaaaggtatgtttctagtcgaggtctacttttgtgaatactgacagtttccatttagactatgcaacatcaagctcttattcaagaagtcaccgctcagatctcctccaagttcactcctaaaattccagagatcaagaaagcgattgaatacttgatcgacaaggagtacctggagcgagctcccgattccaataacacttagtacgccctgatgatctcttgtccgaaggattagcgcttatattcccgatagcaactacttggcctaagtgtgttctctgatttggttcataaagagcaggtaaatgagcgataggacgagattgtagcatgggaaatgtcatctggtggatacccgagacgaagcacaggtggatgccgaatacagggcaaaaggctgagggtatgtagaattaatagcccatggcactagtctcattatagcattttttctaccttgtaaacatgtcagtatatcgtctattaagctgaatatggaaaatgtaactgtggctcttttgtagacttgttgacatggttggtaaggtagtttggtctttacatcgcggactttcttctctgaatttttttctttttctttttcgaaaatgatggaatcatatatcccccagggatctcagttcgacaattatatgataacaatgccatattgatcacttctgttgaagtatttttctcatacagtggatcacccattgaaaaagtagctgtgccgggccatcctgctacgaacaaaagcgatatcttcacgacagttggattaattattacgctgcttcttcgtgtaccaatattttattgccatttttatgtatcagaaaagtccgcggtgtactaattgtatctcttcggaaaaatagcatctgatcgaaggcgatgggggatgataagataccgaaaagtcattcatgcaagtgttttgttacaacattctaatttaacaagatcggaaccgcgagttaatgatgctcgatgccattataaattataatttcttaatcttcctgggcccaatggtagagaaaagtatccgaaggccaacaatcagttgggcaactgaaacctgacaccgccggtttgaggagcccatcgaaggtggtcccggtcttcgtagatgtgcttgctgagcactagaacgcaatatgtcagtatgaaagcttcttcccggaggagg

SEQ ID NO: 305 - DNA, 4738 bp, Cryptococcus neoformans
gttgttcaaaaggacaaatctgcggcatgacattcgcgaaaaaacagtaaagaccgacaagcaaaggagtcaaaaggctatctagacggagaagttgaaacttcacacagtggcgtcaaaccgtagcacatatttatcaagcacacatccgtcgagggaagaggcgttatttttgaaaggattgaaagtgggcagaaaaaatatcttctcattagagtgcattttcaaaaaacatcgaagcctctatagtttagttggctataacaccccactagtagaaattagcgatcgctttcattaatggggaggtctgtcgttcgaatcggcatggaggcattttctttttgatactttggatgatttttttgatcatcatcaaatcacccgtttctcctgcttttctatgtatgtataaagaattataatcccttcttgtcttgcatggataacatccctcatccgataatctatgcctgtcagggctgtatccgtgttatgtcttgaagattggaagggggccgccgatgtgaggggatgtgataaggtcgcgttccacgtcatgatactcgcagctcagttcgcgagcgatgagcaaccgatgaaatggctgaacacgcagaatgcttattcttttaacttgaaatccgcctttcatcaatatctcctactccatcccctggcttcaccgcagcgggagcatatctgtcccacagctctccgtaggtcttcatccagtagcaaaagcaaccagccggctccaagcccgacgcgctacctgctgcgttgcaatcatttccgcagtatatccttctgtgcttgacattgtcacataacgccatagcttaaaaacagcacaatggcacccaagccagccaagacatcttccaagactgcgaagttgccgactcctgcagccactcctacccgtcaaccttcggtcgataccctctcaaaaccgacggtggttgacacgcctccgacgccggcatctcctgcccaggtcagcgctccagttcctcccaagaagtttgcatatcccatcccatcacgcctctctccgtcgactatcaacaacacggaaagcttgttgcgcttcatcatcctggcgttaatatgcggtgctgcgattggaagtcgattgtttgcggtgatcagattcgaatctgtcatccacgaattgtgagtcaaatctatccgcaggattctctcaatgctaacgtctgtgtcttcatttcagtgacccctggttcaactagtaaggctattcttcgaggtcaaacttccctactgatttattcctagccgagcctcgaaagttcttgttaacaagggtttctacgagttctggaactggtttgacccctccgcttggtaccctctcggcagaactgtcggtaccacgctctatcctggcttgatggtcacgtctggactgatttggcatgctcttcgggcaatcaatatgcccgtggacattcgcaatgtctgtgtcctccttgcacctggattttctggattgactgcctgggcgacttatctgtcagtgtaacaaattatctgatcattgcatacactaacatgagagcgttgtagtttcaccactgaaatgtctacaccatcagctggtctattggcggccgctttcattggcattgtacccggatacatctctcgatctgtcgccggttcttatgacaacgaagccattgccatcttcctcttgatgagctccttctactcttggattaaggccgtcaaaaccggtagctcattttggggtatgatcactgccttgttctacgggtggatggttgctgcatggggtggttacgttttcatcaccaacagtatgtcgctcggccctcaattgaattgtctgtttactcttttgcagtgattccattgcacgcctttgttctcattgtcatgggcaggttcaacaaccggctttataccgcttactcttcctggtatgtcattggaactatcgcctccatgcaggtcccctttgtggagttcctccccatccgaacctctgagcacatggcggccttgggtgttttcggtcttgtacagctgatcggattcgtcgaagtcgtccgacgactcgtgcctggcaagcaattccagctccttctcaaagcttttgtcgtggccgtattctgcctcagttttgctgccctcgtcactttgactttctctggatggatcgcccccttcgctggaagattttattctctttgggatactggctatgcgaaggtccacagtgagtcaaatgccataccttccgggatctatatttattgtcaacatagtgcccattattgcctccgtctccgaacaccagcccaccgcttggccctcattctactttgacctcgaaatgcttatcttctttttccctgccggtgtcttctggtgtttcaaggagcttcgcgatgagcagatcttcatcatcatttatgccgttctcagtgcctattttgccggtgtcatggttcgacttatgcttgtcatcacgcctgttgtctgtgtttcctccgccattgcgttctccaaacttctcgaggcgtatattgaccccgtcatccccgaaagcgacgaggaagctggcgagtctcagacgcaggttgtctccaagtccaaggcgaagaagatggccgctgccaacgccaataagagcgggttctctttcacaggtattttgagcggcaagtctgtctccggcatctttggtctcgacactcgatttgctgtggtttccattctctctgtcttcctcttcatctttgtccttcactgcacatatgtgacttcaacagcgtattcttcgccttcagtggtacttgcatcgcgaaacccggatggtagccaaaatatcattgatgatttccgagaggcttactactggattcgccaaaacaccgccgaagacagcgtcatcatgtcctggtgggattacggctaccagatcgctggtatggctgatcgccccacccttgttgataacaatacctggaataacacccacattgccacagttggtaaggccatggcttccaacgaagatgtcgcatatcctatcttgaggaagcatgatgtcgattacgttcttgtgatctttgggggcttattgggctactctggtgacgatatcaacaagtttttgtggatggttaggatctcacaaggtgaatggcctgacgaggtgcaggaagtcaactactttactcaaagaggggagtatgctgtcgatgacagggcgtgcgtctatttttgtattattgcctggcgaaatttgctgacaatctgggcagcacccctactatgaagaactctctcatgtacaaaatgtcttactaccggtaggtcaaaatacattgtcgatagatgaacatcgtctgacatatctcagcttccccgagctttatggtggacacccggctcaagacagggttcgaggccaaattatccctcctaacagtgttactcttgatactcttggtaagtttagggtttgaagataagtgtataagacgctaatgtcgtcacattcctgcagacgaagcgttcacatccgaaaattggatcgtcaggatctacaaggtcaagaaggaagatcccattggacgagaccacaaggccgttactgcctggaacgggggtaagaagttgaagaagagtcctagtgccagtgagggcgtgaagcggggcagcgggagacctagcatgtgaggtataggtataggtttaggtatcttcggagaaaagtcaaaaagagatgccaagcacataaaagagcgagttattgcctgctgctcttcccttgtaattcaagtctttgccgttagtaaaatcgatcgacagatcagggacggatgttgaatggcaataatatcagacatctttcgtttaaacagcttaatctctattgttttttgcgtcacactcactgcaataaagaagcagcggtttattgaggcttagacaagtctttgaaaaaacagatgcgatgtacaagtaggacatgacagacgcgctttcttattggctcttatgatagaagaacgggaaggaaaaagactggctaaaaaaaatgcctccatgccgattcgaacgacagacctccccattagtgagagcgatcgctcatttctactagtggggtgttatagccaactaaactatagaggctcgacagatttttttgtctacggaaaaccttcagaatgaacattcttacgccaagttaattattgctggactaataacggatagttctttccttttgtcagaaccggacagcgacagggaaaataatacagtgacaacgaagcagatcaaaataataattagtgccatactttgcgagcgcccggaatgacagctttattttcgctgagctctatatattaagatacgttacaaaaaaagcatggctccatgccgattcgaacgacagaaagacctccccatcaagcagcgagaggtgccacgtacgacgagactcctgacgcaagcctcctgaaaccagttaaagggctactatggggtgctacagccgacgaaactatagaggcgacgaatggaagaaattgagggcagtcttgctttattgatgcctcatatatattatttctcgcgtaaaatgttgctagaacgggcagcttttcttcttgcagtctgcgtttccttttctatcgatggataagcgttaataaattctatttctgac

SEQ ID NO: 306 - DNA, 4863 bp, Cryptococcus neoformans
acggaaggacgagggaaagaccgtcagcggccagtgcgacgctagcctttttaggtctttgaggtctgtcagaggcgtccgtagcttcttcatctgatccgacctcttctccatcctcgtcctcccagtcttcttcatcatcgtcaccttggaaatcgtagaagtccgccaactctgcacgatcttcgtccgtctcatacgcaagcttgcagtggttcttgtcaatcatgtgttttcgcacagcttccaaactgccgaattccttgccgccgttagggcagaagatacaaagattacccacagccaccttttcaccgaggtatgaaaggaggccggcaaggtcaatgaggatttctctgtcggggatgaagaagctgtggatactagacatgtgaccgacgttttcatcgacagtctcggagtggcgggtacagaaaagacagtctgcgggttttatacgtcgtcggaggttggccatcttctgctcaaagtcaccctcttcgtcgtcctcgctgtcaacatccatctcgctcgcctcatcctccgatccatcatcgtcctcgctttcaaccttggcgggggcgggaacaggctttttacctaaccgctcatcagatgcggcagcggcttctctgtctcgatgctttttggactgaacgtgggtcctgaaagcgttttcagatgagaattgcttgctaatatcacatcagtatttcgtcctactctcctccatttttttattttttagcgtagactcacttgcaagcggcacaggccaaacttctagggtctgtcctgacggcattctgttccctcctctccaagactttttcgttgaaagaggccgcagcgactggaggaaggtttgcgaccctacgcttcatgttgtagcggtgccagtctgtcaagaaatgggcgcgctgctcatcggcagcctcgaatgcgacacggcatgaaatacaggtgaacatggtgaagaatttttgtgtagttgatatagatgaagaatgaagatattatgatgatccaaatggccaagcaaatggctgatgagtaatgaatgggtggcggcgaaaattaattataaaaaaaaattaaggtggaggtcgggttttttgaagatttgttttgacgagttcaccattcatcttctctatccagattcaagcgggcgaaatggcagcgataactccctcatgggcactcgagacaacggcagatggagaggtaaaagagaagacatcaggtccaggcggtcaatggcgcgctctcagtacgtacacccatacatcctcctgctcctccatcaccacgagctcacactcgcacagatgttggacccgacctcatccgctccttgttgatacgcaaattcaagaccccaacgcctatccaaagagcagctatccctcccgctctctccactccaccgagggatatccttggtatggccaggaccggttctggtaaaactttggcgtaccttattcctcttcttcaaagaactggatcgacacaccatggacagggcccaagagctttaattctctgtccgagtcgagagttggcggtgcagatctatactgtcggaaaggatcttgctagagggatgaacaagggcaagggaaaaggaaagaacaagaatgaagacgaggaagatgaggaaggcaagggtaaagagggactgagatgggccctcatcattggtggtgaaggaatggacgctcagtttgaaaagatgtcctccaaccctgatatgtaagtaatttcctgtcgttctctataaaaagtgtgctaacgaaaacagtgtgattgcaactccgggtcgattcctccatcttatcgttgaaatgcacatggaccttcgacacctccaaacggtcatctatgatgaagccgacagactttttgaaatgggtttcgatgtccaacttcaagaaatccttcatcgtctcccttcgacccgtcaaaacctgttgttctctgctactctcccctcatccgtggccgaattcgcaaaggccggtctcgtgaaccctctccttgttcgtcttgatgccgagcaaaagatctcacctgatctcgccctcaaattcttctctgtcaaacccggagaaaaggaagcgtctttacttgttcttttgagagaagtcattggcaaacccaatcaacctgagcctgccgatccctcttctgcccctcaggctatcgtctttgtagctaccaagcaccacgtcgactatgtcgccgagcttttacgtacgaccgggtaccgcacctctctcatttacagttccctcgaccaagttgcccgtcagcagcaacttgccggtttccgtagtcatcaatccgatgtcctcgtcgtcacagacgtggctgcccgtggtctcgatatccccatcatggaccatgtcatcaactatgatttccctgctggtcctcgtatctttgttcatcgtgtcggtcgtacggcacgagccggtcgaaaaggtaccgcgtactccctcatcgtcaaggaagatttcccttacctctgcgacctccataccttcctcggcacggagcgtatgggcgaacccgcagacgttctgcgttcactccctattgagcagcttagtgagaatgtcgagtacgttttccataaccttgacgaaactgcaccccatattactgctttgcgtaacgtcatgcgcaaaggtcaaggcatgtttgaacgttctcgtactaaagccaatcccacgtcttatcgtcaagcgaaatctctcgcttccgctctcagtaataatcctccccgaattgatgacatgtttgaggatgcgatggaggttgaggtgaatgaagaaaaggctagattactcgccaaagtggcagcgttcgcaccgtctgaagctgtgttcgaagtcggaaaacgcgagagtgagagcgcgattatcatgaagaagaggagaaagacagtcgacgagaggcagaaacgagtctcaaaggctgaagcagagaagagtacagcgagcggtatggagaaggcccccgtgaaagagcttcccgcacctcaacttcctagcaagaattttaaagacccttccttctacctcgaccatacccaacgcggagcggaagctgaaaagggttactctctcaaatctggcgtcgaatctctttctggcgcgatcactgatatgactgccgatgaaggtacaggaccgaaagcccaaaaggccagtcaactcagttgggacaggaagaaacacaagtttatcaagaaaaatggtagtgctgatggagaaaagatgatcaaaagcgaaagtggtgcattgttgcctgctagttatagtagtggcaagtatcaggaatggaaatcgaagagaaggcatatgcctgatgggccggtggaggctctggctttgggaggtggcaggaggggaagacatggaccaccgggacagaagagaaaggcagaagatggagatgggggagaggatgctggtggaaagggtaggaaggatcaaggaaagagcaagggcacgggtaagggcaaggacgatttcaagcagaagtctcctggaaagcctggcaagaaggggatcaagcagtcctctgggctcaaatctgcaatggatatcaggaaacagagggaaatcgcgcaaaaggttcgttgtactgcgacttgcgatattttgaactttgctaacgggtcattgtaccacagagaaaagagaagaacgctcgaaaaccccaaaagttcagaaagtaatttctcatccatatatctatgtagaaccggtgttcgattgtggactcatgtatacattattcacttgggtgtcaggaatacaggactcgtaatgtctcctatcgtactataaccacggtcgcaaaacgacgttaaacagccacactccgtaaacaggtctggctatatatgcaatcatcatttcatcaagaaattaacattagatcattgcttagaacaacgtcacgctacataatcattagtaaactggcctttataaacgatccgacaactcacaaattactggggaaatcggtccttccaggcgtccttctagcttcatccagcaactctccagaccaccatccgtcctctggggtgctagtgacggcaatgatatcacctgcctggaaatcaaactcggcagcagtttgagcactgtagtcataaagcgccttgacatctgtatcgctcatcagtgcaactcatgatcagatcagaataagcactcacagaacatgacagggagtccggtagtcgaccattgtcctgtagggaccatattaggcgggggctggttcggctgcggactaggcgttctctgctgttggtgttgttgtacgtatccttgcggctgttgtgggctagcttggtacccatatccttgccccatcgcaggggatgggctcagtgaacgaccatatggttgaccagactgatatgattgctgagatggttgcatagcgggtggctgaggttgaggagatgggccgcgtccaccataggcattactttgtccgtatacagaaggagggcgctgagaatagttaggttgaggcgcctggttctgctgttgaaggtatggcgaaggttggtgctgagtggtaraggagtactgattgtatgcaggctgggcagtttggttaaaagcctgtggagcctgagattgcgcttgagaggcataagcctgctgagaaggaggttgttgctgctgtccgtagcccgacactggtctattgcctgagatggccggcggacccataacagaagaattagttgctgaaggctgtccgtaagctggtccgtagcctgcgggcgcagcagcaggagtaggggaagagccggacgcagag

SEQ ID NO: 307 - DNA, 4954 bp, Cryptococcus neoformans
gaaggtaccatgggcgccaataagttgttttggagaacaaataagctatgtcataccccagaaatgaaatgtcgaggaggaggttgaaatatgggtaaaggagcttaaatatgtgttgggactggataagtgccgttagaatgtgcacaaagggtgtagcagatgggcagagtgtagtgatgcgtggtttaaagatgaagatcgatttttgcgaaagacacataccttgcttagcgactgaatcctcacttcaccatcttcatcgcgctgaatctcatcattcccaatccccgaaagccgttcaaaataatcctgcgctctcgctctgacgtaaggcagtcccacaatgaagacgagaattccccaccgctgcttacgggtcaggttagttgtcgtgggcgagatgttgagctggctttgggaaagactgccaagacgagacaaagagaatgcacgagaagggactagacggagtccgtaaaagtgttcggatagcgatgcgtctattcgtttcaaacatgctttcagctgctggtagtttgccggaatgcagtattaggatgactcactatgatgctcgaggtgatgtttttcgagaatcaaaagcagaagagcaaaagcctcttcgtgatgatttagtagtcttaaaaaatatctagggtaccgttgagccagatacgagaggatgtatcggaagacgggatggaagagatctcgcaactgttcttgggcaagcaggtcaaagagggatggagcattgacgtctggtaccggtcgctctggaaatacaggctgggccattgtttatcaacgagattttgtaacaatcgaagagaagatgtcatccgttgtccggttactcgcttagtatactgactgtatgaatgtgcctttacgtaattttatctgatcaaaacaaacacaacatatcctcgcgagtgtatttatcgtgtacgtacactctttccttcacccgaaattgcagcaccaacagtatacaatggctgtactccacagtaagcgccctcgtatgccagccaactctcaaggcatccatcaacaaacatgcatcaacgacgacgcagcagaaaaggcaaagcggcgcaaatcggcgcatttccatactgtcccagaccataccagtatcagcaacgagaacgagaacccaaagaaccaagccgggaagagggtaatatctgggcttgctatccagcaacaaggattgatccaaaagcgcgggaagaggttgtctgcggtggaacccaatatgccggaagttcgaatcgaggtcaaggagaacaagtacgaggaatggatgaagcttgcaactgataatgtgtattagatccatatcatgtatcctgcaagaactgactttaattttttactagaaaataactgccaacaatacgtggagttttgcccttatcgactactttgccgatctcacccttctccgaaatggccctgatgatcagagtattaactttcagaaagcgagttgcacattggatgggtgtgtgaagatatggacatccagagtggatagtgtggccacagaaacggggaagttgttgagcggtttggcgggaggcagtggtaagcttgactttcctatatcttctaaagcgagatgagtctgatgatgaccggcagctgagacaggggaggatgatggttcagaaggcgaggaggatgaggccggagagccaaaaacaactagaaaggtaaatttcttcaatcctgctgcagaaaacccaacaataacgcattccagaccgtccgttctgaagctactcttgcaaagtcgttcgcccagcttcaaattaaaaagttcgatctcgaattcaccgtcgatccgctcttcaaaaagacttccgcggattttgacgaaggtggtgcgatgggcttgctgatgaaccatttaagtgtggataacaaattgagggaagtgtttgatgccggtgatgcggtggcagatgaacaggatctggatgaggaagaagaagaggggggtggagggatgattgatgaggttgtgcagctggaaaaattacgaagtgagccgcctctcttttttctatatgctccttcagcttctatcaaacgagagctgacgagggttactgaagattacattcctatcaccaaattcctcgccgactactctatcaacccctctctcgcctcgttccactttagttctgactcttcaaccggaaacgacaatgaccccgccatcattcttgggctcaaagactctttccccgttgacgaatatgatcattatgatatcccaatggcgacagcggatgactacaatccgatggacccggcatccaaccgaaggagtggggaggggtatgatttctttggaagtgaggattatgatgctgtaccagcctatggggatggcggtttcgatgaagatggtgcgagtatgatgggtgatcctgaggacggcctctccgctccttttcacaaccctgcgaacagtaacggaggctcccttgcgctccttggtccagggtcttctcatttgggcccctttgatccccaccgccaaggtcaaggccacgaaattgtgctcactttgggagaagggggtgatatcgggtcaggagggatgtttgaatactttgataaaggattcgggaagagttgggctggcgcagaacattggagattaaggaaggtctctagaaagggtgagtattgtacttcattctaatcttcttcacttttccattatcttcacccaccacttcccgtcgagtttcgactttcgactttaagcgttgagggttgagctaatatccacgacagatatggctactgccgggacaattaccactacaaactcaaaaaccaaggttgacaagacccccttcgcaatcgatttccacactcctatggttacttcccttacctcctctacacaagcgctcttcacccccgcgtctaataaatcgtctatcaccctcccgtcgacttttgcccccactagaacaaagaacggcaaggcagtgtcgggccagcgtcagcttagggaagagcgccttttaccggacgacatgcattttagcagtcaccagcttttgaggctgtttttgaagccccaattctccttgaagatgcggccaggtggtagaaacgtgggaggaatgggggggatgataggtgcagatggggagattgatgagaatttctgggcggccgctgcaaaagagagagagggaggtgaatgtgctggggatggtacgtatattttgtctgcccatggaaggtataattgtcgctaacgctagcatctatcgtcgacttccattcgacagaatttggttctgctcctgcaccatttgaatcccagttcttccaagacgacgatgattacggtgacatggataatgacgtcgactttgggcctatccaacctaatgttcctgtcctctgcggccccggtgaagaggaagacgatctctgggcaggcacgcaaatggaattgaaaaaggctcgtccggagaacgtcaattttacgaagaaggcgaaaagagtggatgtgaagaggttgaaggatgacatctggacgggtttgaaagatcttgtaccttattccgataaagctggtgatacagataccgacgatgaggattccaccccttccacacctcctgaaccttccgattccgaaccggtcaagacattctcctccattatccaatctcttcgctcaacttacccacctcagaaaatgtctgaaatctcgacatcattttgtttcatttgtctgttacatctggcgaatgaggaagggttgcgaatcgagagtgcgagaggggacggaaaggaaggggaagatgtgggctgcgtgggaatagcgccagtgggagaagacggggaggttgttttgggcgagggattaaatgctttgctggggatgttgggcgctggtagaggtgggtcggaaggaatggaaagcacaagtgagggagtgaagaaggatagggtgattggcgagttggaggcattgaaggtgtacaaggtgcgccttttcttcttttgataagttcatattagtgtttagcgttaatgtcttggccattaggatcacgcggctggtcgagctgcgtaaggtcgtaaaacatctctacgatgatggaagtgtctcgtttgggataagggttttgtctttttttcctcctttaattgagggaatccactgtactatgttcgtgttatcatcgcttatgcgccctaccttcttcagggcataagataatatttagcatgcgctaactgttacaatgcataagattggtctgctgtacgagtttgtattgaagatgggttatattatacttggacagatgacttcgctttttcttcgccaatcgccgtactacttggcctataaccttctaaccttctaagcttctcaccagctccctcgatgtataacctttcttctcgcctcctcaatgtgacctctcaaacccactatccttccacgtactcgggacttcaaacgcccgcgcttgcgcctccatgtccatgtccatgtcttctcccgccctttttgccacctccaccaccacctttctcctcctcatctttgccttccttcccgccgtctctcagacccatactccgtctcttcacggacctctgagattgcgccctgaccaatcctaaacctgggtttgagttgaaagacggacacggaccgaacgcgttactaccatcggaagggatttcaacgtccatgttttcgacaatggggcgtttactgcctatcgggtagttctgtgccggaccagacgatgagaaagctagcggggcggaagtggaaattatgggaagcgaagggagggagggattgaatgtacttgaagttaaggaggaagaagaggggttggtggactgggaagaatgtgaaggggcggggtttgcgtat

SEQ ID NO: 308 - DNA, 4811 bp, Cryptococcus neoformans
ctcgcatagcaccccggggaacgtctttcttccctcagtctcgactcgtcttgaagaagattggtgatatcctttgccttttgtctaacattggatcccacatcctttccattgtcgtccacatagacaaactctttgagagttttaatgatgtaaatattgtctttgaagtagatgaccacgttttccgagccagcgtggaggcagtagtcgagaagggtgagcgccttgaaaacgtgtcgccagttcttccctttgtcattcaaacgtttgtcgagcatctccataacttccacaaagtcgtttctacactaaatgtcagtccattttccacggcaccatgcgaagacgaaacgaaggcggagggacgcactggttgtaggtcagctgagcaatctcgttcatcatggtgccggaaggtccccatgggtcattagaagtggcttcccggaccttcgtttgcgtgtctgtgtagcccttggtgtagtttttggcgactcggagggctaagggacgtcagtaacaagtggcgggtgttccgacgtggaaggcgcagctcaccgcctcggccgctgaaggatgtcagcatggggctatatggcaatatgggcacttacagatgctgtaaagacgcagccattgttgatggcaaagtaatggagcagagtgaatgataatcaagaacgaggaatacagtcgatagtagtgccagatacggctcccagcaccggcgtcattctccggacatgtgtccgcgaaccaagtggcttcctcattattcagaccatccgtcggttgtccccgatgtctggaccatggtgtcccgatctggtgccacacaacgccgtttcggggtttttgagaacaaagaggagcggtggattttgaggtgtgtcgttattccatcggagtcttctgctctctctctacgcaaaaaaaaataccacagggctatcatcatgccccccatctacgtcaagccagagaacgccctcaaggtatgcacatacttcgcaaattgcacacaaactcacacaaaaacagcgctcagaggagctcctggctctcggcacaccccaatctcagcagcaagcctttgacaacctcgtcgaggtcttccagtcgtaagcagccgccaagtaagggcagcgcgatcaactctgatttttatataggaaacgattcaagcagactcccatcaacgtccttgaacccatcgttaccaagttcattgatctctgtgtagttctcagccgcaaggctcatgccaaatccggtctcctcgttttcaagtctgctgcccagaccaccaatgtcggtgccatcgaaagggtattgaaccactttattgccaaggccgaggcccgtcttgctgcggccgtcgagcaggccaagaaagaggttgctgctttgcccgatgttcccgttgtggacgacgacctgccccttcaaccggcttcccttatgcttgactgctttgttgacagtgctggcgacagggaaaggattgagcgaagattgattgcccccgcccaaaagttctgctgggattcttacgacatttgtctcgatattgccaaaagcaacgacaggctcgaggttatctaccaatctatcgcccaccgtgctttccatttctgcaagattcaccagcgcaaggccgatttccgccgtttgtgtgagcagcgattgcgaaaggatcttgccaacgctgccaagtacagccaccagcaacacgccattaacctttccgaccccgagactctcggccgtttccttgacacccgtttccttcaacttgaaactgctgttgagctcgagctttggcaggaggctttccgttccattgaggatgtccatggtttgattgcgggcaggaagggtactaagccttccatgatggccaactactatgagaagttgactcagattttcaaggccgagggcggtaagcagactgctgtcttccacgctgctgcttgggctagatacttccagcacgccgagagggccggcattgtcaatgacaaagcttctggctgtgtcttgctctctgcccttgccgtgcctcttggtgaagtcgaagtcaagcagaggcttgttgcccttctcaaccttcccaagacgcctactcgcgaggctcttgttcaagatgctgctgccaagcaccttaagcgcgtgcccgccgatatccgacaaatctacaagattcttgaagttgattttgagcccaccaccgcttccaaggttcttgctcctctcatcaccagcctctctcccgagtaccaaccttacctccccgctcttcgcgatgttgttctctctcgtttgctccaagctctcgcccaagtgtacgactctgtgaccctttcccacattcttgatctcgtcaagcccctcgataacaccccctgggccaccgacatgtcatcccttgaaaagttccttgtcacagcttgccgacgaggtgacattcgtgcttccgttgaccacgttgcgcagaccatcaccttcgtctctacccctcctgacgccaacggccttcagacccttgccgtctgcctctacaacactatccagtacctcaacccctctcgtcttgctccggtttctcgatccgacgctttcgccgctgctattgctcaggccgaggaagagcgcaaggctgctagtcacaagcggcagatcgtcattcgacgacgtgagcttttggaggaggcgaagcttcgtcgagagaaggaggcttctactgcccttgctgagcgtctcaagatcaaggccgaagaggatgctcgtcgagctaaggaggaggccaaacaggctgaaattgaccgagttcgcaagcagatccatgagaccaaacaggccgaggctaagcagctcgcagcttccctcgctgcccaaggtgccctcaaggtcgatatctccagcattgaagacctcgactcttccaagcttgttgccatgcaggtcgagcagcttgccaaagagaaaaaggagctttctgagaggttgcgtatcgtcggcaagagggttgaccacctcgagcgtgcgatgaggaaggaggagagaccgttgttggctcaggactacgaacgtcagaaagccgaggaccgagcggctcacgatagggctaaccaaattgctcgagagcaggccattgagcagcagagggctgctagggagttgaagcagagattgggtagaatgttggaggactacgaggctgtcaaggaacgcattgagtctcagatgcaggaggaattgaaggcggctaaagaagaggctaggagaaagattgaggaagaaaaggctcagttgagggagaaggtcattaagaggaagagagaagagaaagaaaggaagctcaaggaggctagagaagctgaggagaggaagcgaaaggaggaaggtaagtctatgttgtcaggccattcgtctgtatcgtcactgacaggtttacagaggaggctgcccagaaggctgaagaagaagctcgcgctgctgctgctcttgaggctgaagctgctgccgctgaacaacgccgagccgagcgtgaagctcaacgtcaatcagacctcgaacgtatccgcgctcagcaagaacgagaagaagaagctcttcgtcgacgacaagccgaaaaggccgcggctactagcggtggcagcgcctacagaccgcctgcgcgtgctggtactactccccccacggcttctccagctccttcaagtggtggtccttcatggttagctcgacgaaaggccatggaggctcaaagcgccggtggtgcccctgtggccagttcacctaagccagtgccttcaaattctgccgcggcgtctgctcctgcatccaacggccccgagagcattgctggtgaagctgagaaacccgctttaactggaagtgtatggaggagaggtatgggagcgaggaggggtatgccgtccaccagaggtggggcttaggtaatctagaaggttgtgttttgtagaaatgcataattctttcaagtctgtatttgttttgtaagaggttgcttggagaggctgggaggagagaagaatcttgaggatatgattgtagcattggaaactacatgggcagccacggatcgttcgggccaagtagcagattggtttgaagagtgcacccgcttggatctggcagtgacttttttctgagacttaaataatgaaatatgacatattattgtatcattacccgcaggaacagattaggtataagatcatcaagggcgggggcaatgcatcggtactttcatcgaaaaggcaaaggaagggcgataaaggtattcagcgactacttgatcgtataagtctagttgtaagtggatatgggaatatacaaagtcatggtaaatatggaaaaagaaacgtaaccatcaaaaatatcaaaaagttcttcaagccccaccatctctttcctccctcaccctatccacccaccctacccacctcgccaggcttcactttatctacgacccaccccttcaaacgcatacctacccctccaaaaccggacgaaaccccataatctcctcgtacaacagcctcttcaactcttccctcgaaatatcatctttcatcatatcaaactcaaagaacgagggtgggagcggtttcgcggacggttcgtcttccgggtcgtggtaggcgtcgaggtaagggtgggcgagacattgttcgactgtgtaccgtttgcgggggtcgactattattggagcgaggaagggggtcgcggggtcagagctggctttttcggggggcgggaggggggagagtgggaaa

SEQ ID NO: 309 - DNA, 4784 bp, Cryptococcus neoformans
atatcgatgacgaccggttgcagcaggtgtgggagtcgatgggcctgcgctgctagacggtttcgagtcgccacgctgctgctgtggggtggacgcagctgctcgggcaaggcctcgctgcataaactttagagaaagggtggaggaggagaggatatgttatggggaaaaccacgacggagttccaccttgaggactgtcagatcgatgtcggaaaacaccacctgtacgtacgtgtatccccgggggaaatctttgtgcgccgttctaaacgggagcgagtactgtttgccgtcggcccatagctggcaggtgacgtagaggtcggacggggttctgtggaaggtgagactggccgggtgggagccaggaacacgtactgctgctggagaccttggtgtgcgagagcggggctgtggagtgtgcgggagaaggggtgcttgggcaggctgccttggagggaggtgctgcggagagtgagcgatggcacggcgcgggggtggtggggctgacattttaagcgcgaggtgcggggcaagatggcacagcctcgcaaaggaatagtccctgtccttggagggcccgggctgcatggggcagcgagagtggtgctagtggctgtggcagggagcaagttgcaggtgcggtagtacacatttagttgttacgcacagtgatacggacaccgacaaccgtcctccactatccccccccacgcggacattcccccgtctccgctcacgccaaacaaaatcttgccaaatacatcttgccgccacttttctcctcccaccacgcaccatggcaccctcacagctcgcacagctcaaggcggctctcaataccgcaggcctgtcgaggaagacacattctaaaaaggacaagaaagcatacaagaaaggcggcgcccgcgagactgacagagcaaagaaggtcgaaaaactggaggagattagaaaaaatctcaacaaattcgatgagagggaaacacgagtaaagcatgatgttggagggaggaatctcaagggtgttgtaggtaggcctagtgcaagcaagcaggctgggttagaacaggtgtgtagttcctgtcaactcgcctccgatcacatctgatagcgttggtttgcagcgaaagaagacgcttttgcctgaacatcagcttcgcgaccaccgcggtacctttagagacaggcgattcggtgaaaatgacccttccatgtccatcgaagaccgtatgcttgagcgatacacccgggagcgtcaacgtggtcaaggcaaaaaaggaatgttcaacctggaagatgaagatgaagatgagcctttcggtgaattggatgacggatttgccttgggtggtttgacacacggtggaaggagtgtgatggatcttcctggtgacgactttgtcgcccaaggtctggccgacgaagacgaggatgaagaagagaacagagccgggagaatcgacaaacgtgtggtcagcaaggttcattttggtggatttgaagaggcaatggatgaagacctggtaagcgcttgctattatatttcgcacatggaggctaactgagacgatctcagcccgaaaagaagaaatccaagcaggaagttatggccgagattattgctaaatccaaggagcacaaatacgagcgccagcagcagcgagagatggacgccgagcttcgtgaagaactcgacggcgacattgcagacttgcagatgcttctcgctgaaaatgctccaactacccctgctgctaccctcttccctaccacatcgaaacttcaccctgaccccatgcccgtaccaggaggggaagtgattggagatggagagtatgatcaaatcgttcgttctcttgctttcgacgcacgagccaagcccaagaacagaaccaagacggaagaggagattgctcttgaagagaaggaaaatcttgaaaaggcagaggcgaagcgattgcgtcgaatgagaggtgagaatgtctccgatggtgaggaagaagaagggtcaagaaagaagcgaaaggcggatgacaaaaaacctgatgcggatgatttggaggacgattacgtggaagatgaggcgttgttgggtccaggtttgacaagggaagagatcgaaactatggtcctttctggaagcgaagctgggtctgacgacgagcaagatgacgaggatggtagggaagaggaagaaagctttgacgaagacgcggaagaagaaaatgagagtgatgccgagtctgctatggaagacttgactgaaaatgaagagctgtcggtgtctgaaagtgaagaagtcgaacctgttgtcaagagaaccaaagggaagaagactgcgaggacagaaaaggtcaaggaaataccctacacattcccctgtcctgcgaacattgaagaattcgaagaaatagttgatcctttggaggacagtgcgttacctactgtcgttcagcgtatcagagcactgcatcaccccagtctggcgcaaggcaacaaggaaaaacttcaggtcagtttcgacatgtgctgctgtctcatactctctcactgactactgtttaaacaggaattccttggcgtactgatcgattacgtcctcattctttcctctcgtccttctcctccattttctctcatccaaacacttgttccgcatctcacagctctcgtcaagttaaaccccatcactgctgctgcacattttgtcgaaaaaatcaagctcatgcaaaaaaatctttctcgtggactggctcgaggtgccgccagacccgattccaaaacgtttcctggtgcgcccgagctggctctactgaggctggtcggtttgttctggtctaccagtgactattcgcatccagtggtcgtacccgcggtcttgctgatggggcagtatttatctcaaagtcgcgtccgatcgctgcgtgatctggcatctggtttgttcctgtgttctcttttagcccaagtaagttgtgcgtccatctcgccctataaacaacatactgacagtgtacaagtacgaatcactttcgaagcggattttgccagaggccgtcaactttgtagcttcgtcaatcctcatcctccttcctcgccgcaagggtgcagaggtcaacaggacataccctgatttaaaagcaccatctacatccctttacttgaatcttccctcgtccgtcgttccttcacaaccactggaccttgggtctgctattactgccgtcggagatcaggacgaggaagaggcggagcaactcaagggcggactgctagttgttgcttgcaagctcgttgacaaatttgctggcttgtatctcgactcagaggctttcgtcgagctgatgagtcctgtaaaacaggttctggaacaatcaagggctaaaaagttatccagcgagctcaacatggtattaacatctactttgaccgccctgtccaagcgcctcagcaacactctcagtactcgtcgccctcttactctccaatctcacaaacccattcctatcgcttcctatgcccctcgattcgaggagaactttgcgcctggcaagcactacgatcctgataccgaacgcaatgcttcggccaagctcaaagctctttacaagaaggagagaaagggtgccatgcgcgagctcagaaaagacaaccgattcttggccggcgaaaaggcgagggaacaaggcgaaaaggacaaggaatacaacgcgaggatgcgcaaggcggagggcagtattacagtggagcgtgcagaagaaaaggccatggaaaggtaagtctcctctcaagcccagactttacatgttacttttagttcgtgctgaccattcaatttgtctttagagaaaaagcaaaggagaagcgaagggctggcagggattaataccaggaatagaatctcgtctccttggcttatacagtggtttacagtggtttatacagtggttttacaccatatgatgtactataaatttgattttgatcatcgaaagcaacgccacacaaagcccaaatatgcatgcaagtaaggcccagggtataaatgaatgaatcaactgtccaaaaaaacgcgcaggaaaatgcgtaaaaggatggttccactattcgagaaggtgatttaaatcgacttttctagttggcaggctttcgagcaacccataaagccataggactacaagaatagatcagattgaatagtatgactgaattaccaaggcactcacgtgaacaacttggtcctgccaccggcgacgagagccttggaggcgacgatcaaactttggccaacgctataagtgcccttgggcacgagaccaaacttctcaaggaaccacacagcgttctgggtgattgtgtagcccatcttgctggttctccagcaggtgaacactggaatggttatgaatacgcgttcttccttcaacaagaccagaacttactatcccaggtggtctgagccttccagatgtcaccttcaagagggtaataccagggcacggcatcatctcctaattattaaaggttagaaaagcaaggttcatctcagagtaacttacggtcggccagatcctcttcgtgctcaatctcgaaaccaacagttttaagagcgctgcgagcggcggccaagtttcgcatctcgggaatacccgtctccaacctgtggacagagtcaataaaggtgctatcatagatgagaaaacgcacctcgattccatgagcgatttccttgtgctcagggttggagggatcccaagcatcagtcatgcaccattcgta

SEQ ID NO: 310 - DNA, 4928 bp, Cryptococcus neoformans
gctgggcccgtccttttccgaatcaaagtcatttggaacctgggtgggagaaacctcaactttcgtggccgcttgttccgtgggttccgtagacggtaatggggagggaggaggcagctgcgcagtagaaggaatgggtgctgttcgaggtgtggctgagatgcctcgcccacacttttgcattgtgtgggttgtgccgccgtcctgagctccagcgatcttagcttcccattggttcctcaccaagtccactgattttgctgttctgacatgtttagtcactgtccgagctgtgggagtcgaggtgggggacgggctgctgtcgatgatcatcttcgccacagctcttctaattggagtggagggtggtgaatctgctagagctcctttaccagctattgacgccagggaggcatatgctggtgaggcggtgatgctggaaatgttggtcggagtttggcggccatttgacggggaagtggtgttgttgtcacggctgagaaggcgcgtctggtaagagaagatgctggatgagcgaccgaggcctgaagctccccttggtggcgagtgctgcgggtcgtttgacatgattatacggtgggcatgggcatgtcaataggtgtagcagcggggagagtgaagaaagaaggaagggagagaggaaggaagaaagagaagatggtggtggcggtgggatgtccttggccgtcgctgtctgcggctgacgtgtattgtgctgtagtcgagagagcaagggaggccggtgcgcgaggaggactcaaggaatgatggctgtttgttttgctttcttttctgcgcagaaatcgaggcccgacgcgtcaaaatcagcttacgtaactaacggagtaccaaatgtactccgggtgtgcctgggtaaacattttgccaggcggctctagcttccaggagagatcaatcgctcggtgtgttattttttgtattttttttattccaccacttctatccgacatccagcaacatgggtaagcacgacaagaagacaggtaagggtcgtctcgacaagttctaccgtcttgccaaggagcaaggctacagagcccgttctgctttgtaagctttcgccctcagcttcccacatactataacttacagtcacacagcaaacttgtccacctcaatcgcaagtatgacctcctctccaaagctcgatgctgtatcgatctgtgtgctgctcctggtggttggcttcaggtagctgaaaagtacatgcctaaaggctcgctcatcatcggtgtcgaccttaacgccatcaagccccttcctcatgtcacaacctttgtcgccgacatcaccacccctcactgtcgacagactttgcgtcagcacatgcatgactggaaggccgatttagttcttcatgacggtgctcccaacgttggtagtgcatgggtccaagatgccttcactcaaaacgagttggttttgcagagtttgaaacttgccacagaatttttggccaagggcggaagttttgttaccaaggttttcagaagtcaggattataacagtttgctctgggtctttggtcagctttttaagtctgtagaagcaacgaaacctccttcttctcggtatgtgactcacgactgaaccccgtcgcggaatctgacctttttgcagtaacgtttctgccgaaatcttcgtcgtctgtcgtgactttattgccccgaagcacatcgatcccaaattcctcgacccgaagcacgtcttcaaggacattgcatctctccctacatcaatcacagagcccactgatacctctatcgcccccacctcttcttctaccgcctctgctgccgctgccgccgctcgactagctgccaactcgcacgctcactcaaacgtctatgcccctgaaaagaagcgtcgacatagggaaggttacgctgaaggtgactacacactgcatcacaccgccagtgccgaagagtttgtccgaggacaggatcctgtattgttgctgggtaacatgaacaagattgaattccgaaatgagaccgaaaaagggtaggtctggacttttgtcgaattaatctctatgctaatttttttcagctggctcaaatctcgccacactacccccgacatcattgccaactttgaagatctcaaggttctcggtaaaggtgacttcaaagctctcatgaaatggcgtcttgccatccgtctcgaaataggactcgatgtcaaagccgataagacccaagatgccaccgaggaagttgttgtcgagcctatggacgaggaagagcagattactgaggaacttcagaagcttcaacaagctaaacttgccaaaaccaaaagggagaggaagcgagcaaacgagaagaaggcaagggagttgttgaaacttcagttgaacatgaccgttcccgacgaccttgaccaaaatgatcttgccctccaaggtgaagaggagatattcgatcttgaagaaggcgagaatgaggcgaggcgtcgaggaaagaatggaggcttagctaccctagtggatgatggcgaaggaatggatctcgcttcggaatctgaggaggaagaggatgaagatgaggaagacgatgaagtccttgactctgacgaagagcgtgagcgcaagactgccgctctcgagggtgaactcgacggcctttacgactcttatgttgagcgcaagaaagaacgcgatgccaaatggaaggtcaagcaagatcgactgaaagacaaaaactttgatgcgtggcatggtattcaggagaagagcgatgaggaaggaagtgacgatgacgatggccaggatgacgacgaggagggcggatgggatgtaattgctcagaaaaaggcaaagtatggtgaaggtgattcctcggactcggattccgatgctgagcctgaaacggaggttcccaagaagatcaagaaggttagctttgaaaagcctgccagatcggaaaagagcagcggtcttatgactagtctgagggagcctgaactgcgagctcagagaagtaagcaagcacagttgtggtttgaccagcccgttttcaaggaagttggcgatcttgctgctttggacggtgacgacgaggaagaagaggaagaaggcgagtccgaggaggaagagtctgatgatgaagatgtggatatggaggacgcatctgagagctcaagtaccctcgaaggcgacgacgactttgagatcgtacctcaagcgccagaagatgacggtcccgaatgggatgttgatgatgaggatcaagacgaggttaagaagaaggttatccaaggtatgtttagattatctatccgtcgtgacactcaaagcttactcttgttgcagacaagggtcttcttactgccgaggctgtttctcttgctaccgcccttgttaatcgaaaaaccactgccgacaagctcattgaccaaggcttcaaccgtctctctcctcacaacaaggacggtcttcccacttggttccttgacgatgaatcccagttttacaagcccaacattcctatcaccaaggaggctgtcgatgctctccgcgctcgacagagggcattggatgccaggcccatcaagaaggtcgccgaggccaagggtagaaagaagatgaaggctgtggcgaggatggaaaaggccaagaagaaggctgacggtgtcatggagagcgaggagatgggtgacggtgaaaaggctagacaagttaggaggatgctcgcccgtggccgccaaaggcaaggaaaaggccaaagagaagaagatcgtcgtggccaagggtgtcaacaagggtgttaagggcagaccaacgggtgtcaagggcaagtacaagattgtggacgccaggatgaggaaggaagtcagggcgttgaagagaatcaagaaggcgggaagcaagaggaggtagaggatggagctgttgatcccttctcagaggttccgtctagattagttgggcttaatatcgtctgtatgcatgtacctataccgtctttatgccatacatactgcgtctctttctttaaataataagcatgctaaataaatggaattttctttcatccccgcgcaatcgtatagacgttctggctgtgcgcaccacatctcatgacgtcaacactagcactttcccacgatcgcctccgccaaacatgcacaaattcccccatcttgacatctccgtcgacatctcggattcatttcattttgcaactgctttctccgtctcgctccagctcccatgtcacacgaacaccccgcagagatcgtccaccagctgcaatcaatagactccatccagcaggacctcgcagacacagccgctgccgtcgtcgatgctgcctcccaaagccttcccccccaacatgctgcacaagatcaaaaatcccactcaaccctgttggacaatgcagaggcaatggagtctattcttgaaagtgccataccggcagctccaggttcatcgtctaccgctgcagcatctgatgccattggagataacaattttactgcgtctggtcctcctcctatttccaatactgtcgttgctccatctgctgcagatgacgaaactggagacgtgattgtcgttgaaagcgagactcctacaactaccaatgtcgtagaggcagttgtcaacccagaaaatgatggcgatgtcccgatagagtccacagaacagtcctcaggacagcccgcagaacagcccacagaacagcccacagaacaacccacagaacagcccgcagaacaacctgctgtcgaaacacctcaagcaccccaatccactcctgctgcacccgccgcatctgccgttgaaagtatcccaaccaccttggaggaaactcatcttgagcaaatagtgcaagcacctgccccaactgttcatactgagcctctgacgcctg

SEQ ID NO: 311 - DNA, 4306 bp, Cryptococcus neoformans
gcagatttaccgtcagtttaatattatggagatagtcatataatttcaccatggtcctgtcatactcagctgcttggggaacgataacatctcgggtgaacttagttgccagctctgcgtgacgtttttgaattagtccatgcgagatcaacggtggttaaagattattatccccaccttgaatacctctttggtcatcgctgagagagaagctaacagctggtttgagttggtcgtgatgagcagtcggcgacggagacagatggaacttacgacctgaaacaactgaattggcggtggccattccccgtgcgagaatttgtcggcgagtacaagtagcagccagtttcaatgctttgtggtgatattgatggatcatattgatagaaatgtgagttacagtatgccttgttgtgaagaagtagtcgagagtaaaagtagtgactgaattgttggatcatccaccaagaatcccgccgttgtcgtcgtagactgcaaatcggttatacgtgataatgatagccggtgagtattaggcgtcccttcatttgcaacaacctataggcgtgcacccggagacgcgctggtggaggcggtccagaccgagctgaattggaggtgattcattaattattattattatgtgtggtggcgcgggtcgcgtctttctttcgttcgcatcccctatctcccctttctccggccttcatttctaacaacaactactcttcttgcttcttgagcgtgtactcccaaacccagtatacataatggccatacaagaacccattacaaagaagagaaagctcgatatctcatcacagaaggagcttgagccgcaaccaagttttaccgaagttttagaacagcttgtggccgaagaggatgcggcaggaggtgagtatttttcggtgaacttggcattgcgattgctaactgatatctccagatagcatagagacgtctgcggcgtggcctcgaccgccagtcccgccatttgatgccaagaaggacacgatctgtgagtaatcctcgggctatgactgatcgaccttactaattgctgtaattgctgtaatagcttttcagcagatcgaaatcgaagagtcagctgatcccaagcatggaccaacgctacggctatttggagtcaacaaaagcggtaattcagttttggcgcatgtatatgggttcaagccatatttctacgttgcagcccctagcggtttcctcaacaaagaccttcaacctctggccgataagatcaatgtaagagttcccatatcagattatactgcgatctggcctaacgtacatctcagtcttctatatctgcgctgggtccttgtgtgactaactgtgctatcttcaaccggcggtctctatggggttatcgaggagacgacaccgtaccgttcattaagatcaccgtatctgatcccaagaacctatcgaaagttaaagatgagttttttacattgtccactgtatatgttgctgatgatgattctcggcgtctctacgtgcctttgagcgtggacagatagatttcaatggtcttttccctcctgaaattctcacctatgagagcaacattgcatacaccatgcgtttcatgatcgatacgaaagtgagtgcactttaccaatcaaaaattgagctaattctttgaagattgtggggatgaattgggtcagcattcccggtggacggtatgatctgctggaaggaggaagtaaaaaatcacagtgccaaattgaaatctcatgcaagtacgtgcaagatgaaggattttctcagaccactgaccagatggaccttcttcagctataaggacttgatttctcatcctcctgaaaatgaatggctggatattgcacctcttcgtgttctcagttttgacatcgaatgtgctggccgcaaaggcatattcccagaagcaaatgtggaccccgtcattcaaatcgccgcgatggtaacccgtcacggtaggttccaagttccctggtcatttacgcaagcgttttggttgatagtggratctttaggggaatcaaagcctttcattcgaaacgtattcaccctcaacacgtgtgctcatatcgtcggatctcaagtgctcgaattcaaagacgaaagacagcttcttcttgaatggcgcaagtttgtagatacggttgatcctgatatgattatcggatataacatttctaatttcgatctgccctatcttcttgatcgtgccaaagctttgaagatcccggactttgcctttttgggtcgactgcgaagtaagtgacgctcaaaactgcatttattgttgcttccctaatatgtctccttagatgtcagaaccgaagtcaaggaaacccacttttcttcaaaagcttacggtcagcgagattccaaagctgttaatatggaaggtcgacttcagcttgatattttgcaagtgatgcaacgggactacaagcttcgaagctatactctcaacgccgtttgtgcacaattcctaggtgaacagaaggaagatgtccatcattccatcattacggagctccaaaatggtactgcggattctcggaggcgtctggctgtttactgtttaaaggtgagtaacagcaaattcaagtaccttcggcactaacatcattgcaggatgcctatcttccacaacgtctgatggacaagttgatgtgttttgtcaactacaccgaaatggcacgtgtcacaggcgttcctttcaactatctcctgtccagaggtcagcaaatcaaggttatctctcagctttaccgaaatgccgcggatgccggctatgttatccctgctctcaaaagcgaaggctccgatgagcagtatgaaggtgctactgtcattgaacccagtaaaggtttctacgacgtgcccattgccactctggatttcgcgtcactgtatccctcaatcatgatggcccataatttgtgttatacaacattattggataagggtactattgaaaggctgaagctcgtcgaaggagaagactatgtgcatacacccaacaatggtgagtggaactgttcgctgaaaatgaggcggacatactgattccgttatagacttttttgcaacatccaaacgtcgaaagggacttctacctcacattctcgaaaatcttctggctgcccgaaagcgagccaagcaagatctcaaagttgagaaagatcctttcaagcgagccgtgttggacggtcgacaacttgctttgaaggtgagcgccaactcggtctacggtttcaccggtgccaccgtcgggaaacttccctgccttgcaatttcctcaagtgttactgcctacggtcgacagatgatcgagctcaccaagaaggaagtcgaggcagagtactccatgaaaaacggttatgaccatgatgccaaaatcgtctatggtgatactgattctgtaatggtgcgatttgggtgcccagatctgccaacagcgatgagactaggtgagtgcggatgtacaagtcatgtcaagatcattgattaattggccaatgcaggtgccgaggctgccgatctcgtatccggcaaatttatcaaacccatcaagctcgaattcgaaaaggmctactttccttacctacttatcagcaaaaagcgttacgccggrctctattggactcggccagagaaatacgacaaaatggatacgaagggtattgaggtgagccgacgtgtctagttctttctagttataattgataatgatgagtcactagactgtccgacgagacaactgtcgtttggtgtccacggtcatcgaaacttgtctcttcaagatgcttattgatcgagatgttaagggtgctgaggagtaagctcctcggaatcatggaacagcacagaccactgatatgtcattctctagctatgtcaaggacactatcgccgatcttttacaaaacaagattgacatgtctcagctcgtgatcaccaaagcccttgccaaagctgactatgccgccaaacaagcacacgttgaattagtagagaggatgaggaagcgtgacgctggttcggctcctagtttgggtgatcgagtggcctatgtcattgtcaaaggcgttaaaggcgctgcagcgtacgaaaagtctgaagatcctctgtatgttttggaacacaatgttcccattgacacccgatattatctggaaaaccaactttcaaagccattgatgaggattttcgagcctatccttggtgagaaagccaatagcttgcgtaagtcaaaacagtgaatattacgcaattaagc

SEQ ID NO: 312 - DNA, 5198 bp, Cryptococcus neoformans
gcgtgtcaaagtgatggtgaaagagggtgggagatggattgaactggcggaggtactaagagacagaaaagatacgatagaacttttatcgccgtgaacgtcttggaagagcattctagtaggtgtgtaaaatctgttgtataacgaaattaagaaccataccgccaatacgtacatctatttgaatacgattctcttatagagacctgcttcatgtcatcatcatacatcttaattcattactctctagcaaatcatttggagtaagattcctaggcccaacagtccctggcgtgcatatcccatctgacacgtgtctatatgttagcgggctgtgatactgatcccttcttccgggctacaacccaacactagcaatatatttattggctaagcggacacacgagcgacctactaccaccgccgaacagcttgtccgattattgctttcatcgctgagtatccctaataggaggatggtactaccactattacgaagtttctgcatgctaactcttggctgatgcatatgggtccgatatattatctgtttgtaaataaccaacaatgcgctcgattctcctggcctctgttggaaaagtagtaagtataagtcctcgtgtgggtatcttttatgccaaagcatgtagtaaatacaacgaacaatacccgccggagaaaagtaaatgtcgcagttatgaacttccattacctcgataccattccatacaaaaaagataataaacaaaaacatgtaagtaaagtacatctgaaatgaaacaaataaactgttattcgtcacttgggttgtaaaattaatttccgaagatttaaaaaatcagtgccattatttgacatgcagtggtgatgacctccaccgtactggacgttgttctctgccaacaagtacgtactttataccacatatgtgcttaatcatcgtccttgtaacttcacctacttcgaacgctccgtcttaccctattacagcacgctaaacatgaagtttatgcttggcgatcttcccgttctgktcccttatgatcggtatgtcgtctcttaccacaaccctcgcagcggtcaacgtcatacaagtagccacagtaactgacaacatttgcctcaggctgtatcccggtctgtatcttggccagttattgggggttcaagcttacatggcccatcgcagagcaatactcctacatggctgacctgaaaacaacattggacgcaggagtaagtcaggttgccacttctttcgagaagaccatttgacacagtggcacgaatagggacattgtgtacttgaaatgccctcgggaacaggaaaaaccgtatccctgctatctctgatcattgcctatatgcaagtaggtatatagcagctggttgaccgaatgacacctactcatatatctcactatgtagttttaccctaataaacggaaactgatttactgctcacggacagttccggaaatagagaaggctttagcggaactcaagcgattgatgatgtaccgcgcagagatgggggcaaatgatggtgatttcagaggactgggattgacgagtcggcggaatctttgtcttcacccggaagtcagtgttgaatgtctgtctgattagcaaaaggctcacagacttaacaggtcagcaaagagaaaaaaggcaaaatagttgattcgcggtgcagggatctcacctcagcgttcgcttgtgaaaaagggagggctgacccggggagcgtaccattatgtagtttccatgaggtatgttccctcagtgactgaccttagggctgacagatgtgctcaggagttgaacaattacgagcccgggaatcttatacccccaggcgtctatactctggatgatgttaagaagtatggccaagaaaagggtgtctgtccgtactttacgatcagaagaatggtgagtagagttcatagtgcaacgctcctaaggctaattatcagaaatgaagttgcctttcctcgacgttatgatatactccttccattatcttctggatccaaaggtcgcagagcaggtgtccgctgaaatgagcaaggagagcattgtgatatttgatgaagcacacaacattggttaggatctatgttgagatagccgatttgcggattaatacttacattgcgttcagataatgtctgtatcgagtccctatccatcgacttgacgaggccaatgttggattcggccgcaagaagcgtcaataaacttagtgacaagattgcggaaatcaaggagactgatgcgaagaagctggaggatgagtacgcaaaactagtcgaaggtctgcaagaagccaacgagcgagtggaagatgacgacatgctcgtcagtccggttctgtcaaaagacatggtggatgaagctatacctgggaacattcgaaaggcggagcattttatagctttcctcaaacgattcattgaatatctcaaggtaatgataccctagaacgaacaggcaggactgacttccacagactaggatgcgcgtgctgcatgttgtagcagagacacctcaatcattcctagcgcatctgaaagaaataacatatattgatcaacggcctctcaagtaagtggtgatttagttaacatcttatgcagtgtggcttatgttgcttatccagatttgcttccgagcgccttacttgtttggttcgcacattggaattgacaaacttggaagaacattctgcgctgcaaaaggttgctggttttgggacccttgttgccacttacgaaaaaggattcctactgatcctcgagccttacgaaaccgagcacgccacagtgcctaaccccatttttcatttcacgtaagttcatcatgaaggacaaccaaaacaaggcgctaaatttaccacagttgtcttgacccatcgctcgctatagcgcccgtctttgaccgttttgcctcagtggtcatcacttycggtaccatatctcccctcgacatgtaccccaaaatgttacaattccaacctgttatggaacagtcgtatcctatgaccctcacccgaaacgcttttttaccaatggttataactcgaggcagtgatcaagtcccaatttcctccagatttgaggttagaaatgatcctgcagtcgtacgaaattttggaagcatcttgattgaaatggcacggactgtccctgatggagtggtggcattctttcccagttatctatatatggaatctattgtttcagcttggtatgacatggtgaggatgtttcttatcattttaccttgaaaactgaaagcactgcatatagggcattctaagtgaggtgtggaagcataagctactgttcgtggaaactccagacgccatggaaacgagcatagccctcaggaattatcgcgaggcatgtaataatggaagaggggctgtccttctctctgtggcgcgaggaaaggtgtccgaaggaattgatttcgaccagtatgtagacatcgctgggcgctattatggtgactaacctattatcagcaattatgggcgagctgttattatgtttgggtatgttcaacacacaaaattctgttcctttggttgaccttgtgctcagcattccctatcaatacacggaatcacgtattctcaaagctcggctggagtttcttcgagataatcataggatccgagaaaacgattatcttactttcgacgctatgcgacatgctgcccaatgcgttggtcgtgtgttgcgagggaagaccgactggggtctgatggtctttgcggacaaggtgaggatggaattccgaacgttgaatacttccagcttaactcttataatagcgatttgcgagacaagacaagagggcaaaacttccgaaatggatcaacagttatattacggaggcccattccaacttgtccacggatgtggctgtttcgctggccaaaaagttcatacgtcaaatctcgcaaccatttgatcacacacagacagggatatctttatggactcttgaggacatagaggagaggcaaagacgggataaggatgaagctgaaagggtcgaaatgacacaatcagcagcaattagagagagtgccgccgaggagaatgaccatgctccgcttgctagcgattacatggagattgacgacgccgagttggcggggctgtctatacccatagatgaataatcgggagctaaataatcgagtttggtggattgtgaacttttgttgtagaaaagtgcggatggattaatactgtcacagcaaccacgcgctcacagaggacataatcagtgatcaagggcttgcatactatgaggtcaactacgttagaccccattcctcccatctaatacgtaggctcaatctgcgagggctcatctcgactagcatagaacttttcgaggaaagttttgggttgaggcggattgtcgtactttttgaaccaatgcattacatggggctacaataggaaaaatgagcctaccacagctgatgaatacatgtggaatgcaacccaccacttgcttccatacgttcattgtctcctgatactcttggtggtttttgagcaacatcacgttcatcacggagaggtcggtaattgtgtctcggtttcgttcaaagtcttgtctgattttcattcgcacaagggatggagaaacatgaagaccgtacagctggacgatgtcaggagcctgcagaaaaatgtgtgttaatagaagctagagagttgggaatagaagtaaacgaaagcgcctaccgatctataccaagttcgataggcagacaatgaggctcgtcgggcctcgtcccacgacgaaacgctggatgtcgcttttgcgagcctagcggggatggtagtcattgtggttggatcagctgtaagtagacggatggtagtttataagcaaggtgattctcaatgaaaagatctggagctgcgaaaagcgtaatgtgtacaaagagcgacgaggatggtactagagggagtgcagaataatgcggcaaaccattagttgcgggatcaaaactgacgaatcggcgtcgtccctttgtgagatgcgagccgtgttaccaacttgccatccggcgcaccacgggtgactggcagacttttcgtgtttgcaaacgagatcatcctcgggatgccacagagaggaagtagggatgagatatgaactgg

SEQ ID NO: 313 - DNA, 4880 bp, Cryptococcus neoformans
ttgaagactagattgtaggaagcggagattcaacaagcagcaactgggcaacaagctgtgtgcagtgacctgcgatggtgcagggtgcaacatgtttattatgcggagaagagcacgaaattgaagtctgatggctgatggacaacgaaaactacgtagagcggtgactaatctgatctgataaggactaacaaagtacacttttattattcgtatacgtagtcccgtcctttcaccgcccgtgaacgtatgatggtgcgttgtgagtcattcgttgtatgacagttgataaataacatttgccgaacgcattgcaaattatgttataacagctaccatcatggaaaaagacaaactcaatctgcatttccacccagagagtcgactattccatcgtctgcctggtgagagatcgagcggacgacgggttcaaagtcgattgggttttgcttcaaaacgaaggaacccggatatataaccaagaatagtcctatgtgttgcatattagacagttgactaattactcgctattgagcggcgatttttacgctatatacggggactgtgatcagcctgccgaaaagaattgtgaaaacgaacaaacggattatagaacagataagacttcctccccgtaataaatgctcttctgctctcttcttcaaattctaataataggcgtcgcattcctacggtgcctggcagaggggaggcggcgtatttccacagttgtcatttttccgcgtattctttgatttttgttggttattattatgccgagatataattctttgccgagttcggctgtttggcaggataaacgtcggattgacttcggaaagtctttccgagttacttgtattgacatcttgtccatagactgaagattgaccgtgaatgaacagcgagatatgcggcaggccccaggtcgcacccggttaaatacgaataactttatctcgtctcttcgctctctcaactacttcccactacatttgccatgcccacgaacaacacaaaccttgacaggtcgttcttgaccgcaaatatcgatgatctccttaagcagctcaccacagaagagaagatctccctccttgcaggcaaggattggtggaagtgagtcttgcttgcttgcttgctttgatagacataggctgacgtacattgtataaaagcactgtaccgattcccaggctcaacatcccttcgtgaggtgcttatgctacttagaagtgcgggtatactgatgttggagtagcatcaagatgaccgatggccctggtggcgctcgaggagactcattttaccatatgagtgagtaccatggacttgctggttaaatgttcagggctgatcagaattagcaccggcttgtgcccttccaagcgctacttctctggcctccactttttctcccgatttaatccattcagccggtaatctcctagcacttgaaacccttgctcgcaatgctgtctgccttcttgctcccactatcaacatccaacgttccccgctcggtggtcgagcatttgaatccttctctgaagaccccactttgtcaggcttgattgcggccgcttatgttgctggtctgcaggaaggtggtgttagtgcggcgatcaagcatttcgtggggaatgatcaagagcatgaacggatgggcgaggactctgtcatcgcgcctagggcgttgagggagatttaccttcgaccattccagattgcactcaagaagtctaaaccacaagcattcatgacggcttataacaaactcaatgggacgcattgttcggagaacgaatggttacttgaggagctgctgagaaaagaatgggggttcgatgggctggtaatgagtgactggtatggtacctattccatttccgaaagtatcaacgccgggctcaacctcgagatgccgggggccacccgatggcgtcccaacggactagtgactcaccttatcaaagcgcacaagatcgaccccaggcagttggacaaggttgcaggtggtgtattaagatgggtacagaagcttgcgaagaaaaacgaggagttggtatattcaccgcctggcaaagagaagactagaactgaggatcaagcagaagacgccaagttgcttcgtcgtttggctggggaaagcattgtacttctcaaaaatgagttgaatgttctcccaatcagggaacccaaaaagatcgccgtcatcggtcccaacgccaaggccaaggtcctcaccggcggtggatctgcccaacttcgttcagcctggtcgtcaactccctggcaaggtctctccgacaatgctcccgaaggtgttgaactttcctattcccttggatgtcactccgacaagttcctgcctatacttgacgacagttttacctgtcctgatggctcacccggcttccaactttcacacttccccatcacctcctcaggcgataaagctgaggaacccgtacatgtcgagacatgggactcatccgacatgttccttgctgactttaccgctcctggtctgactaaggagtactttacccagcttgatgccgtctggacaccggtggaggatggagagtatgaatttggagtggtcgttactggcaaggggtggttctggatcaatggagaacttgttatcgatgcgtcaagagaagatgaaaggtccacgagtttttttaacttgggaacgaaggaaatcaaaggccgaaccagggctaaaaagaacaaggtgagttgttcaactgacgttacattgtcacggaagagaattgatattgcttgtcatagagatatgacattcgcttcctccacgacacccggccatactcagtcaacaacattaacactcccatcgcaagtgccggtatgcgtcttggctacatccaggttatccccgcttcgactctcctctctaacgccgtctctctcgctgcatcctcagacgtcgccttgctcgttatcgggcttaactcgggctgggaatcagaaggatacgaccgtcctgacctttctttaccgatggacacagacaagctcgtcaatgccgttgcggaagcgaaccccaacacgattgttgtcattcaagcgggttctgccgtttcaatgccgtggctcgacaaagtgaaaggtgtggtgtttgcttggtacctgggaaacgagactggtaatgccatcgccgacattatctacgggtataccaacccttctggtcgcctcccgatgacattccccaaacgagagcttgatattcccgccaacctgaactacaaatcggcacgcaccagggtttattacgacgaaggtatctgggtagggtacaagcattttaatgcaagaggtatcgaccctctctttcccttcggccatggtctttcctacaccacttttgcttattccggccttcacatctctcaagtaccagaatcaccaaagaacgtcggtgctgatggatggagagtggaagtcggggtgcaagtggaaaatattggcatggaagagggagcgcacacagtcatgttctggctgagtccgccacctgagagcccgaacggactgaagcacccgaagtggactctgcaagggtttcaaaaggtttatgggctcaaaccaggtgcaaaaagagagatcaaggtcacgtttgataagtgtaagttttctctaaaacctacagctaagaatacagcttatgagtattagatgcggtctcacactgggatgagctctggaacacttggagggcggagttgggagagtggactgttcgggttggcgtagacgcacaaaatatcagtggcgagaaggcgacattcaagattgaggatgatcttgagtggagaggcttgtaaagacagttcaatataaataaagggcgtacgaagttgtgcaatatagtcatatatgtaaatagaatgcagctaatcatgtcgagagatctagactttgtcaattctacgtcatctataccacagtctacaaaagtccttccgattcggcgatagtcttaccaacagccatagccctcccccaaaccatacctctaagcgcagcgtattggaaaccagcgcctgccaagacaaagcagtgaaaaatttgatgggatgatccgaaatagtcgaaagtgccgggggaaagcttttcggggattcttgccgcgctagaagccaatcaagttagtttcccatccatcttgtgacaaagatttcagcctactagagtaatgcaccaaaaatgtagcttgccccacctgctacaatgaggtcaaggctcatcttttctctcgcatggactagaccttgggtgaacaagatgtgggtgatgggtaccacagcagagaggcctagaactatgaatgtgagggtacggtgccatcgatgggaacgatggtgtggggacagtacgatctgtgggaagatcagtttggtgcgagtgggcatacggaaacaaaccaacataagctgatactataccggcaatgatgatgccagctgttgctttttgtcagtgtcgatctccaacatgagatgggacgtacccatatagaaaacttgaaggaaggcattctcatagaaagcatagtacataccgggggtgatactccccacaattaatactacaatacctatctatagaggatcaggactcatatctccaaatcaatgactcacataatctccacggtgggctgcatcgcaaacctcttttgaatggcatgagactgtatgaaaccagctgctcaaactcaaacataacacagcgcaaatgaggtatagagccagggccaccttgtcatgtagagtaggcggggtcggtaatgggctgcaggactggtttagggtggggaaatgcgttgggatgaggtgaagggg

SEQ ID NO: 314 - DNA, 4447 bp, Cryptococcus neoformans
cccccgccccctagctgcacttcgtcatcgttgtaaaaaggtcccgttgtggtggatggtgctggtgtgcgtcgagtctcgmtctccggacacagtcagctcattcctctttccatctttcacttctcttttctaccacattctttccttttccccagtacttatacccctagtacttcccaatttcccccttataactaaatctacacactagaagcggcgaattcaccatggctgacgacccttctcgcgtaagtcaagttcatccgcgccgtccagcttgtctgactaacggtgttgcaggcggttcaggatgactctaccgccaccgccatcttaaggcaaaagcgatcgtaagcttactctctcatactgcctttgccattcagagaagctaacagtcgttaagtcccaaccgacttgtggtagatgagagcccctcagatgacaatagtgttgccatcttgcatcccaataccatggaggcccttggtctcttccggtgagtgtttcactgatctgcccttggtcgtgctaacagcagggtgctccagaggtgatacgatcattggcaagtttcgctatcgagtagtagccttcatctgactaaccggttatgtagtccgtggcaagcgaaggagggacactgtccttatttgcttgagtcaagacgacatagaggagggcaaggttgccatgaacaaaggtaagtggacgatgggacgtatattggatagtctgacagcttgcagtcgcccgaggaaactgtgccatcaagctcggtgatttggttcacgtctctgctgccaacgatatcaagtacggcaagcgtatccatgttcttccttttgccgactctatcgaaggtttgtaaatcgtgtagtcgaggtaggaccctatgctgacttttggcaggtctctctggaaaccttttcgacgtctatctccgcccgtacttcttggaggcttaccgacccgtcaggaagggtaagtatacgttacagattagatcagcggtcgttgctgatatttcttaggcgacgtgttccaggtcaggggtggtatgcgaacggttgatttcaaggttgtcgaggttgacccttcgccttattgtgtaagtgaacagattcatagcggccttagtgtcttggctgtggttttggatgtgctgactgacgtattgaacagattgttgcttctgaaactgtatgcttctgtcagcttcccgacgagaaagaaaatgttgacattattctaggtgattcacactgagggtgatcctctggaccgtgaggccgaggaggctacccttaatgacgttgggtacgacgatctcggtggatgtaggaagcagcttgctcaggtgaatggcttaacaagatcacatgaggcatatttactgactggggcttagatccgagaacttgttgagcttcctttgcgacaccctcaactttttaaggccatcggtatcaaacctcctcggggtatcctcatgtatggtcctcctggtaccggtaagaccctcatggcccgagctgtcgccaacgagaccggtgccttcttcttccttatcaacggtccggagatcatgtccaagatggcgggcgaatcggaatccaacctccgaaaagcttttgaagaggccgagaagaacagcccttctatcatcttcatcgacgaactcgattcaattgctcctaagagagaaaaggcgaacggtgaagtcgagcgaagagttgtctcccagctcctcactttgatggacggtttgaaggcgcgatctaacgtcgttgtgatggcagccactaatcggcccaactctattgatcctgcccttcgtcgattcggtaggttcgaccgagaggttgacatcggtatccctgaccccactggtcggcttgagatccttcgtatccacaccaagaacatgaagctttccgatgatgttgacctcgaacagatcgctgccgacacccatggttacgtcggcgccgacatggcttccctctgttctgaagccgccatgcagcagatccgagaaaagatggacctcatcgacctcgacgaggacactatcgacgctgaggtcctcgactctcttggtgttactatggagaatttccgtttcgctctcggtgttaacaacccctcagccttgcgtgaaactgttgttgagatccccactaccacctggaacgacattggtggtttggacaaggttaaaagggaactccaggagactgtccagttccctgtcgagcatcctgagaagttcctcaagtacggcatgtctccatcaaagggtgttctcttctacggtcctcctggtaccggtaaaacgttgttggctaaggcgtaagttgaccaaatcgctgagcattgctaatttttcagtatcgccaatgaatgtcaagcgaacttcatctctatcaaaggtcctgagcttttgaccatgtggttcggagagtcagaggccaacgtgcgagatgtcttcgacaaggctcgtgctgccgctccttgtgtcatgttcttcgatgaacttgactctatcgccaagtctcgtggtaattctgctggagacggcggtggttctagcgaccgagtccttaaccaaattcttgtgagggcatttcctttgttaaaatgacatgtgctgatcattatatagactgaaatggacggtatgaacgcgaagaagagtgagcatgacatcgttccgtttgacattcacctactaacgaacaatcagacgtcttcatcattggtgctaccaacaggccggatcagatcgattccgccctcttgcgtcctgggcgacttgatcaggtaagcaatctaagcaatcatctggcttcccgctctaattgtgcgctgacgttattctagctgatctacatccccttgcccgacgaggagtctcgtctttctattctcaaggctactttgcgaaaatcacctatcgacccccgagtcgacctcgatttccttgccaagaacactgctggcttctccggtgctgatcttactgagatctgtcaacgtgctgccaagcttgccatccgtgcaagtatcgacgccgacatccgcaaagaaagagagcgaaatgagaaggctgaggctgccggtcaggatgttgaactcatcgatgaagagaacgaggaggatgaagttcctgccatcactgtgtaagtcctaattgcccgatttgaaagggaacatcatactgactcactgctacagggaacacttcgaggaggtcagtcgtacttcgagatagacctatagttccgctactgacttcccataggctatgcgttacgctcgtcgatctgtttcagatgccgacatccgtcgttacgagatgttcagcaccaccctccaacaatctcggagctttggtagcaacttcaaggtgagtctattgatatgcgatttgattgttgactgacaatgtttagttccctgagagtgggcagactgacaacgccgctgctggcgcgactttccagaacgaggcggatgatgacgagtgagtctcagatgattattggcattattgtggttattgacggttatctttgaagcttgtatgcttaagcattgatgttgtgccgatctagtattgtttcacgttcatcggttttgagtgaataaatttcagaagtttcccgagatttcgattggttagaagaaaagaatgatgcatttcgctctatgatctattattggtttgctggtggtcccttgtccaacgaacaaggcaggtttctatattccactgtctccggtgacggaagacaacatccgtgctgttgtgaatgccatccaccagccgctcaatcgctccatgggtaaatcatctccatcttcgttttcgaacttaatgcttaatcctagcagcggaggtaaagatgtcggggcctggacagaagtgaggtactcgtagtcaacgcgcgctagaagcatctctgtattcgatctgtcttgaaggatagactgcatgagagcaggaacatattttctggcctctggccactgtgaagaagtaagattatttgccgttcaacaagtgagacagtgagagacagagcgacccataccatcttttctagaggcagatcagagatgttgatccattttggctccatttcctccgttcttgaggtgtatgggttatgagcgtctgcccacaatcagcataatttatcatatgactcacgtttccggatctcccgaccaagaagtacaggcgtatatgtgaatccttaggagagatttctcttgctgagtaccaggatctggtcggctggtaaggagaatgcccttgtagtgaagatcgaatctgtttacaaccaaacctgactcttcctaggacatgtacagattcatagttaaaacaatatgatatcaagtatatgcggggaacttacatgtagctccctaa

SEQ ID NO: 315 - DNA, 4951 bp, Cryptococcus neoformans
catctcgacttcgaggattgaaagggattcttgattggcgatagcactatcaaaaaatcagtcgtcatcgcaacctacatggatcgtgaggcatacttgtagtcaatagcatcggcaccaatgtcaacatcgagttccacagacctaacgactctcgggttcccagctacaacacgtcgatcagcccaattctccgccaatcacctccgttgacagttctcggtcaccgcccaacgcagactcacatccagtgtaccggttggttaagcaaacgccgacgtctgcagattcgtgcgtagtgaccgcaagcctagcctctccccttacatccttctttgacagatacacattccctcgttcagagccatcaaggatttggatatcgacttgttgatcaggttcaccggggacattggcggtgacaatcacaagagagtgtgcggatgcaaagttccaaatactaatacgtagtcaggtgggtgataagcaaggtactcaaagtcacgaaccattctatgtcgcgtggttagtgtgcgtcaccatccagatgagacagaatggacatactgggcttgggattccgatcggaagtgaggtcaaacttgacagcgtagactgctgtcagtaatgtgaaaaggtataacagcgaggggattcggaggatcatggcggggcaatgaatgtatacctgttttgtgtgattatacagctggagaatgacaaaatggttacgcttgtcgaataacagcttcgttgcaggccacgtccaaagacgtggtggagggtgggtgcctagtctcaaaaggcttgccaatggttctaactgccttccgtgcctatccaatcactttcctatccgcgcctatacttccgtaattgtaacgagtcgccggttgccttgttctttttttatttcgctattttcgagcgagacgtgctttggatttcagaaaatacaaccaaaacagctgcccacgcaacaaccccctccagcatstgcatgctaccttctaccctcgcgagaatacccatacgcctcttacacccacaagccactcagcagctcagatcactctcgaacacaatggcaaccaacaagtcagctgtcacacagccgacttggtactctccagcaaaatcagcagacgaaccagtactcagagtctacaactccctcacaagatcaaaggatgtctttgttcccacaaacggaaggagagtcgactggtacaactgtggtcctaccgtctatgactcatcccatatgggtcatgccaggtgagctcgtctctttggaatactcgtgcaatggctgaaccacaacaggaattacctcactcaggacattgttcgaagaatattgcgagattatttcaattacgatgtcaactttgttatgaacgtcaccgacattgatgacaagatcatccttcgagctcgtgaatcgtacctcctggaccaagccatttccaccaaccttgctcttactcccgaactcatatccgacgtcgaagctgcgtttacaaagtatctcgccaaacctctcaaatcccttaccgcccctcttgaacactctcctaatgccacttcttttgaaatcctggacttgctgttgcaaaaggaccagtctgaagctcagtgggcaaaggaagctcgagaaagggaggaaaagtttggaatgtacttggcaagtctttcaaaagctagggatgcgtacaatgctgcccagcaaagggtcggaaagcccgaaggagagggacaagctgtcaaagacttggttgaaggagcgaccgacgtccttgggccgtatcttggtgagaaggtatggcatatctttattgtttcgatcagcactgattctggatatctgtagcttggccatacaattgccgatcccatcgctgtctgccgacgtctcgcctcttactgggaaaatgccttcttcaccgatatggcccgtctccgtgtactccctcccgacaccatcacccgtgtttccgaatacgtacccgaaatcgtctctttcgtccaacgcatcgtcgacaacggatttgcttatgaaggtggtggaagtgtttggtttgatgtcgacaagtttgagggtgccgagggtgatggattcaggcatgagtatgcckagctccaacctttcaagtaagggcaacaagaagctcttggatgaaggtgaaggtatgttccgcctgtttatattcagaaactaggtctaatctacagataggtgctttaactggttcccagggaaagcggcgcccagcggactttgctctttggaaagccaagtccaagcctggagaacctgcctggccatcaccatggggagagggccgacctggctggcacattgagtgctctgtcatggctagtgcgatcttgggtagcggaatggacattcactctggtggtgtggatttaatgttccctcatcacgacaatgaacttgctcaagccgaggtgagtagtataaatcactggaagacgcctcttatgccatcgataggcataccatggctgcaagcaatgggtcaactacttcttacataccggtcatctccacattgaaggtttaaagatgagcaagtctctcaaaaactttatcaccatcgatgtgagtaatagatctgccaaacgtgccagctaaagcttacaaattctataggaagctctccagacatattctgcccgacagttacgacttgctttcatgcttcaaatatggaatgccaagctagacttcaaaaaggacctgatcgttgataccaaggccaaggaagagacatttgacgtaagcttcaagtcggactactaggaacattattcctgacagccactgaacagaatttcttcacaaacgtcaaggctagaatgagcgatgccgctgctcgaggtcccaacgaggacggcaagcaccattacgaggaggcggagaagagcctcatggccgagtaagtcgtcaattgcaatctctgatctctatactgattcaatggacagctttcacaaagctcaaaatgatttccgagctgctctttgcgattccttcaacactccayccgccattcaaattcttcttgacctcgtatcctccgtcaacctctattttgcgtctcgtggccgagagtacaacattgctcctgtcgttaccgttgctcaatggattacccgtatgcttcgtatgtttggtctcggcgaaggcgacgtcacatctggtcaaataggatggggcaaggagggtgatgaggcgtctggcggcgactttgaaggcaagctcgacccttatctccgagcgatggcctcctttcgagatgatatccgtcgactcgccattgatggcgccacccctggggagattcttaagctctgtgacaaatttagagatcaggaccttgcgaacctcggtatccagctcgatgacggccagtcaacaactggcggtgccttgtacaaacttgttgacccggctatcctcatccgagccagagaagagaaggaacgagcagctgcggagaaggctgagaagaagaaggctgcagaggcgaagaggctcgctcagcttgaaaaaggtcgagtgcctcctcaagagatgttcaggcctcccaacgtcgccgagggaacatactctgcatgggatgaacaagggttgcctacaaaagatggtgaggggcaggacttgagcaagagcttgcagaagaaggtggcgaaggagtggaaggttcaggaaaaagcgcatggcgcatggttggcttggcaaaaggagcaagagggaaagtagacggtgtaggtctatggcatagggcaatgtgtaccaatatagatatattagtatttcaggcatgttggttatttgggtttccgaatttgttctttgaacaggatttcgcgtacactggcgccgtggactatcgcatggacgataactcgacagaacgctagtacatcacatctcgactttgtataaatgacaatccagtctgtccatgttctttcttcttcgaattatgagaatgtacaccgggcttctccgataagccataccgacagcttaacgggtagaaccgtagtacggctgctgggctataaatgcggatacggcaagcatattgaatcagcagacatcacctaggataggtcagaagtcacataccaggagcgccaggggcaacaccaccaggagcgtttccgacaaagttgccgtttccaagataggtgtagccaccattcccatatgcctcttcggccttgatgcgcttgtctgtttggcgaggattgccaatcagcaaaattgaatgttagacccgcgaaagacgtacaaatgagccagaaggcgtggatatgaccactgcgagagcgttagtatcctgcaaacggtcgcttatggggtgctgtgacttacggcaggtaaccctgttaccccagtgacaatcgatacatagtcagttttccttcaacatcaaacgtacacacgtgtctacacgtaccaagatggtcaagagctaaataccattagtttacacccccaataggcattcatgaggacatacgatgttgatgagcaagtcacagctgcagccggtgatgatagcggcggcggctggagggaagatgatggcgacaagaatgaggacgatgtcagaacctcggacaggcatcttgattgttgttcagttggcgaattggtaaagcaatagggtataaagcaagctgagtagataacgagtcgtgaagacaaaagacaacaacttgaagctggaatgaggacagcaaaggatggccgccgaaaggaccgtaacagatcggtggcgggtgatgacgtcgtgaccaacttgcttatgtaatatgcgcgatcgccttactttactgggcgtcgctgtaggcagtctgtagtagtaaggcggtgctcgctgtatatgtcgcatatgcaagatagatgttt

SEQ ID NO: 316 - DNA, 5346 bp, Cryptococcus neoformans
cgggaagagggttataatggtcaagacgggtatgatgcaaaaaggttactgtaacctctttgataacgcgaaacgtgaaatgaaaaagtacatggagcattattgcaacgtctatctatgacttcttgggcttcttgactacacactcatcagcacaagccacaccaaaaaaagaaaataaagaaaaaaagaaaacagaagatagactcaccaccaaacttggacctcgcagagatccttccagcaacaccattcaaatccatcgttcccctcacaatcttgtaccgcacaccaggcaagtccttggcaccaccacccctcacaaggacgaccgagtgttcctgcaagttgtgtccctcaccggggatgtacgcagtcgtcatctgtccgttggaaagctttactcgtgcaacttttcgtacagcagagtttggtttacgtggcttggtggtgtagactttggcgcagacggcctttttttggaaacacccgtcgaggagggggacggaggactttcgcttggtagattttcgggcacctcgcatgactgcaaatagtattttagcatcattacgatggtaatttagagggtaaacgcactttgattgatggtagcttcgcatcgggagctagaggcgaatcctcttccgaaactcgtggcgggtcggaacacgggcatggcgacaggcctggcgaaagcggccttggctggtcgcatcgcgagcctggaaaaggaggaggtgagtgcgaggagtggtcttgaagggttcatggcgagggccgtttaggtgtgtgagattgaagaaacaaaaaaagaatagttatttatgtgtgcgcagaaagcgacgaaaggtcggaacggcgtcgttgagatttgttcaggatgagttttacgtaactggatgtttttgggccctccacttttgggtcgaagatttmtaaagtgaggattaaggcttgttgctctgcatctacaacttaatttgtcaaaacaacaaaaatggcagaggaagacttcatccctctccaaggttcagctgggaagaaagaacgcaaggagcgtgtcaagtacgtacatcgcatacccatacaaccctagctaactcgaccatctaaaagcacaacccttttcgtctcctccctcccttatacagccaccaccaccgaccttctcacccacttctcatacatcggtcctgtacgacatggtttcgtcgctaccgacagagaatcaggcaagtcaaaaggtgtcggttacgtgactttttcgttgaaagaggatgccgatcgggcaattcaagagttggacggaggttcttcggtgggcagtaagaggaagatccaagtgaagtgggctgatgaaagggtgagtgccgtttttttttgatatgacatgtgcaaaaactaatggttgggggaacgttacaaggcgtctctgaaagaccgaaaagccgagatcaaggtttcaaaacccatccctggacagacagacaacaagtcgacggaccccaaggctatccaaactcttgttctcactgggttaccatctgatatcaccaagaatgtgctttggaagaagattagaaaggtcaatgacaaggccgagttggtgttccctgtcgaggctcaagaaaacgaggaggaggctcccaaggatactggtacgttcttctctgaaacttttcaaacgtctaggagctaatcatattatataaagcccacatcgttttcccctcccacggtgatgctctcaaagctcttcccaagcttcacggccatacgtacaagggtaacatcttgtcttgtgtcctcaagaagcgtcttgaaaaactttccgccaaaggagaaggcaaagctcccagccacgctggtagactgatcattagaaatttgtcttgggacgtaagtcgcagtactctttttattttcgggaaattactaaagaagaatactacagaccactatccaagatctccgaaaagctttcctcccttacggtcctatccattctatcgatctccctacccttccctccaaactccctccttcatccgaccctgccaaaccgccgccccctccgcgtgcgcgtggcttcgcatttgtctggttcttggcccgacacgacgctgaaaaggctattgaaggcaccaacggtaaaccaatcaagaagggtcctgatggtgagggtcgagtggtagctgttgactgggcgttgagtaaggaaaagtggcaagaggcgactaaaggagaggagaagaaggaaggggagaaggaaagttctgattctgggtccgattctggatccgagtctgagtctaattcggaatctggcgagggatctgatgaagaatcatcaggtgatgaaggtacttccgtagttagcggctcagaagaaagcagcaacacggatgaaaatgaagaggaggaggaggaggaggaagaagaacctgtcaagcctaccctccccactgtcgatgtcggcagtaccctcttcatccgtaacctccccttcgaaactaccgaacttgagcttaacaccctcttccgttcttttgggcccttgcgatatgccaaaattaccattgacaaggcaactggacgatccaggggaactggcttcgtttgtttctggaagaatgagcatgccgatgaagttattgaagaggcgcagagagtcgcgatggaaactggtgccaattctatccctgtatgcttattttttctcgcattatccaacagaactactgctcacacacgcactacagcttggtggcgcagcccccaagaatcccttcgccctcccttccctccttaccgctgacccttcctcttctctcgcttcccgtcttgtccttcacgggcgaaccctcgacatcacccgtgccgtcacccgagaaaccgcctcccaaatgaaggaagacactgaacgtctccgtaacgccgcagacaagcgaaacacctacctcatgcgcgaaggtgtcatcttccctaactctccagccgccgagggtctgccagagagcgagattgaaaaacgtcaggcgagcttcaactctcgtaaagccttgttgcgaggtaacccttcgctgtacatctccaaaacacgtctatctatccgacagttgcctctcttcgcgactgataggacgctcaagcgattggctatccatgcagtcaaagctttcgacaaggaagttgctgatggtgagcgagaaggtttggctagggcagaagagatggacggtaccatgagttctgctattgccgctcgtggcgacaagtcaggcggtaagggtaagggtaaaggaggcaagaaggagcgtgagacagctgtcatccaatccaagattgtccgccaaactgaaaagctcgatcccgtcacaggccaaggcaggtcgaagggttatggtttccttgaaatgcgttcccacaaggatgcacttaaggtgcttcgatgggcgaacaataaccctgaagtgggtccattgatgtgggagtggtggaaggttgagctcggagatatgaaggagcgagtggaaaaggctttgacggatgctaggaagagggaggaagagccacagaaggaaaccgccaaggagagtaagaagggattggaaagcgttgaggagttagagtcgaggttgaagaagcttgatagcagattggaagaaggcgattcaagaagcggtggtggaatgagaggtggaaagactcttatcatcgagttcagtattgagaacgtccaggtaagtcacttttgaatatccttttgcaagtcaagccagtgactgattcaccgtgatgtgtaggttgtgaagcgccgagtagaaaagatcaccacggcgagagagaacgggaagcgcaaggcggatataattgcagctgaagacaccgatgacgacgaatctgcctcttccaagcccgctggccgatttgacaagcgcgccaagcgcgacggacgtgatggtcgtgatcgtcgcgacaggcatgatggtcccggtggtcgtgaggggttaaaaggcaactttagaggcaagcaaggtcaagatcgagagcaaggcggcaagtttgataaagacaggcctaggggaggtcagaatggcccaagacgggattataacgatcgtggaggtcgaaatgaacgaggtggtcgcaacgaccgtggtgacagacctggtcaagtccagccccgacaacctgggaggagggaccaaaaaagtgtgaaccaggtgaagaaggatgtcaagaccaaggaagctggggagaagagaggtattgagaagttcggaagtcaactgggtagcatgattgggaggaagaggaagatgcgcaagggtgcaaagtaggtggtgattgtcctgccttcgttttaagtctctgtccggttacatgcatgtgtctattactgtaccggatttctctccagtccattgtttgacactaaccaatggaatgaataaattgaatggaaacatacgtatgtacggcgacatcaagtgagatgaatggcgtcctgtttttatgctcctcctttttctcctacgtactaacaacaaaacgatgatgatacctcacctgctcccacaccggaggaggttggattaaatcatgctcttctagccggcgctatcactatcatctaccatattttcttcttatctacttagctgcattcaactgttccccaaatctccttgctaagctcaaaccatatgacgagtcttctccaattcaacagttttcgctagtgtctttgttgctcacctatgaagatgaaaatacagcttattcttaattggttgtttattattaggtttcccatgccatgggtcaagggcagatggtcaaatccggccaccgcaaccttaggatctgcaaaggaagtcatcaagctattaggcaatctggtcgtgtatattgcacaggaagagaaggtatcatcatcttttgtatctacatgtcttgtcaaaaatcgcgttctaataagatatagattcttagatgctaggtacaaggttcagttacacgttttgtgccagacactaataaatatacaggtacaacgtttcgtcgtcaaatttcggcatcccaatatgacatttcttaccactccttttgagcaacgcaggggtattttctatcccgcactcccgcctacaatcccttttttttcttcctcttttaatctcttcacctctttctgcctctcttcgtacgcatcataggcgtaaactacaggcttggcgttgaacaccgcgtcggtggtcagtgattcgtcagaggacgtatcatcatttgcgtgacatcctcttggacgagagtcgactggttgcggattgaacaagt

SEQ ID NO: 317 - DNA, 3906 bp, Cryptococcus neoformans
gaggaccccaccatcgttctttacaccagctgagtccccatccgcccgtggccagttcagatgtgtgcgggtgatggctcgtgcccccactgtcgcccgcggcactggccatggcaagtgtccctgtgagacccgtgcccgcggcagaggaggacgctgtgccggtgccgccgtcgtcgctgggcgcggaggacgggccgggaagggaagggacgtggatcctgacgacctctgaccagtcgttcaggctcgggtcgagcgaggtgtggacgcgcaggtatccgtcggtggcgatgctggccacacgcaggccgtgggcggggtccggggggccgaattggacggagcggatggcgccggtggggccggtgaggataccgcgctcgagccatgcgcgcgaggtggaggcggcgggggcggtggcggacgtggaaaaggagggttcttcccagatacggattgtgcggtcgtgggagcacgaggcgaggagggagccgtggatcgggtgcgagaaggagaggtggaggatgggcgcgtcgtgggcctttgcggtaagccggcgccggcggtctgtgcactcaccttccagttggcgtcctcggcccatttaccgtgctcgtctttccgaaagacctttatgcgctggtcggcggaacatgttgcgaggcgttcgccgtagtagtcgtacgtgaggtctgcaggcggagtgagctgcgccggggacaggcgacggggcgacgggacgtacgggtgacgaggtctgcgtgcgcgggggcgagcaggtcggtctgcagcatcgtgcagttgtgtcggtgtatcatctctaacggactgtttacgagcatgcatcatgcaggcgggcaccgccgggtagcaattacgtaagcgggactataccaatcccgcgacgtggcgggtgtctgcatctgtctccatctctgcgcgccccagcagctccctccgccccccagcagctccctccgccgtccccgcgtatccaatgtcccaaccgatcatgctcccccagggctgggaagccagatggtacgccgccccccgcccgcccgcgctgacgtaacgcagggatccccaggcgaacgcctacatctatgtcgaccagagcacaggcaggtcccagtgggaggtccccctcaaccccaccttccccacctcccccaccccgcacgcccccccccagcgccacggccgccgggcctacccctccgccatgtacgcccacgcctacgacacgcccgccccgcacgtcggccccccccagccggtcgcgggctacgccgagcagggcacaccgcagttcatcacccccggcttcgagggccagcagcccgtgcagcagccgccgtacgccgctgtggaccacgtcgccggccagttccagcagatgaacattgctcccggcgccgcgcccgtcgctggcgcggctgccggtgcgtaccagggcgcgggctatgccgagaagcagctgcactcgacaaagaccaagacggtcaacctgataggtctccagccggacgtcgccgcgctcgacaacccgcctccgcctgccctcctccccgccaacgcgagcgtcacgtcgtccgcccactcccagccggatccgtcgtaccagcgctgcaccctcaacgccatgcccaccacgcagtctttgctgaacaagtccaagctgccgcttgcgctcgtcatggcgccttaccgatccattcgcgagacggacaatgatcccgatgtgccggtggtcgaggacggcgtgattgcgcgatgcaggcggtgcagggcgtacatcaacccgtttgtcacgtttatcgaaggcgggaacaggtggaagtgctgcatgtgtggtctgagcaacgaagtgccgcagctgtttgactgggaccagcgtgcagagaagccggcggacaggtgggcgcgcaaggaactgaatcacgccgtcgtcgaattcgtcgcgccgacagagtacatggtccggccgcctcagccgcccgtatatgcctttgtcattgacgtttcatccgctgcgatccaaagcggcatggtcgccgtcgccgcgcgcaccattctcgaatcactcgactcgttgccgaatgccgataaccgcacaaaggtcgccatcatcgccgtctccaccagcctccatttcttctccttgcccgccgacgcgaccgaagccggcatgctcgtcgtccccgacctgacagacgtcttcctcccgaaacccgtcgacttgctcgtcaacctgaccgaatctcgccccgctatcgaatccctgcttgccaagctgtcagacatgttccaagactcgcacaccgtcggttccgcgctcggctcgggtttgcaggccgcccaccagcttattgggaagattggcggtaagattatcgcgctgggcgcttccctcccgaccattggcgagggtgtgctcaaggcgcgagatgatcccaagctgctcggtacatcgaaagaatctcagctcctcaatgccggcaacaactggtacaagacgtttgcgatcgagtgttccaagaaccaagtctcggtcgacatgttcctgttcagcgggacgtacaccgatgtcgccacactgggttgtctgccccgatacactgccggccagacctatctctacccaggcttcaacgcctcgaggagcgaggatgcgatcaagtttgcgaccgagtttggtaaagtgctggcgatgcccatcggtctcgaggcggtgatcagggtccgtgcgtcgagggggatccgcatgtctgccttccacggcaatttcttcatccgatcgaccgacctgctcgcgctgcccgtcgtaccgcaagaccaaaactatgtgatcgagctccagatcgaggatgatatcaagggctcattcgtcgtcatccaaaccgctgttttgcataccacatgctatggcgaacgacggatcagggtgatcacccaggcgatgccgacgacggacagtatcgccgagctgtacacctcggcggaccagatcgcgctcgcgacctacctcgccaacaaggctgtggagagaagcatgtcacacagcctggacgatgcgcggaaccacgtcacaaacaggctgggagaaatgttgacggtgtacaagaaccaggtgacctctgccgccggcggcgcctccgcccagctcgccgtgcctgaaaacctgttgctcctccccctgctgtgttgcgcgctgacaaagcacgtcggactgcgtgaaggcgcctcgatccctccagacttgcgggcctatgcccaatgtctgctcaccacgcttccctgccagacgctgattccgtatatccacccgaggttttactctctccataatatgccgcccgaggccggtacgattggcggcgatgacggggcgatgatattgcccccggcgctgaacctcacgtcggagaaactcgagcgccacggtttattcttaatcgaggatggacaaaacatcttcctctgggtcgggcacgacgccgtcccgcgcctgatccaagacgtctttgacctcgcgtcataccacgaactccagggcgggaaatataccctcccgagactggataaccccttctcggagagggtgtgtaatgtggtggataagacgagggagatgaggaggggagtgtataggccgcaggtgtatgtggtgaagagtgatgccgagccggcgttgaggagctgggcgttgagtttgttggtggaagatcggatggataggatgtcgagttatgcgcagtatttgacgactgtgaaaagcaaggtgggtggttttttgttttttttttttttttgggaaaaagctgatgcgtgtgtgtggtttaggtgaatggcagttagagtcaaccgtgtttagatggatgactggtgtttggggcttgg

SEQ ID NO: 318 - DNA, 5088 bp, Cryptococcus neoformans
gaatacagacgtgtgatcaacaagtaaggaataattcagacatacttgattagaggcagtgtaattgagagtgttggtcaagctgtatatctggttttgacaaagttgcagcttataccccgcgcttccatcagtaagaagcttttgaaggcctgctgtatctgttgaattgtctgtgcaagctgctgagactagcagaggaaaaaggagaattaaaaacgagaggctggaaagtgcaggaaccatgatccctgttgtattgattatctccgtattgatggagaatgtcaacacaatgggtatatgtgaggctgttgggagtaaggactgatataaaaatatatatatttcaagtaactgggtgtgataataatgattggagatgaggccgagggacaagggcaaaaaaggtcgaacataggtacatagattgttgcggtgccaagtgccagggaccgatgacacatagttgttgtttgtttacgtgagctgtcctgcagtgtgcatgcgttgcctagcagaagagggaaaagaagaagggactgagggacagaagacgacgggtggaggcacgagcgcacgacgtaatatgatgtgtaatgtgcggattccagactcccaccaaccaagaagccacgacgagggagggagggccgctgtcgagacgaggcaatgtccgtcgaggggcttgtgtcgagcctaccgctgtcgttgattttattgttgtattattattattatcaaaccgtcggttgccgccgacttggagtttgcacctgctcaacacgtggtcgactcgtgctcaacgcgtgcatcatgcaacatattaataaagtgcggctggtgcaactcgaggtgccacagagcagtaactccgggtgggcgcgtcgtggaggtcgttgttaccatcatacgtagagcactactaacgtgcacccaacttccagatcgactctcccccaactatcaccatatctcacaatcatgtccttcaagaaggatgatgaagcaggtggaatatgtacgtactctcttaacggcgcagctcacacccgcagctttctaccacgataaatccactgtcatacaagaagcccgcgtcttcaacgaatcgcccatatctcccaggaaatgtagggccctcttgacccggatcgtataccttctatacacaggggagactttctccactcaggaggccacaacccttttctttggtgttacgaaactgttccagcacaaggatgtgggtgcactccgattatctctttccatcgagcaaccaactgatcccgttgggtagagtgcactaaggcaaatggtctatctggtcgtcaaagagctgtctactgttgcagaggatgtaatcatggtaacatcttccatcatgaaggacatgcagcccaatttggaagttgtgtacaggcctaacgccatccgagctcttgctaggatcattgatgtgagtcatcgagccatgtgctagaacttcaactaacatccaagaaggcgcaatcggttcagtctgtcgaacgtttcttcaaatcggcccttgtggatcgctcgccttcaatctcttcagcctctctcatctcctcttaccacctcttcccactctcccccaccattatcaaacgctggtctaatgaagctcaagaagctgtcaacgcaaagtctgtctcttcatactctggcgcatctgcatacttttccggtggctcagcaggaggttatcaggctgttgcgagttccagctacatcatgcagtaccacgcattgggcctattatatcttattagagaaaaggatcgtatggcgatcaccaagatggtgcaacaactcggtgcaagcgggaaggggagctctatcgtgagaaatcccatggcaatctgcatgttgattagatttgcgaggaagattatggatgaggaccccaagtacgtgcatccttggtgtagaagtgttgtgcctgacagtgtgcagtctcagaaagcaaatgcacgaatatcttgagactttgcttcgacacaaatcggaaatggtcaacattgaggccgcgcgagccatttgtgaaacgaaagatgttcaaccaggcgacctttacaagactatcgcgggtaagtcagtaatatcatttcactatcgaatcctttgacgaacgccattgatagtattacaattattcttgagctcccctaagcctgtgatcaagttcgccgccgtgaagactttaagcaagcttgcgcaaactctacctcaatccgttgctgcgctcaacgtcgaaatggagaacttgatcaccgactccaacaggagcatcgccacgtacgctatcaccacattgttgaaggtaggtctttgtttggcgatttgatattgtcgggcgtcagttgaccatggcacagactggcaacgaagcttctgttgacaggctaatgaagcaaatttcgtcgttcatgaccgatattacagacgaatttaagatcatcgttgttgatgcgattcgatcactttgcctcaagtttccagctaagcaagcggtgatgctctcttttctttctggcgtgctaagggacgagggcggttatgaattcaagcacgcggtcgttgaggcgattttcgacatgattaaatatatccaagactctcgcgatgctggtgagtctacttcttgacgaatagtaactgatgaaacagcactcgctcacctttgcgagttcattgaggattgcgagttcacaaagctttctgttcgtatactccacttgctcggtattgaggggcccaagacccggaacccgactaagttcatccgatacatctataatcgcgtcgttcttgaaaatgcggttgttcgcgcagctgctgtcagtagcttggcgaagtttggtgtctgcgtcgatgacccttcagtgatgaagagtgtcaacgtgcttatgaggagatgccttgatgatgtcgatgatgaggtcagagacagggctgctatgtacatcaaggtattggaggaaaaatctttggcagatctgcttgtgaaggatggtgagttgcaatagctctcaagtgactcaacctgatatatgacatagaagctcaattctcccttgccaatctcgaggaacaactgatgtcgtacgtccgagataattcgaagcacgcttcggcattcgacatctctgcagtgcctaaagtcagtcgcgaacaggcccatgcagagatggctcagactcgctcatctgctctcgatgtcgccggcccctctactgctgctgtcatcaccccagcctcccccattccatctgctaaggaagcccaatcgtcgtatgccgctcaactctcgaccatccccgaatttgagccatacggtcctgtccttaaatcttctgccaagcccatcgagctcacagagtctgagacagaatatgtcgtcacggctgtcaagcacgtcttcaggaagcatgtcgtgttccaattcaatgttgccaacaccattcccgacactgtgttagaacaagtcgctgttatcatgcagccatcgcctgactgtggattgatagaagatttcattattcctatcaatagcctgacaacgcaagtaggccaggcaccggtatatgtaagctttacgagagagaatccacaagaatatgcggccggatcattcggttgtactctcaaattcgtcagcaaagaagtcgacccatccaatggacagccggaagaagaaggatatgatgatgagtaccaggttgaggagctcgacctgggcgcggccgatgtaagtgtttttgttgctttatcatgttcagatactgatatcaatgatagtatataactcctaccttcgttactttcgtgaacgaatgggacaagttagcctcttccccgtcacttaccgaaaccttcgctctatcttcttccgaatcccttagagaggcttgtcgatcccttattgaagtcctcggtatgcttcccttaggtggcaccgacacgcctacctccaattctgtccacacccttaatcttgctggtcttgccatccctatagcagatggcgaaaagtcaagcaaggtattagccagatgtaggatgacttacgctccaggtactggtgtaacaattgagctgaatgtcagagcagaagaggaggaggcggcgcggttgatcatggctgccatctaatgcggtcttgaaaaaataaattggatttacgctagtgtccgttgtacgatggtaacaaatggaaatgcatggatattggctctacaggtcatgtgctaccataggattataaaactcccgatgcctgccttgctaacaaagtggaaggacgcctttatagaacatttaattataaatatcgctccgctacaaaacacccaagcggaagacgagtgagtgaattggacggcagcgaattcgttgttggacgcatttcatgacatgtcaattgggtttttgagttcaagtacatgagttcccgtccctcatattgccaacagacgtaataaatcagaggaatccaacaactatcactttgcttctagtcactgaaaggagggacaggccgccgaagtcacgaccacaacagcattttggctagtagtagtagcaacccgtgtgagattcacgccgcccttgcttggttatctcgagtggacccccatcgcagataatacataggaagagctgaagaggaaaaagaaaaagattggaaaaggcacgccatttcagagaagtggttttaacaactctccaatcaggattccaagagattcttctgaagttcgttgaatgttagtgagcggcggaacgacagtactatcgcccaaagctcgcgcatagttcaacagattatcctcacacctttttccatgaaattcgaatgaacaatgtcgtactcgtagatggagaagatcacataggataggcaacggccaaaataatccggaatgactgttgtctcctcgacccttcggtaaatgcctcaaagcaaagcaatagccttcatctaatatataatgtcttctcgttcctattgccacatgaacgagcgaacagccatagcatgcaccacagccctagttt

SEQ ID NO: 319 - DNA, 5140 bp, Cryptococcus neoformans
ggaaatgaggatacttgttggtgttgtggcattagacattgtaggcgtgaaaagaggatgaagatgagttaaaagggagatgtgttcatcggatgttcctacatcgtttgttaggtcgtgactttggggtaagacactgatggctcacctggaggagtatcgatgacaaggtaatccaagtcgccccatctaacttctgacaagaactgcctgatcattccgtcttttttagggcccctccaaaccacgctatcacctctatcctttaacaagaagccaatgctcattacacccagccgtcttccttggtccacgtatacaggcacccagccggctgatgattggtgaacagtagctgtcggcgtatccaggccgaccatgcgcggaagtgagggaccggtaatgtctaggtctataagaccaacacggtttgtgggagactgtgccaaaagggataaagcgagctgtacagaggacgaagacttgcctaccccgcctacatgaaggtcggtttgtcagcaggagcaggtggtgtacgagctgcacttaccctttcccgagaggactatgataatatttttcacagttgacagtctgcgagataccggtgtctctattatatccgccatatctgtttctctcaggaatagatgcgaattcaaagttggccccaatgtaaacaaattatgacattaatagtcaagaccggcgtctagagtgccactgctaaaaacaaatcttacgtaatgatttgccacctaatgcctctttccttctttgacttattattcgacatgcgtgatcttgacggctacttgttgcagctggattctcttcttattttctaacgcctaaaacatcgcgagtatgtccaacgtcggcacagtgaagcatattcccaaggaagtgcgatacaacttcctcaacgtacgtatctcctcagtttgttgaagcgggatcgggagctaacagtacccatagatggccgctccggcgagctatgttgctggtcttggtcgagggtaagtggcatctgcgcccaattcctgtgtgactttaaactgacagacgtatagtgcttcaggtttcacaactcggtccgatattggtcccgcccgagctggtcccagtgcagaggttgttgcggaagctcaagctcgccgtggtgaagaagaaatccctgatccagatgctttccaagatccggacgacgaaaggaatctgtttgctggtacagtctacgaagcggacgatgaagaggccgacagggtgtgggacagtgttgatgccagaatggatgcgagaagaaaggccagacggtgggtcttctctatggatatcttgtctcatgttcgatactgattagatatgcagagacgcggcagaagcgaaagcggcggctgaagaacgtgctcgcaatcccaaacttcaaacgcaatttgcagacttgaaacgatctctatcgagcctcaacgatgctgattgggacgccatccctgaagcaggaaacttgactggaaaaaggagaaaggccaatttgcgattggaggaaaatcagaatggaagaagctacaatgtcagcgacactgtcattgcagatgccgtgaagagaaatgccatggtaggagagttggatcctgcagaggtgggtaacctagtagtaactcgtcatcgaaactaatcacttccacaggctggtattggtatcgatggtaccgaaacggatcttgtatctatcggtaatgccagggaccgagtattgtcgctgcagcttgaccaagtgagtttagatttaatcgtgggttatggtattagtcattgacagctttggttaggccacaagagacgcctcaaacggctcttctaccagcatcgaccctaaaggctatatgaccgctcttaacagtcagattgttcaaacagacgctcaaattggtgatattaagcaagctcgccagctcttgcaaaacctcattcagtctaatcccaaacacgccccaggatggatcgccgccgcttccttggaagtacacgcgaagaagatggtcgctgccaggaagattatcgctgaaggatgtgagaagtgtccgaaaaacgaggatgtttggttccatgccgctgaactcaacacaccggagaacgcgaaagttatcttgggtcgagctatacagcacgttcctcaatctgttaaaatttggctcaaggctgcttctctagaaacagacataaacgccaagaagcgcgttctccgaaaagcccttgaattcgttcccaactctgtggggttgtggaaggagactgtcaacctggaagatgatcctgaagacgcccgcgttctccttacccgtgctgttgaagtcatccccaactctgtggagctctggcttactctggcccgtcttgaaactcctgaaaacgccaagcaggttctcaattctgcgcgcaagcgtatccctacctctcacgaaatctggatcgctgccggtaggcttgctgagcagtcaccttccgccgtggctgtcaagccagaggtcaagatggaggacgaagcggaatacgaggctgagcaaagaaagaagcttgctcagcaggtcaacaaactcatggctggtgcagtcaattcattgcgcaagaatcaggtcattctttcgcgagaacaatggttgcaagaggccgagaaatgtgaacaggacggctcacctcttacagcgcaagctatcgtgaaggctaccatcgctcaggacgtcgaggaagaagataggagatctgtctggattgaagatgcggagagggcgacaaagggtggattttacgaggtcgcgagagcttgttacgccgtcactctcgaggcttttcctaatactccatcagtctggagaaaagccgccgagttcgaaaaggcccatggcacaccgtgagttactttatgtaattgcaaggccagatgactgacaaaagattgtagcgatgctgtccaagaaattctcgcccaaggatcccaacactgtcctcatgcggaggttctctggcttatggctgcgaaagagaagtgggtcggcggcgatatccccggtgctcaagccattcttgccgaagctttcaaacaaaacgaagattccgaatctatcttccttgctgccgccaagctagcagctgagaccggcgagatggaggctgctatccagatccttgagaaggccaaggcacaggcagacacagagagagtctggatgaagtcagcggtactgttgaggcaattgggcaagttggacgaggctctttcaaccttggaagttgcaatcaagaaattcgcttcctttgacaaattgcacatgatccgagggcagatctacgagtcccgtaatgaggttgcgcttgcgcgaaatgcatatgctcaaggatgccgatcatgtccgaagagtatcccattatggatcttgtcggctcgtctggaggagaaggcgggtgtgacgatcaaggcaagggcattgctcgaaaaggcgaggttgcataatcccaagaatgatgaattatgggcggaaagtatcaagattgaagaacgaacgggcagcccacagcaagcgaaatctgtccttgctcgaggtaagtatcactttatttctagcccatcctgcgatttactaacagcttcattctatagcaatgcaagaatgccccgcctctcctcttctttggtccatggccatcttcatggagactcctcaacaaagaaaaggtcgttccgttgacgcaatcaaaaaggccggcgaacatccggccgtcatcttggcggtcgcgagaaacttctggagtgaaaggaagattgaaaagacgagacagtggatggccaatgctattaccgccgatgaagattggggagatgcctggggttattggctgaagttcgagaggcaacatggagagaaagtgagctgattcttgttttcagtttctaaaaggatatctggactgatacatgaatatataggaacgtcaagaagcggtcgttgaaaaatgcatcgcggcatcaccacgccatggtccggtatggcagtcggtatcaaaggatttggccaatgttggcaagtctacaaaagagatactggagttggtcgcggacaaactggaataatgttttagtatagtgccagttcttttggtatgtcatgatcacaatatgtcccgaacggtctttttggatctcgagtccccttgttggtggcaaagaagttggacgcctgcactgagaccataacctgtttgagagtctcgcttgcttattgatgaaaggaaaaacagactcttgctctccgacatcacttaccgatgctagctattgctaatagactaagcttcgcaacagcctcataaaagtagttgacaagttattgcaactcagctcggacatctctgcctatacgccgttgttacacgagactgagacgatcttcatttttcacatcctccttagacgatactcctgcttctgtcctcatttagccagaaagggtataaaagacaaccgcagcttcgacaagaaaatattattttcaaattcccgccttagaagccacaccaaaactgtcttcttgtaacaatcttccctattctttagtatcagaatttatgtcttcagcatcttcagcaagcggagggggtttgtcagctttggttcaagcttataagaacaatgtaagtaactcaaacccaggatccgacactggctaatagtaaatacagagcgaasccggggcccaggctgcagtgtcgcaaagcagcgaccagagcttcggatcgcaaacactatcacagctggataaaagcgttaggtaagttacccaacctctgggtcgcatccaatcttgattaatatcgttccggattcccaggtcggccttttgagcctggagcagctcttgtgcagatcagttttatgcgctcttgcccagatcacctcgtttataccaacgggcatattgagccggtgacagatccaatgaaacgcgcttgggtgttcaaaaacagagaggctttcctggcaaaccgagttattcactctttggatgaccaatcagttcttatgtctgatgaagattacgaagcggtcagaaaactcgtttccgcggctatggtggacaca

SEQ ID NO: 320 - DNA, 5045 bp, Cryptococcus neoformans
tgattgtcgtcaatgattgccataccataaagctgccatgaatgagacttacagatccagggggataagttgcaatcctctgttcaatcgtttccctagcggtatcgagccagtcaccgtcaacaggagcgtgcatgatgggaaaccttctcaagccgtccagctcgtacaagatatcattgatgggcaagtacgcgacgaaatgataggcatcctccttttctctttctgggaaggctgaagggtccatagcaaacggagacgatttggagaatgagttgtggacctcgcggatgtggtcggacgaagaaaggacgtggccgagactgcaagaaaatgtgagtgtttgcatgagtgccagtgcattaaagaacgtactcgagagattgcatgcccgcaccaaactctcggaggttttcaagttcgctctacgtcgtgtcagtgctgatcagaagagccaaaaagttactaaccccaagtttaatggattcacgttcgtgaaccgattgctgaggcttgatgttcatgaccttttgaaacaagtacgcatcagcagagttacttttttatataaatgtactcacagcattaagagccgcaagagtcccgcaactgttgttgataacctagcatagacatgagctcggacacaatgtcaataaaagtttgacaaacctgattggcaaaccatacgccattatctaaaggatcaacctctacaccggcactttcttgggcagactccgcatccggtgcgacgtatttgaagaggaagatgagggcgtgaataggttttagggtagcaagcgtttcagcatcgagagagtacaggtcgtcctatgtgcatggctcagttaagatgcttgtcattgggcagtgtatgactgactacttgcaatccgtttacgcccaagtcctttagcagctgggtgaatacctgggggtctgactctgtgagcgaccagcctgaagggtcgtctgccattgttagtcgtgggcgatgtttatgtttacggagagcaaaggaaaagtggaggcgacttgtgctgatggtgtggtggcaactggcgggttaccggactttggcatgcatccttttgccaccggtacagtcttctttcttcctacccccgtacggctggcacggcgcactcttctgtcctcccgcctttcctacactactctatacatacacctccatagtagtgtgggccggttgcaagacgctccacgtcatacaaatgaatatcgcggggatttgtttttctgttttctccgggggctgcagacgcgctcgccctgttgctttctcccaggccatccactcacctcgagccacagtcaaataatcccatcccccataatgaacgctgcccagcttctccaggactccctttcctccaaccaggccgcccgagaatccgccacccagcagctcgaggccgccgcgagggacaattttgtgagtagccgcccccacggcacaccacagcccttccgctcacaaacaacaaacagcacggctatctccacacccttgccacagagctcgccaacgaaagccagggcctcgatgtaagatatgccgcaggtctcgccttcaagaacggtatcgccgcccgggtatgcatgttttccttccttacccgtaacaaactgctcacaggacatctcgcaggacgctataaaccagcccgtgctttccgaacgatggcttgccctccccgaatcagcaaccaaccctctcaaacacctttcactttccacccttgggtctccccagcttcgtgccggtgcggtcgctgcgcagtgtgtttcagccatcgctgcaatcgaattgccggtgggcaagtggccagagttgatccctcagttactcgaatttgtgcagaaccaggacaacactggattgagagtcaacactttgcaggctgttggctacatctgtgaagtcatcgtgagttaccatgatccatctgacatactgtccagcactgacatccatatagcgacctgatatccttgctgccaagtcaaatgagatcctcaccgcggttgttcagggagcccgaaaagaagagcctagtcacgaggttcaacatgccgctattcaggccttgtacaattctctcgagttcattagggataacttcgagcgagaggtttgtccgatcaatatgactagtcacgcgacttttggactaacaaaggttttagggcgaacgaaactacatcatgcaggttgtatgcgaggctactcaaagcccctctgttcctgtccaagtcggagctttcgaatgtctcgtgcagattatgcacttgtactacgaaaagatggacttctatatggagcgcgccctctttggcgtacgtcttgcatcggtgtcttaattattcgaggctgacgtatcttagcttaccatcatgggtatgaaacatgccgaggaacccgttgctctccaagccatcgagttctggagtactgtctgtgaagaggaaatcgagttgactgctcaggcccaagacgttagtcatttttaataccatttttctcttgtactgatttctcacaggctttgcaatacggcgatcaccctgaaattgagtccaagggttttgccaaggctgctctcaatgatatccttcccgttctcctcgaactcctttctcaacaaaatgaggatgatgacgaagatgactggacaaagtctatggccgctgctgcctgtctgcagcttttggctcagaatattggtgatgagattgttgggcccgtcgtgcccttcgttgaggccggtatcacccgacaagactggcagcaccgagaggctgctgtcatggcctttggttccattcttgacggtcctgaccccatgactctcgctcccctcgttacccaggccctcggtgctcttatcagcatgatgcaatccgacccaagcttgcaggtccgagacactgttgcttggacactgagcaagatcaccgagaccatgctcgaggtcattgaccctagtattcacctccgcaactttatcacagcccttgtcatgggcctcaacgcctctcctcgaacttgcaacagttgctgtgctgccctcaacaaccttgttatgcaaatctctcaaccccctgagctcctcaccgaagaggttcaaactactgtcatgtctgaatactactctggtattctcaaggagttgatgcccattgcagagcgacccagcaaccagtccaacagccgaagcgctgctgttcagactatcgctaccttcctctccttttctgccaacgacactctccccgtcgttcaggaggtcgctgttgccttcatcgctcgtcaggaagcccttatgggtatgcacaaccagcttgttggtatggatgaccgaaacaactggaatgacatgcaaatcaacaactgtgttgccattgccgccttcatccggcgatcacctgctttggccgctcctttcgcggacaggatcatgaccaacctcatacagctcatttccgcctctggcaagcagtctggtgtgctcgaagaagcgttctccaccattggtggtcttgcctctgcccttgaggccggattcaacaagtacatggaggcctttgccccttacatcatcactgcgcttggatctcacgaagactattctgtcgcccaggctggtgtctttatcacttctgacattgcccgatccgtcaacgaaggcctccagccttacgccgagtctctcatgtcctcactcatcgagctccttcgatcgcccattgttgccagacaggttaagcctcacgctatctccgccatcggtgaagtggctcttgctatcggatcgggcttcaagcccttcctcgaagccaccatggctatcctttctcaagctggatccacttctgctccccctggtgatgaggctatgatggactttgtgcagactatgagggagtctattgttgatgccttcattggtatcatgaacggtttcaaggactccgagggtgagtcgatttaattttctgtagaactaaaactaacttttgtgtagccggtgtcatgctcccctacgcccctggtattctttctttccttcaaacttgttgggccgacgaggaccgttccgaaggcttctgcagtgcctcccttggtctcattggtgactttgccagcgcattcaagaacaacatcaaggaccaaattacacaaaactggattcaagaggctatcaccagcggcagaagcagaagcgcttccaagcaatccaagaccaacgccgcctatgctcagcacgccatcaaggaactgctcaagtaaattgattcccactctccctcgcccgatttatcgtctcgcatgatctccccacatatcatctcttttgcatggctctcacgaacaaaaacgctcccatatttcattcacaagtataaagtatctttgccgcgctctgtcgtccgaggacgttcaaccgccgccattatttgcatcaatcacatggtcctagaagaatgactctttgcattatcattttaatttttctcccgtttctcatatattttatttctttttttcattcaaaattttggcgagaggcgatagacttgaagaagcagcagttcgaaggtcgttgttgaatgtgttggattcatcaaaagtgtagttttcttttatcatctttctgcctttgggctttctagttccctactagtgtgtgattaggagatgctatatacccgcgtttctatcaaactacgctttacaacaatgatatacagtggtagagacatcatctcgtttgtcagttaattagtgttcttcttgaaaacctccgagggtgatccagatatatgttcacaaattgcatatatgcagaggaggaatattggtggacggtgctggaggctgcagatcgcaggatatcaagagctgcagtccgaaactgtggtcggaagcaggaacggtgttgattgatcgatagttccaaggtcccatatcttaggccaagcccaaagaagggggacactgattcggaaggaca

SEQ ID NO: 321 - DNA, 5289 bp, Cryptococcus neoformans
gggacacagtggcggccgatgatccgtctgatgtttacgggtttgacatccgataacagcgcgataatcagtgggtgaggtgtgccgctgcctggcgccgctccggctgtcacggaaacgtgcctcctttcatcacacccagacaacgctagtcaaactgctgcacgtctctgcggatcgccatgcagcgttcaagtgctgcacgccgtgcggagaaacggcctacctgcattcccgaggtcgctggcgagtgatggacacagcatgtgacgccagcggtcggcagcagaccatcgctcgcgatccaatgcatgatttgcttcccgggaaagacgaggaagtgagagaagggggatgccatgggggcagtatgcagacatgtggtggaaatgtacatacgaagtgaacatgggatgtgtggatatggggtgtttgtggagagcgagaagggtgtgtattgcatcatagctcaataggcagcagcgtccgaagccgaatggaggttcgtttcgcccgctccaagggtcgttgccagcctggtatatatattcgtacatagcacatagattcatacgtatacctgttctcctacatacattcccagaccacagcgtccctttcttcgccacaaataaaggatccacgcaccagccgaccgccgccgtctcgtgactcagcccagcctatcattactgctccattcaattcacttggattctccacccttccgtcacccataacccccaagtgagtccctcttttcatctccctgatccacgatcctcggaagcatcctttctcccgtgggcttcgccagtcgtttgccaactgctctgggcttctttcgcctacgctggcgccttctgtgcctctcttcctcttcgcctcttttggctctcaggccagctatattaaccgctgttgggcgggtgcataccccttcgactccatccgcaccccagaaaaaccttgtccaatcccaaaaaaaagcacttctgccatgcccttacagcgcgcagtatctgattcccatgcccttgtttcgtttcgagctaacgatgacccgtctgttcactttcgcccgcgcccaaagatcaagccattcccaacgagccctagaacttaccacttatctccttcactccaacttcgttctcccaagcagctcctactagactggagtgacgacctttcacctatcaacgaatttcatataccaatagccaacatgtcttcccagcccctcgagaaggccaaggtaatttttttttttctgcaagatgcacattccaacaacacagactgattcttttacttgaccagctgccggtcccaaagaatcttcttttcatcgaaaatgatgttccaccttcgaccaccccttcagcggcgactactcccacagatcatgaactcgacccgcttgcccatgctggcgataaggcagaacttctcacccaagctcttcatgagagtcaagtccctacaaagccaaagagcccacctaataatgtgtcgaggttgggcaaacttggacagcttgagacaagattgccggatatcaatgcggaacctaatgagtattatggcggagcacaggtaaccagtagggcacgaacattcagcaatgtaagtctcgtgtcctgttcctggacgaaccaactgatccacaataggtcggtgtcgagggtgaattcaagcgtcggcctatgcaaatgggcggtgagaaaatctctagaaatcgccgactttcgcatggtgagtactacgttaatggcgtatgctgataatgaagacgagagtaccccgtctgctcccaggcgctatttaattgatgtcgaggaaacaatgagactcgtgttggagcaagaagacacggataacaagtgagtcacatcatgttcgaatccaatctgactcgtacagcttccaaatttctatctatgattcgggtcccaaacttctttcattgggtacggcgagttctaatgcccataaaacctttgatatccgggtatgtcacaaatatctttgccgtttgataataataattgctgaaatgagctggggttagggcacatatatgttatcgaatcttcttcaggaactcgcacttgcccgagactatggacgcaagcgcattgtcttggatgaagctcgtcttgccgagaatcctgtggaccgtctctctagaatgatcaagaactcattctggaacagrctcactcgacgcatcgacgcagagggtcttgaaatcgcttgcgcggatcccaagaatagaagccagcacatgcgagccaggatttatatcccacatggagaggatgaaatggccgagcattatcgtcaaatgtgcttcttctctcaaatccctagcggtatgatacgctgacacatcaacgcagagcgaaagagaaacccaacctcaaactcgaggtcgatatccttcccaaagaatgtgacaatccagcttttgtcaagactctcaacgataaaccaggcattctcgctcttgcaatggataaaaaggttgacgcagacggcaagtctcacctagaggctctgccatttatcgttcccggtgcaagattcaatgagaagtatggttgggacagcgtaagtaatacatcggacttgtaaaattagcatctaatcargtgcagtactttatggccctgggcctcttggtagacggtcgggtcgacttggccaagagtatcgtcgagcactgtattttcgaaattaaatattacaacaaagttctcaatggtaaccgatcatactatctctgtcgatctcagcctcctttccttacagacttcgcccttcagatctacaaccagcttgatcgcagcaagccagccgaaaacaaagcatggctcaaacgtaccatccaggccgctatcaaagagtaccaccggtactggatgcaagagccctcgctcgaccttgtcactggcttatctcgctaccgcccttctggcctaggtattccccctgagactgaagccagtcatttcactcacatccttcagccgtatgctcagaagattgggatctctgtgaatgagtacattgatggttacaacgacgggacaatcaaagaacctgagcttgacgagtatttcttgcatgaccgaggagtacgagagtcgggacatgatacctcatacagactcgacagaaagtgtgcagacttggcgactgtcgacttgaactcgctcttatacaaggtgagctattactatgattgacacacagacgctaaccggacaatgcagtatgaattcgatattgcttcggctatccaagtagcctttgacgacgaactctacctggacgaagagtttgaattgtctccctggcctatcaccgccgaggccttcaaggctggcgccacctaccagctctcgaccaaaactcctcagacaagcaggcactggtttgaacgggcagctaaacgcaaggcaaccatggatgagctttgttggaatgatggacagggaatgtactttgactatgacaccaagctcaggaagcagacgcgatatgagtccgtcactacgctctggcctttgtgggcaggctctgcctcggaggaacaggctttgaagcttgtgtaagtagcaaatattgttcgttgtgaatgaagcgtcgcgactcacaagttttacagccgcaatgccttacccaagttcgaagttgctggtggtcttgtatctggaactgaagaatcgcgtggcgtaatctcgttggacagacctaatcgtcaatggggtgggtacctctggggtttgtctggcacgtgctgactatcagtgatcagactatccttacggttggcctcctcatcaaatcatggcatgggtcgggcttgaacgttacggatttgtagacgatgcatccaggctggcgtacaggtggatctatatgtgagttgttgagtttggatgtgttaaacatactaacacttgacctattaggatgactctatcgttcatggatttcaatggtatcgttccggaaaagtttgacgttgttgaacttagccacatggtagatgcggaatagtgagtgaatagactcgcatccgattcacttggaagctgaccccgcctttcaagtggtaatcaaggtactgatttccgatacgtgccgagagaaggtttcgggtggatgaacgctgcctatcaaatcggtctccaatgcctgtcaaccggtatgagacgagctgttgctgcttgtgtaccagttagtgttctagcaaccaactgcaatggctaagctgacatcaaactttagccttgggttttctttaaccttcctgcaccggacttcacatctgccaggaagcgacgtgctgaacgggaagcccgggatgccgaagcagccgcatccggccacggtggtgtgccgaagaacgaagtccataatgagcctccctccctagaacaggccatcgccagcctcaaactggaattaactgctccgtattcgaaatcggtcaacaaatgataaggaaagaacgcctggaaacattcttgatggcgtacatatgtgtactcaaacgtccatcccattgcgcaatcgattcttgtaactcatggatatggtcatgtaaatcaaatataaccacaacgtccagcagtatgatacttcatcaaagaaatgacttagactcgatctgtttatacattcgtgatgagaaccgtactactaatggcgaatatcaaatactatatgcggtaagccgaccttagcagtagttctttatacagacagacaaacagacaaacaaacagcccaagtaaaataaataagtacttcttttgcaagaaatccaatttaaccaaacaagtttcgaggtgaagcaagatcctttcttccttcttttttgacctacttgatatatcctttgtaggccagtgcatcttacatgatgatgaaaaccagagctagtatacaaccagtatactcacgcagaaaggcataaataaggaagaccgtccgtatccccgctgatgtctttctagtcctacacctttgcacccccaatagttccctaaaacacaacctcttattcgtctttttaccaatttcgcttgtttattccacctgccaccatcatcaccgtcattattatagcgatccttgacttccattacttactcccaaagaatagtatagccactaacaacattcacaacctcatttgatcagaggcgcagcacatcccttgacgaagcatttactcacagctacgttctgtctcccttccaggttgtctgc

SEQ ID NO: 322 - DNA, 5239 bp, Cryptococcus neoformans
aattttgtaggatattgatctattgacttatgagctggtacatcccaaatacaatggtggtactcacaatattttccacactcatttcaggatacacttcacatccagcgatacttgatttgtccattctaaaccgatatctcggcaagtccatatcttatgccacatctcactctcaattgagacagcagttatttcagtggagtatcgaatgtatagccagacgagcgacgagccttcaagagggttactattgttaagtgacggtcagaagaggcaacgtactctaggacattccggtaagtcgttggacatacaaggcaaactgactaccttaagccccatgttttgtccttcattagtgctagagggcgtacatccaaatctgggtgttctcgcgcatgggcatcctttacgacagcgagtattagacatgctgtaattccgtttttgccgtgaaaactgtctcaaccaaagcctctgtgcttatctgagagagagccgtcttctgcctctccataaggaatgttcgataaacatgattcttaagatgttgttgattgtaagctgggtaactgtctatctatgagcaatgactgagagaagtcgtcgacaacatttgtcttatagctcctgccgaatgacaagtaagtcagaggaggatgacctcacggtcgagctagtatgtcaggagacaaatttcttctacgcgtagttggtatgtatatctgtcgataacattagactatgagaaaaaaacgatggaaacacaaaaaagaacgaacgaaatccgtcgggaccgacgacggacaagacaagaaaagaagcaaagaagagtggatcggtagagtggagggaattaggcgtgccaagttatctatcagggttaggcawggaggttacgtaatccaataaatgaacgcagttcaagaatttctgccaaaagttgtaagatgggcatygaagcgttgtctacacatctatattcgaacaagcagacatggtcaagtcatatatgcgccacggccctactcaggtaaagttgaactgtaaccattagtatcaatcttctaacccctcttaggccttcggcatcatctgttcacccacagcaaactcctcttacaatggcagattagcctatgttccaggatgggaagatgttctcgtctgggatacaaagcggggagaaatggttgccatgtggcattctacggggcttacttcaccagtgacttaccttatccctgcccctacgccttacacctctacgtcgactactcctgtcacttttgcagtctcatatcaggacggttcgatccgtttatggtcgtacgatccctctacacccgatgttgaagcttccgaaaccgtcacattcaacggtcacaagaagagcgttaccacaatgacttgggactatgatgcttctcgactggcatccggtggtactgaaggtgagattgtcgtttgggatcgcattggagaagtcggtcttttccgtctcaagggtcaccgtgcaccaatcaccggtcttgcatttattcctcacccccgcggagggcaccccggatggctcgttagtaccagcagagacacctacttgaaggtgtgggatttgggaactcagcactgtgttcaaacagttgttgtcgggcgaggggaggtgactagcttggctgtccgagaagaggctgaggagtcaattattggtcaaggcgaaggtgaagccgaggatgaagaggagatcaagggtcgatggactgtcgtcacgggaagtggtgacggtgaagccaaggtctacacgattgaaaaatcccagctcgcaagaggtatggccgaggacgagaaaggggaacttcccgctctcataacctccgtctgcactctccccctcccttcatcgactcaccctatctcccaaattacctggcaccccgcacttcctctgctgtctttacaaacttccgaccgcggtgtcgctatacttcgtttgaggactgaagaagaagttagcgcaaagagggctaggaggaagaagagagatagggagaagaagaagaagggaaagggcgacaagcaaaaggaagaagacaagcagaaggaagaagacaaggaggaagatgagaaggatgaacctgtcaaatgggaggaaagagtggctgtctggtgtatggtcagggctaatgccaaggtcaagagctttgcctttgccgatgaaaatgtagtttctgtcaagggtggcgtatctgtaagtgacaatcgattagtattcgagacatgctcatcaattgcagttgcttttggccttgtccaacaactccatcgaatcatacactatccctactccaggaagcaaatctaagcttgccgatggaactaccccggaacccactaaaactcattccattgaacttcccggtcaccgacaagacatccgaactatttccatctcttctgacgaccaagttattgcctccgcctcgtctggtaccctcaagctctggaatgccaggacaacagcgtgcatcaggactatggaatgtggttacgctctctgttccaccttcttgcccggtgacagacatgtggtgattggtaccaaggggggagaactgatgctctacgacgttgctgcgtccagtctattaaagacctacaaagctcacactggacctgtttggagtgtgagcgttcgacctgacggtagagggttggtcagtggtagtgcggacaaggacgtcaagttttgggactttgagatgagggaggaaggcgaaggcgaaaaagttgtcagccgcttaggtgttgagactgtcgtgagtaaatttttgcgcaatgattcaacatttgaatgacactggtgcagtacaagaccaagcaactcgctctcgtccacgttcgtactctcaagatgaccgacgacattctttgtctcaagtactctcccaatggccgtttccttgccattgctcttcttgactccaccgtaaagatcttcttctccgacactctcaaattcttcctctctctttacggccacaagcttccagttctgtcgctcgacatttctttagatagcaagctccttgtaacctgttccgccgacaagaacgtcaaaatctggggtttggactttgggagactgtcacaagagtatttttgcgcacgatgaagctgtcatgggcgtcatgttcgagaaggaggcaggaagtcacaacttctggacagttggaaaggataggatggtcaaatactgggacggtgacaaggtgtgtacttttgacattttcgtgaaatgtgtgacatagctgacctgtctgatacagtttgaactcatccaaaagctctctggtcatcacggcgagatctgggcgctttctacttcgcaaagcggtcaatttgtcgtcactggttcccatgacaaatccattcgtatctgggaaaagactgatgagcctctgttccttgaggaagaaagggaaaaagagattgaggctatgtacgattccaacctcgccgatactctgaatcgtgaacctggagagggcgagggtgaaggcgacgaagccgaagccgtccaaaaacagactgccgaaaccctcattgcgggcgagaagataatggaagctatcgaacttgccgatgctgaccgtgcagccactcgtcaatggcaggtagataatgccaagtccaacatcgaaattcctcgtccacctagaaatgccgagttgatcgctcgaggagatttggagccggatgaatatgtgttgaaggttgttcagaagttacctgcggcgcagatggaggatgctttgctcgtcttgcctttcaggatggtggtcagtttgatgggctatcttgacgaatgggccatgcaggtgagaactacttatttgtcatcgaaaaccgtgttaactgatgggttaacagggcaaggaaattatcttggtgtctcggatcctgttcttccttcttcgaacacactcttcccagattgtatccaaccgcattatgcgaacgccccttcttacactccgacatcacttgcgtgatgcgttggcgcaacaacgcgacgtgatgggttacaatttggcagcactcaaattcctcaaggggagatgggagggcgaaagagtggctggtttgtatgagcaggaaggtcttgatgaagaggccgttaggaaaaggttggaagaaggcagagggaagaggaagagaattgaggtcagggcataaatttttgggcaatgcatatggtgtttctacatgcgcgacgtttgctatcatgacgcccgctgctggtcatcgtattggttgttcacttgcccaaagctttcttccgcacatcatggaacaagcaacatttgggaatctaaatccagaacatgcatgccttttcgagtccatcttatcaacaagtccgatttttatgtacaattcttttacagcaacaagtcatcaaagtttccgctagccttgggttgagcaggctgggcaggctgggcaggctgagtcgattgagaaggaacagagggagttgaaccccacaagctgttgaccatcttctccttctcaagatccttgattgtcttaccccctcggttttgggactgcgccgtgctagatttgccaatggaggacagggaagaggcaaagagatcatcgaaggtggagttggaagaaccgccggtaggcttaggggagagggcggaaggagtagaggcagaagtgtaagacggatgagtagaagaagcagggggtttggctgcgttggagaaaggaatggaaggagcggcgttaaggggcggtgacatggcgccgtaaccaaatgtggggccggatgaatttgacgcaggaggggagtacgcaggcgtcgagatggaaggggcagaagtgggtgtagaggaagtagcggggttgagaaggtcaaagacattcgtgttggcgggcttagcagcaggagctggagccggagcaggtgctggtacggcagactggaagtcatcaaattcatctgtaaaaacacgttagtcacaaataatgaggcatgaagctctagaactcaccgtcaccgccaacagcaggggctgcattagctgttgctgctgatgcagtagcaggagcagccacaggctcatcgtcaaagtcaaacaagttaatctccttgggcttctcaacttccttctccttggctaccggcttcggaggtgcttgggccgttgacctagagatagaa

SEQ ID NO: 323 - DNA, 4468 bp, Cryptococcus neoformans
tagttgatcctatatataatgcttagtctaaaatcaaaatgattacacgggctcggaaacatactgttgaggagcaccgccaaacatggtaggttgctggtccgcttgaatagattcgaagaaatcttggatctttttcgaagctcccgcgggagcttgaggcttaacttccggcgcaggagatgcagccttggtcgatgtcgatgtgctcttatcgggcgaagctttccttgtgggctctgtatcactcggacgcctactacctccctcgacgactcccagactcctcttgtaatccattctattttgctcaaagttgggatcgttaaggtactcttccaacgccttgacgagccctgttggggcatgcttgagattcggcacagggacatttaagacatggtgaagttttcgggcaaaggagaggtagtcaacgactttttcggtttgcttgatgaaagatttatagatttcaaacgagtcggtagcgtcgaccttggacatttcgaaatgagtgattgatgacccctaattttacgaaggaaaggatttattggctaattgtgcgaagtaatttagttatctgttggcgaggaccatcgaaacggtcgaaggtggtggtatcgttgtgttattgttaaagacaatgtcaagtttgaagcaattgtacgctatggccatggtaagctttaatgtcgggatggcgtggaataatctgatttctcatgacttctcatataggacgttcactcccgataccgaacagacgcccaccagtttgttcaaccccgtttcaatgaacgattcatcctttctctcggctcaaatccagattgtctcgttctcgacgatgaactcaacgttttacctctttccaagggcaaggatattcaaataggcaaggccggcgaagaagacgatcgagggaggaagagaaaggcagaggagctcaaagagatgaaggaaaacttggaaggtgtagacattgttggttctcttgccaagttggcaaagactgtcgaccaggccaaggctatcctgacttttgtcgaggccatctccgagaaaaacctttcatctactgtcgccttgactgctggtcgaggtcgaggtaaatctgccgctctcggtctcgccatcggtgcagctcttgctcatgactactctaacatctttgttacttctcctgaccccgaaaacctcaaaactttgtttgaatttgtcttcaaagcccttgatgccttgggttacgaggagcacattgattatgatgtcgtgcaaagcacaaaccccgacttcaaaaaggctattgtgagggtcaacatcttccgaggtcaccgacaaaccatccaatacatctcccccgaagattctcacgttctcggccaagctgagcttgtcatcattgatgaagctgccgccatccctcttccccttgttcgtaaactcatcggcccctatctcgtgtttatggcctccaccatcaacggttacgagggtactggccgttcattgtccatcaagctcattcagcaactccgtgaacagacacgaccatcgattaccaaggatagcgagaatgcggctgccagctctgctggttcatcttccaaggctgcggctgctggtagatcgggcgctggtctcgtgcgatctcttcgtgagatcaagcttgatgagcctatccgttactcccccggagacaatgttgaaaagtggttgaacaacctcctctgcctcgatgccaccatcgtctccaaatctatccaaggttgccctcacccttccaaatgcgagctttactatgtcaaccgcgacactctcttctcttatcaccccgcttcagaagtgttcttgcaaaggatgatggcgctctacgtcgcttcccactacaagaactctcctaacgacttgcagatgctttccgatgctcccgctcatcatcttttcgttctccttccccctatcgacgagaatgataataccctccctgaccctcttgtcgtccttcaagtcgcgcttgaaggtaatattagccgagaagctatcttgaaagagatggctcagtcgggtatgcgatcatccggagatatgatcccctggatcatctccactcagttccaggacaatgactttgccacgctttcaggagcgagggtggtgaggattgccacgcatcctgattatgccaggatgggctatggatcaagggcgatggaagcgttggagagtttctataacgggacttcgtacaactttgacgatgtccctgttgatatgggcgagtcttttgctgacgctgccaaggtcggacctgtaagtgacgtcttttatccccttcccgcaaaaccgaacgtcgactgaatgcgtttcccagaatgccaacctccaaaatgacaccatcgccatccgtgacccttcacgtatgcctcctcttctccaacgtttgtcggagcgtaaacccgagaccttggactacctcggtgtctccttcggccttacccgtgacttgctcaggttctggaagaagggcggtttcacccctttgtacgcgagccaaaaggagaatgcgttgactggcgagtacacatttgtgatgctcaaggttttggcgagtgctggtggtggtggagagtggttgggtgcttttgctcaaggtatgtcgtgtcttttacttcaggatgaagtacatatgggcaatgactaacggttatgaacagactttagacaacgattcatgaaccttctctcatatgaggcattcaaaaagtttgacgcttctatcgctctctctatcctcgaatctaccgtccctcgcaactctccctcccccgcacccaaacttctcaccaacaccgagctctcttcgctcctcactccgtttgacatcaaacgtcttgaatcgtacgccgacagcatgctcgactatcacgtcgtcctcgaccttgttcctaccatcgcttccttattcttcggcaagaggcttgaaaccagcttaccgcctgcccagcaggccatcttgctcgctctggggttgcaaaggaagaatgtcgaggcactcgagaacgaactgggtatcacttccactcaaacccttgcactgttcggaaaggttttgaggaagatgacgaaatctctggaagacatccgaaaggcctccatcgcgtctgaacttcctgctgagccgaccctcgccggccgatcagccaacgggtctaacaagtttgtcgcgctgcagcaaaccatcgaacaagatctcgccgattctgcggtacagctgaacggtgaagatgacgatgcgtcaaagaaggagcagagagagctgttgaatactctcaacatggaggaatttgcgattgatcaggggggtgattggacggaggctgagaagcaagttgagagacttgcatctggtaagggcggcacgagactgtccagcacagtcagcgtaaaagtggacaagcttgacgatgacaaagcgaaggcggagaagggcaaggatgcgggtgccaaggatgcgaagaagaagaggagagagagtggaggggagaagggtggaaagaagaaggtaaggagggagtaagaggatgtttttggtttcatatctagatttgtgattatggctcttattctttaactcatatttggttcagtaaaatgtatgattcttgcatggttctaaatggtatacaatgctgggtattggactaaatcgtcctggctcaagaatctgtctgtctaaatttggcgttacaactatgactcagggttgactctcatcttcatgaaggccgtctctgcgcttcatcttctacccgtggttcttgttgcagccccactatcctctgttcttccggcgaaagggtgaagaatgattgtctaaagttttggtattttcttctcacctaacgaatgaacggcatcagccgacaagaccatcgttgtacaaggaaacgacccttacaggactgaaaacatgctccttaggtccaaaatctgcgaataacaccatgtatgcacaagcgactatcatttcccgtcagctgctagagtccaatccccactccatgagagaagaggaggccgcagaaggcatgtaaccggtgaaagagataaacataccagtcccagcaatccatcctccgaaacccagagccttattgacccttaccggcaaaacgctctcatccgctttcttactcatcctagcccagtatcgttcagcctcagctttacttcgttgagcggcaacggtgtttgggtcggggccagtgtaggccttgtacgatggaacggctctggaagggggtccaatgggaggagtgggagaagacattgcgccggcttgaataattgaaaagaagtagatagcagaagtatgatttttagtttgttaacactgagatgacagcacgatgcagtgaaagacgataacaacacttggaggagcacttttgcctttcgttag

SEQ ID NO: 324 - DNA, 4316 bp, Cryptococcus neoformans
tcactctgcagctctcacctcgtccgccaccagagcagtatctgtacaagctacccaatagactacccatagacttgctctcccctggtgtgcaagccactctgccgcattctgtggtcatcccgcgcatagacaccggtacgtacgcgtctatttgtccataacaattacaacctgacattgatgactggacggtagaacatgtccgaggtgtccccacagtcccaatatggtggagaaccggacaagccaacaacaaaatcgagctcctggctacgaaatctttcgcggtccaaccttgctgctctcatcttgttttacgtcgcctcccttcacgtcattgggttgtacgtcttcacgcaagggtttctcctttcccgcttggctatcccccatgtctctcccgcctataacgtatctaacccctcccccatatccgctacccactctaaagcggtcatcattgtcattgacgctcttcgtaccgactttatctccccgtaccaccctcaaccgccttcaccccatcatcatggtgtcctctccctgcctgccgagctcacacagagtcgaccggaacactccctcattttcaactccttttctgacccccctacctctactatgcagcgcatcaaaggtattaccaccgggtcgttacctacattcatcgatatcggctcaaactttgcgtcagctgccattgaagaggattcgctcgtctctcagctcgtagcggcgaacaagagggttgggtttatgggtgatgacacttggatgaacctctttccttcttctttccatccgaacatgtcccatccgtacgattccttcaatgttgaggatttacacactgttgataacagcgtcatcacccatcttttcccttacctccatccttccaaccaatctcagtgggacgtccttatcggtcatttcctgggcgtagatcatgttggtcatcgtgtggggcctcatagggatactatgaccgagaaacttactcagatgaacgaagtgctggaaaaggttgtggatctgattgatgaagagactcttcttgtcgttctcggtgaccacgggatggacgataagggtaaccacggcggtgactcggagatggagacctcatctgctctttggctctattccaaaggccctatgctaaccaatcccgcggtcgtccaagacaaagaccacttctgccatttttaaatctttgcctacttacattttcccgaaatccaccatgcctctcaggcagattaaccaaatcgatattgttcctactctcgcacttttgctcggcgtccctatcccttataacaaccttgggtcagtcatccccgagtgtttcacaaataatctggaaactttggaggtggcgcaaagggtgactgcagacggtatatggagatacgtcgaagcgtacggagacaaggaagtcaaggaaaacttgaacagcgcttggcgtcacgcccaatcccaatatcaaaaggacaacctgtccgcctccatcatcgctcatcgtgctttctccctcgacgctctcgtccacctccgatcactctgggctcaattctccatgcctctcatcgtcattggttctctcatcctcggcctttgcgcgcttaccctcatcgcactttacgtcggtgtgcgtaacaatggtgtgaattgggacgtttatgcgcgattggctttggaaacggctacgatgggatccactgtcctcgcgagtattgcaggaaccgtagccggggtgtacaccgcccggcctatcgtggctatcaaagttttcatcgttgccgcagccttgatctccgaggtaatcctcatccttcccctattcgtcaaatcctctctctctctcgctctccctctcccgacttcattctccatcaacagacatatcggccccttcattcttattgtccatgcgttgtcattcgcttccaattcattcatcatgtgggaagaccgggtggttctctatctcatatctactatccctatcatctatatcatccgagcactttccgctcctacagccgatatgcgtctcaaaatcatcttcctctctctcgctttcaccatcctctctcgtctggctggaacgatcaccatatgcagggaagaacaacagccatactgcagcgtcactttcttctcaggcgtgaccgctaccgcccctacatgggcactcatcgctatagtcccgcttgccctccaaatccctcgtgccatcggtatcaccctctcccgctccaaatccctcgctgggcctgcaccttttatactcggtatcctttggcgtgccgtgctcgtcgccaactctgtctactgggtcctcgagtttttcgaatcgttcgacgggctcaatcctgcccgaataccgctggtcaatttcctcaaactctggctcgctcgatgttctgcaggcgcgagtttaggtgctatcccatatgtatggctcacttcccccctgtgtatctctgtagaacgcacgacggatcaagcgacgggtgaagaagaagtgacagtgtttgggttcgccaatgcctttgggtcgacgtacatcctgtatacactcgctccttttgcgctcatacatctagtgtcgcagccaatggcccagttcacactgaccgcctttcttattgggcttcttgtatacctcgaattggtcgatacgagacgggacgccatcatccttacaacatcytttgcttccttgggcaacaacaagaacaacaacaacgcttcttcaccagcgggacttgcctcatttgacccggctgatacagcgcaaaccatcgtacgcccctcattcacagatgtagtccccatcgctctatctgggttcctcacattctttgcgacaggacatcaagccgtcatctcatcaattcaatggaaatctgcttttgtaggcttctccactgccagctacctgttctcccctgtactcgtcgtcctcaacacatggggaggcttcttcttgtcagcgatcgctgtgcctcttttggcgatttggaatatcgcccccagaccacgagagagtatcccaaccctcgcgcatgctttgcaagtgacgttggcgttcttggtgtaccacaccgtggtcgcgttcgccagtgcaatcacagctgcctggttgagaaggcatttgatggtgtggaaggtgtttgcaccaagatttatgatggcaggcgtcacgttgttggttgtggatgtagggttggcgctgggattgtttggagtgagagtgaccgggtggaaggtcaaaaagacgtttggatgcgagagtatataagaatcaaacgaggagaataatgaagaagttggcggtacatccaaatcaaaagttgacaggaagttacgaagttacgacgtcaatatgcatgggtagatataacacattgatatttgatatgaacaagggaagattaataacacagtgtctgtagaccggtatttcaatagaatgatacaggccgcgtgttgcgatttcactcgagttgctagaaagatcagggagcgccattccatggcggttttttactacttttctatcaaccacagaccccatgaatctgtccgcaaacgtcatctccgtcctctaaaggctatcatgcctgtctattaacgcctgttcttctttttcttcttctcctttctcgaattgcctccaccatgactcttgatggaagcgggcagtgacgtgggaggagccagagcctgttccgctagcccaacctgctcagaagcttggcctccagcgggagcaggaagagtttcggcagctcgtacagggtcttgaccttgtaaaagggcagtcctttcatcaataacctcatcccctgctgcaccattatcgggaacgagtccctcatcgatgtttagccccttaccacgctcaggttttgggctcttcaagccactgggactccttgtcaatccgccttgatcgcttatacgtcgaacaaatcccttgatggagctcaagcgctttcgccttttatcttccttgttagtggatgcaccgggtgtgtcttgtttactgctatcaccggagaccgcatcagacttgacagatgacggcgatgcacgagaaatgctggagactgagggcgaagcggatagcgtggagaaagtagatagtcgatgaacaggtgtaccttgggcagcagggtatgacgcacgtcgagagtcatagacggatgggaagggtacagttttgggtgtggcaggggcattatggtccccaatgcttggcgcagaaggttcaggtatgctcggcaccgactctgtaa

SEQ ID NO: 325 - DNA, 5434 bp, Cryptococcus neoformans
cgtttgcatcgttttgcatagtataaaatctagacccaacgacaaccctatgaatccttggtccaagacttgatgaccttttcgagatcgaatttgggatcttccgggtcagtaatcactgcagcgacgttagcactcgtcttgattgagtgtagcgataaagtctgaagaaatgtggctggctcgacaaggtgggaagaagagaactagtccgctccgtctgcccaagctgacttcttggtttgttcatcgtctggccaacaatccacatggccgtacagtcgtaccgactggacacatagcacatagcgcgcaaggcagcagagtatccctttttatccctccaacctctccaagacaatctccgaccaatcccgagcattgcttccagccaccttccacccggcagggatccagttttcatcactcacatgatgatcctccgctctgagcagccttcttcgcagcataagccttcttcgcctcctcgacgaggtgtgctcggtgggcagcatggtgcttgacctgtgtcgttgaatgtttgcgcgcgaggttcaaattcgatcggcgatgcatatggagtggtgtaagaagcagaattgatggacaatgttacaggaatgagagttctcttttattagcatcccgttcgctacgaaaatcatgaatactcgccttgtcctcgtcgtacttggcttgtaatgtggactggtggaagatgccgtaagtgataccggcgatgagggcggaccaacggacgacctgcgatgtgtgagctgtgctacctggacggagtatgtgcacccacgttgacggtaggggtggccattgttttttgtttatgtatggatgtatggagaagagtgagtataggggagatatacaggggaagagaggagtatttaattccgtatccccgaacgtggcgccgtgtgacgcgactcctctacgatatgtatgggctatgtcctcgatccacatccatataacatagcccaccatggccacaaacgcaccgtgctataccatagtacacgacgaccttctagactcaccctctaccaatgacctcaggaatgctctccagaagggctcagacgaggtcaagctcgagaccatgaggaccatcattgtcggcacccttaacggccagagctatgtatgtgtatcgtgcccctgtaggctgcgtctaacactcccataggcgtcccttctaatgcccatcattcaatacgtaatgccctctcgaagcaagcagctcaagaagatgctccatttctactgggagtaagtcgggtccgtcggtcagagtgtggaagtgtgctaacggtgtttagggtctgtcccaagctggatgagaatggcaaactcaagcaggagatgatattggtagtgtgagtatcattgcatttagctttgactcggctaacgatccttcagcaatgctattcgtaacgatctggtaagcatcaagtcatgacatctaactttaactaacccgttgcagcaacatcccaacgagtacatccgcggtgctacccttagataccttcagaaagtccgcgaatcagagctcttggaaccgctcgtccccaccgtcagacagtgcttggagcacagacactcgttcgttaggaagaatgccgtgtttgcagtctacactatctaccaagatcacgagcacttgattcccgacgcgccggagctgttagataccttccttgctgccgtgagtaatttctttacttaccagagtaaagctgatttggtcgtaggaatccgactctacatgcaagcgcaacgcgtttgtcactctctgtaacatctcccagcccacagccgtccaatatctcctcaacaactttgatcagattgagtccatggacgagttgatgcagatggctgtgattgagcttgtaaggaaggaggctaggtctgaaggtggtcatcgcgtgagtatcttccatctgtaaactgtacccgactaaccccatgtaggccaagtggatccgatgcatctttgaactcctcaattccaaatctcacgctgtcaagtacgaagcggctacaagccttaccaccctcactcaaaatcccgcagctgtcaaggccgccgctgctgctcttgccgaactcattgtcaaggaggccgacaacaatgtcaagctcattgttcttgacagattcaacaacctcagggcgaagcacgagaatgttctggatgggatggttatggatatcttaaaggtcctgagcaggtgtgtatgaccatgtgcatcgtaggtctctcgactgacatggagtagccccgacatggaagtgaagcgaaaggctatcggggttgctctcgaaatggtttccagccggaatgtggaggaagtcgtcttgttcttgaagaagcagcttcaaggcactctcgatcaggattttgataaggcaagttgtcatgatcttaccatttctttatctaacaccttggcagaacctcgaataccgacaacttcttattcaaagcatccactcttgcgccattcgtttctctgaagtcgccgccaacgtcgtttacgtcctcatggacttccttggcgactccaacaacccttcagccgtcgacgttatcgcctttgtccgagaagtcgtcgaaaaattccccaaactccgaacagctattaccgaaaagctcatctccacattcggggagatcaagtctggcaaggtcttcagaggtgccatgtggattgtcggagaatactgtgagcagccagaggatattaaacaagcgatcgccgcgattcaaaaagtgttgggtgagatccccatccttgcatcagaacaggtgagtacacagttgcttcaattaaggtcgattgcttatcccagtagcgattattggacgaggccgaagcagccgatgagactcccgccgagcaacaggagcaacccaaggcaatcaccacaacccgcgtgctcgccgacggtacctacgcgaccgaaactgtttacacctcttccgcatccgccgctcgcctcgaagccgtccgatccgcttcaaaacctccacttcgatcactcatccttggcggcgactttttcactggtagcgttctcgcttctacattgaccaagctcgtcttgcgatattccgaagttacgtcttctgatcagcagagcatcaacatccttcgtgctcaggccatcttgattatgacctccgtcatccgtgtcggtcagagcaagtttgctgctgtccctatcgacgaggatgccgaggagcgaattatgaactgtatcgagactcttgccgaacttcaaggcagtaaagccctccaccaggtgttcttgaaggataccaaggcggcatacgccaaaatggtcgcaactgaggagaagaaggctctggagaagaaggagcgggaaagcaaggtgtcggtggttcaggcggatgatttaatttctttcaggcaattgtccaagaaatccgtcgttggggacgtcgacgaggtgagtgcggtctaaatgatttatgcaccaaaatcaatgctgatgaacgactagtctgacgatgtcgtcaaggctaccggctctatccatcctcaagacgactttgtctccaaactctcccgaatcacacaactcaccgggttttccgaccccgtctacgctgaaaccgtcgttacactctcacaatacgacatcatcctcgacgtgttgcttgtcaacactacaaatgagacattgcagaacttaatggtggatttcgcgacattgggagatttgaagctcgtcgagaggccagcaccatttacccttgccccgcacgggttccacagtttgtccgcgaccgttaaggtttcttcaaccgagactgggtaggttcattattgcgtctggattatgactgctgacgagatattagtgtcatctttggcgctatcacttactccaaacaaggagcttccgatgccgatgtgactatcgtcatgtccgacattcacgttgacatcatgagctttatcaaacctaactatgtcaacgaggcgcaattcagatccatgtggacggagttcgaatgggaggtgaattttttctatcccgtttgtttccaggacagaagctgacatgtttgaacagaacaaggtggccgttcaaacatctattagcgatctccgagcctatctcgatcaccttctcaaatcgacccacatggcccttctcactcccgaagcagctctttctggcgactgcgacttcctcagcgccaatcttgctgccaaatccctctttggcgaagatgcgcttgccaacgcttcaattgaaaggacagaagatggtcacatcactggtcacgttaggataagaagtaagacacagggtattgcgttgagcctgggtgacaagatcacgttgagtcaaaaggctttggcgacagcgtaaggagagagaaagggagatggtgggattctagagggttgtagaggaacaacaaaaggatttggatactatgtaaaaaatacgaagtagtgatgctagaatctctgcagaaacccacaatatcgatgtccgggggctgaaggatgctgagaattaataagcattaatctgtgtacatacatacagctcatgtctcaacttacaggattttgactacagacaattcgtctagaaaataggcgcgaggaatactcaagtttcgatagacgcctacttacgtaccaggcacgatctcgaaagcaaaagttgaagggcaactcaccgtttccgcattgaaatcttcacttcttgggccaaacaacaaagagagctcccagtatgcctgcaaccgcctctagaaagggcaaatcccgcgcacaagatacctctgatgacaagcctgaggctgctttgcctttgggcaaacagttggctcataccggtatgtctcttcgtctttgttctttttttgagtcctgatcactaaaatatgtgtatgtgatagacaagaaggtcagggacaaggcagtaacaagtctggtcaatttcttgtctcaaggaggagacactgaaggatcctcgagctcctatgttaacttggaggataaggagatggccaaactttggaaaggattattctactgtttgttctcgaccatttacgtattggaccgccttcatactgacatttgaatcacaggtttctggatgtctgacaagccccttgttcaacaaggtctagcagccgagcttgcagaacttctactcaaaatcaatcctcgtaccaactctcccggtgataagttcaaagctagcctggcgtttttggaaggtttctgggattcaatcgttagagagtgggcgggtatcgacagattaaggtaagaaaatagtctacaggttggtaagtccaggaatgctgactgaaagcggacagaatggacaagtactacttgctcatgag

SEQ ID NO: 326 - DNA, 4794 bp, Cryptococcus neoformans
aacagaagcagcacaataagaagtgcagatgagatacttctcttcttatagatgcaatatctctcaataatcacaacaagcagctgatgacgcatatgtctaagttcggagtctttaaaatatgcttcaaaataaaatatcgctcggccatggaatatcataaagaagcagtaacaacaaaattatcataagataaaattaaatgaatgagctggtaacgaacatgttactctgaagagtgattgttgtctgctgccaccttctgagcataatactatcagggaagagacgacgtaagtcctgtggtataattaacaataaagtaccgcaatgatgcagctaaaacggatcatcaatgggcgggatggctgtatgcatggcgatggcgacgatacatgacgactcttgtttactactaaggaatgggtgttgggtgtgccacaggcggagttatgtaattctccgacctggggacaccgcttcgaggttaggttgccgaccttgatgattgacgcgacaaccacgaacgtagcaccagaaccagctcatctctttttacaaccacatttctccttcctcccgcctctcgaccaccatggtgcgtagatattctgccaggatgaatggatccagggctcgtaggggttactttcacatgctaatacctgtatcaggcatccaatgatcccaaggccaaggtgatccttcagagcatcgcgacggagaagcgcaacatcgaaggtgcccgagccgtcatccgagcattcgaagcctcatcaaaaaatgaaactgtaatacagcaggctcagaatgaaatacgcacagcgacgatgtccatcaagttccttgaagatgagttggcaaagctgcaggtgggcggatcaggaggtgcatctgggactccagggaggggtgagccatctggcgggacgggggcaggagttcccggaaagcaagggccgcagggagtagttctgcgtctagtccaggcggaagggggatggctggagatcgggaaaggcccttgccccctccaccacctggagctgagcaagacagcgccaagaagcctgaaacgaaaaattattctcaattaggtgagaaaattcccatctatccccagcgtagtagctcatcattctgaacgaagatttgttacgatatgacgcaccattgaccggagctaaaattactcgaatgttaaatcaacttcagttcaaattgcaagttgaagaacaatacaagacgggtatcgagaagatggcacaagcataccgggctgagggtgataagagattgaagagcgagacggacgctaaaaagtctgaaagcgaggggaagatacaactgttgagaaaggcgaagaagaggtatgaatcgctggccaaattcggtggagctgtggaagacgacgaaggtaagtgtaccatttgatttttccatcgttgtctttgaatctcaccaggtctgcagacttaatgtctgatggaaaacgcaaggaggctcttcgtaaacccatctccggcaaattggtaatctctcttcgctctgctcgtgatcttaaccatcgcgcccttccccgtcgttcttcgaaaacctactcggaaaccacagtcgtcatcaaggtcgaaggtaacgaacgtgctgtctctcatccttcacgaaacgacaagtggcacgaggacttccatattccggtggaaaaagccaatgaggtagaaattactatttatgatacggttgcccccggtgattcagcccccattgggatgctctggttgcgagtgagcgatcttgtagaggcattgcgaagacaaaaagtcgggattgaaggtcagggtgctggctgggtgactgctgcgactgctgcgacgatgggcccgaggagcagcggcaatgcgccagactcggttacgttgcacagtgctggaactttgagaggcaagccggacgcagaaggcaaagggcctgacgggatcgacggttggtggtctgttgaacccgccggtgcgatatcattgagaatggattttggtgagttgtccaatggttgaaagagttcatgtctaacgcacaacagtaaaggatacggtggctggtgcgcgtcgtccttacgaagctcttggtcgacaaggtgctgttcgtatgcgaaagggcgatgtctacgagatgaacggtcacaaattcgtacaacgccagttctaccagcccatcatgtgtgccctgtgccaggagttcttgctcactggtgaaggatatcaatgcgaggattgtaggtatgcctgccacaagaagtgttatccgaaggttgtgacgaagtgtatcagcaagtcgaacgcagatggcgtgagtgacgaagtttacctctttgggtacctgctaatctaatcaggagggagacgaggaaaaaatcaaccatagaatccctcacagattcactccgtacaccaatatgtctgccaactggtgctgtcactgtggatacatgcttcccttcggtcgtaagaatgctgtcaagtgttctggtaagtttgatcgcgagacgcgccaaacataatgcttattaagatatcacagagtgtgcccttacttgtcaccaaacgtgttcacatcttgttccagatttctgtggtatgactatggagatggccaatttactgctcaagaatcttcgtgacatcaagaccactcagcaccgcaagcctgttccttcaacatccacctcatccagtgtgtctactcttccctcttatcattctcaagagtctcgttctcatccagtgcaatctgctgcgctacaacaaccggccccgtcatctcgtccacctgctggtgctttgccctcaacagaccaaaggccaattcagccacaagttcaaaaccagcaaactggtgcttatgataatctccgtcctgctggtggcagagcaatgccccagttgccacctgtcgcagtgccaagcaacaaaattagctttgaaggcgacagactgcaagagcctcatggtcaaattcctccggttatgcctgcggctcagccccaaccacaaactctcccacctagtgctcaatctgttcaatcccctgtcaaacctcaatatgttcctcaacccgctgtccagcaacaagtggcccagagattgcctcctcagcagccgctcatggctagaaagaggaaggttggactggatgatttcaactttttagcagtgttgggcaagggcaattttggaaaggtcatgcttgctgaggaaaagacttcgagcaatttgtacgccatcaaggtcttgaagaaagaatttattattgagaacgacgaggttgagaggtgagttgaattgcacttgtgcaagacgggctggctgaccagatgctagtactcaatctgagaaacgagtgtttttggctgctgcgcaggaacgtcatcccttccttctcggtctccactcttgtttccaaacggagactcgtgtttatttcgtcatggagtacatctctggcggtgatctcatgcttcatatccagaaaaaacagttcactctccgtcaagccaagttttacgcgtgtgaagttctgcttgcattgcagtacttccattcgaaaggcattatctaccgagatttgaagctggataatattttgttgacattggatggtcatgtgaaggtggcagactatgggttatgtaaagaggagatgtggtttggtaagacgacgagcaccttctgtggtacccctgaatttatggcacccgaggtaggacgccagcttgttgcaagaaaaggagatagtgctgatgtattcgttagattcttcttgaacaacgttatggccgtgcggtggattggtgggctttcggtgtgttgacatatgagatgttgctgggacagtctcctttccgaggcgaagatgaagatgagatctttgacgctattttggaggatgagcctttataccccattactatgcctcgggatgctgtgtctcttcttcagcgggtgagtatgaagctgggtctctcttgtgtatggtatgctaaattttgtaacagcttcttacccgtgatcctacgcggcgacttggtgctggcgaaggggacgctgaagaaatcaagcaacacttattcttccgcgacgtcaactttgacgatgtctatcataaaagaatcccaccaccatacttcccggtgatcggtaatgctactgacactagcaattttgaccaggagtttacaagggagcagcccacattgactccggtccatacgcaattgagcgaggcggatcaaaaggagtttgctggcttctcttgggtgggtgtcttctctctcactattgataggatttacactgacccaacaacgtagattgctccttgggctgcagcacagacctagacagtaacatatgggagtggctttggtctgaagacgatagaaagatattaaatacagcttgcctttctccgaagttggaaagcataatacagttagcattgtgtgtataagttgtgacgattcatgaatatacaatatcgagtggaagtcggaggtgccgatgatgtggagtagatattgtggagtactattgtaatttaatcttgataaatggtgttgaattatgcacgcactacccttaaactacaaagtaaatgcaagttattgttgacatgtaagtattcatgcgaattattaattgattttaccatgctaccgtattatttggtatgatatgaggggtgaagattgtgacctcaagatgggttacctcgctgatggtggtgggatgcaggaac

SEQ ID NO: 327 - DNA, 5148 bp, Cryptococcus neoformans
cttgatctcccttcttcttgttgtcatgtcggttgttggttgtcttgttttctgccatcgatgttggttggatgacttctatatctttcggaagtttgtttcaatttttttcctattaatgaccgagattttctttcgtgtactcataccgccgccgtagtttccaatcgccactgatgactattcattctaccttgtatatgcgtatatgatgcccttgcggaacggaacggaagaatgggttatttatggaattgcgcaagataggtgcagacgggtgaaattcgggatagaagaagaacgacggactggaagcacttgcggataatcaatactttttgcgacatacgtacatatgacaacacttgcactgatcggcagtggcagcagagccaggttttcggtggacaggtttggtggaggcgtggtggcaaaacgccacgtttgctaatgccgataaagccgcagtggtgaggagatgacaaattgcccaactgggaataacgggctggcggccccagggaatttttttttttgtgctcgctgctccactgcaggataaaatattaattcctttcgtcaaatctctttccatctcttcttttctttctttccatcacatctcttcttgtgtcgcaacagcgctcaagcttacccactcccctcaaaaacactctccttaacgacagtgcatctgtcctgtactcttatccccaagacttcaagtcttatcaaaaacatctaaaacttcgacctcctcattagatattaaagagtgagtaacctggtggcgaacagttgtaataattcaagggcatttcgttgactgtgtatttagtggctcctgctgctaccgctgctgcctcctctggcaagggctctttcgacctcgccaccctctttgttgccgacaaggctgcccgtgacgaggctggtcttgctctcgccgacgccgtcaagaagtcaggtgttgagtttttcactcagatcggcttcaacgatgctatcgtcaaggtgagtgacggagaagaatatccttgatggagagtggcgatgaagaaaatttttagctgactcagattaccaggctctcaatgacaagaagtctcaatctgcgcgtgaaggtgcctgcgaggttatctctactctctgcgagaacggtgctgctcagcttctcgagcctcacgttatctcctctgccgagaacactcctttccccgctcttctcgaggctttcgctgacaaggtcgccgctgtcaagactgccgccatcgctgccgtcaaggccatcgtgcagagcatgaacccatgggcttctttcgttctccttcccgctcttcttaacttgatcaggacttctggcaagtggcagatcaaggctggttctcttgagattctccagcagttgatcacttctgccccttaccagatgggcgaggcgatgcctgaccttgttcctgttctcgccggagccgtttgggacaccaagtctgatgttaagaaggctgcgaaggctaccctcgagaaggctgtgtctcttgtcgagaacaaggatattgagaagttcgttcctgctttggttaaatctctcctcaaccccatcgaggaggttccgaagactatttctctcctttcagcaaccaccttcgtttctgaagttaccgcccctaccatctccctcattgctcctctccttatccgaggtcttgatgagcgacctaccgccaccaagcgaaaggtttgtgttatcgccgacaacatgtccaagcttgtcgactccgaatacaccgttcgacctttccttcctcagcttttgcctcgtcttatcaagactgctgagaccatcgccgaccctgaggctcgatcagtcgccaaccgtgctattgttacccttcgtcgaattggtaaggtcccagttgagtctgatggctcagaccttcctcctcttcctgtcgctgagggacctcacctcgccaccaacttcgtcgctcttgtcaagaagcacggtggtgtttccgttgaacagaccaaccctggtcttgcctacgccggtgtcctcgccgcttctcttgtgaaccaccacaacttcgaccagaagacttgggagtctactctccctccttatctcaagctcgctctcccttcctacgactctcttcctgctgttcgagagctccttcagaagaaggctgatgaggctgagactgacgacgccaagttccctgatgaagaagagggcgaggacctctgtaacattgagcagttcaacttggcttacggtgcaaagatcttgctccaccacgccaacatgcgtcttaagcgaggccaccgatatggtctctgtggtcgtaacggttccgggaaatctaccctcatgaacgccatcatcaacaatcaagttgagggcttccctccccccaccgaagttcgaactttctacgttcagcacgacatcgacggttccgaggctgagatctccattcttgactgggttttgagtgacaagcgattgctcgccacccctgaggaaattaagtccactctcgaatctgtcggtttcgacgaagtcaagcagaagaactccattggttctctttctggcggttggaagatgaagcttgctcttgcccgagccattcttttcaaggccgacattctcttgctcgacgagcctaccaaccatttggatgttcttaacgttgactggctgatcaactatctcacttcccttactcgatgtacctccatcattgtctctcacgactctgacttccttaaccgaactgttaccgacgttcttcatcttaacaacttcaagttgaagaggtaccctggtaaccttgaggaattcgtcaagcacgtccctgaggctaagtcctactaccaactcgatgtcgctgaggattatcagttcaagcttcccaaccctcctctccttgatggtgtgaagaccaaggagaagtctttgctcaaaatgcgaaacgtttcattccagtaccctggttcttctatccagcaactctacgacatctctctccaggtgtctctctcatctcgagttgccgttcttggtcccaacggttccggtaaatctacccttgttaagctcctcactggtgagaccgagcccaaccttggcggtcaggtctggaaacaccctaacttagtcatcggttacgtcgcccaacacgctttccaccacattgacaaccaccttgactctactcccccttgagtacatgctctggcgataccagaccggtgaggacttggaggaaatgcacaaggctaaccgggtcatgaccgaggccgagcttgccaagatgaaggagggtgccaccgttatcaaggacggtgtcaagcgaatcatcgatgagcttgttgctagaaagaagctcaagcagtcctacgagtacgaggtatccttcaagggtatgtcctctgccgaaaacatctggatttctcgagacgaacttgttgcccgtggtttcgagaagaaggttatggagctcgacaccagggaggctcagcgattgggtctcatgaggcccttggtcaggagggaaatcgaaaagcacttcgaggacttcgggtaagtgacgttgcttttcgatgttttaagatatttcgctcacgtgtacttatagactcgatgccgaattcgtctcccacaactccatgcgaggtctttccggtggtcagaaggtgaaggttgtcctcggtgccgctacctggcgaagaccccacatcatctgtctcgacgagcctaccaactatctcgaccgagagtcccttgccgcccttatcgcggcccttaagaacttcgagggtggtgttcttattattactcacaaccgagagttctctgagtccatctgtaccgaagtctgggccatgcgtgagggtcatctcgaggcttctggacacaactgggttgagggtcaaggctccggtgagaggattgacaagaaggccggcgatgacgacgaggtcgagtacgacgctttgggtaaccccatcgtcaaggcgaagaaggagaagaagctttctgccgccgacaagcgaaaagccaagaaggaccgaatggctagaaggaagcgaggagaggaagtcttcagtgatgaagagctttaagcttccttttatagtgctggaagtgtttcgtggttagtagaataatgtagacttcttttttcttcgccattgcatgatgtatatacccatagggacggtattgccaaatccacacgtgtaacgcaacgttgatccaacagggatgatgcaattgaactctgagtccttgtcatccgctgactattcactatcaaatgggaaggaggacggaggggaggtacattcttttccgtaggtaccagtacaaataattcacatttacgcggtggccactgaatgcagctcatttctgtgattatttaggaactcatggcaaattcgagtggtattattaatgcctctgctgctatcttatggtagcgcattgttctgagcctctgattaatcattattatgctcattatttataatactggcacgaaaccgctgacatgttttcgcgggaatcgtcatacaaccgtacattctctttctatctgagatcaacatctctaacaaagataattttccgccctcgatctcggtttacagcctctgcgcactcttcatgatgcgggctctaattgctagataggtcgtcgttttccgccgcattgtttatcgcagattcggttgttttcatcaagttggcgaagccctcattgtaatattattattatagagcttagaattacacagatgtcactgaaacgaataaggtaattttctgtactacaaactgtgtaccagcgccggctggcaattatttccgattattaaaaaaagggattaggacagcgagcgaaatggatagacgaaggttttcgataaagtcttcgacgaccatagggttcgggtcgagtaatcgggatgcagcgtccaaacggactttgacagcctcaatgataagtcgaccggggaaaccgataaggcggacgatttcgtattggaaatcggggagattttgccacctaatctcatgattgatcttttgtcgttgaacatccgcttccatctttatctaatcttccgcat

SEQ ID NO: 328 - DNA, 5325 bp, Cryptococcus neoformans
tcctatcacgcgcaaacccaaaaatgtactggctgtactttctcttccctatgcacccaccaaaacctcgcaatccttgcaaaaccaacggtaccaccgcgaaaccctaaaacgtgcactcaccaaaccacttcttgccctgctgtccgttctcctcgataacctcaatcacaccaggcctgagagcctcgacggagggaacgtggttggcgaggatacccatgtcaccagtagcggcggggatgttgacttgaatgacaccggaagaagagtagagggactattggtgggcgggcaggagtacgtgtacatgtacgcggatatgacgaatttgaagagttggagtttttgcaaaggacgtattgatgattagcggggaaatcgtttggaaccgaatagagcagtgtttttttttcaagagcgcagggaaagatcgcgatgaaatggtggaccgggaacgccaacacaccaaccgaccaacaaaagaccgaccagaaccgacgatgaagacaaagaattgtccgtgcatcagcaaaggaaaaccgctctattttcttgcacaccaacgcacctggtgggggaggaccaaactcaactgcaacttgccgtcggtggcagcctcggcgtacccacgtcgagcgattcgaagggcagaagcctgtcgggggagggcacggagagcaggggtgagtcgggaggcgaacatttctggaggagggtgtgtcagagcctacggccgccggggcgggggagggggggggagaactcactttgtgtttcagcgttgtctgtggtgtaaggtcttctcgctgctgaatggctacgcaagagacctcatccgaaagcccgcggaaatacggcattatcccgtgtggcacccgacagctctgtttatgtaatctgcagcgtgccttgcgcctccaccgcggcgctcaactttttgagaccattcagacggtcatgattgcagagctccttctagctgctcatatcaagcaaaatggcgagacaatcaaagccattcacggcatctactgtttcacaagaaaagcccaagaagcaggtgatcaagaagaaaaggcttgaccccgccaacgcatacacctacctcccgtctctccccaaacgccaccgtacatccgccttccagaactcgctcagttacgaagaactccaacaggccaaggagtcgtccaagggacgccattatgatggtgaagacgatgaagaatctatgcaggcgagggtgcgaaaagttgcgatgatgattgcttctgaagggcctcaagaagtggatagcgaagaaagtgaagtggactctgacgaagcatgggagagtgatggaagtgacgaagagagatggggagatgtatttaaagagctagaaaagggaaaagggaagaagaaggcaaaagacgtagtcagaaaagtcggtacgactttttatggttcaaggcgccggaaaactgacagttgttacagcctgcgaaaccattgactgtcaatcttgatgaaagcgacggtgaagcccccaaagaaattgccaataattcaaccgttcctatctctcctgagtctgcagaagaagacgaggataatgatgatgacgaggatgaggatgaggatgatgacgaggatgaggatgaggatgaggatgaggatgaagacgaagacgaagacggattgtcggaactttcagcggaagaggaagaccccgacacgcttgccgaccttgacgcttttgtcgaccaactcgccgcgtccgacaagaaacgcaaagctacagagaccgacgccgattcttcagctgagcagaagaagagacgggtcttgcctgtcaagtttaggcaagagatcaaggatgacgcagctttgaagagcagtaagtttgtcaaatatcccgctctgtttgcataaaacgctaaaccatgccgttagaccaaaaattggatatctccgctctcatttcatcccacccctctctcgcttccgcctctgctcttatcaaaccctccaaaccatccactaccaagtcagtcctcaagggcggtgttcttgctgctcctcttcctaccgtccaacaagaacgacttgaccgcgaggccgcttacgcccaaaccaaaactgaaggccaaaaatggtctaccttgatgaaacgagtcaaagaggccgaacacttgtccttccctctccaagcaaaggaccgcggtggcgtcaaatcttccagcgagattcttgccggtttcaagcctcaaaatgaaatggaatctgccgtcgaagcactcttaaaaaaggccaacctgacagaggacgagctcacgaagcatgaagatctccagatggaagctcgtgaaatgacggaagaagaaattaaagctcgtcgagctgaacttcgataccagcgtgaacttcttttccgcgctgaagccaaagctaagcgcgtggccaagatcaagtccaagacatttaggaaacttgcgaggaaacgagcagcaaaggagaaccccgggatggcgttggaggacctcgagaggcttgatcccgaggcggcgcagattgagagagagaagattgagcgtgagcgagcaaaggagcgagcaaccttgagacatggcgcgaagagcaggtgggcaaggggggtcggtggtgaagctgatgatgacgagaggatggcaaaggaagcaatgttggatatgaaggagaagctgttgaggaagattcagggtaaggatgagggttcatcctccgaagaagagagcgaagacgaggaagaagatgaagaaaccgtcaaggccaaggcgtttgaccagctcgctcagctcaactctgattccggtgcggcctcacaagctcaaggcaaaaagggtctcatgcaaatgaagtttatgcaaaaggcgcaagaaaggaggatgaaagaagtcgcagagcaagagaaggatgctcgtatgcaaatcgagctctttggtgaggatggcgaaagagaggaagagagtagtaacgagagtgatgaggagccagccgttgttaatgttggtgggaatgaaggaagactcaagtttagcggtcctactcctggcgtaagttatctcgcacaagcccatgtagttcaaaggactgatacccctcttcacagaccggcgcttccgaatcaccagctcttcctgctccttcagtccaagaccccgtccccgcatccaaatccaaatccatctttacccgtgccccttctccccctcctgtagactccaatccgtggctcaccgctaccaactcctccggcccctctcgaaaacgtcacgcccaacttggatcccagcttaacgacgagaccaaggctgttaaagctatcaagaaggcaagcaagagaagagaggatgaagaggaggatgagagggttgatattgatgtggaggcacccatcgccaccaaatcagtggatatctcaaataataagggtaagactaagggtaagacctctattgctgcgattgcggcggtccaagcggacgaacaggaagaagatgaggaaattgcagacttgcttcctgccagcggcgttaaagcattcaaacaacgtgatcttgttgctgaagcgtttgcgggtgataatgtcgtggaggactttgcgactgaaaaggccagacagattgaggcggatgcctccaaaggttgaagatacctcactccctggatgggtaagcttcatattcttccgaagcaaaaccaagctattctaggtggctgacggaagagaaatattttagggatcatggggcggtaagggtgcaaagaagcgcaaagccaatccgaaattcctcgtcaagacggccggtatcgagcctattgcccgaaaggactttgcccattccaatgttatcatcaccgagaagaaggacaggaaggcgtcccaattccagctcaaggacttgccttatccttacacgagcaaggagcagtatgagaagagctttgaagtgccagtgggtagtgaatggaatagtaggagcgggttccagagaggcactctgcccagggttgtcaaaaaggcaagttcggctcatgacattggattcactcgaaaagctgacaattcttatagcctggagccattatcgaacctgtcaggagactgttctaggcttcgtatattatgtaatgtattgtgcgcacttttgatgtttagtatgcattcgtcgagcttgttatgccaggtgttcgcagtctgtttcttatacaccctttcccgtcagccttttttcggcctggacaactttacacctctcgccccttgtagttttattaccgacaccattaatctaatctaatctgttttaggtgtgcatcaagtccgctactgaacgtgtcgctttcctcggatccggccgatatcatccagtagtagaacgctctatggtctgaatcgtatacttttgacaatttgctcactccagtacaaaaataatccacacaacctcttcgatggatcagtgtaaaatgttgagagcctatctcacacagataatagtccgcttccagatgcacgttacgtcggtattcggagacggaggggtagatggatccgagttgaaaatcttctttttgcaacagctgagtacgggtgaatctgtcttcgatgggatctgtctactaggaggacctagtgcgtcgatgaaggacaccgacatgaaatgctcacgttcccgattagtgaatgaacaacaatccaacgcttaccgagttcttcggtacaatagggagagccgacatcgaaggatcaagaagcaacgtccctatgaacgcgagcgtggaatctctccgatggagacatcatcatatatcctaccccgacgaccttcatcagggatttcgtccgctaaaggatagctggtgtactaactagtccgacgatacgaatttactagcacctcttggaaaatgcaggatgtcccgcaatggcgcgttatccaacgacctttgctgacatcgggcttcccgatcagacattgaatcccggtggagactcgtatagaaggtattgtcaacacttttgatgctgaagccgcctcgccgttctcttgcgccctgtgctgtatccagcatcggtatttagcccgccttctaagaccgccccctgctcgataataagaagttattaaatccatggcaatattccatgggtagaaatcctgcatggcattaatcttagtaagttccaagattgttaattgaataattgactgcttgcgaaacttaccaataagctaaacgaatgccgtccaaactgaatactgaggagatcttcaagcaggtagtcggtttctcttc

SEQ ID NO: 329 - DNA, 5238 bp, Cryptococcus neoformans
aacgtaagcagtggcaacggaaagccacgtggtgctcaaaaagggcaaaaagtcgcaaacagcgcaatgatcaatacggcagcttccattcgctgatgcaacggccgcttcaagcgtcaggacgaacatgactatgtcagtgctgcatcggccatccatccacgtgtacgggccagcagaaagacggagaaacaaaggtgacgggcttatgcatccatgccttgcgtattttgtactgtactgtggaagacggagttgtttgcgtcgtagatggcgctggcggagagtgggcaccggcgcgactccggacagcaccagacctgaaattctgacaaacatgaccaaagtaagatgcgttatcgctgggccaatggggtgagggatatgagccaagtgacaagaccgatgttacgtgttttcctggagcggaccttcccaaagcggcaagtcgcgcagcgtcgaaactgaggtttgaaaaaaccgcaattggccctgatgaaagcgaccctgaaaattagtctaacggccacggacgggagaaccgaggccaaaggggggaagcgacgctatcccctccaagctcctcgtccgcgcccccgtcgtcgccttaacaactctgtttttttctttttcaatctcttttccatctcttctcttccatctcttttcctacttatagcctccccacccgacctaccacaccgccactcttcctttcttctctttatccttcgaacaaagcgacgatcgttgctggattctgatatatcctccatctaattctcagaactccttgatccgcttctggcagctagcctacaaacatccttcagcccatccgcaaacagctaacgacaccagctggggcgccttttatatactccaactcttagtttagcgttctttctctttatatatatatcccccctcccctaataatttaatacaaccatgtctgaccacgaaaaagtcggtcacaccgaggagattcctaccaagtatgtttatcgctctgtcaatgtttgcgtctctttgtgctgactatatactagggagtcctccctcgagaacaaggtgcagggtgaggaggtccccgctgctgctgctggtgagttttgtcgcagttacgattattgtttgccgacgactgactgcggcatctgaagccgacgaggagcccaggaagaagcgagagtacaaggaaatggagcacaagactgagggtgacctccacgccaaggttgacatgaacaccgtaagtgagatttccatccccgccaagccttttcctctgctcccacatcataccaccccactccacagattcggmtctcgccgctaactctattttcgcccacagatccagttcactgctgccgacttgtacgacaaggacaaggtcgatattgagcacgtcgttatggaggaggtctaccagctccttcaatgtaccgacgccggtcttaccgaggctgaggccaccgaccgtatcggtatttttggccctaacaagcttgaagaaaagtccgaaaagtaagcatcacttgactctcccctgctatgcaatgcactaacatccctttagcgtcctcctccaattcctttctttcatgtggaaccctctctcctgggttatggagggtgccgcccttgtcgccatcgccctttctaacggtggtggtactccccccgactggcaagatttcgtcggtatcatccttcttctttttgttaactctactattggtttcgttgaggagcgtaacgctggtaacgctgtcaaggctctcatggactctcttgcccctaaggctagggtcaagcgagacggccaatggaaggagattgagtcttccgagcttgttcccggagaccttattgctttcaagcacggtgatgtctgcccttctgactgtcgattggttgaggccattgatgtttcgtaagtattcatattccacaagcacgattgcatacgctgataatcgatatagcatggaccaggctgctcttactggcgagtctcttcccgtcggcaagcatgagggtgacgagtgtttctctggttctacctgtaagcaaggtgaggccgagggtatcgtcatcgccaccggtcccaacactttcttcggtcgtgccgctactctcgtcggtcaggacaacgaccaggtcggtcacttgcagcaggtccttgcccgtatcggtactttctgtctcgtctccatcggtatctttgtcctcctcgagatcttgattctctacgccgacttccgatacccttaccgacgtggtcttgacaacatccttgtcttgctcattggtggtatccccattgccatgcctactgtcttgtccgtcacccttgccgtcggtgcccagcagctcgccaagcacaaggctatcgttacccgtatcactgccatcgaagagcttgctggtgtcaccatcctttgttccgacaagaccggtactctcaccaccaacaagcttaccattgacaaggagaatgtcaagtgctactccaagtgggacgttgagggtgtatgtctcctcgctgcctatgcttcccgtaccgagaaccaggacgccattgacggttgtgtcgttggtaccctccctgaccctcaacaagctcgtgctggtatcaaactcctcgacttcaaacccttcaaccctgttgacaagcgtaccgagatcacttaccgagacgaaatggacggtggcaagcttaagcgtgctaccaagggtatgactggtatcatcattgaaatctgtacccgtaacaagaccaacgagcttgaagaccaacttgaggccgatgttgaggagtttgcccgacgtggtctccgtgctctcgctgtcgctttcgaggatgttgctggtgatgacccctccgctgagggcaacggtttcgagcttgtcggtctcctttctatcttcgaccctccccgatcggacaccaagaagacgattgacgacgctatggctctcggtgtcaaggtcaagatggttactggtgaccagcttgctattgctaaggaaaccggtcgacgacttggtcttggtgaccacatgtaccctgctaaggttttgaaggaaggtcccgaggctggtagcaagcacgccaaccttgacgagatgatcatggacgccgacggtttcgctggtgtcttccctgagcacaagttcgagattgtcaagcgtatccagaaccttggtcacctttgtgccatgactggtgacggtgccaacgatgcccctgctctttctcgtgccaacgtcggtatcgctgtcgagggtgccaccgacgctgcccgaggtgctgccgacattgtccttactgagcccggtctctctactatcgtccacgccatctacggttctcgagttatcttccagcgtatgaggaactacgccatctacgcttgtgctgttaccatccgtatcgttctctgtttcgccatcatggcctttgcctggagatttgacttccctcccttcatggtcctgatcattgctgttctcaacgacggtaccatcatgaccctctctcttgaccgagtccttccttctactacccctgactcctgggatcttgccgaagttttctctttcggtgtcgcttacggtgtctacctctccgcctctaccattgctctctacgctaccatggagaacactacattcttcgaggacaggttcggcgttgaacctttgaagggtaactcttacggtggtcacatggttatctacctccaggttgccatcatctctcaggctcttatcttcgttacccgatctcacggcccttcatggactgagcgaccttccgttgctctcatgttggctttctgtctcgcccagctcgtctcctccatcatcgctgcctacgccgactggagtttcagtcaggtccactctgtctctggtggctggattggtatcgtctggatctggaacattgtctggtacttccctctcgatggtattaagttcatcatgaagaagaccgttatcgctgctctccagaggaggaaggcccgaaaggccggccctgccgtcgccgatgccgccctccaccgagctccttctcgacacgagtctctctactccaaccgaaccaacttccttacccgagctgccaaccgactcaggggtggtgccaagatctctatgtctcagaacgagcttcaacggtgagttttcgtgtctggattgtccatttgtctggttactgacggcgcctcgcagattctcttccattcaggctcagcagtctggtgccgcccttacccgtgcccactccaggcccgcggcgtaagaggtgttgcgttcgcgttgaaagagcatttgtagccaggctgttcttttctatctgttttcgtgtagcagcactggtggttatacatttcctatcccccgtattatcatccgcatcatcatttagcttacacaacttctactccgacataccttaccttcttcgacgagccttcgttctcgtcactcctagttaaaatcattaatccctttttaagatttgtcttgtctcgttctcgcatagcgtgcattcgaatgcaaatctggtcatagagtgatatatgtaacaggtatataatagagctcaataggggcgtactactttcaagataacagaactgataaggacccctataaaataagagaccatatggttgcataataaataagctgacaaaacggaagcttgctcattgaactttgtcctattactatgtctctactaagtaacacaacaggcccttagaagacactgtaatcttgatccgagacgggcggcagagacgtagacgaagaggcagcgaagaaggaatgaagaaacacgatatggatggcgaacgaagggaggaatcaaaggcacgggtggtgacgtcgtagttattctctcggcagtgttgcgtcgtcggactccggctatttcttctttcccatatcgatccttcatcgatttctcatctgcccttctcactactaccatctttattcctcccagatacatcgagataatataatcctcaagccactataaggatgcaaagcaagtttggcagcttcatgaacaaggcccaggccgccctcaaggtatgttgcttgctgctctcatataaccgcaatgtcatcgttcgatgagcttcaaacgaggtggttgaaatgacatagtggcattttaacatgtgataccaatcagggccgcccttc

SEQ ID NO: 330 - DNA, 4993 bp, Cryptococcus neoformans
aatgacgtgatgacagagtgcagtcaccccaggcgaacatgaataaaatttctacccacagatgagaagtcttctactacactatttatatgtaatccatagcgaaaacgattatatgcttataacggacatgctcagggaccgagttccccgtcgccgttcgtcctccgcgccatcgccgtcgggatgatcactgctgcatcgttcgcggtagcgcgactcctccacaactcggcccggtrctgatgaacacttcttgcttgccattcgcgatttaactttcttttatcttttttaaacacaataaaataatacaccaaccatcacgacgtgcttctccggacaattccacaagagttcatcattcaattaataagtactactactactttgtaatgtctctctccttcgctttcatttccgtacagaaaccccattctgcaccatttcatctctcaggcgcgcycatgtgctccggatcaatcggctacatggctcctgtgcctgcttataaagcttgtcgagggcagtaataatctgcgataaagttgcgattctgatcttcaatgggcatcagataccagcagacgctttcgatgtgatgatatgagccgcgttctcactgtacctgttgtgcaaggcatgtgtcattttgtatatatactccgagtacagcagcatacaagtacatggccgcccaataacgataactcgaacaacaactaaaatagcatacaagactcaaagtagtgaatgaggagaagagatcggtaattaaggaagtgaaggcggacagcgggatcaaatcatgttctcagcatccaaacaaacctgcgcgcgttggtgttggtggtggccgccgagtaacaaaaggcaaaatcaaataatcatccgtgcagctccagctcgctgcaactaataactcatcccttcatctttctttcctcttcttttcgctcttccgctcttccctccatatattcacagaaagcctacaaaaatgcaggcaactccagaaacgctctccctcctcacgaactacctctcctccactgtctctccagacgctcatacccgtcgctctgccgaagagtctcttcgtcaggctgagggtcaacagggcttcctgttgctcgtactcgagctcgtcaaagccgactcggttaatatgatcgtgaggcaagctggcggtgtatacttcaagaacactgtcaagagactttggtctggggatgaggtatgtcctcgtccggccttttagtcttgttgggtttcagctacatttattgactgaattcgattccctaggagacacaaatcgatccggccgacaaggcagccattaaatcacaacttgtccctatgatgattgcgttgggtactcctcagacatcgcgactgcagagccagatcggagagggcctaagccacatcgcttccctggattttccccgtgaatgggaaggtctctgcgacgtagggttgaaacaacccatcatacgaccactcattccatttgcaggaacttgtgaactcactcacgccagataactttgtcatcaacaacggcgtcctggccacggctcattctatctttaagcggttggtcttttaaaatatctttcgccagcacgcctttctgatttcatgattagctggagatctcaattccgcacaaatgagctttacagcgagattaactttgtgttgtctcgtttttgcgaaccatattaccgtcttttccagcatgtcgatcaattgcttcaaacgcctcctgcatcccttcctaccaactcttccattcttcttttgggccaaagccttcttctccttatccaactattccacgacttatctagtcaagatctgcctccattttttgaagaccacatgactgaattcatgggaggcgatcagcctgggtggttgaggaagtatctggactgggaagtagaggagctcaagggcgacgatgatgacgaggctcctggacctttgcaaaaaattcgctcatctatctgcgaaatagctgaattgtatgcccagaagtactcggatgtttttacccagttgggaagctttgtggatggcgtctggaatatgttgacccgtgtcggcaccagcaccagggaagatgtggtgagtgacagtaactttgtcagatcacacattctgactcaagtactttgatagcttgtctctcgtgcactgaggttcttgtccgttgtggtaaagatgggcaatcaccgtgccatgtttgctgcttccgagacgttgaacgctttctgcgaaaagatcattcttcctaacatggctattagaggtgagtcgccctttgtagaaagagcataactaacgctggatctagagcacgaagaagaaatgttcgaagatgacccaatggagtacattcgacgtgaccttgagccctccaccggtaagcgtcatgcgagaagtccatgtacccatactgactcaatgattagaaagcgacacccgacgacaggctgctactgacttcacccgtgctctcatggagttatttgaaaaagaagtcacgggtatcatcaaaggttacatttctgtgttcctccaagagtacaacaaaaatcctgtaggaaactggaagtccaaagacactgccatttacctgttgacctctattgcctcccgagggtctacccaacaggtgagatataaatcactgacatgatggttttacactaactgttatgcagcttggtgtcacctccacaaacgtccttgtcgatgttgttgacttcttcggtcagaatgtcttttcagatttgcaggcagctcccggatcagttcatcctatcctcactgttgacgctatcaaatttttgtatactttccgcaaccaggtttgtcgactaacctcaacctcatcaatgcgacgtcactaattaatcggtagcttaccaaggatcaactcgtctcggttctccccctccttgtccaacaccttgcctctgataattacgtcatctcttcctatgctgctattaccattgagcgcatcctgttcatcaaggttgagagacaggcattgtgagtccacgatccactagaaattgcttgcagaatctgacaaaaatggtgattaggttcactcaggccgatatcaggccatttgcggagaacatcctcatggctctcttcgccaacattgagaaggggggaacacccgagaagatcgctgaaaatgactatctcatgaaatgtgtgtattcttccttgaccacatcggtctgtgtctgattatgattatcaggtgtcatgcgagttatcatcacagcccgaacatccctcacgccttcacatgaaggcatcctcactcggctcgttaacatcatgggcgaaatcagcaagaacccaagtaaccccaaattcaatcagtactgctttgaaagtgtatctgcattgatcaggtttgtgtgcgaaggaactcctgcagctttgccgacatttgaaaacgcgttatttggtcccgcccaacacatcttgaccaacgatgtcgccggtgagtgggagagtgtcattaatctccgggctaactagtacgcagagtttattccctatatattccaaattctcgcccaacttctggaattgcattccccttccgagcttccgcctgcctaccaggcactcaccggtccgcttttgtctgccgctctttgggaacagcgcggtaacatccctgctcttgtcagaatatggaaggctttactccttcgcggtgcgcctagtattgtggccgcaggtcaggtacagggattactgggtatcttccagagattggcaggaagcaaggtcaatgatgtttgggcgtttgagctggttcaggcactgtatgagtttgtgcccatgtaagtgcgattgcatcgttcagttaatgtggctaataaaacgtgcagtgaagtgatgcggccattctcccagacagtctttgtgctccttttgaaccgacttcaaggtaaaccttcgacccaatttaatcattgcttcgtttatttcttcgctttcttggccaatctggacagcgtgggcgcggatttcctagttggtgttctggaaggtattcagactgggtaagttttttttccatttgttgatatgcgcagtgttgctgaccccccttcaggctgtttggcaacctcctgactggcgtcatcttgtccaacacccagaagataaccgccaggaatagaaaattggttgaagttggtcttataaagactctctctcgttcagatagtcttttggtagagccgaacaggcagttctggcctcccattttccttgcccttctggacatgttcactcttccgcaagatatcacctatgccaatcccgaaggatcaggtgatattaccgagctggatcccgaggaagccggattccagtctagcttttccaagctgggcgcgagcgagaagactgtgagtgaccctactgcaggcgtggaggatagtaaggtgtttgcggcgaaagaattagccaagagatcgaacgagaaacccggaatggtatgtggcatgtcctctcatgatacttgacaaagggcttcttgttgacggtggtaaagttgggccctctcatcgaagcggctcagaaggaggaacaggtgacagtcaccaattttgtccagttcatggcgactagcgggtgagtatttataaactcctttccaaacttgctgacgcccagccatgcaaggaacacgatttcatagactcttgacgacaaaatgtcttggattacactataaattatgcatgacatctagaaaaaaggtctgaaacgcttcgggtcacagcttacgcaacggtagtctactggaaacgaatatttacctcccgtgctcactgtgtatacttgtagatcaagtaatgatgtctacttgacaatcaccacagggtcaagtgctggcatttccatagcagccaacgagctgtctgatctgttc

SEQ ID NO: 331 - DNA, 5384 bp, Cryptococcus neoformans
gatggctggaaagggtggggagattgtcaagattgtggtggagaagcctagtggggagaaggtcgagattgaggcgaggcatacgttgagtaaagatcagatagagtggttgagggcgggaagcgctttgaactggattggtgagcaggctaggaaggccggtaaggtctaagcggtatgaaggtttgggagaggggattgaatagaggggatgtagaaaaagcacatagctagacagcatataggttcgtttctttttggaaagtgtaattcagggtatacccttcgcatcgggtgcatggtttgggttgttttatttttggaatcatctgattatttatgcatctgcttatgactttggattaagagggactacaagtaatcggtcggttgggattatgtacgtgtacaacaaaggactcagatggcctggcgccacaggagatgagaagaaaacaatgggtatagatgagctgtttagaactgtgtggagtgaggtggagatgggagacaagagatgaacgtagatcaaggagcaggccgagaggactaagaaagtacgtgcgcgatgctcgacaattgaattctcctttaaagtccattctgaacgaaagactacgttgaaatgtacctcagcattatgcatcaaacgaccctcttcctactcattttcgtgaaatgtaacttggaactagcagctgatgtcaaacaccaatgccaaacagccgtagagcaggttgaggaaagatagcagtgaggcctaagagagcacgtcaagaacggcagaaagtgatgacgcaaacggtgccacacaccattttccgttgattcccgccacgcgaacaccacgtggccaactccactatcaccagaaccaggaggcatccaccacgcaagcgtcagtgtctcacgaacagtgggccgcttacttgacgcgttactgccttccttccttcctgcttacttctttcttcctccagaatccctttccgccaccacaatgccagtcccagcagtaacgacgtcagcagcaggatccctcaccctccttgaagatcccgacaaggatgtcagggtctacgccctcaaccaccttctctccatcgttggccagttctgggcagaaatgtcggacaagcttccttatctgtaagtctatctttcttggatttggcttttatataagaacatgaactgatatgtaccgcagggaattgttggccgaccctctttccaaagaacttgccccggagaaccgaccgtttgccgcactcctcatctccaagatttacttttacatgggtttccaagatgaagctgtagagtttgcattgaaggctggggtagcatttgagaaggaatctgaaggagagtacagggaaacgatcatcggttcgtcttgcctcgtgtctattggggaggcagaggccggtatgctgattcagtaatggttggatttgtagctggatgcttggatcaggcgattgacaaaacgcaaaaaggagaggatatcccagcggatctgcagagcattgttgactctgttctccgaagcagctctggggagaatgcaaagctcgtacgtctggatcttgtctcagcatccgattctttctgacaaactgtaggcaatgggtttggcgctctcccttcggcggctcgaccttatcgagatgatctatcttagttctagagggccatctcaagcatcttcatcgaagtctgagcgagtcgtgcatgatgagaatttgttgcgatatgtccttgcagaggttgtctcaggtactagcgggaatgaggcttggccggaagatttccgtgccaatgtaagtctccttggggatattaaaaatatatacaagaattgacatttcgctagttgttcagcctccttcgccgattattccatctcaaccccaaccccgattggaattctataactaccgtttgggctcaaagctcagacgttgaatcaacagtagaatccctcgtcaagcttctcgaggttgacgacaacttgacggtgtaccaaattgcgtttgacctcaccgaagtggcatctcaagcgtttatcgacgaggtgcgggaaaagttgggagagaccaaatgggctgcgcctgtcgacggctctgtgagttgtgtccatttgattcgcaaagtcccgctaaatatgttgtaggaggacgatgtccgggtagtcttaaataacattcttcgaggcgacaccagcgccgaactgttcctcaatttcctcagtaggaacaacaagaccgacatgtcaatacttaaagtcaccaaggaaactcttgaagatcgatattccatctatcactccgccatcaccttcaccaacgcttttgcccactgcggcaccacatcggacaagttccttcgtgagaacctcgactggctcggccgagcttccaactgggccaagttctccacaactgccgctttgggtctcattcaccgtggaagctgggtcaacggtaaccgcgtcgtaaagccctaccttcccggaggtgctgctcccaacaagtacagtgaaggaggtgccctcttcgcgcttggtctcatctatgccggtcgtgtcgagtttgctgaggaagagctcaagaagggtttggccgaaggtaacgaccctctcgtccaacacggtgctgctcttggtatgggcgttagcgcattggcttctgccgacgatgaaatttacgacgagattcgaccaatcctcttccaagatgatgctgtcgcgggcgaggccgcaggttatgccatgggtcttgtgatgctcggtacagcgtcagagagagctttggaggagatgttatcttacgcgagggaaacacagcatgagaagattatccggggtttggctatgggtatcgcgttcttgatgtacggtcagagggaggcagcgaaccctgtgatccagaggttgacggaggacaaggtgagcttttcggacattcaacctttgcctagcactgacaagatgcctaggatgccatcctccgatatggcggtatgtacaccatcgccctcgcctttgcgggtacgggtaacaacaaggctgtcaagaagcttctccatgtcgctgtctctgatgtcaatgacgatgttcgacgggctgctgtcaccgctcttggttttgtactcttcagaaaccacactacagtgcctagggttgtgcagctgttggccgagagctataacccccatgtgaggtatggtgcgacgcttgctttgggtatctcgtgtgctgctactggtcttgaggtaaatatagattaaaatcttccttgggatgaaaatggctaatgtgattttggtagtctgccattgagctccttgaacccatgaccaaagaccctgttgactatgtccgtcaaggtgcttacatctcccttgccatgattctcatccaacaatccgaagccgcatgccccaagtctatcaccattcgagaactttttgccaaggtcgtcgccgacaaacacgaagatcccatggctcgattcggtgcttctctcgcccagggtatcattgatgccggtggtcgcaacctgaccctagccctctctacacgagctggtactttgaaccagaacgctgttgtcggtatggcgctttttgttcagttctggtactggttccctctcgcccacggtttgggtcttgctttcacccctacagcagtgattgctatcgatggcaagatgaaggttccacaactggagcttgaatgccacgcccgcccgagcttgtatgcttatccggccactgagaagaaggtggaggagaagaagaaggacaagcagaaggctgccgtgctttctactactgcaagggctaaggcgagggagagggtcaagaaggccgaagcgggtgaggttatggagaccgacgacaaggctgaagagagtgggaagggcaaggatgccgcgcctacaccaaaaaaatctaaaccatctgagccatcctctttcaaaatcccgaacatgtcccgcgttaccccgtcacaattggcatacgtcaccttccctacttcgggacgatacacgcccgtccgacctcttgaccactctcctctttctggctctaatattaacggtaaaccatcaacgttagcgtcaggagcgagtgcgagtggcagtatcgtggttcttcgagacgaaaagcccgaggagcctgcagagtatattgaactgagtaaggagttgtggcctggatggctgccggcaaaccccgaagcggcagcagctattttggcgcaggctaccgcagaagggtctggtggggcgccgggttcgggtgttactgggcaagctcaacaacaacagcaagagcccgaggaggaggcagaggccccaccagcgtttgagtacccgtttgaggatgagtagaagtcgtagaatgtaaaattctcatcctgatactcgttgctttttccactagtcacagtagtaccccatggccctcaagttggcgagagcctcagacctataggccttcccatacttggcggcccaagtcttggccttcttcaccgcctctggggaagcatcccggtgagcgtgccagtagcggtagcgggagagctcggggtgctcctggctttccaccagttcaaagcgcatccacgcctgctcagggcgaagagacttgccattgtagacgccagtgacctttcgccaaccgctgtctggctgcgagtatcggtaaaggttcttgccaacaatcttgtggtgacgggcaacccagtctgcaaagagacagtcgtttcccttggcgtgggtagagtcacaccagtagcattgctctcggtggtcggaagggagttccggggtgtcttcataatggtaattgtcgtccgagtcatagccaccatcatcattgcgataataactaggactctgatcagctcataactcatctgacgatgaaagggaacggggtaaataccctttgtctctggagttgcctccatcggcttggttatgcttcctttttgcatttgacacttggtcgctggatgcagcggtcggagtagaacaggattcctcctctgcctccgatgacggccaccaccatcgtcgcactcgccttcttcgtaaaattgacgttctccggacgaggacaagattgaaaccacagcagcgtccgaaccgcccaaagccaccgggtttacattgccgaaagcccagtctcaccgccaacctcggatccacaaaagttgtggacgcccccgtccttcgtcgcaccaccaccggagaaggcgtgggacttgatttttttggcgatctttttagcatcgtctgtcataaagatggcggtgttctccttcgaggcggacatcttggtaccggcaccttggagggctg

SEQ ID NO: 332 - DNA, 5419 bp, Cryptococcus neoformans
ttaatacggttgacagacaaggaatgaaagccacttggaatcctatttcaaaacgagggcggattcaggaaaagatccaaataagttatgtgtgatgtggaggaaataccaggaacaaaaagcgagcatcgcttcatcaaaccgaggtcatgatggcccaaagaccaagcaaacgcgttggtcaaagtactacacccaacatcagaatgaccgaggagatgcagacacatgtgagactgtgctggcaatcggcaaggattcttctatagctgatccttcgggtgcagccacccaaagttatgaagaacaacaggccatattcaccacggaccattacgccgcataccacctcgatttacagagtgaagaacggaacgatcaaccattgctcgggccgtcgtttgctccttccacagcattttggagcaactagtcacataggacgggaagtcaataaacatgaggtttagtgagtgtcaaatgtcaaaaaggcgagttagatcagtttgcggtccgagatgcatgctattatttatccacagagagcaccgccgtgcgttaattatgtattttttattttattattaacataaagagataaatctcctgacgtgttattccttctcataatcgcgtcgtcgcccaaacgcggtttcggacgcgttttgcctccctggattccacatcttgccctctctcttctctttttctccttttcttccatctccccacaccatcctcagcggcatgtcttccccaaacgcaggtcgatcttcctccccactccattttcccacctcatccgtaggcggtacacctcgtgcttctcgtgtccagcagctgtctggatccggtgcccgtgagtcccttgtctcgcgtcgtctcgcccagtgctaatcttcctgactagctgctgcatcatcctctcctcttcactttccgacatcttcacctcaagcgtcttcccgtgctgcgcgtacacctggtggcttgaggagcgatgttcctagctctgctgcagtcagacgaatccgcgatgaaacaccattgttcttccctccgtgggtctatcaaaatctcgccccattttctgctgatgtataagtagttccggaggatcgacccctcgtcgagctcgtcgaggtgacatccactcctctttcccgcactcatcgccgtctctcgctcgacgacaagcccaagtcccggctgactctctttcgctccgtgcgtcttcccctggtatgggtaccgatagctttggtactccgcgtgttttcggatcggctgcccctaccctttccgcagttgcccaatctcaacttggtgccgacggcgacgatatcgatggtatggtcaaatttatctggggtacgacaatctctttgcaagagagcatgaaccttttccgggattttttgagaggcttcaaacccaagtaccgtgctgtgtacaatgcggaacaatccagacatgctgaggagagtggcggcgttgcgcctcctccgatgactttgtacgacaatctctctgctgagcgtgccgaggtccctctctatgagacgtatctcaaccggcttcgactcactggtgaaactaatttaaacctcgacgcgctcaatctgctcgcgtaccgacccacaaaaaagctttaccagcaattggtcaactatccgcaagaagtgatccctatcatggatcaggtcttgagggatgtgatgattgaattgggtcatgaagagctggagaaagcgcagaccaaattcgctgagggtaacttatctcagttggaattgagtttgattacaaatgagattagagatgtggagtcacgagtgtataaagtcagaccgtttggtggagagaagacggtcaacatgagggatcttaatcccggaggtgagtgccgactttactttgcctggacgtgcaactgataatctgtagatactgacaagctggtgaccgtgaagggtcttgtcatccgtgcaactcccgtcattcctgatatgaccactggtaagtaatgcgtatccaatcttgtgaaccttttgctaactcatctcagctttcttccgatgcttggtttgtcagcacactgttcaagcggatatcgaccgaggaagaatcagcgagccagagcgatgtccccgagacgtctgtggttcaactggcactatgtctcttattcataaccgctccgaattcaccgacaaacaagtcatccgtcttcaggagactcccgatgctgtacccgatgggcagactccacatactgtatctctttgcgtctatgatgaactcgttgacttggtcaagcctggtgaccgagtgatcatcactggtatcttccgatcaatcccagttcgtgtcaaccctcgccaaaggagtatcaaatctttgtacaagacctatctcgatgtcgtccacgtcaagcgtaccaacactgcccgaatgggctttgacccttctactcgtgcgggcgagagcaagccaccgggtgtcggcgttggtggtgaggacgacgaagatgaacttcttgcgcgtcaggatggcgatgctgcgatggacgaggaccttgggtcgcctgtcagatcagccgctgcggagatggaacaacgcattatcgagctctccaaccaccctgatctttacaacatacttgcctcatctttggcgccctccatctacgagctcgaagatgttaagaagggcatcctcctccagcttttcggcggtaccaacaagtctatcgcccgtggtggcggtgggggcggtcctagatacagaggtgatatcaacgtgttgatggttggtgatcctggtactagtaaatctcagattctgcagtatgtgcataagattgctcctcgaggtgtctacacctccggtaagggaagttcagcggttggtttgacggcctatgtaacgagagatcccgattccaagcagctcgttttggaaaggtaattttcatttgtaaattggtggactcaaggctaatgacaatgtagtggtgcattggttttgtctgacggcggagtttgctgtatcgatgagtttgacaagatgagtgatgccactcgaagtgtcttgcacgaagtaatggtcagttcgatgtccttcccatatttgaagccaaattaacttatataataggagcaacaaacggtttctattgccaaggcaggtatcatcaccactctcaatgctcgtacatccattctcgccgccgcgaacccaatcaactctcgatatgaccctaacctccctattcctgccaacatcgatctccctcctacattgatctcaagattcgacttgctgtacttggtgttggacaaggtggatgaggtgaacgacagaaagttggcaaagcatttggtgggactctatttgtcagatgtagaggatcagcctgccgacaatatcattgtgagtctttttgtttcaaggtgaccgatctcaactaacaagttgtgcagcctcttcagaccttaacgtcctacattacatatgcccgctccaaaatccaccccgtcctcaccgaaggagcttctgaagcgcttgttcaggcctatgttgagatgcgcaaggccggtatggactctcgtactcaggaaaagaggatcactgctaccactaggcagttggaaagtatgatcagattgggcgaagcgcatgcgaggatgagattaagtgacagggttgaggaagaggacattagggaggctgttaggttgatcaagagtgccctgagggagagtgctgtgcgtttacttttgtgtctatcatttctgcataaaactgactgaatattcaacagaccgatccccttactggtcaaattgatcttgacctcatcaacaccggtgccggccaaaccatgcgtcgcgcccgagccgatcttaaacgtgaagttatcaaactcgtcgtcgaaaaggcccgatctcagggtattcgctgggcagcagtcattgatgagctcaacaaacaatccagtgttcccgtggatcatgcacagttcgcagaaattgttagggagctggaagaagagagcatagtcaaggtcatgggtgaaagggaaagaaggattatcaagagtctgggtgtatgattactttggagaatgggttttctttcatttttttcgtcgtgtggtgtttgtccttgttcttctgtttggtacaatgtttgcataatataaatgaaaagcttgtactacatcttggacttcaatcgctgttattcttcaaaggccgtaacaacaaatattggatctcgtcatctgcaatatcgcgtaagacattccggtctgggctcacgaaagtccgtaaagaatcggccattcatcaccgctcgattgcctattgcagacatgtcggttgtcggagttgcaaatgcgattgtgaagagtagcttccgcgcgagtaatatcctttcactgcaggatcgtcctttacaatcgctttgaatcaattccgattccgacggctgcacaatggtcttctctacccaagtagagcagagtagaaatacgatcgagctgcttcgctcatgaaagattttccaccacacttttcgaatcaccacattttctccccctctatgtttccgctctattcttcaaataaagcacagattcacagctcaacacgccttaacgcacctcactggatagaacatctacgaaaccgataacaaaaaatacgataacgacgaacacgctgcaataatgccgtttgacgcctggggctttgtcccggaaggataataccgccgaagacagcagcaacggtctagcacatttaacactgtcactgaggagtctaccaggggcaatgctggcacgcatcggcgcagcacaacagaaagcagcgcacttctccatcggacgaatcgaactctgcccctccgcctcctcttccaacttggacgtcgtcagaaactgtaggagaggagactgaagagctacgagatattgaggacaacatggaaagtaccaaattggatgatatacccgaaactgagggcactgctctgcccccttcgtctacggatgctattactgggtcgcctgcgacggagggtggtgcgtcccaggtcccaacagagaccaacttcacgaaaatgcttccatctatgactgatacacgcgctggcctaccggctggtgggatggaagaacctgatattgattgggttgcgattgatcgtgtgtctggtagacacgaaagaaggaaaaacggagcgacaacgacaaggcctagtagcacgagggataccaatacgtcgatgagaagtttttggtttttcggagctcctcccaagtcaaaggattctcggacgaaagcatcgagtaatgtaaagtctgggcggggacatgaaccattaaagaggcgaaatacggcaccaccca

SEQ ID NO: 333 - DNA, 5660 bp, Cryptococcus neoformans
gaatatcatggactttttcaaatcttaaacatccgtagtacttttcattcgatcaatcagagcgtgctgtcatgcatacctcgcgaagaagctttcaatgggtggattcacacatccgcttgtctcattgctagtttagaagattcatgacctacgccgatgccaaattcacattgattttcagaattctgccgtgttctccatcctaattctacagcctacagcagttggtctcagtccagtgcagacttttagttggctttagcgtctattcttcgcctgtcagcagcttaatatgtactctctgtttctccgtatttgatgaccagagcatataaccgacaccaacattattacaattaaagcgtgatacatacaatccgtttttatcttttccccttcttcttcttctttccgctcgtatttgacttcccttgagctccttgcttcattccttcctgaccccctggagctactgccaaaggtggagcctccacgctcgccccagcaagaacaggcgttccttctcgctctggtgtttcactggctgaaattgttgttgagatgatcgtcttaggtcgggctttggtgttggacatggaagataagaggcggaggttaagggagtcgaaccggttaagaatgatggaagagaatgttttgtacttgatgcactgtggacagcaaggcaaaattagatcgtccggcggacattaactggaagacaagtacaaacctttaaatcatcggtgatcttgagcacaaggtgccccgtctttggctgaaacttgacgcaatatcgaacctttgatggttgtcagccctgcgccttcaaaagtcttgatatatctctattgtcatatacgcaccttattaggcgatcgcgcgtagagatctgttgcggcctacatggcgatgcgtcagcacatattgaacgagagcgtgcccatataggtgacactgatgacgacttacggcctcgaagtctgtccagttttttatgtacaccatcgggtatggggtcgtctgtcttataggaatgcaacacgataacaatccgagttgcctgaagtgattgttgcaggcgttgttcgagcggaagacaacagaaagtggacgctcgtataatgataccctggaatccatttcacttacgtaaaccggttatttgccgctttctgcagctttggttttggctggcgcaggaagaacggccagccttgacttgtcacttcttccttttcttcttccttccaacccccaaagctcgactgaatactttaagaatggtaattatacggatatcgtccttaaacccacgctaactcgtccgcagggtgttccagctcttttccgatggctttctaagaagtaccccaagatcgtcgagagggtgaaagaggacactcccaagaagatcagaggtccagatggcgaaattgtcgaggagcctataagatatgaaaatcccaatcctaacgggttcgaggtggataatctttatcgtaagttgatcgtcgttggcatgccggacggaccactcatgaagattgatcagtggatatgaacggtatcgtgcatccctgtacgcaccctgaaggccgacccgcaccagagacagaagaagaaatgatggtggaaattttcaagtatactgaaagggtagtcaacatgtgcaggccgagaaaagtcttgatgatggctatcggtgagcctggttcttttgtagctcgatatctgatgctgataaccggttagatggtgttgctcctcgagcgaagatgaatcaacagcgttctcgtcgtttcagagccgctcaagaagccgcagacaaggaagaagagaggagagaggctatcaaattgtttgaagccatgggccacgccgtttcagaagagactgccaaccacaagagttgggataccaacgcaatcacccctggtacaccyttcatggaccttctctcaatatcactaaagtactgggtgtcccacaagctcacaaccgaccctggatggaaagatctcaaaatcatcctctctgactcatccgtccctggtgagggtgagcacaagattatggactggattcgtcgtcagcgaagctaccccacatgggatgccaacacgtcacatgtcatctacggtttggacgctgatttgattatgctttcgcttgccacccacgaacctcatttccgtgttcttcgagaagacgtcttcgcccaaagttctaagggaccccatgcttgcaaaaactgtggcaaggtcggtcatattgccgccaattgtaagagcgataaaaagttcaaagaccccaatgttgctgaagttgccaagacggaggaccccaaacctttcatcttccttgatgtggcttgcttacgcgagtatttggcagtcgagcttgttgtaccaggcatgcccttcccgtttgacctcgaattggcgattgatgattggattttcatgatttttttcgttggtaacgatttcttgcctcatctgccgagcttggaaatccgtgaaggtgcgattgatgtgcttctcaagatctggagggcggagctaccgaggatgggtggttaccttaccaaccacggcaaagtcaatcttgaccgagctcaagttatcttggaagggttggccaagtccgaggatgaaatcttccagaagagaaaggatgatgaagagcgtcaggagcattcccagaagcgtaggaggattgaagagcataagagacaagatgaggataaggcgcgtgaagaggatcgtaacaccttgactctaaacggcacagagtacgttgctgttgataaccccgctgcgaccgcccgtggcggtcctcttcacccatcgttgccgtctcgaccggcattcgacctcgttcccaaggaggatgcagttaaacaaccagaggatcaggaccaaaaggcaaagaaggcaatggctggctccaactcggatatagtcaagaatcgcaaggcgatcaggatggcaaacatgagtgcggctcaggcactcaaggctgagttggagggtggtaatgacgtgaatgtcgacgacaaaaaggcgattgcccaagaaggaaaggaagaggatgaagcggttgttactgttgagaggacggaggacgaggaaaaggagcagctgacgaaggaggaagcgaggggaactttggaagagcaaggcgagaaagagggtgttgatgaagaggtggttcctcccgctatccagacggacgaggatgagggtgaggcgcccgtcggtgatgccaccgtggctgaaaatgacgaatctactatccctgaggacgacgaagaccccacacacgttccccgcaagagaaagaggggcgattccgatggtgatgaggatagcaatgaggaggatgacgatgacgacgacgacgatgctccccctaatcccgaagccgaccagcctattccgaagaaaaagctcaaggtcaatgcagacggaacggtcgactatgaagatgatgttaagctatgggagcccggatatagagaaagatattatgagaagaagttcggtgtaaaattgtcggagagagaattcattgacaagtaagtccagtgccatcatgctcaatgtggcagctaacatcgtcaatagggttaccaagtcctatatggaaggactctgttgggttcttgaatattactaccagggcgttcctgcttgggattggttctatccttatcactatgctccctttgctcaagacttccgcgatgttgggtctatggacatcaagttcgaaaccagcatacctttcaagccgtttgcacagcttttaggtgttttcccggccgctaggtatgttatcattgtctgatcatcaagcgggtgctaatctcatcgcagtcgaattcatctgcctgaacctttacagactctcatgattgacgaagactcccccatcctcgacttttaccctcccgactttgagatcgatatgaacggcaaaaaaatggcttggcaaggtgtcgctctcttgccctttatcgatcagaaccgccttttgaccgctttgaagagtaaggaagagctcctgtctgatgacgagaagagaaggaacagttggggagacaatgttatgtttatcgccaacgagaacccgttgtatgatttattctgtgataagttgtatggtttaagagcgaaagacgtaagcaaggtaagtggccggttttgtctttaaagtttgtcagctgatcattctttcagcctataccgattgacaccaaagcttcgtacggcataactggttctgttctacccgatcccaactgtgtccctgcgtccacattcgacacgcctattcccagtatttcggaatgccctgatcttaaccccaacgactctatctccgtccgatattacttcccacgccaagcgcatcctcatcgatcgattcttctgagaggatataaacctgagcctgcaaggctgacggaaagcgataaggattgggtccgacgtggtggtcaaggtggaagaagaggtcacaggcacaacggcggtggaaacggaaatgtgacaggtggaccgggtatggcaagaggcaggtacgagagtgggccgccacggaccaatggctaccaaccgcctccgcctcggtcgaactatgggggtagttctggttacggctacggcgcccctgcacctctgccatcaaggccgcctgtatcgtcttacggaggtggagccggtggatatggctacagtaacccctatgctgcagcaccaaatccttatgccggaggttatggagcaccagcaccttatggtgagcttgatctcctttatatttatagtgaagaacaaggagctaacatcgtcacagctgcaggaggctatggtcagcgtccctacgtaccaccgctgcccccacccaacccatattctgccccaccaccagcttatggcagaccacctggcggaggatatggttatggtgctcctccgccaaggggcggcggttataatccttatccctccaggaggtagacgcataggggaggagtaaaagatggataaatggtgacggagggccgttaagaggaagttaacataatagtagaacatccttcacatctgtcaagtaggagttttgttgtttctttctttttcttcttcatatcctttgtatatgcttatttccgagttgcaaccttcagcctttgcctactacgttctcttgcaatctgcgcgtgttaaagagtcataatagccattctacgctcgatcatcaggtatcatatactctctttcgagcacaatacctaagcttcctccgacagagccatttttactcccctgcgaacgccctgtaccacccaaaagacgatcaagccactcaaatacgctgcatactctccagtctcttcgacagatgacaatttccgaccagctctgtacgtacctaataagcctctttgttgttcccaccctcggaattgaatgaagtcctcctcgttcccaccctaggcgtcgtcagcctcctatccatcagatagtttaatgacactgcccactctagctgttactgaaggttttacaatgatacaaagctggtcgatttccaatctgaatgtcacatacaagtctattaaccactcccggctaccgacgttc

SEQ ID NO: 334 - DNA, 5703 bp, Cryptococcus neoformans
aaatacttctacactgtctggttctgcgacgtacaacaattatacgtaccagacagatgtagagtacgtcccaggattattggaaaactcgagtggtaagtggtgtatcatgacaaggtcaggtttgcgctaatgtcgacaaaatgcagatggtatcaatcactatttgacgtaagtttattttgacggcattgagattcgctgtctgacatttatttgtagcgttgaggaagacggctatcctgctattgacggtttggtcgctgtgttgacagtgagaattaccgatcggcctgcatcgtaagccgctccttgcgacgtaaatttgacatcccagctaatatctatctgcagcagcagctttgccttccctactttgtcaataacacctgttgcccttcttgtgccgcttcttagtgctatcttgacccttttttaacccccatattgctttatctccctctgatggtggttttttttttgcttggattgaatgaccaatatctatccgctcgattctcaatcccattacctctgtccatcttacgtttttgccacttgacgctatacgtgaaagacgaaaccacttgtagattgtagtacgatgtcatttcatagatttttctccttgacatatagatgcgtgttaagacagccggtttattttagtgtggatactgggggtgcatggctttatgtacgtagatgcgaattttctcttggctgagtaaattgtctcatcatctgttgaaatgggacgtcatcgtcatctccgcgctcatcagcagtcattcttcatgcatcttcgccgctcaccgccgctcaccgtcgcgttcatgcaccgattctccatttagtcacagtattctcttgcattccatctcaaatacattcatataaattcctcttctttcttacaccgtgtactagatacgacctttggaggaagaatccctattgtcactttgaacgaaaacaaggaatacgaagcaaagcagcaatggcagctcctatgcaagttgacgaagccgtccctggtgactctagtaagctcaagccatatacgtcttctgatgcatgctaacgtgacttccctcttttagtcgatggtaagcaatagtttggtatacaatgcatagacaagtgctgatagtctggtgcgactgatcagagggcttgtactctcgtcaactgtgggttatgatctcttctgtaccaatagtgttgaattaactttcggattagctatgtgttgggccacgaaggtgagggcatcggataaggatgaactgagattgaacctgatgttatctgtagcgatgaagaagatggccacttccaacgttcttattgttggcatgaagggccttggtgttgagattggtaagctatcttgcttgcggcttgcattgcagcgagcaatcattgaagatacaaaagcttatatatttgatagccaagaacgttgccttggcaggtgtcaagactgtcaccatctacgacccttctgcagtagaaatcgcggatctcggtacacaattcttccttcgtgaagaggacattggtcgacctcgagctgaagtcaccgctccccgacttgccgaactcaactcttacgtccctatcaagattctccctggagcaggcgaaatcacaccggaaatgatcgagccttaccagattgttgtactcaccaacgccactgtcaggaagcaagtagagatcgacgagtactgtaggcaaaaggggatctattttatcgcagcggatgtgaggggtctattcggtagcgtgttcaacgactttggcaaggattttgcttgtgtcgaccctacaggagagaaccctctaagcggaatgattgtcgagattgacgaggtaggtcgctattttctgatcccaaaaaacatttgctcatccagtctctacaggatgaggatgctattgttacctgtcttgacgaaacgcgacatggacttgaagacggcgactttgtcactttctctgagattaagggtatggagggtttgaacggctgtgagcctagaaagatctctgtcaagggtgagcgttgtcgggttccttgatgacaaaaaaaaagctaacatttagataggtccttacactttctcaatcggcgacacccgtgggttgggcaagtacaaatctggcggtctcttcacccaagtgaagatgcccaagattcttcaatttgttagtgatgtgcgcataaattaaatgacattgctaatccgatgtacagaaaacccttaaagagtccctcactaaccccgagttcttcatcaccgactttgccaaatgggaccgacccgctgccttgcacgttggtttccaggctctttctgcattttacgaaaaggccggtcatcttcctcgacctcgtaacgccgccgacgccgagcaagtcatttctctcgctaaggagatccactctgctgctggaggcgaagacgtccttgacgagaagattctcaccgagctttcttaccaagctactggagacctttcccctatggttgctgtcattggtggtttcgtcgctcaagaagtcctcaaggcttgttccgccaaattccaccccatgcaacaaaacatgtactttgactcactcgagtctctccctgctacccttccttctgaggctgacgtccagcctcttggatctcgatacgacgggcaaatcgccgtcttcggtaaggcctttcaggaaaagatttccaacactcgcgagttccttgtcggttcgggtgctatcggttgtgagatgttgaagaattggagcatgatgggccttgccactggtcccaacggtatcattcatgttaccgacctggacaccattgaaaagagtaacttgaaccgacagttcttgttcagagccaaggatgtgggcaagttcaaggctgaaagtgcggctgctgccgttgcggacatgaaccccaatttgaagggcaagatcattgctcacgatgacagggtcggccccgagactgaaagtgagtatatccatgtgaatggcttgggcagtgctgaccaacggcagatgtctatggtgatgaattcttcgccaatcttgatggcgtcaccaatgccctcgataacgtgtcagcgcgtcagtacatggaccgacgatgtgtgttctactgcaagcctctccttgagtctggtactcttggtaccaaggccaatactcaggtcgttgttcctcacctcaccgagtcatattcatcttcccaggaccctcctgagaagtctattccctcttgtaccgtcaagaacttcccgaatgccattgagcacaccatccaatgggcccgagaagcgttcgattctttcttcgtcaatcctcctactactgtcaacctttatctttctcaaccagattttgtcgagaccaccctcaagtcttctggccagcaccacgagcatctcaaacagattgagaaataccttgtgaaggagaggcccatgtctttcgaggagtgtatcatgtgggccaggttacaatatgagaacaactatgtaaatgagatcaagcagttgttgttcaacttgcccaaggaccaagttaacgccaacggcactcccttctggtccggacccaagagggctcccaccgctcttgccttcaacattgacgatgtaggtcctggagcttatttgagcggataatagatctaattctagtatagcctcttgatatggagtacctcatcgccgctgccaaccttcacgctttcaactacggtctcaagggcgagcgagaccctgctttattccgaaaggtggtcgagtctatgaacgtccccgagttcactcctaagagcggtgtcaagatccagatcaatgaaaatgaacctgttgaaaacaacggtaacgatggcaagttctcatatcaatggcaaaagattgcgctaactggtgagatatagatgaagatgacattgaagctattgtttcttctcttccccctcctgcttccctcgctggtttccgacttcaacctgttgacttcgagaaggatgatgactctaatcaccacattgacttcatcaccgccgcttccaacttgcgtgcccgaaattatggcatcacccttgccgacaggcataagaccaaactcatcgcgggaaagattatccctgccattgctacaaccactgctctcgctgttggtttggtttgcttggaactttacaagttgattgacggcaaaaacaagcttgaggactacaagaacggtttcgtgaatttggctttgcccttcttcggtttctctgagcctattgcggcggcgaagcaaaagtatggcgagactgagtggaccttgtgggacaggtttgagatcgagggcaatcctacgttgcagcaattcctggaatggttccaggagaaccacaagttggaagtacagatggtttctcagggtgtttccatgttgtggtcctctttcgtcccttctaagaaggcgagtagacgctccgactgatgattctcgtaatgacatagctaatattaacgcttaggctgccgaccgaatgaggatgcgcatgagcgagcttgtcgaacacgtcggcaagaagccaatccctcctcatgtcaagaacttattggtggaggttatggttaatgatgagaatgacgaggatgtcgaggtgccctatgtgttggtgcacatctaaagtgccaatagaagggaaagatgcgaagaaataagaagttccatgtagagcattgtctttaacaaaacctagcagtgatgcagtgtgattctgtatttctcacgaacatggtggatgtacaacagtggtattattatacatggtattatccttattcggtagcttcctctggccgttctccagcatgttccgctttccattcctctgtctcccaaactgcaacgatcaagttagtcttcttgcctgattttgaacgaaaaaggctccactcacttgctcgatcattccttccactctcatccacatacttgctaggttgagccaagctgcatttcaagaatttaccgcttccttgataccccggtaattggttaagatcataattgtcaatggcttcttgagcatcggcagcggaggagaacgttatgaacgcgtaaccgcggtgttttttagctgtcatgataatcacgttagcatcaggctgcatttatattattggtaaatagaacatacggtcatgaggctcatgaggaatcttaatctcgatgatatctccaaaagtaacaaaggcttgtaagagttgttcctcgtcgacctctggagcaaagcctgagacgtaaactgaggacttcttgttgagatttgaggacgctgcctgatcagtggtcttgttcattattttggatttaccccgggcggataatgacgaaagggtagatgtgcgatacagaagttgcacgctgtcggctgctcataaggaaagagaacagcagatctagtttacgtaatcaaccccccgaaggctgctaggtatgacgactggtcctgagcgaaggaagcctcacattgtccgtttcgtctgcggcattcgcccatttttttcattctctccagctcattattgccaggcgcaacaacacaccatgtctagtagcattattaccaaacccaagccccacaggaggagttctgccatgtcttctatctcaatagaacagcc

SEQ ID NO: 335 - DNA, 5540 bp, Cryptococcus neoformans
gaatgcataaacggggataggcagagacgcaccagttgacttgtaaatcgctccactcaaacccgccgcagccatggcattaagtacatcatgcttccccctgatggcgtcaaaagaagagtttgagatattgtagaaaatagctttttgtacgacattagaggtaatatcaaaagagaaagtgcaagattaacccacccaaaacaccaagcgaattgcccataaaacttccccttctcgtacaaccgttaagaatactgttcagccggagcttgaaggaggggttgtttcccagcggtcttgacattccttcttttaagccccaggtgccaccgatagccaaacctattaacagcgaccaagtcagcttttcgccatgtcgatgtatagcatacacccaacgaaccagaaagataagtcgtccctgtgccaacacagagatcatccgtccagcccctgcttggcaaaacactggccgctccttcaaggtcgttcaacttttcttcatcgagctgtaaaaaatctaggttttcactcaatccagccaatgggtggagtctagcgggatcgaacgcggatccaaatgcatcaagggctgttggggcgggtgcggtgggagcgggtgcgggagcggactgggaaggaggatcggggatgaaggaggacccctgggcttccggctgggaagggacgacgtttgatctgaaggttgtggaactgaacagctcagcggaggccgaggattcttgaggggcggggtcagagcttccgaagagaccgaagatagccattgtggttatagagttggttaaagtacaaagttgaaatggacagtagtggaggacatggaatgaatcgaaagaagtagcaattcatcccgccgtttttcgcccaatttctccagctccgtgtcacgtgatctctccacctcctcgtccaccatctcgtcccaaaattgcatcgatggtctctggtcactccatttgtatcccacaacaccatgtcctcctctgccccaagcgacccgcctctctcagccagtagtctcaccgtaaagcataaaaagagatcctccaaagacaagagcggtactccttcccctcggcctagcaaaaccgctcgtctcgatcaagaggatggcgcagacgatcctatggacgtattggaggaagggaaggacggacgatcgagggatcccatggaagccttagaagacggagcaatgcccaaagttgaagacgagtatgaggttcaagctgaaagagaggtcgacgctgcaaaggactttgccgatgttactgcccctggacaggaggccaagttgaagcttgtacaccaggtcagccagatccgggaagcggagttgtaacaagccttctgaccaatatctacaggtccgacatcaggttgctattcctcctgattacccctacatccctatcaatcagcacaagcgcaaagatccgccagcccgtacctacaaatttgagctggaccctttccagtttgtgtctacttcctgtattgaacggaacgagtctgttcttgtatcagctcacacttcagctggtaagacggtggtggctgagtttgctattgcgacatgtttgaaggaagggaggcgagtggtctatacaagtcctatcaaggtaagtacagttttaggcgcatccaacaaaaacatttaccatcaatattgcgcaggcgttgtcgaaccaaaaattcagagaattcacggaaacatttggtgacgttggactgatgaccggtgatgtgactatcaacccagaggcgtcatgtctggttatgaccactgagattttacggtctatgctgtaccgtggttcggaagtcatgcgagaggttgcttgggtcattttcgacgaggttcattacatgcgagacaagggtgagtcatggataaaagaagcaagccagtagctgactaaatccttcgcagaacgtggtgtcgtttgggaagagacaatcatccttcttccccacaccgttcgctacgtcttcctctcggccaccattcccaactcgatggaattcgccgaatggatctgcgcaacgcatgagcagccttgccatgtcgtttacactgatttccgaccgactccgctccagcactaccttttcccagccggatcagaaggcatatatctagtcgtggacgagaaaagcaatttcagggacgacaatttccaaaaagcaatggcagccttagcgcagggtcaaggagaagacccggccaatcctagcggcggaaagggcaagaagggcaagaccaagaaaggcggcgcattaaagggcgaaacatccgacatctataaaattgttcaactcatcatgcgacgcaacctcaaccccgttatcattttcgccttttcgaaacgtgaatgtgaagatcttgctatgcaaatgcaaaaattcgatttcaacacacccgatgaagcggctaccgtcgcacaggtgtttgaaagcgctatcggttccttatcggaggacgacaaaaaactttcgcaaatcgaaggtatattacctttgctcaaaaggggcattggaattcatcacggcggattgttgcctattctcaaagaagtgatagagatcttgttccaggaaggtttgataaaggctttgttcgcaactgaaactttctcaatcggtctaaacatgcccgccaaaacagtcgtattcacgagtgtgcgcaaattcgatggtaaagatttcagaaacctttctggtggtgtaagttttcctcttttttgagctaggtccaactgacgatcggactgaaattaggaatatatccaaatgtctgggcgagccgggcgtcgtggtctcgatgcgcggggtatcgtcatcatgatgtgtgatgaaaagatcgaacccgaggcagcgaagggcatggtcaagggccaagcggaccgtcttgattcagctttccatcttggatacaacatgatcattaatttgatgagagttgaaggtgtgagccctgagtacatgctggaaaaatgcttcttccagttccagaattctatgagtgtaccagttttggagaaacgtgggttccttgataataagatcaacctggttcgagctgctgatgtcagaatgtcgaaaatatagaattgaaagaggctgaggccgagagggacgccatcgtgattgagcgcgaggatgaaatcgaagagtattacgagctccgacaacaactcaaagaacgtgggcaagatttccaagctgtcattacacaccccgcgtactgcctccgcttccttcaggccggtagacttgtcgaaatccgcgacggtgataaggatttcggatggggtgtagtcgtcgcttttaacaaagtcgtgaatcaaagaggtcgacctccaatttggacggaccaggatccacctcagaagcaatacattgtcgacgtgcttactcgagtcgaaacaggagcgtccatccctcgagaccgatcggcgtctgagatttcccccccttcaggtgccgacaagggtgaggtcgccatcattgcttgttctctctccactgttcagtctatcagccaataccgagtcaaccttcccaaagacttgcgcggtcaacaggagaagaacactgccttcagggcagtcaatgagatcaagaagcgtatgcctgacgggccacctttgctcgacccgatcaagagtatgggcatttcggataaatcgtttgtcgatttagtcaagaagattgcactattggaaaaccgacttcaaactctcgaaatcacaaagtctcctgagcttccacgtctctatgacctctacgaccgaaaacaaaagagcattcagtctgtcaaatccttgaaacgccgcatcaattctgtgcatgatatccttcagttagaagaactcaagtctcgtaaacgggtattgaggaggttgggtttctacaaccgccgacgacgtggtggaaatgaaggggcgtgtagcgtgcgagatttccacgggagatgagttgatgttgacagagatgatgtttggtggcacatttggtacactagcacccgaacagtgtgctgcattgctgagctgtttcgtctttcaagaaaagtcagaggcaaaggtgaggttaaaggaagagctcgctgtcccacttcgcactctccaggagacggccaagagaatagccaaggtgtcaaacgaatcgggcattgcgattgttgaagatgagtatgtgcagagcttcaaggtggaaatgatggatgtagtcttgcagtggtgcaaaggtgccaaattctctcagatctgtgaagtgagttttcatctctttcactgttattgtagacttctttccactgaccactcttgaaaagatgaccgacgtctttgaaggttccattatacgatgctttagacgattacaagaactcatccggcaaatggggcaagcagcacatgcgatcggtaacacggagctggaagaaaagtttgcaaagagtatggagcttcttgagagacccaacactgtcgttttcaacccttcgtgagtctatacattcccttttttggattcactggatcatgctaatgggatggcatagattgtacttgtaaaatgatttctttggttctagattggttttgtcatgcatactttgaattgggaaacaatgcagtgtggcctttaagacagaaggggacggagtttgataaatcacttagcgtagctgattgaatccctgagcacacaaatttcaagcctctactattaagagcaccactgatttttccaccatgccatatttccccatgtgaggtttatatgggagagtgccaaaggccaaagggtcttggctatttgcactttatcgtgccttgcgccgttaggggcctcccttagtgattgtgcagtttcgctggagtacaatataggaggtaacaactcgttcttctgccacacatactgtataatgtatccacgtcaacctagacgtagtgctgttggcggaaaccccttaggatgattgggataccgaaaaggctgaagaatcgtgcaatgaaatctttcgctcgtcgtaccagagggtacctgctagtgggctgtcacataataaagccaaatataagataagaaagtcttggcgtatcataagcatggttgatctcgagattagttggcgcaagtacataagttggtaaagatgtttatttgccatgcatgatccatttgacccttaatgcgttgacaatttcgtgtccaaaagtgcactctactttacctaaacaacgagggagcctctcaaccaatccgccaccacaacggtcgtgccaatcgcaaatacaagtaaacaaccgtccttgtacgtctgcgagaagaggttgagatatcgcgagccagtgaggagtgggcgagagatagagggaggaaggaccgggaggaaattctggagaagggaatggggcgcgggaggagactaggtgagaacgtatcagatggcacccatatatatgtatttccaaaggaaaaggaccatactttgaaaatca

SEQ ID NO: 336 - DNA, 5694 bp, Cryptococcus neoformans
actcaacttcaattgacgacctttcgtctgtggacgtagattccgatccctctctatcccctctaaaccaaatatctagactcctcagctggactggctttggcgaggaggatactcctagagaaaaataacctccttcatttttctcaccagcaccagcatcgaggccagctgcgaacgcttttgattccatcgattccatcacaagctgttccatacccaatgtttcacgtcgccaggactctagtgcaaatattgcccttggatgaagtgtccggaggtctatgcgaatttcttggatatatctctttggcggtgaggggtataatatatcatgatcatggtcccattccattccttcttccaacacttcattttcatcttcatcttcacctcgatctggttttctatcttgactttggtttcgagctttgatatcatcgatatattcatctgatagatcgtccttcggctttgatgtatatcctggtggaggaagatcgccgctcgagatcattcgctcatcaactctctcccagctttctggagagcggtatttgacgagaacatcttgcagccgggctatgttctctgcggaagtgagactcttaagaaaagtcgcgagtggcaggagagagatggtatgcagggtatcggaagaggagaatgttgaagttactgccatattgggcgagttgcataatgaaattgggaatgaaacctgggcggattgagttgatatttaatcgacgcgccaagtcgacagcgcgccttagacattggaaattgacgtcatcatttcctgtccaagactattatcggctccgagcaaagacttttgttctgcgtccgccgagtctgtattcgagacggaagacatttcgagtctgtaaatataatagacgtcttgaagcaactttctagccagtaaaaatcaattcgatatgtccaatatattcgcagtaccacttcagaacactcgcgtaagctcgtatattcaatgtttcctgccgttttctcctgctcatcaactgtccagaacgtcacaatcgttgcccatgtcgaccatggcaagacctcttttgccgattcgctcctatcctccaacaacatcatctcctctcgaatggctggtaaacttcggttcctagactctagagaagacgagcaagaacgaggaattaccatggaatccagcgccgtctcgcttcgatttgacatgactcgtctttcgcccgatggtacatctagtatccaacagtgcatttgcaacgtcattgatactcctggtcatgtggactttgccagtgaggtttcaacagcgagcagactgtgtgacggtgcactcgttctggtcgatgtgtgggaaggtgtggcaactcagacgatcgccgttcttcgtcaagcttggatggacaagctcaagccattactcgtaatcaacaagatggatcgtcttatcacagaactcaagctgtcaccttcagaagcttatcatcacatttcacaattgattgagcaggtcaatgccgtcatgggttcattctacgcgtctgagcgaatggaggacgatttgaggtggagagaagaaagagaaaagcgacttgcggcaaggaaagagcagcaaggcgaagatcttgatgatgatgaagagtacgaggagaaggaggatgaggatatctattttgctccggacaggggaaatgttctgttcgcttctgctatcgatggttgggcgttccgtctgggtaaatttgcccgtctttacgctgaaaagctcaaaatcaaagaaggaaacctccgtcgagttttatggggtgattggtatctcgacccgaagaccaagagagtcgtggggcgcaagaagcttgctggacgaaacctcaagcctatgtttgtccaatttgtactagagaatatctggcgagtctacgatacagtcctcaacgagtagtaagttcgagctgttttatgacccaaaccgacatatcctaatacagatgctagcaacccggatgcagtccagaagatcgtaacagctctcaacattcgcattacccctcgcgatctccgatccaaagacacccgcaacctcctcaacctaatcatgcaacaatggcttcccctctctaccgccactttccaatccatcattgaagtcatccctccacctccctctgcccaagccatccgccttccgtacatgctccacccagaaaaggcaaaagcagctgccgctagcggtggtttgaaggctgaaaacgagctggagagggggttgtacgagtgcgaccagggagaaggagctgaagtggttgcgtatgtgagtaagatgtttgctgtccgcaagggggatttgccagagtacaaaccgaaagaaatgacggctgaggaaatgcgagcgagaggaagagaggagcgagaacgacgtgcggctttagtggcggagcgacaggctaaaggtgaagggcttgatgggcaaccgttgcctgaggaccttgctaagccactagagtcactttcactcgagaacatccaacccgctacttcggagaaaccagccgtcgacgatagcgactctgaagttctcctcggattctcccgaatattctcctctacccttcaccgcggtacttccctcctcgccattctcccaaaattcgactcttccttgcccccttctcacccacacaacattaaacacactgtccccatcatcgcttctgatctttatatgatgatgggccgagaacttgtgtctgtcgacagtgttccagcgggtcatgtgtgtgctattggtggcttgaacagggctgtacctcgaagcgcgacattatgggcgcctgatgcaaagggcgttgaggaaggatttggaaaggaggctttggtcaatttggcaggtgtaggtgttggagcgaacgccattgtacgagttgcacttgaaccagagaaccctagtaagtctatttcgttcgatacttttcaatccatgtgattttgacgatccctgggtaggcgatatgccaaagttaatcagaggtttacgaattttgaaccaagccgatccttgtgcagagtactttgtacaggaaagcggagaacatgtcatcatcactgctggagaattgcatctcgaagtacgtcctctttttcccccttgatatctctagtgatacgattactctattagcgttgtctcaaagaccttcgtgaacgttttgccaagtgtcctattcaacagtccgcccctattgttcccttccgagaaaccgccgtcaaggcaccggacatggcacctcccaagactaccggggcaccccgaggtactattaatggtacagtgatcaacggtcttgtcaagttcaggttgagagctatgcccttgccagagggtgtcgaaacctttttgcttagccaacaaggtgctatctctaagatgcttgtccgtgagcgcgatggcaaggaaggtgaagaagaaaccgatgtgcaggagggcgctgaaggacaaagtggtgagggtgaagtcccagaaggtcagcaggaagcccgtcaactctctcccgaagagttctggactgagctcgagaggttgctcaacaaggccggcggtgattgggctggagccgcggacagagtatggagctttggacccaagagagtgggtgccaacttattgttggaccctgttggcaccaaacatctcaggttaaggcgacgtgaacagctcttcacccaagcgcgggcacaaggtcaatcagccgatgatgcccttctctccaccgatcatgctgttgctgcggatcaactagcttctctcagctccatcacctcctctgataatgaagctgcgcgagctgaacttcgtttgctgagagattacgagtcatctatcgaaactggtttccagctttccactttccagggcccgctctgtgctgaacctgtggtcggaatggcttgggttgtggagagtgtggagcttgataggcaaggaatggagtcggagcaaggaaaggggcaggtggtgggtggagcgctcatctcggctgtgagagatgcgtgtaggcaaggcttgttggattggagtccaaggataaagctcgcaatgtacacctgtgatattcaggcatctagtgggtctattcgccctctttactctgtgatgaaaagtttcgctaatcttgattgtagctgatgtactgggcaaggtctatggtgtcattgccaggcgtcgaggaagaattgtctcggaggagatgaaggagggaacttcattcttcactattcgagccatgttgccagtggtggagagtttcggtttcgccgatggtgagtccagctcttactgtttcatttacaatcccctaatcaaatacgatcctgatagaaatccgaacgcgaacttccggtgctgcctctcctcaactcattttttccggctacgaaacccttgacctcgatcccttctgggttcccaccacccaggaggagctggaagatcttggagagaaggctgataaggcgaatgtagctaaggcctacgtcgatggtgtgaggaagaggaagggtatgtttgtggagaggaagattgtagagtttgcggagaagcagaggacgctaaagaaataaatgtaccaagtcgtgaagacaagtgcagaaggaagcagagccaggtcgaagacatagtacaatagtatgttgcatacaagtttttgatatgtgatgtcttttttacagcactcgatgctctctaccctctgattacaggtttacatgtacatattgcctccaaaaccacctccgcccccgaatccaccaccaccaccgaaccttccccccccacgacccccacccaacggcccaccaattccattaccgcctccaaatcttcccagatcaggcccaaactccccaggaggaggcatctcatctccccacctatccctatcacctctccccacacccccaaggggattgccgcctactccagggaagatccctccaccgcccactccatcaggagaggggcctacaggatcccacctcgatcctggaggctggactgaaccacccggcccatcaagatccgggtcgcccaaacctcgaccacggcgagaatcaaacatgggatggttaaaatccatcagcatcccaccgccatctctgttaggattgaacgatccaggtggacggagggacgcaagaggatcgaggtcgcggtgtccgagagaagctgggttccggccggatgggttgatgttgtttatattgtccagaagtgggtcaccagtccttgggaccgaaggacgcgcaggagatggttcgctcccttgtggcgctccagccggaggaggaccacgaggatcagagccggatacctggctgtaccctggaattgagagcccgggcaacagtcttgagatgacgtcgcgactatacttttcaacgaatgtcttgacgctgaaaaggccctcggtcagcttttggtcagagatcaactgcaagaaaaattcgcttactcgttcattgatttaaacccgactgcagtagcagaagcatctggtgattcttggttagaagctgatgaagcagtggccgagctcgggattgggaacagcccggaatctactaattcagatctgacaacagacagattatgtggttcaccatcctttcaaacgacacaggcataag

SEQ ID NO: 337 - DNA, 5693 bp, Cryptococcus neoformans
aagcaggcgagcgaggactgcaaaggcaaagccaaaagcaaagcaatcacgaacacgtaccaacgcagagtctgacgaaacgcaaaaagggaacttcctgtcggagaatcgaactccgatctcccgcggacgctgtagaactgaatcctccagtgacaagcgagcatactagccgttatacgaacaggaattaatgatgaactggtctttgataattgataacagacaacaatgtaactggtatggacgaaacgctccgacagacgcagttacgtacctccctgtgatagcgagcttcgattcaatagcgaatgcagtatttcttatttatctaattttcttacttgactctcgtttggttgatcgatgccgtcaacagatactcatttattccattcttttcccgttggcggttcaactttttggttgatattattagatggactctttattttacgtacgttctatcatcacttttcaaccctactctacgtacaccctagaggttcttccgcccttttccaatcctctatatcccctgtctcacatatgaatgagagctgccagtacagttaataatagagaggacggtctatagccataggcatgcaaagagaggcgcgttgaaaatgaagaaataattcgaaattgctgtttttagaaagcgctctttgttgcttgtggtggtggtggcacttgttgatgagtcggaggtcggcgttgttctccgccgttgcggatcttttcgaaggaagacgagattcaagttcaagttattcctctatatacgaatactccccttctcattcctccccacctcttcatcccattttcagccacagaggagcgtctccacacaaggttgcccctcagcccaaaaaaattgccgccacgattcgcgttactgctctttcgaacgctttcaccacccgcgcaagaccactcttcagagccccgactttaatcaactatcgcacaatggccgccagcgtaaaccacaatgcgcctgccggggctgtcgtggtcatggaaaaggtgggtatattggtaatattgattaggaagaggcactaagttgtcacagaccgacaaaagagactaccttatcgacctcgaaaagactgcccaggcttcttgggccgagcagcacctctttgagaccaacccccctcctcttcctgagggtgtcagctcttactctgaattcttcgcttccggcaagtctatggaggaggttcacgagaaaaaccccaaatggttcggtacttttccttacgcctacatgaacggttctctccatcttggtcacgctttcaccatcagcaaggtcgagtttgccgctggttttgagaggatgcgtgggaagagggtcttgttccctgttgggtaccacgccactggtatgcctatcaaagtgggtgtcttgactgtccagcaaggtttttttatggacattattaacgattgtgatttaggccgcctctgacaagcttatccgagaaatggagatgttcggtgaggactttgctcgctacaaggaggatgagcccgaggaggttgagcccgccgctgctaccgctgcccccgccaagtccctcgagtctaccgatccctccaaggccaagaagggaaagctcaacgccaagtcaaccggtctcacctaccaattccaaatcctcgagctcatcggtgtcccccgtgacgaactcaagaagttcgctgatccttcccactggctccactatttccctcctatcgctaaacaggacttgagcggtcttggcgccagggttgactggaggaggcaattcattaccagtatgtgatgtcgttaaacaaggcagagtgatgaactgacaatcccataagccgacgcgaacctctactacgacagcttcgtccgatggcaaatgaacaagctttacaagcaaaaccgtgtcaagttcggcaagcgatacaccatctactcccccaaagacggacaaccctgcatggaccatgaccgtgccagtggtgaggctgtaaaccctcaagaatacactgctgtcaagatggaagtgctcgaatgggggcctactgttcctgagggggtgaagaaggccgtcgaaggcaggaaggtttggatggttgctgctacgctccgacctgaaactatgtatggtcagaccaactgtttcgttggccccaacctcaaatacggactcttcgaggcttccgacaatgaacttttccttgttactgagcgatcagcccgtaacatggccttccagggtatctttgaccgacccaagggcgcttgcaacaaggttgcggacattattggttccgatttgctcggtaccaaggtcaacccccctttcggtctcgtcaaggaagtctacgtcctccccatggagggtgtccttgccaccaaggtgagtgctatctattatataaatgacatgtgctaatttttttggggcagggtaccggtgttgttacttctgtcccatccgactcccccgatgactaccgaacccttatggacctccgtaagaaggccgagatgtacaaaattaagcccgaatgggctgccatcgaccccattccagtactcagaactcccaaatacggcgatatggccgccgaggtcctctgtactgagctcaagattcaatctcagcgtgacaaggacaaacttgccgaggccaaggaccttacttacaaggagggcttctacaacggtgtcatgaccgttggtgactttgcggggactcctgttagtgaagccaagcccaaggtccgagagcagatgatccaggctggtttggcttgcccttacgccgaacccgagagtgaagtcatctctcgaagtgccgacgtttgtgttgttgcccttgttgaccaatggtacctcgactacggagaggacggctggaagactcaggctttcaagtgagtcctttgtcatatcaaacaccggtaaaaaccatgctgacacaatagttaggcttctcaataagctcaacacttaccagaacgagacccgacacgcctttgagggtgtcctcaattggctcaaccagtgggcgtgcgctcgatcttacggtctcggttctaagctcccttgggatcctgtctggcttatcgagtctctctccgactccaccgtctacatgtcgtactacactgtcgccaacctcctccacgaagacatgttcggcaagaaccccggtccgcttggtattacccctgagcagatgaccgatgaggtctgggagtacgtcctcgctgacggtcagctccctgccgacagccctgtcgatgccgagaaggccgctcagctcaagtaccatttcaactacttttaccctctcgacgtcagatcttccggcaaggatcttatccctaaccacttgacgttctgggtctactgccacgctgctctcttccctgagaagcactggcccaaggctgtcagggccaacggtcatttgatgcttaacggaaagaagatgtccaagtctaccggtaacttcttgaccatgaaggaggctaccaagaaatacggttccgacgcgatgaggttgactctcgccgatgccggtgacgacatcaccgatgccaagtgagtaatcatgttacagtgtagttgcgattggctaacgtacagctcagcttcgaggagactgtcgccaacgctgccattcttcgacttcacacctgctccagttgggccgaggagatgaagtctaccaaggaccagctcaggactggtgaatggaatgactttgaccgtggctttagggcagagatggatgctctcatcaaggaggcgtacggcgcctttgagcaaatggagtacaagcgcgccctcaaagcgggtctctatgactttgagaacgctcgaaactggtaccgaatggtgtctgaccccgtcaacagcggctccggcatgcaccgcgacctcgtcttcgcctggcttcgcgcccatgtcctcctcatcacacccttcactccccactattctgagcacatctggaagaacgttcttggcgagacttcctccatccagaccgctcttttccccgagccttcaggccctatcgaccccacagtcctcgagcagaccgagtacctccgtggtgtcgttgatgctatccgatctgccgaggcgcaggctggtaagaagaaggggaagaaggctgctgctgccgtctatgaccctagcaagcccaagaaggtcaggatgtacgttgccaaaaacttccctgaatggcaagaaaaggctatcggtgtcatcaagaaccaggcctgggatggtgagaaagtggacgacgttaagctcaggaagggtttggaggaggttggtttaatgaaggacaagaaggtcatgcctttctgccaggctttcaaggtgcgttcacctcttttctttctagccgctgaaggttgctgataaaataaacagaggaaacttgctgttaccggtccctctgcctttgaccgaactcttcccttcgatgagctctactctctcaagatgctcgcccctctcatcaagtcttctctccgattcgaggaaattgacgtgctcagtgtggaggaggctagggagatcattgagaaggatggtgagaaggaaggatgggccaaggaaaagattgaggttgccgagcccgctgtccctggtgttcagttctggaacgtatagatggtaaagagatgataagtgattttggtcgtcatgcatctggattgtttgggtttggctagcccatgggggtttggactttttatcttacgtctgactgttttggagaaaaccgttgatttttaccgccactttatagaaaagacagttactacgactggtgaatgatgtccaccaatgcctgagtgaaatttcggcataaaaagtaaacgttcgagtgttatacgattgggcccggcgaaaggacggagaaaatgaggtgcggtagaactgataagattgagattttgaaattaacagtttacccgatccttcaattagagatccggcctgtgattcaccatgcattttattttgatcttttgcaacgctttctatatttatatttgccctattttttgtcatctcatcgctgtttacgtcttcgtgtactttacgtgtttaatccctttcaagatgtccaagaccaccaccactaccacccgggccatgctcttcgacatggacggtactcttctcggtacgctcttcttttgccgctcatctggctatgcaaaactcactgacaactcgaaatcactctagactctactcccgccgtgttggccacttgggagtattttgccaaggagtatgatcttgaccttcaccaggttttgcgtacttcccacggagtgagaactattgacaacatgaggaaatggtgcggaatcgaggaccctatccaactgagggtgagttttagctacagaagcacggaacctacttcaaaaacttgagcgtggttgattatttgaacaggatgcaaccgagacctttgagagcatgattgtcaccgaggccaagcaactgcaggctgctggcaaggaaggccttatcgcccttcctaatgtccttccccttctcaacaagctcaacgcctcccccatccctgtctgggctattgtcacctctgcaaccactgtctatgcctctgctgccttgccaacagctggtatcc

SEQ ID NO: 338 - DNA, 6004 bp, Cryptococcus neoformans
gatagatccaagccccactactcagaccatcttgggctatagcccctacttcttgtacctgacgtcgggctgactcggtcgctgttccacccggcagtttcagtcgctgtgatcgtttgcgtgtctgagaagacgacatggtcgagagtttgaggtgctagcgtatgtcgagggagtattagtgagaatgaagagcaaaggcgttgttcaattcaatgattcaactttcccctagtgtgcatgttagcggctggaacttcaccaatgaatgccttttatatgcaacataatataagtagcttttagtagcttacacatattcgttcgctggtgtttggtggagagagtcgttataggtatatatgcatgacgagcatgacgtcagaggagtagggtggattttttacgtaacagtactgatttacaaagaggtgacgtgttattgttgttgtttcttttcttcgtcgccgccgccgccgccgccgttattgctgctgctgcttcttgcgtgttcctgctccgtcgccgccactcgccagcaacggcaaccgtcacgacgagcaatactactatcaaaacgatattcctaaaaacccgcaattgcttgcgctcaagctgatcggtcagccaacgacactcccaatttctacttatcacctagactacccaccgaaagtcgccgattcctataattcttttccgacttcagaagctgcttttatgatgtccactgataaagagctgtataagctcgagcttctctcgcttgtatcgaaggtgtcccaggagctcttcaaccacactaagcttcaagacaaaaaactagctgaatttgtgatagcagtaggtctctcctttctctttcctctgtggaggttctgactcattacagcttcacgaacaaagtaaaacaactgaagcgttccagaagaagctcaatgagatcggcgcagactttcccgaatggtttgtcaagaatctcgacagactgatcgttaccatgcaccccaagtataagaggaaagcggccaagatgaaagcctcgaagcagtcaggaaagtctgacgatgggcaatctgtcatggaggagcagaagcaacttcaggcgagaaagtttcccgggttgtccatgcctgaccaagattggaagcctgccgagaaatatgtcgacgaaagggccgcaaaagaaccgcacgagacccttccggaatcactttcgaccagtgatactatggcccagttagagtcgatcgcgtctcgccgaaatagaccggcggctgaggatttcttggacggggagcctgctgcgaagaaattgcggagtgccactagcagtggtcatgacgggtcgtcaggacgacggggcggatatgaaggaggcagctttagagattcttttagacatgggcgtccgacggttgatgagaggcccgtactctacaagatctacaatggcactatcgcgaatatcaccgattttggggcttttgtaactttagatggcgtagaaagaaaaatcgatggtaatcaaaggtcaaatgaaggtaagttatcccaatcgtgccttcccatgcttgatttgaactgacactttcaggcttaatccatgtatcgaatattacaaatggaagagttaactcaccccgagacttccttaaacggggtcaacgagtcaaagtcaaagttatggctgtcagtcctaagatcggtctaagtatgaaggatgtcgatcagaacactggtgatgatctttcgtgagtgcaagtgtatgctgcacctgctttttgttgacttagttataagcccacatcttactgtcaagactgctgaagaggccgcagtgcagcagcaaagcatgtcatcttatgcagctagtggaagtaacagcacccccctcttagcagttgatgagcggcagcgatctagtgcaaagagattatcaagtcccgagcggttcgagattaaacagctcatagccagtggggccgtatctgcagcagatgtgagtattcctactgtacgcgagaataatgggctgatgggattgcagtaccctgatcttgatgaagacttcagcactaacgtcgccaatcatgagattgaagaagacattgatgtcgaagttaatgaagtcgaaccggcgttcttatcgggccagaccaaagtcaccctggaactctctcctgttaaaatcatcaaagcaccagacgggtaatgttcattctgttcgatatacacgacaattttgttgatcaccgttttagctcacttaaccgttctgctttagcaggcgcttcattggcgaaagaaagacgtgatctcaaacgtttggaagcgaatgagcaggccgacgcagagaccagagagatcaaccagccttggcttgatcccatggctaaccaaaacgagcggcagtttgcatcagacatcaaagggaacctgcttggccaaaaggccgctcaaatgcctgcctggaaagctgcaaataaagttgtgtcgtatggcaagatcacttctatgagtatacaagaacaaagacgcagtctgcccatctacaaattacgggagcagttggtcgccgctattcgagatgtgagtaccttcttgttcactttcagtcaatcgaatactcatgtgcattcgtagaatcaaattcttgttgtagttggagacactgggtctgggaagactactcaaatggcgcaatacctcgctgaagagggattcctcgaaaaagggcgtttgggatgcactcagccgcgaaaggttgctgctgtttctgtcgctaagcgtgttgcagaggaagtgggttgtcgactcggggctgaagtcggctacactatccgttttgaagatatgaccagtcctgagaccaagatcaagtacatggtcagtcgtttcagcttttactttgactatgactaacttcctatgtagaccgatggtatgcttcttcgtgaattgctggttgatccggattgctcgaaatactctgtgattatgcttgatgaagcgcacgagcgcacaatcgcaactgacgtcctcttcggtctcctgaaaagtaggttaagctcctgatgttactcgccatgatgctaatactgttattaacagaggcttgcaaacgacgcccagatcttaagctaatatgtacttctgccacactggatgctgccaagtttgcgacctacttctggggttgcccaatctttaccattcctggccgaacataccccgtcgagacactttatacaaaggagcctgagcccgactacctggaggcctctctcatcaccatccttcaaatccatctcatggaaccagcaggcgatgttcttcttttccttacaggtcaagaggagatcgatacagcatgtgaggttctatatgagcgagtcaaggcattgggtcctcaagttccagagcttctcattttaccggtatatgctgcacttccctctgagatgcagtcacgcatctttgagccagccccacctggtgcacgtaaggtggtcatcgcaaccaacattgcagagaccagtatcaccattgatggcatatactatgtcattgatcctggttttgcaaagcagaatgcttatgacccaaagcttggtatggattctttgatagtcactgtgggtcttcatatcagttgtcatgaacaaactaatgttgtgtagccgatctcccaagcgcaagcacgtcaaagagctgggcgtgccggccgcacgggccctggcaagtgctatcgtctctacacagaggtcgcctaccgtaatgaaatgttacccaacccaattcctgaaatccaacgaaccaatcttgcatctactattctcactctgaaagcaatgggaatcaacgatcttatcagtttcgatttcatggatcctcctccagcagcaaccatgttaacagctttagaacaactttatgctcttggtgccttggatgatgaagggctgttgaccaggattggtcgaaaaatggcagattttcctctagaccctcctttatccaagatgcttatcaaatctgttgattatggatgttctgaagaagccttgacaattgtggctatgctgcaagctgggggccaagtatactatcgacccaaggacaaacagactcaagcggacgccaaaaaggctaagtttcatcagccagaaggtgaccttcttacattacttgtgagtgatccataatttaattacatcaggcatggagagtagtactgaattaaagttgttaggctgtctataatggatggaaaaactcgaaattcagtaacccatggtgcttcgaaaactttattcaaacacgagccatgaaaacagcgcaagatgtaagaaaacgtgggtgtaaaatttttgtcaatgttattgttggttatgaagctgatttttttaatcagagttgattggaattatggatagatataaacacgatcttggtaggtccttatcgccatcaaagcctcttatgtgtttacaactctttatagtgtcatgtggtaccaattacaaccgagtacggatggccatttgctctggattcttcagaaatgctgccaagaagggtaagcttgtctttttcatggtgatgtttgttctcatgtgctgacgatctgttccagaccccactgaaggttataagacacttgttgagggtacacctgtcagcattcatccctcaagtgccttgttccagcgaccccctgaatggtgtgtgtattatgaactggttcttactgccagtaagtctaactgtactaaggtatttcaataaatgctcatcagtttcacagaggaatacatgcaccaggtcactgttattgaaccaaaatggctttctgaagtggcaccaacattcttccgtattgctgatcaaaacaagattagcaagcgtaaggcatctgagaagattgagcctctgtttgatcgttttgctgcagataaagatgactgggtatgtatgttctggactggtgatccaacatgagctgatgtaaaaacctgcagcgtctcagcaagcagaagaaagcagctcgctcttcacagacttttggttgatccatattccctatcatatttcaaaaatacaattacatcatttctctttagctttctggatccaagggttccaaattagtaaacaaaagatgcattgccaaaatgccattgaaatttttttgccttccaatggctctggtgcagctatttgttaatctcatttctcaaaaacatggggtgacagacaaggtagtatcagactgaggctccatcttctagatctgaatggtgaagagtttgctaagcttgtaggaatgtcaacagtctattcaccaccttatcatccacagagccacagttggactgaacaagtgaaccaacaatttgggcaatatctgagcctttaacatcatacaacatggatgattggagccagctcctaccatgcgctgggttcacttaccacaacttacacagccgaacaacaaggttatcaccctttgaagcactgtatgattgtaatgtccatttctgatttcacaacaattaagggcaggctggaagctgccagagagaatcatgtcaattacaagcatttgagaggcataggggataacagagagtgcatgaggcaggctaatagacaatttgcaatgcagcctaacaaccatcatctacttccccttcactcactatgagtgaccagatctttcttagcaccaaaaaccttccacttgaacattaatctcccaaacatgagactcaattcattggtccctatcttgtcatttgttgtctgaaatgtcatcaaactagacctgtgctcaactgttcacaccagtctcatcatttgtcatgagcctgcaactatgacctgtaaggctcccagcaagctgacagagcctgcacagtcagtttcatttggttgtgaacacatgctggttttattttccatttttttattttttatttttttgctttcatctctc

SEQ ID NO: 339 - DNA, 4999 bp, Cryptococcus neoformans
gcactccgagattgtagacataccaggtgatctgtgcgtaacgtcagcaattgttctaatgtccgcttccataacagctctctaatagtcatctaaagagaatctaaataatcatgccaactcacatttttatgccctctgaagtgatgtaacaacctcaactctctcagacaccgctttgtcaagatcttcttttgaaacacattcgttacctttttcaccgcgcatgtttctcccgtactagagtttctcgcagaagacacgcaaccgtacgctccttgcccgagttctttgacaaactgccatggctgctgaagaatgctacaaagaaggtcggatcaggatgtgaagtgggaatcgagaagtggaggcagtgacgtactagacgttgttgggtgtctggaaaaggtgccggggagtgttgtccatggtgaatttatgtaggatagttgataggacgagtcgtacgggtgagcaagacaagaaggaaaagtgaaaagtgaagaaacgggatctggggtcgtccgtcgaggagaamcacgaactttcacagccatgcgcaggtggaggcagtcaattatgtaaacaatggcacgcctagttccaggcatgccttactgtgttattttgtgctctccttttcaactaaacaggcgcgcagcttactcaccaccggccgtccccgtccaccaaaatatttcggccatttcgcatcaacatctgcgtcttcaacatacttctcttcacactcccggcatgcctcctaaagcccctgtcaagcgcacggcggcttcatcctccactactgctcctcgaaaagctcctcgcgctggcccatctacgacaacagcaaccgcaaagcggcccgccacaacttcctcaacagtagctaagggcaaagcgccagctcgaccgtcggcatctacacaggtcgatgttaagcccaaaattgaagatactaggggagaggaggaatgggcagatttaatgaagcagcagtatggcgataagaagggcgctgattggtattccaagggtgtgaagactgtcgaagcaagtattctccctgaatgatatagacttgaactgatactgttgcaggataaatggcaacttctcccagcttttctcaaagtaaaaggccttgtcaagcagcatcttgactcctttaactattttgtcaatgtcgacatcaaagctattcttgcggccaactctcttgtcatttcagatatcaaccccaagtactacatccgatataccgacatccgtgtagggcgtccagcacgacatgatgctaatcaagtggcctctgctctttcgccgatggagtgtcgattgacagattccacatatagcgcgccgatctatgtggatgtggaatacatgggagaagaaaagaggagcaagcagaggggtgtgcagattggcatgttgccagtaatgttgaggagcgatttgtgtaacctcaaagggaagaatgaggcggagctagcgaggatgggagagtgcccgatggatccgggaggatatttcgttgttaagggaacggagaaggtcatattggtgcaagagcagttgagcaagaatcgtatcttggtaatgaaggataagaaggatgaggtgatggctgaagttacatcgtgagtcattcgttcttcgtatctctatcgccatggtcagaagcttcaaccagactgggattttggtcggattggtcgagccagttcagtctttttgaattgcggccagtcccctgatcaaaacgaatttgttcgcgccgaaccagttggaggcttggtttttaaaaccacgctaattcgctttgggacacaatggctcgttgtaatgctgatcatgcacagttcaacgcacgaccgagttgtcaaaacctatgtcgtcagtaaagccaaccgtctctatctccggcacaactctttcaaggaattcatccctatcgttatcgccctcaaggctatgggtctcactgcagacaaggaaatcctccaactcatatgcggttccgacgaacgataccaggaggcctttggtgtttccctcgaagaagctgccaaggagaagacctttacgcgccgtcaagcgctcgaatggattggcgccagagtatctcccaaccaggctaaggatgacagcgggtccaaccagaagcttaccccaagcgatattgcccagcaggctcttgctgcaatggttcttggtcatgttcctgtgcgaaacatgaacttccgacccaagtgcatctatcttgccaccatggcgcgaagggttctcatggccatgattgacgatcatatggttgatgatcgagattacgttggtaacaagcgtctagaacttgccggtcagcttttgtctttgctctttgaagattctttcaagacttttaacagygagctcaaaaagcgaatggacaaaattctggaaaagcccaaccgtgccggtcctttcgatgccgggactctgattcgtcaaggtggtgatcccatcactcaggcgtttgtccgttccatctccaccggcaactggtcgcttaagcgattccacgtcgagcgggcaggtgttacccatgtcttgtctcgtttatccttcattgccgcattgggtatgatgactcgtatctcttctcaattcgaaaagacgcgtaaggtctctggtcctcgtgctcttcaaccgagtcagtggggtatgctctgtccttccgatacgcctgaaggtgaagcatgtggtcttgtgaagaacttggctcttatgacccacattactacggacgtacctgaaacgcccttggtcaagatggcgttcatgcttggtgttgaggatatttcccttgttaccggtaatgaactctaccggcccggagtgcatatggtgcaggtgaatggtacgctcatcggtgtgaccaacatggcgaaacgatttgtgagacagtttagaaagttgaggcgagctggaaggatgtctgagtttgtgtcaatctttattaaccatcaccacaagatcatctacattgcaagtgatggtggacgaatttgtcgaccgatgattattgttgaaaagggaagatcacgagtgacaacggagcatgtgaggcttttgaaagagggcaaagtcactttcgatcatttcctccgagcaggcttggtggaatacctagatgtcaacgaggagaatgactctttcatcgcgtgttacgaaaatgagatcgaagaaggaacaacgcatctcgaaatcgaaccatttactattctcggtgctgtcgccggtttgattccttaccctcaccataaccaatctcctcgaaacacctatcaatgtgcgatgggtaaacaagctattggcgccatcgcatacaatcagcttaaccgaattgataccttgctgtatctcatgacataccctcaacagcccatggtcaagaccaaaacgatcgagctgatcggctacaacaaacttcccgccgggcagaatgctacagtcgctgtcatgtcttactctggatacgatatcgaagatgctttgattctcaatcgtgccagtgtagaccgaggttttggtcgatgtcatgttctcaagaaggtgacaacgccaatgcgaacgttccataacggttcacatgaacgtactgcttatcctgaccctcctcctcgacccgacgcatatacttttgttgataaggccgatggcatgaccgctcccggtgctactatcaaccaatacgacgtgatgatccatcgagaaacccctgtcgatactcgtggtggtggtgcggacacccagctgtacaaaccaatgcctgtcacccacaagacacctgaaccgattttggttgacaaggtgatgctaacagagggcgaggatggtgcgttgatcaaaatcttgacgaggcagactcgaaggccagaactgggtgacaagttctcttcgcgacacggtcagaagggtgtttgtggtttgatcgtgccccaggcagatatgccattcaatgatcaaggtattgtacctgatatcatcatgaatcctcatggtttcccctctcgaatgtatgtacttcctttctgtggttcagaagcaacgctaacgaccatataggactgtcggaaaaatgattgagctcctttctggtaaagccggtgtcgtcgctggtaaactccaatatggcactgcatttggtggttccaaggtcgtcgacatgtcgcagatccttatcgacaacggtttttcgtatgggggtaaggatatgttaaccagtggtatcaccggtcagccgatggaagcctacgtctactttggacctatttattatcagaaacttaaggtatgcctcttgcatctcgcccaaaccatcagggactgacaagaatgatgtagcatatggtcatggacaaaatgcatgctcgacctactggtccacgagctaatcttactcgccagcctactgaaggtcgttcgaaggacggtggtctccgtctaggtgaaatggagcgtgattgtttaattggttatggtgccactcagcttttgttggaacgtcttatgatctcctccgatgcgttcgagactcaagtatgtgagagctgtggtatgttgggatacaataactggtgtcccaaatgtaagagtggtaagggggttgtagggttgaccattccgtatgcggccaagttgttgatacaggaggtaagttttcgttttcctagtaaatgacacgatgaaaactgacaaacgaaacagctgatgggtatgaacattatgcccaagctttgcttggaagacaccgtctagaggtgaatttaggaaggacgagcagttttcatgaatctacggtttatattatgcatgacattatgttttgaaatatctcgaaggcctgtcggttatggagcagtgaggtgtggccttcatggaaacatggtatgatgctaagttgttacatgattatacaatgtgcgacagattataatggtctatgctgtgtata

SEQ ID NO: 340 - DNA, 5796 bp, Cryptococcus neoformans
gggaaacccccaccacgaaaaaactccctggcctgttggcttcttttcagattctttgtctggggataaaaaaaatggggggtgggggaacctcttgtctgtcttcaggcctgtgaggaaggtggggaggaagctggaggagaaaaaaacggacgagaaaaaaatgagaaaacacggcacaaaggaaaaaaaagggggggaacgaaattgaaaacctggacgggttggcttagggcttgatgggggggggtggtttggcatagctcacgacggagtgtggccatgtcgggaccgttaaccctgggtgaacatctgagaaacatcagtagtaatgtccagtacgtcgagatgcagctcatcttcgccaataaagtcttcccaagcctcctgccaacctgcatagtcctgcgccgtatcgcgactgagccaccgagccttggggccttcaccggcgaggcgggcgcgcacttgatagacctttggatgatttcccttgggggtgagggtgcggtcttcaaggatttggaggatgcgtggcgaggaaacagccgggcggtcgagtaggcgaggaaccgcgtgctggtgatactgttcggattcccggtatggcttgaggcgcgaaacatggcggcgaggcgtcgactgtgttgaggtgacgggaacatccaattcatagagtgattgctcgggaaaggccttgaggtgtaagaggctagcctccgacccagtgacccacgagtacatctatcacttcgtttcacaaaccgacttcgcagtcaccgtcgttggcagaaacgtcgaaagaaaggtcagcaacgccggattatattgggaaaatgggccaattggcgtttgaaagtaatcccggggaaaattggatggaggatgtgacaggtatcagtgtcagtcctgatgatggtgagtggcttaagtttgtcatatgatacgctctgaccgaaattgacaggccgtaatcctgttcttccaccaaaatctctgcatggccatgggacgttgtcagacatagggcgggcgtcaatgcacaagcgcatggcttcggattcatccattttaagcggcgataatgccacaaaggcgggccttgcgtgagttgcttcatatttggtcccgtccttgctgacttgggtagatcgcgctcgccggctgcttcacctacctacgatacggcatcttcacctactactcctacggtggacatgtccttccatccccgagcatctaccgattcgaccgtttctctcccgttggcactccacacgaccgaaagtctgccacctggcgccagacgaggctacgagaatcgatcgacatcattctctggctcttctcgtgaaatcattcgtccactctccaaccccgctgctagactgagtaaccctcaagctcagagtcagacacgcgcccctcttccttccttatacccagctatcctttcaatggtctctgctgcgttcaaatcatacatccctcttgccgacctcaccaaagatggtatcacgtacaaagattccttctccggccaagctgctgtgacactgatcgcagagctcatcaagacgtctgatcgaaatttggctctgctgctcggtcgaagccttgacgcccaaaagttctttcatgatgtgacatacgaccaccgattgagggataaccctaaagaggtgtaccgatttaaagacaggctcgctgcaccctttacggacacaaacggcaatggggaaagcccagtttcggaagggagattgacgaggaacgggagtggagcgtcaagtacggcgatgggcttgggtggtggattgaaagctttgacagctgcaaggcctgcagattcttcctcttcaatgcatactgaatctacaccagtatctatgaccccatctcgatcttcgaccatgcctttcctcgactccgactcgccagatggcttggacagcgaagatactctcccagtgggtgtattcacccttcttacagactgttactcccccacatgttcgcgcgacagtctttgttattctatcaattgtcccagaagactagagcagatgaagaggctaaacatgaagccggagcctgggttgaataggaagctcagtcgtgagagtttagtggatgtcaaggagactggcactctgtggattcattctgtttcgcaagagatcttggatagtgtggatgataaagagaagaagaggcaggaagccatcaacgaagttatctacacggagagggactttgtcagggatctggagtatcttcgagatgtgagtagaccttataggtaattaccaagtgctaacgacatatagtcatgggtcaaaccgctacggacgcaagaagtcatcgatgccaagcgccgagacgactttgtccgacaagtattttggaatgtccacgacgtcctctccgtaaaccatgtcctcgccgaacgtctcacgaagcgccagaaaaaggaaccagtcgtgtcacgtattggcgacatctttctcgaacgtgtcccactcttcgaaccgtttgtcacctatggtgcccatcaacttttcggcaagtatgaattcgagaaggaaaaaggcgcgaacccagttttccaaaagtttgtggacgatacagaaagaaaaccagagtcaagaaagttggagttgaacggttacttgacaaaacccactacacgtctgggtcgttatcctctcttactggaagctgtcctcaaatatactcctgacgatcatccggataaggaggatttgccagaggtgatcaagatgattagagggttcttgacgaaagtgaacgcggagagtgggaagagtgagaatatatttgaattggcgcaaatcgagcaacagctggtgttcaggccaaatgaaaggattgtaagtctcgaagtgagaaagattatgagcaaatcttgacgttgatacgttcttataggatctgcgactgcgagacaagaatcggcagttagtgcacaagggtccgttgaagagaagaggtggcaatcgagaagagattgcagatttactgggctttttatttgaccatgcgtttttgcttgtcaagcccaaatgggtaaacaagagtgagcagtacaaggtttatcgccgagtgagcccttttttgtcaaataaaatgctgcaaaacatgaagctaacaacttctgcgtggaatagccaattcctctcgagttacttgtcctcgtcactccagatgaacaatacaactctggcaaattgtcatatggccatgggcgttcccgactcatcacacgtcaccccaactcaaaaaccaaccactcttcccagaataactctataacagcccctccgaagccagaatcaaaacacggtttttcgattacgatccttcacctcggcaaaaaaggctattcgatgcagctatgggttgacactcatattgggaggaaaaagtggttggagaatatagataagcaacaagggttgttgagggagaagagtacggttttcgttagcgaaactatcactgaaggaattttgagcggtgtgaggaaagtgaactgttctagtccttatggtgagttcttttcgttgttgtgaatgatgtatgctgatgattgggaagatcaagggaataggatgatcttcggtacagatgaaggtgtttacttcgccaacttgcgcgatgaaaagctccgcgaaccagtaaaagtcattaaccttatcgacgtcactcaagtcgatgttatcgaagagttccaactcctcattgtccttcacgamagatgtgtcactaccttcccacttgacagtcttgacccttccgatcccaargccgctctcaagcgagggaaacgcatttcatcgcacacaagctttatcaaatcgggtgtatgcctcggcaagactttggttgcgatcgtcaagagctcaacgttgagcagtacaattaaagtgatggaacctgtggatctgagtcaaaatcggaaaaagacacaagcggggtttatgaaaaggctcaatggcaaagacgacgcattgaagcttttcaaggttagtcatcatttcatgttcctgattcgcagattctgacacttcatctaggaattctatattcctacggaatccagctctgtccatttcctgaagacgaagctctgtgtcggctgcaccaaggggttcgagattgtcgacctagagacacttgatatgcagggtttgctcgatccgtcagatggatcgctggactttgtgttaaagagggataacgtcagaccgattgcaatttacagaatcgaagaggatttcttgctgtgctacgacggtgagtctatatggtagccccagatattttgcaagatgctgatggaagcagaatttgcgttctatgtaaacaagaacggatggcggtcaaggcctaaatgggcgattgtttgggagggcattcccacatcttttggtaaagtcttaccatactgagcgattgccgaaacagatgaactaacgaaaaatagcattgcaatatccatatgtcattgcgtttgaaccgacgttcattgaagtgcatcacgttgaaactggccatctggtccagatcatccctgggaacaatatccaatgcctcttcgccgacactcctccttcacgagtcaatgcccctttaccaccgaatcgcatgatgtacgctccgcccactctcgggactcccccttatgcccgtcctcccaatatgccagggtatcctgcttatcccaacgtatcttatcctggtcatccccaacaacctcgacaaacctctaacggcgcatatcctcctcaccgcataaatcaagcacctagtgccggagtacgtcaccctcagcaaacgccaatgggctacggtatgcctgcaccccacccgccaccccttatgaaccgattcgcaaggcctcaggttgttttcgtcagcgatgacagccatgttcagttcctcaaattcccacctgcttctcattctcatcctcaaaggcctgtcatgacgcactaccagactgcacctgccgggcactcagccagatcctctcggtaacccttattaatttaacgccttttataaacacttagcatacgatacagcatcttgataggcgatagttcgccttcattactttgatttgatttgaaattttacatattgagcatcgggtggacgtgactgacatcactatcgaaggatggaaaaggagaatgtcattaccgtgtacgaggctgttttgtcaaccctctgggccttttccttcacttgtctcattcctctgtttttgtagcatcatttatccttggtcgttagtggtgatacattccacatagtatacgattggtacgattccccatgcataaagctcatcaaaacctagaatagcgaagaatcgcagacccggaccaatgtagggcatcgaggtgagtgataattgtgaggaatgtgtcagtcagcttgtgcaaaaaagtttaagatatagtactgtcccctccttgcctgaaagacgaacttgagaacaaaggctgttaagcgctttccagcttgttaaataatgataacttaatcacggcgaagagtctatcttctgaaacctacaatccgccaatcatcttgtccacacagagtaattacttttcaatgccttgttgagtgaaggaatgctggcgagatgttactacattgctatgtagaagactccgcgccacgtgacttactcaccaaatgatccttatctggcttgttccattcatgaaagactcattcgagagtacccccgacaac

SEQ ID NO: 341 - DNA, 5782 bp, Cryptococcus neoformans
agtcaatcactttttctcatccatctcctggacggtttgttgcaccggcttcatcaaagcagcgactggtactttcaaaacgctcttgggcgtcccggatcccgtcgaactgtctagcaggatcgactgcctatcccaagctcgtgctgaaccccaaggtttatcaccttcccttggcatggcaatagtgatttgatccgagaacgttgccgttattggagaaggcggcatagagcctggaaagtgagacggtgtgttgaggaggggaaggatgggatattaggtgatgtgggtattgaacgggatgatggagagctgtaccatgtttgaagacgacgttcaggcgtacgacccgacgtgtggttacatcactgaatcaatctggcatatcattgctgatagtcaaatgtactcacgccgaccaaagacaataccagcacatgatcatccatattattacagtacgactacggtacagacagtaatcactaccggtagcacgatatggtttctgccaccgtggctgtttgtttggctggtgactggaggaactatgcctgtcttgggtactgactgtatagaattgaactctatcacatgtatatctgtgatgattcgcgataggtgggatggcaacaatcgaccgatgtcacttatcgagaaaggcaactggttcagaagcacttttttgcgacaacgttgttgtgtgacatgaagaaggttgacaaacgcttctgtcctcgaccattgggtactctcgcagcctgacccttttctcgctagcctttagtatgtactggccgtcatttctgctacgctccgtcagtaacaaaggaaacctggtgtggaagtggaggaagtgcgggatcaaatgatcaggctgacgaatctgcctccacttcgcaattatcaggctgacaaaaatgtcgacggcggctgtattcctgagcttgcccgagttgtttgaaatccccacaaaagcattcccccgccccccgccatggtcgctgctttcgaccccctcgccccctcgcaggcatcctcgtccaccagcccggacaacaccacgttccatactctcaccagagagaggcagttcagacatccgcccgtcaacgcctcagatgttcctgccctcgacgagctcgtcgctccccacatcaagagtttcaacgcattgatagaagatgaagggaacccaggtgcaaagggtctgctgcagatgggcgtggaggactcggagagaaggtgttttcgatggcaagggaagcgaaggcggtttgggcacaaaattgagctgtatgtcgggcgtctgcattgcccaaggccttgctaatgcccatctgatcagaccgaatcgaccgggtcgcccttagtaagccccttgttcccgaaaaggacaagcttgccgttgagcgaagggtcttccctaccgaggcacgtattccatggcacttcctttagtttaccgctgacgctccttacaggcccgggagcgtcttgctacctaccgttcaaaattgacagtcaacatcaagtggacagtcactgacgaggacggaaacaggaaggagtttgaggagatcaaggagtgcggtttgttgcctgttatggttcgagtaagtattggcttgtacaagtatgcctcgaattgctcttaacaacctcggcagtcaataagatgtaaccttcaaggccttcctgccaccgaactcatcaaacacagcgaagagtctacctctttcggtggttactttatcgtcaacggtaatgagaagattatccgatatctcgttgttccccggcgacacaaccctatcaatctctaccgaccttcattcgccaagcgtggtgcttcctacactccctacggctgtcagattcgatgtgtccgaccagacgaaaccgcttgtaccaacactattcattacttgtccaacggtggtgctaccctgcgttttgcgtggcgtaaggtcgagtacatgattcctcttatgctcatcctcaaggctctcgtcgatgcgagtgacaaggagatctttgagggtcttatccagggcgagtacgacaataccttcttgaccgaccgtgtggagttgttgttgcgaggccaaaagtcgtggggtttacacactggtgctcaatgtttggactacttgggagaaaagtttagggttgtgctcaatgttcccgatgactggagtaacgtccaggttggtggctaccttttgcgaaaggttgtgctggtgcacttgcctgctcctagggacaagttcaggatgctccttttcatgcttagaaagctttactctcaggtttctggtgccacttgccccgacaaccctgattctcctcagcaccacgaagttctccttcctggtttcctctacggtatgattatcaaggagcgatttgatgactgcctcaacgccgtcaagtcacaaatccaactcgacctgagagacggtaaggcgagaagtttcatggatcccaagtactttaccagcgtactgtcaaaaacgaattgggatatcggttccaagctgtcatacttcctcgctaccggtaaccttgtctcacccaccggtcttgacttgcaacaaacatctggtttcaccattgtcgccgaaaaactcaacttttaccgatacctcagtcactttaggtgtatacaccgaggtgctttctttgctgaattgaagacgaccactgtgcgaaagttgatgcccgaatcgtggggtgagtcgttctcgtcaagattcttgtagaatgttttcaactgattgtcaataggtttcctgtgtcctgtacacacccccgacggttctccatgtggtcttttgaaccacttgtcgcacacctgtcaaatcgtcacttcatcccttgacgtttcacacatccccgctctcctttcggcccaaggcatgacccaagtgttcgcctcttctatcgacggtcgtcgcatggtttgcatccagcttgatggtaaagttatcggttacgcttccccaatgaaggccaaacagctcgccaataggcttcgaaagctcaaaactgaggcagactccaaggtgcctcttgatctcgaaatcggttacgttcccgttacgaagggtggacagtaccccggcctttatctcttcgccagcaggagtcgaatgatgcgccctgtgacgtaccttgagaatggcaagcttgaccacttgggctcgtttgagcaggtgtacatggatgtggcgattaccaaggaagagatcgaaaagggtgtctcctctcacgtggagctggatcctaccagcatgttgtcagttattgccaacatgactcccttctctgactttaaccagagtccccgaaacatgtaccaagtaggtcaccaacggtgtcattcttgacagaaaacaatgctaatacataaatagtgccaaatgggtaaacagtcgatgggtactccttcaacagctatcagcaagcgtaccgacaacaagatgtaccgactccagtctggtcagacacctgttgttcgtcccgatcttcacaaccaatacggtttcgataacttccccaacggtaccaacgccatagttgctgtcatttcttacactggttatgatatggaagacgcgatgatcttgaacaagtctgcccacgagcgaggtttcggttacggtacagtctacaaggccgatatctttgacctaaagggtgtgcccggagcgagtcgaagcgccaagcctactttgcactttggtctcggtagggatgtcaaggaggaccacgacgcgaggaacattatcagtcaggacggtttgcccatcattggtaccagggtcaaggctggtgatcctctgtgtgcctacattgacgacaccaccggtcgaaccaagttccacaagtacaagggtgacgaaaccgccttcatcgacgaagttcgtgtcctcggttccgatgctggtgatgccgagctccagaagatccacatcaaactccgtatcccccgttctcccgtcatcggtgacaagttctcttcccgacacggtcaaaaaggtgtatgttcccaaaagttccctgcgatcgatatgccttttagcgagagcggtatgcagccggatgttattatcaaccctcacgctttcccctcgcgaatgactatcgggatgtttgtcgagagtatggctggtaaggcgggagctttgcacggtcttgcccaggacgctactcctttcaagtaagtccccagtcctttttctctttcatattgcaaaagggctgacggaatatcaggttctctgacaaggaccgacctgttgactactttggcgagcagctccgagctgctggttacaattactacggtaacgagcccatgtactctggtatcactggtgaagaattccatgcggacatctaccttggtcttgtctactaccagcgtttgaggcacatggtgaacgacaagttccaggtcagaacgactggtccagttgatcctctgaccagacaacctgtcaaggcaagttctcgtcgtcccgcatactttttgatatagtcagttactgactgaagaacttttttgcagggccgaaaacgtgctggtggtatccgattcggtgaaatggaacgagatgctcttatcgcgcacggtacttccttcttgttgcaagaccgactcatgaactgttccgactactctaccgcttgggtctgcaggaactgtggttcactcgtatcgctcggtttcgaagaagtcggtggcgctcagggtatgcaggaatactgtaggatctgtgatgggcataagcatgagcatgcggaggagatgagcaaagagaacggtgttggtgttgtcatgcgcggtggagagaagaagggaaggatggatgttgtccctgttccttgtaagtgacaatctaaatctaatggcgcaagaagcggtcgcttaccgtcttcttttcttgttcttgctgatgtcagacgtcttccgatacgtgagtatctctatatatttgatcatcattattcttgcaatggctgattttcatctcatagctctgtgccgagatggcttgtatgggcatcaagttgaatgtgactgtgacataagcagatgcttgttaagatgtgaagatattaatttgaagggctctttttggataaccctatgcattataccttggttttcgacttcttcgccctttgagcattgagacctcaagtgggaaatgatctttcaccgacaacagaacacgtacggtatgaagcaatgatgagaagaaatgacgagaactatgcgttttctacatacagacctacgtgacaactaaataaacatgggacctgcatgtgttagatttggtagatccagattggccgtagcatagcctcaattgatctgacaagatacattgggcttataacatcgagtcttctcatgatctcatgtatcatgcacgcatacaccctgttcaaactaatttgcagcgagatcaatctgaacagccactcaggctgttgtcgggtcgagaatgcataattggcgataggagcatgccgctttgccgaagccgagatgagagcctcggacatagccgaaaggaatccttccttatttttgagaagacggccaaatttgggctcgattttaccgactgccgagaataaggcagagttactagcgagctcgttcattttcgctggaatcagatttgtatcttgcgccgattgcagattttacatgcacaagctatcattcctacaaagacagtatacctccagtccaggt

SEQ ID NO: 342 - DNA, 5917 bp, Cryptococcus neoformans
cgactttcatgacgtgttcgactcgggcgtagagttgcacattggcagcgagacgaccccatagcttggtgttcggtgtggcaaccagacgaagggcgaattcacgctggaacatgagaacggcacaacgtgggatgggacgttgggaaaggagcttgaagacgagaggtgaagaaatctacagtgtgaagtgagcttatattaagtgaagatttgagaagggatgtaggtatacctgataaggagtgttggagatgaggacatcaaagtatggcaagtcggccttaacaaaatcaccaactatcaactcgagcttcttttgctctggcctttgacacgacattagccggagctctcagatgcgcgacgaaaacgggatgctcactttccaagaacacgcttctgtacttcagccgccattcgagggtccatttccacagctacaaccttcctgcacgccggcaatatcctaacagtcaaattaccggtaccgggaccaacctcgaggacgacatccgtaggcttgaggtttgccttatcaacaatgctaaggaaaaataagccttcgcttccaatataaatcccaatatatacaggactagacttacccttgagcgacgagaggattggtcaaaatgtgttggccgaacttagcagtgtcgaaaagatggtttcgtgcacctcctccagcggccgcggcggcagaggactcgccgcctttcttaggtcgttgagcggcggatgcaggctgagctctgaaagtctgggaagtggccttaggcatactcgagaaggtctaaatttctagagaaagatttaaagaagaaaaaggtagaaaggttgtaggaattcgaaaaggacagcagcagcgagagaagcaacttttgcagaacgtcacgtgatcggagcaaaggatcaacaaaaccaaaaagtcaaggctcgacgggatttgaacccgcgaccgctagataaactccagttcacgacctcgaagtctagaatgctaccactgcaacacaagcccttgacaatattaattggctttttgaactactcatatatttcacttctagtgatccgtgccacaccccttttaagtccgcccacgtggcttataggctggacgcgcgtcttggatgagttcgttgttcgccgtcattcactcgatccttctttagcttacaacggtttgccgtcttctttatatttttcttcctcttcattactctctaatctcgcatctaccaccatgaccgaaggagaaagacccacttttgatatcgcagtccccgctaaagatcccgaacccaaggaggacgacaaacccaaacacaccggtgacaaaggcaaggctagagatgagagtaaagacgaagggcctgagatggtgcgtttagatgtcaggactagagtcaaggatacgcagattgctgactaggtgttcgtagagtgaggaagacctgcagctcaaggctgagctggagatgcttgtccagcgattacgggtatgtcgcctctcagcgctgtagcaaaggttcgattgttaaccagcgtacaggaaccggactctgggctttatcagcccgctcttgagtcacttagaacattgatcaggacatctaccagttcaatgacttccgtccccaagcctcttaagttcttgagaccattctatgaggagatgggcaagattagggatggatggagcgaagatttgaaggagcaaagagtaagcgagattctctttatattggtgcccggtccaggaacttacgtataatatactataatatagtctctccttgcttccatcctttccgtccttgctatgacctactccgatactggcaagcgcgaaaccctttactatcgagttctctccggttccgaagaagctcctggtctctggggacatgaatatgtacgacacctcgctgctgagctcggagaagagtatgccgctacatacgcagctttaggtgaagatgccgacattcctcaaccagacaccaaatacacgaccgaccagctgagagccctctcgatcgagcttgttgaattctttttgaagcacaatgcggaagccgatgcggtggatattttgctggaagtggagaacatttcggccattacgaagtatgtggatgacaagacgttcgaaagggtgtgcagatatatggtcaggtgagcttggcactttttatcgctagtaggaagtgcaggcgcttatacgattcatcagctgcgttccgttgttggttaaccccgatgaccaatgcctttcctcgaaactgcatctgttatttattctaaatacgaccgttatcccgaagcccttgctcttgctgtccgtcttaacagcccggaacttatccgcaaatactacgaggctcctacaaacccgtatgtgtaacattcttgtcttcgcaagctcatgctgacaattgtgtagtgtgatgaagaagcagctctcgtacttcctcgcccgtgctcaaatacctcttcattgggtacacaccaatgaagacgctgagcccaacgatactatacctacccaaccggaagacgttcttgagtgcctcggtaacgttaagctttccactcacttccgaaattttgggaaggctgttggtgttgaagaggcaaagtctgttgatgacatctacaaaactcatctcgagccctcatctcgaaacaccgctattccggactctgcccgtcaaaaccttgcctccacctttgttaacgcctttgtcaacgccggtttcggtaacgacaagcttatggtcaacgccccggaaggtcagagttggatctacaagaacaaagctgaaggtatgatgagcgctacggcatctgttggtttgagtcttctttgggactcagagagcggtatcgaccacattgataagtactcttactctgccgaggaacacatcaaggccggcgcgttccttgctaccggtatcgttcattctggtattcggtccgatcccgatatcgcgtttgccttgcttgaagagcacgtcgacagccaaagcattcccctcaaagtcagtgccatcaacggcatcgccatcgcttacgccggttctgagaggcaggatattgccgacaagctcttgccatacgtccaagatgagtccacatctatggaagtctcttctatggctatcctcgctcttggtttcgtctttgttggatcttcaaacggtgacattgcgagcgagattttgcagactttgatggagagagaagagaaccaattggcttccgagtggacagtgtttgcttgcttgggtttgggtttgctttatttatgtgagttggcaacgttggcatcaaaaattcgacgtcgcaatatactgatcgcatcttggtacagccgctcaagaaaagtccgaacctactctcgccaccctcaaagccatcgagcaccccatcgcccaaatcgctcagaccatcgtcaacatttgtgccaacgctggaaccggcaatgtcctcaagatccaggaaatgctttacatctgttccgagcacgctacagagaagaaggatgagaagaaggaagacaccgctgctgagggcgagggtgaatctcctgttgcctcatccgaagttcctggtgcaatccctgctgccggaccacccgtcccccctaccgctgctggtgtgcctggtacggacattgaaggcgacgtggatatgagcgatgttgccgccgaggctggggcgcccgatggtggagctcagtctgctgttaccggtgaggaaggcgagaaggagaaagaggcagagaagacggcggagcaattgaagcaccaggcttttgctacgcttggtattgcgttgattgctatgggcgaggatgttggtgccgagatggctttacggcagttccagcacttggtaagttaatacaaacgccagagacattagaatggatgctgatgatctgattttagatgacctacggtgaccctgtcatccgcaaatctgtccccttggctttaggtctcatatccgcttccaacccccaactctctatcctcgataccctttccaagtactcccacgactctgatcttgacgtcgctatcaacgccatcttggctatgggctttgtcggagctggtacgaataacgctaggttggcgcaaatgttgagaggattggcggtgtattatgcgaaggaggttgactgcttatttatggttcggattgctcaggttcgttatccatccccgtccgcatcggagtagaggagatcaaacgtgctgataatgtattgtagggtcttgtgcacatgggcaagggtactattggtatcaaccccttctacagcgaccgtcaggttatgagcaagaccgctgtggctggattgctgtctgtcctcgtgtctttcaccgacgctagaaaatgtgagtcgcatgcgctgctctaattctgtttgccgaagctgacctcgttcagtcgtcttgggcaagtaccattggatgctttactggatcgttcccgccatgttccctcaattcctcatcactcttaacgaagaactcgaggaaattccggtcactgtgcgagtcggacaagctgtcaacaccgtcgctcaggcaggtacgaggcatggtatcagtggtgtacgttcaaattctgtcaaaaatacattcgccgtcggggagctaacaaaccaaatatgcagttccaaactcatcaatcgccagttcgaattgcaacaacagaacgagcagagctgggaaccaacgagttcttcccttatcagagcgtgttagaaggcttggttatcctcaaaaagtgagtgttgccttatttgggccttggaaccgtttgaggattataatgttgattttgagcttaggaacgagcagtataacgcggaggaccttcattaagtagaggatatctgcaggagtggagaggagactcgctgtgggtgcaaaagcgaagcaatgaaaatgtagatgtgccctacgaagttgataattgcatggatcatgtagacaggaattacgaattgctccacaagcggaccagaactgaatatgcaatcctatcattacccaattatgatgagaagtagcgaaaaaatgctcgtgcccgtcctgactcctgcgtttgaccgccctgcttctttgtttgtatcaattttattttttcttggctttggcttgtttttttcaatggacgctgcaccttctgagtcactaggttcagtatgttcaaaaagatcgacggaggacacgtcctttccattagtatgctcttcggcttttccatccacagtcaacgtttgagtttcatattactcgtatttgtactactggtttctatttgccctagtctggtcctttcttctggggggcatgagatggggtatgatcgatcctgtatattaggaagcataggaatgcggtggaagtgaaaaagactggtcagtcattatcaactagattgcattttcgcaatacacgtgatttaaccttttacaatgatgttcatatcaaagggtgatgcctgcccaccacttggcataagaccttttaagtttctaagtttctgttgtgcaaaaagtaagttctcccaagtattgcagtatgtatcatcctccaatgtagattgcttcatagtatcaggaattgctgtatttatataagcaatgctcttgctttgcacttgcctatatactcagcggcttccgtgtccgttcgacatggatgatatcttcttccaagaatctgcatgctacatagaaatacttatacgtgcgcacaacacaacagaatcgtatcttcttttcttcgcatcatcacacggccgcgcttccttctcttccgcgctttcgtcacttcctttcacctctgttaatagattacaaccgcacgcaatatgatccgcc

SEQ ID NO: 343 - DNA, 5949 bp, Cryptococcus neoformans
atgaaagggtttgccagggaatcagaggtaacaaagtcaagaagggacataccacagccatttcagatttgatactctcggtcgtgatgtacattttgagtgtgtcgatctccgagttttgaggaaacccaaagtcaataatttctacatccatcttgagtaagtatggcaatccccaaccgttggataattacatcatcgctcaccatcaagcagttcatagatgagaacaaagttattcttcacgctctcttcatcgagcttgccaaagtagctcctcgcgacggtgatgaatcggtaaatgaactcgaacacaagggcggcagaggcattgcatctggaaaccgttagtttgaattggcgccaaagttcattggtaggaaacgtactttgtgacaccaacgatgtagacattgttcaccctcacatggaagaaggatgttgaaccaagggttataataggtgaacgaacgtcgggattggagattacttggatacgaaaaacatcagagagcgatcgccttcatttaatgtcagccatgaacagttgcggcagcccagttcacctacttgacatccgagcgaaatagcctcgatataaggacctggcgaatggttagcaaagtgtccaaagaatgtgagatgcgtcttacctcgcccttttggttgaatatgaagaatgcctgaccaaagtcagcgctgtactgccggaaaatggtatacttactgagatcatggtggggtggcacacgaacaagactcagagggctttcaacattgagcattcgttcgctggcgagtgacaacaatacgaccatgaatggcggacgaatgccagggaggcatcggttatcgccgccttgttaatatgcttaaataaaatgttaagtatgagtcgtccatccgctcctgttacacttttctgttttcggatagggcgaactgggcgcatcgttttatttggcctttgactctcaccttaccttctcgataacggtgtatgctccgtcacgcactgagatcagtacaacgcattttaaccccaagccctattgtgtacccacgcctacaaagaacgtacgcagcaatgtccgctgaagaaaccaaggtcccttctcaagaatccttgcccgtagaggagatcaaccccgccggcccgcaaccagcaatcgctaccgagggtgccgctgaaaaatcgaagaagggcggtgagtaacataaatgtagatgtaaatagtcgctgaatatacattgtatagccaagaaggaggccaaacgacttgaaaagctcgccaaagctgccaccaagacttccgctgcacaatctcaggcccccaagaaggaaaaggctgagaagaaggagaagaaagccgaagttcctgctgaagcttgggttgacacgactcccaagggcgagaagaaaggttagtggtcttgtgtgatcgtggcaatgttcaagctaatgtaattgattagatgtctctggtaacttcccctctggctatgaccctattcaggtcgaggctgcccattatgattggtggaatgccaaggggtttttcaagcctcgttacggcgccgatggaaagcccttggacaagggaactttctgtatcactttccctcctcccaatgttaccggtaatttgcacattggtcatgctttgaccgtctccttgcaggacgctttaatccgttggtgagtattctgatgttgatcatgtcacaaactaacttttttttaggaagagaatgcagggtcaaactgtcctttatcttcccggatatgaccacgcgggtattgctacacaagcagtcgttgagcaacgtcttatgaagactgagggtcactctagacatcattacggccgagaaaagttccttgagaaggtttgggaatggaaggaccaataccagggcaagattaccaaccagatgactcgtttaggtggttctttcgattgggacaaggtggcgttcaccatggacgacgtgagaagtagacgactgttccagaaggaccaagctgacagagtttcttctagaacttgagtaccgccgttagagaagcattcgttcaaatgcacgaaaaaggtctgctttacagagctaaccgactggtgaactggtgtgtttaccttaacacctctctttccaacctcgaggtaggttctctcttcaccgaagtttcaattttccgctaatttgcaatccgtattaggtcgatcaacttcaccttactggccgaacccttctcaatgtcaagggctacgatgccaaagagcgtttcgaattcggtgtcatcacttctttcgcttaccccatcgagaactctgatgaacgtatcatcgtcgctactacccgtcctgaaactatgcttggtgataccgccattgctgtgcaccctgatgaccctcgctacactcatcttcacggcaagtttgcagttcatcctttcaacggcagaaggattcccatcgtcacagatgccattactgtcgacatggagttcggtaccggtgccgtcaagatcacccctgctcatgaccctaatgactttgagtgcggtatgaggaacaaccttgaattcatcagcctgatgaacgacgacggtacctacaacgagaacgcaggtccttacaaggtcagtttatgatgttgccgtgactcactggatgtgctgataagggaaatagggaatgaaacgattccatgttcgaaacgccatcgtcaaggaccttaaggagaagggactgtacgtcgagcaaaaggacaacgagatgcaaatccccatctgctcgtgagtgtttgttctactttgcatttgggccgggattaatttgagtatcagtcgatctggcgacgtcgtcgaacaaatcatcaagcctcaatggtggatcagctgcaaacctcttgccgaggatgctctcaaggtgaatcgcttgtatttttcgtcggtttctcatctaaaccaaactccatagcgaacccgtgcgggcgaactcgagattaagccgaagacgtctgccggcgactgggtacgatggatggagaacatgcaggattggtgtatctcccgtcagctctggtggggtcacagatgtcctgcttggttgctcaaatttgagggcgagtctcccgacgtgcgtctggattctttcttcttctcgttaaaaaaagtctgatgtcttaaatattatagacttctgacgacaagaactggatcgttgcacgaactgaggaagaggctcaggaaaaggcgaaggcccgtgctaacggcaagaactttatcttggagcaagatgatgacgtgcttgacacctggttctcttccggtctctggcctttctccactatggggtggcccaacaaggtatgcgtatccaagcttaggagagaatgatgactaacataaagaaagacacccgacatggagcatttctaccccaactccatcctcgaaactggttgggacattctcttcttctgggttgcgcgtatggtcttcttcggtaacacccttaccaacgtcatgcccttcaaggaagtctactgccaccccatggtccgagatgcctatggccgaaagatgtccaagtctttgggtaacgtcattgatcctctggacgtgatcactggccagaagctggagaagctgcacaacgacttgaggatgggcaaccttcccgagaaggaaatcttgaaggctgaggaaggccagaagaaattgtaccccaagggtattcctcaatgtggtaccgacgccttgagatttactttgtgtaactacacatctggtggtcgagatatcaacatggacattggtcgtgtggaaggttacaggaagttctgcaacaagctctggaacgcgaccaagttctgtctcttccgaatggaccttgtcgatttgcagggtgtcaggcagacaagtgctttcgtccccaatgcgtctcacttgcccactggcaaggaaggtcttgtcgaaaagtggcttttccacaagctcaacctcgccagcgccgctatttcggacgccctcgaaaaccgggacttctctgaagcttctactgtcgcctaccaatacttccttaacgatctctgtgacgtctatattgaggctaccaagcccatcttcgaggccaactctgatcctgctgccaagctctccgcccaaaacactctctatacatgtttggaagctggtctcaagttgttgcaccccttcatgccttatgtgactgaagacttgtggcagcgtttgcctaggagggaaggtgactcttgtgaaaccatcatgttggctcctttccccgagaagatcccagaacaagagttccccgcagaagttgctagctttgacctcgttgttgactgtatcaagtctgctcgttcggtcattggtctttacaatctccccaccaacggcaagactcccgaagacaagatcactgtgatcattcaggcccgtaacgccgagcaactcgagttgttgaagtctgtggagactgtgattgttggtttgacaaagggttgcggtaaggttgagtggattcaggaggacagcgagattcctcgaggctgtggtactgaagtcgttactaccgacatcagtgtacacattcctgtccaggtacgtcatctttcagttatagaagcaactgggtcggtaccccgctgacatatctttgttcctttttcttacagggcaaggtcgacgctgcttctgagattgataagctcgagaagaagtccattgtagtcgagggacaaaaggccaagctgcaaaaggtcattcaacaacccaattacgagaagactgtcaaggaagacgtgaggcagcagaacgacgagaagatggaaaagatcgaggttgaaatcgaagcgcttaggatggccattgagaggttcaagggtcttttgtagataggttagagatcggaggagtgtgaaatgcacgagactgttcccaaatacaactgcttgattcttatacgcgcaatatgccagatgtcgagtagtctacgtagtaatcctttatatggtttcacccgaacacattttttgcgttttgcgtttcgtacccaaggactcgcgcgcctatccgcgcctgtctgttttaaggttgttcttcttctcagggtcgtgttcatggagcaacgtcaccgggttgtagttagcgcgcgtagtgagaggaaacgaaagggtgaagggtgattcatctcacgctcgacgctcatccttagatcctttgcccggctatgactatacttagttctccggcgtagcctgcacaacaccctttgctgtacagttgactggattcttcgtcagtttcttgaccttcttccttcgtccttccttcctctgctccatcctcgccacccacgcactcttgaacgagcctgcgacgccctcggcctcacagcaactttcggacaatctgcctcgtgagtagctgtagccgtaacaaactcggtcgtccgtcactcagtcgcattgtctggtatcttgcagaatcccccagcggcaggagcactccttcctgcttgaccttcactctggcatcctcgaggcccgtgttttttgatcagcggccatttcccagcatagcttgagctagtccgagcattctttctcctgccattccccatacatcatgggcaacactccctcctcacatgcagcccctcccccatcgtcgtctaccaacaccgcctctgcctcggaacgggaaagagcctcgtcttctgctcaacccatcaaccctctaggccaccacccacctcccggccaagttgccagtccactggataaatccgactcttcttctctcaacgaaacatcgagcccgaaacataaagatccacccttcaaaaacccctttccgcgttttgcagaaggatcaccggacttcctctcggaagaaaaatgtaatggaatgatgcacaa

SEQ ID NO: 344 - DNA, 5846 bp, Cryptococcus neoformans
tagtagtcacccgtaaggagctgatagcagtacatagtagggtactcacctcaatttgttcaatatttcggtactcgttgcgatcaaccttggcttgcatggtgcccatatccatcatattatcttctccgccgataacatcaagatagtcagggaaagcctccaggtcgactatatgctcatcagcgtaaatcctacttttaaatcaaggtttaagaggactgaccaggttcttcaaacagcgcatagtcatccttttttctaatttcgaccataatcttctgcaaaagctctttcaatggctttttcacacgcatccacttggtcggtcgtttgcctgttccaggggtctcttcaccgccgttctgcgatggtgttgatataccagtaacttcttcagctggcggaatggacgaagaagcaggcgatatatcttcgggctcagccttgacctgtgtgggtgtctcgggaatagcagcactgggttttgacggcgtagtggaagttgaggacaacaatctttgagggatggcagacggcggccgtctagggccagtctttttcttggacgctaagggttttgcagatttcttgatagatgacttcttaccgggacttgtttgggcttttgatgcagaccccgaaggagttatggggttggcaggggaagatgcagtcgacggggcaggagtcgccacagttgaaaggtccgcagtggaagaccctaccgccggaagacttatacggaaggcggatggaccggcggcattgggcttgagtttggggcgcggcaaaagggaagacgagttggcatcgtgggcgtctatgggaggagcggcgcgcttgcccttcttattgtgtgtgggagtaggggtggagggttggtgtatgtttgtgagagagagcttgagctttattggcgggaggccttgtgggggagagtttaccatgagggccggtggacgtggtgggtggaggttcggagacggctggtcgctcgatggaattatttcagcgagagactcagaggggacttttgtcaatctacgcttcttctttgttatgggcatttaatccacgtcaccagaatttgatcccgttgcctccaccggggtgagtatttacaagtgcaaaagttcttcacgcagcaatagcactacatattctcgccgcgatggaagccccccacaaggcccaccacaagccatcagctggtgcgaagcacgcaaagaaagatgccgcaaagggtgtagaccgatcaggcgggaaaaatttcaaccccaaggtacgtacatagcgccctgcaattccccacccttacactcacccttacacaggcattcacaaacacctccttcagagcagccgatagagcggccaggcgtaccgccgagaaaaaccaacagcgtctccatgtcccgctggtcaatcgtaaccctgaggaacgcaaggtcaccaatgaaaaaggcaaaggaatggacgaaggtgccttgccacctccgcccatcgtcgtcggcattgttggccctcctggtgtgggaaagacaactttactgcgatctcttgtcaggaggttcacgaagcacaatctctcccagccgcagggccctgtgactgttgtttctggcaagaccaggagaatcacttttatcgaatgtggcaatgatcttaacagcatgattgacttgggtaaagtggtcgacctggtgcttttgatgatcgatggtagttttggatttgaaatggcaagcggcttctttcgcccggcaatatttagctaacttgctattcaggaaacttttgaattcctcaacattcttcaatcccatgggtttccaaaagtcatcggagttctcactcatgtcgatcttatcaagaaagcctccacccttaaagacaccaaaaagcgcctcaagcatcgtttctggacggaaatctatcagggggccaagctcttctccctttcaggtgttatgaacgggcgttaccctgatgcggaaatcaaccttttgtcaaggttcatctctgttatgaaattccgccctcttgtcttccgaaaccaacatccctacctagtggctgacagaattcaagatctcacaccccgagaggctattcgtgagaacgccaagatagatcggacaatcactctctatggttatgttcgcggtccaaaccttcctccacgtaacgcgaagattcatatccccggtgccggtgaccttgaggtcaaagaggtcgagagattagccgatccttgtcctcttcctacgctcgagagcgaaagaagaaggaaaatgggcgagaaggcaaaattgattcatgccccaatgagcgatgttggcggcgtaatgtatgacaaggatgcagtgtacatcaacgtccccggtaacttcactaaaggaggagatagtaagttcatctccatttccggagaccaataactaatatgattcacctcaagctcctcagggcgagggtgaaaagatggttatggatcttcaagatgccgaaaaaacgtttgcggacaacattcaagcgtctgaaattaggttgtttggccattcatctgctcccttgcaagtcactgaggaacgcaaggatcgcgtccgccgcaaagccgaacctcgttctggtggtcccatgcttggcaaagcggatgaagatgagtttgatgagagtgaagacgacgagtttgacgatagaagcgatactgaggaaggaggtgtgttcaacggagagtcggaccaggacgacgaccaggatgaaagagatgtagcgtacgccgagtcagaatcggatcacgatgatcttgcctttgcgactggctttgagcaagaagggggccgaatcaatttcgatgatgaggatgatgacgatttcccttcggacgaagatgatgaggatgtacctggttggaagcacaacctagcttcccgtgcttcctccactttggccgatagactacgcaagaaacgcaaccttatgacacttatatacgacactcctctttctcccgaggaaattgtcaatggcaaaacacgtccttcttccgccgatgcttcatcctctttcgctgaactgcaaaatgagggtttgttccgaatcagtcacggagagaacaagggcgacgatggtgatcaagtaaaagaggaggtagacagggatcaattaaagaacaagtgggcggacgaggaaatgcttgactcgctcagggggctctttatctccggtcctgttgctggagagggtgtagatgaggatggggaggcatatgaggaggagggcgaggatttcgaggatctagagggaggaagtgatggccgaggcgatggcgaggatgatgtgccatacgttggtgtcaagccttctcaagtaagcgttgaggatgcgcgcgccgctgctttagcaaagaagaaggaggctctcaagatcaagttcgatgagcaatacgacgactctgacgatgaggcgtccaaaatggacttttatgaccaacaaaaggcggaaatggctcgccaaaagcagatcaatgaagaggagtttggtaaccttgatttggatgcccggacgcaaattgagggttatcgttctgggatgtacgtcaggttagagattgaagctgtgccgtatgagttgatcgagaactttgatcctcgattccccatcatcgttggcggtctcttggctgcagaagagagatttggtttcatcactgttcgtatcaagcgacacaggtggttcacgaaaacactcaagacgaatgatcccctcatcttttcccttggctggcgtcgattccaaactctcccgctctaccatctggacgaccattccatcagaaaccgatacctcaagtacactccggagcatatgcactgtttcgccacattctatggtcccgtctcagctcctaacacaggtttctgcgcattcaactctttgcaaggggatgcccccggtttccgggtatcggcaaccggtgtcgtcctcgatgttgatcgatccaccaagattgtcaagaaactcaagttgaccggtgcgccttacaagattttcaaaaacacggcgttcatcaaggacatgttcaacaccgggcttgaagtggccaaattcgagggggcaaacatcaagactgtctctggtatcagaggtcaggtgaagaaggccctaagtaagccggacggtgccttcagagcaacctttgaagacaaaatattgttgaggggtgagtaacatttcactgtgtctgtttctacatcttctgaccagtcgattctcagatatcgttttcctccgagcatggtactctatagaaccgaaaaagctttacaatcctgtgtgctctcttctactttccaacaaggaatcgtggcagggtatgcgtctcacgggtcagattcgtcgggaggaaggcctcaagacacccctcgatcccaattcagcctatcgacccattgagcgcaccacacgacgcttcaatcctctcaaggttccacgtaagcttgctgcttctttgcccttcgcatccaagacgccagaactctcaaagcaacgtaaacctacttacatgcaatctcgtgccgttgtgctgggagaggatgagaagaaggcggtgacgctgttgcagcagatccaaacgttgaagaaggataaggcagagagaaggaaagcgaagcaagatgagcgaaaaggagcatacaggaaaaaggttggtgagaaagatgagaaaagagaggaaaagattagggaagagaggagggaaagattcaagaaggagggattgaagagaaagagggaggaaatgagcgaaggaaaaggtcggggaaagaagagcagagcgtaaaagattgtagagcggatgggttggatattattttagatctattgtgggtaatcaggggaagctccttggattcttgcatgctagagatgctgtcctgtgacgatccatatcaactcaatgcctgtttgtggctttgcatagtgtggactcaagtcaaataatcattcgtcggattgcttacacctaacgtccttctggttgctaaaagttgtcatgtcttttaagcttaccgtcttcgtgtctttactaggctaattaatatgtagtagtggtattatatatatgtttccgacggtaggtggtgcaaacggctgctcacgcaccaccactaaagtgatttccattttctgattcggttgtgcagcttaccgtcggataggtataatatgcatacgtatactacgtattgacagccccaatgaaattgaataaccgtttacgattcagcacgaaacgaagctgaaattgttcttttcctgcttgagtcttcgctgaagaccgtttgtctcttgttcccgccggtttatcgcgacttgagatgtatgacgatcacgcaagacaacaccataacaatcaaaattaagatattttacatattaccaccagtcaccgagcttgcatttttccgcgccttccttcgttcatgttgtgccccatgtcccatgcttcatgcatttccgcagggccctggttcgctattactcatcgcatcagtattaggagatacgtacaaccacacatcatttcatcatcaggcctgaagtaagaaccgttaaccacataataaagacatacatgctcgagcaacaaggcgtcttctacaacgtcggacaatcggcggaggattggcggtcatccttacgattcacagttagccgtctaatagaaacttactcatcagcagatgtcaggaatcatataaataatcccaatcacactcttatcagaacgcgtgcctgaaagtttaagcttccgactgtccacttttaggttattagag

SEQ ID NO: 345 - DNA, 5404 bp, Cryptococcus neoformans
ctgtttctctttgcaaatcttgattctgttatcagcaaaacagttgtaatataggtaaggtgacactcaccatcactgggatcgacgtcggcagtctctttgctgtcaagcaccaagtgttcaggccaggacatattggttactcgaatagagtccgttagggctctcaacgcaggctaataggaattataaggtttttattttaagattgcggcgacgatagccttaccttgttgttaattgtcaccttttgcatgggaacagcatcttcgtccacagagacatctgagcccaggccgtcaagagaaacaacgtcgtcgtcgggcttttcattgattatggtgttgtcctgtttctatatctccttttagaatcaacgttaagctaaacaaagagaagcataccttgttttgaccttgctcttcctcgtcttcgtcgacgctctcgccggctgatatttcaaactcttccccttcactacctccttcttcgtcttcttcgccctgctcggccccaagcaaggccctttcatactcgttgaggtcatccacatcgacaagttccatcaacctcttcataccctcttcgctgacgtcttggtcgtcttcatcaccactttcgatctgctcgtccggaacgtaagattgcttgtcgagggacttggactcttccgccttggatggagcaagcttcttgttgctcttgagtttccttgtttccttcttgctaatcggcattgtggagtactgtgttgtcgaacagatattgaccgggtgcggattgagatggcggttcaaaattgagaagggaaggtggaggatgagtggaggtgccacactcggacatatggtaatgccgtggccgctgctgattgagcgcgagactgaagcgacggctcgcgggcacaacatatcttctctgacctctatacacatcttctttcctcttccagctttactgcgtcctgcgcaaccacctcaagctcacgcagacacccaaaatggatgcaggtgaataccattcctttacatgcacacgtatacaccgctacaaccgtcttgactcctagcagacgactatccgcttgcatcccagcccctcgacgatggcttcacttacgatcctgattacgactactctcagcagacggccccaaagggcgacgaggacgaagaaaagtacgatgttgacgaggatgagccgatcagccaggaggactactggactgttatcaattcgttctttgaggaaaaaggtcttgttcgtcaacagctcgaatctttcaatgagttcatcgaaaacaccatgcaagagatcgtcgacgatcattcgaggttaactttggatcaatttacacagtatacaggcgttgcaggtgacgaaacagtgagttggcttcattgtctgtttatattgacatgctgataagccctacagagacgttacgaaatttcctttggccagatctatttggctcgggtcaatcatacggagatggatggtagaactaatatgttgttcccgcaagaagcgcgtctcagaaacttgacttactcggcgcctctgtatgttgacatcaaaaagaggactttgacagcatccggcgttgatgatcctgtggaagctgattggcagcctgccgtgggcgatgatggtgaggtggaaggtgctgaggaagaaaaaacatcaatcggcaaagtgcctgtcatggtccgctccaacttttgcctcctgcatggtcttcctgacgaccagtgtcatgagattggagaatgcccttacgatcaaggcggttattttatcatatctggttccgagaaggtcttgattgctcaggagaggatggccacaaaccatgttttcgtgttcctaaaggcagcccctgcgagattcacctattttgcggaaatcaactctcaaaaagaaaaaggtggacgggtggcgaatcatacagaagtcagaatgtacgcaagggcatccggaacaactggtggcgtcattcgcgtatctcttccctacaccaaagttgacatccccctcgttgtggtcttccgagctttgggtattgttcccgatagagacgttctcagccacatctgctttggcgccgaagatgaagcccttcttgaaatgcttcaacccagcattgaagaatcttttgctgtccaagaccgtgacactgccctcgacttcattggtcgccgtggtcaacatgaaaaggcccctcgagctcagcgacagcgtgcggcctttgatatccttcataaagagtttttgccccacgtgtctaccgccgaaggatttgagtcgaaaaaagcgtacttcctgggctacatggtgcataggttatgtatggcggcattaggaagaaaggagttggatgacagagatcattttgggaacaaaaggttggatcttgctggaccgctgatggcggagatgttcaatgttgtgtttgggaaattgagggaagacatgtacagatatctgaagaaggcaagttgagcgtaaagtaatggaattaaagctaacttccggcagtgcgtcgaacaaaacaaggagtttgcccttaacatggctattcgccctaacacgattaccgacggtctcaaatacgctcttgctacaggcaactggggcaagcgagacaatactcgagcaggtgtatcacaagttctcaacagatatacttttgcttctaccctctcccatttgcggcgtactaatacgcccattggacgtgattcaaaagctgctaagccacgtcaacttcacaacacccattggggtatggtttgtccggctgagacgcctgaaggttccgcatgtggtctcgtcaaaaatctcgcgctcatgtcttacatttcggttgggtcctattccgctccagtcatggaatttttggaagaatggggtctggaagatctttcagaatatcaagatgcgcccactgcgacgaaagtgtttgtcaatggtgtctggatgggtattcatcgagacgcacccaccttgcacaacaacctgttgcaaatgcgtcgtggtggccagctcaagtacgaagttagtatcgtccgagacatccgagagagagaactgcgcttgtacaccgatgcgggacgtgtctgtagaccgcttttcattgtcgaccagccaacgcagacattgcgcctcaaacgtgatcacattgacaggatcgaccagatggcagacgagggtcttttgtcaggagcgtgggacaagctactgtccgagggtattgtcgaatatgtggacgcagctgaggaggagaccatattaatagccatgacgcctgaagatcttgtgaacgctcgtactgcacacagcaaacatgagcttgtaagggatagagcagcccacaatcttgaatcctttgatcctgcggctcgtatcaagagtacggtgtggagtcagcagtatacccatatggagatccacccgagtatgattcttggtgtctgtgctagtatcgttcctttccccgaccacaaccaatctcctcgaaatacctatcagtctgcgatgggtaaacaagccatgggtgtctgcctcaccaactaccagcttcgtatggacactatggtcaatgtactctactatcctcaaaaaccgcttgccactactcgttcaatggagtatctcaagttctctgagcttcctgctggtcaaaacgcaattgttgccatcatgtgttattctggctacaatcaagaagactctgtcatcatgaaccaatcttcaattgaccgcggtcttttccgatcgttgtacttccgttcctacaccgatactgagaagatgaagggtatggttaaggcggagacgattgagaaaccggacagaaatgagacgttaagaatgaagcatgggaccggcgatcggtacgccaagcttgatgtcgatggtcttgttgctccgggaacaaacgtcaacggtgatgacattctcatcggcaagactgcacctttgcctgaagacagtgaggagcttggtcaaaggacccaacttcacacaaagcgagacatatccacaccgctgaagagcacggagcagggcgttgttgaccaagttatgctgagtaccaacggagaaggtaacatgtttgtcaaaattcgtgtgaggtccaccagagtgccccaaataggtgataaatttgcctcacgacatggtcagaaaggtactatcggtatcacctatcgacaagaagacatgcctttcactgcggagggtcttgttcccgatatcatcatcaatccgcatgctattccgtcacgaatgactatcggccatttagtcgaatgtctcttatcgaaagtgtcaactctgactggagctgaaggagacgctacgcccttcacagagctgactgtcgaagctgtttccaaagttctgcgagcaaaggggtaccagtctcgcggttttgaggtactttaccatggtcatacgggaagaaaacttcaggcccaggtctactttggccctacgtactatcagagactaaagcatatggtagatgacaagatccacgctcgtgcgcggggaccgttgcagattttaaccaggcagccagtagaaggtagaagtagagatggtggtttacgatttggtgaaatggaggtaagtaacatgatgattcagcttcaggccgctaacaccattacagagagactgcatgatttcgcatggtatcgctggatttttaaaagaaaggatgtacggtgagtaaacgaagttcgagcgaattctgctgttgcgctgacaactcattatcaagattcgtccgatgcgttcagaatacatgtgtgcgacgtctgcggtctcatggccgttgccaatctcaaaaagcaagagttctactgctctgtttgcaggaacagtacccagatctcccaggtgtacatcccgtatgctgccaaactgttgttccaagaggtaaatttccatcattggtatctgcatgaagtcgcacaacgctaaccgtgtccccattagttacaagccatgaacattgcatgtcgaatgtacggggaaacagattgaagagatggttgaatacagcattgaatataagggcgactgtcatggaggtgcgggccatgcgtggacggaaacagggtctagtcgaagcagcatcattaattattgcatgtatttgttgtgctgggatggtgacgtcatggggagctgtggctgagtacatgttacatacaatgataattgtcgctgtgttgcgtatgttccgcgacgatgcccgcccgtccccccatccacccgcccgccatccccacagcgaaaactcccccacgcccctcctgaagccgtccccagcaatcctcacacaggtaccaccgccccgacccccccgcgacccatctctccatgtttt

SEQ ID NO: 346 - DNA, 6295 bp, Cryptococcus neoformans
tctcccctcgatggctcatgcttaagggtaagcgcttgtctcctgctttcaatcgacatattgatcctcgtataggtcgtgaggaggaatgtcttacgaacttggctaagctccgaaactctaccgaggatgcccccgaaatccagtacgagttccgtgcccttcaggctgagcgtcttgttgagcgtgaggccgccaaggagcgatacggccaggaagacgtcaacttccgagtcacattctcctcgcctttaccccagacgtagacgtggccgatggtagtgagagcgaggacatggtcggcaccgcaggaaatttgagtgatttgcactttcgcgagagcggggagggagatgggggtgtactggaatttaggatggccaggcacaccatcgaaaccaaggataccttcattggactgataccaagttaatcacaacctggctgttctttttatcaggagacttaccctgaaactaccccaagccctcaattcgcccttgtcagaaatggcaacactgatactgtcacccgccgcaacctgaacagccctaaaaccttccttttcaagcgtctcaacgacataaggataactctcgagatcttcgttgggaatcatttcgtcagggttcttggggtcgggaacatcagtggtaattcggccaagagcggcattgtcattgataccccatgaacggacctaatatcggattagaacaagctccaaactgatttagtacaacacaaggacttactcgaccagcctcgtcaatggcgagcgtatgcataccaccgcaatagacagattctaggccacctgacccaggtttcccatccctgctgagcttaccttcctcaatctgctcctcgaaccacgaatgcaacttgggcctgccaatctcgtccagattgtcggggcccagaccgaattgaccttgatcaccagtaccccagacgaacagggcattgtggggagtcttgacggctgttttgattgaccatgtcagttcgcgagctgattgatggcagtttggaaggatataaattacttacgggggaccaacaaactcaatggtgcggccggtgctaagcgcaaagttatcaactcaacgtctgtcaagaacgtaatcaagcgggagccctcacctgtccttgccatcgctccagaagccgcgccagaaatagaagaaatacaatctgtcaagcctcgtaccaatggcaaacccaaagtcaaagcaaacgccaaacattggtccgccattcaagaatcccttgcggcatcttcctccaatcaaacatctgagcttgataccgtcagcgcccctgttggttcaacaaagcccgagaatgtaatggagaaggatggttcattgagattcttctggcttgaccacttggagcaagatggaatcgttcatctcgtgggtaaagtgcttgacaagcaaacgggaaagtatgtcagcgcttgtgtctcggtgacgggaattgagcggtgtctctatgtcaagcctcgtgccaaacgatttggtacgttctttatgttaaaatcagaactttcatctgactatttatagctcgtggatttgaaaccgatctcgacgtgtcggaagaagacgttttagacgagttcgaaaacttccgttctcaagtaggtatcgatcagtaccgttgcaagtttgtcaagcgcaaatatgcatttgaggacaaggatgtggaaaaaggagaaagcgattggttagaggttgtctatggttttgaccgtgagtcttgcgttcgggtttaccgactggtgctgaacaaaatagaacctgctatccctatggactcgaatggtgctactttcagtcatatctttggcacaaacaccactcctttcgagttgttcgtcgttaatcagaagattatgggtccttcatggcttgaaatcaaagatatcgctcctgttgagaaggctgtatgtcttatgttttgcgacattgagtaagtgctaactatttgcagtcatcatggtgcaagcttgagttctatgtgaccgatccctcagaagtcaacccgttctccgaaaccgacccttccgcacctaaagacacgcccccttttactatcatgtccatttcccttcgcaccatcgttaaccaccgcgagaacaagaccgagattctgtccgtctccatgagaacatgggataattataacattgaagatcccacccctcctgatcaactccgatcgcaactcaacaccatcgtccgacctatcgagcgatttcccagcggcctcgaatccaaagcgcgatcagaaaaatcccaattccaaacggtgaaaacggagcgagcactactcaactctatgttgggtatgatctaccgccacgaccccgatgtcattgtggggcataatttcttgggaggcgggtttgaagcattactgtataggatgaaagagctcaaagcagatcattggtcgagaataggaaggttcaggagaaagggaatgaatgttagtaagatgggaagtaatgtaaagctcatggccggtcgtttggttgcggatttatcaagtgatgccgccaaggtcagcgttcttacttgtgtgttctagatcatcggctaaccattatgacagggtatgatttcatcaacgacctggtctctcaccgagatgaccaacacccacctcaaggtccaacgcgaagacattgacccagaagacactgccggttattttgaccatactgccacttcacctgatagattgatcaagtttatcagactgtgtgaagtcgatgcctttttccagatggcgattgctgctagagtacaaatcttgccattgaccaagcagctgaccaacttggctggtaattcatggtgaatattttacaattaaatctcggatttagagctgacggatgacaggaatttgaccctcaacggtggtcgtgcggtccgtaatgagtttatccttctccatgagttccaccgacttgagtacgtctgtccagataaagcgccttacaaggcaaagaccagaccgactggggatgatgatgaggttacggaagacattatagcgatgaaaggccagagaggaaaagccaagtatgctggtggtttggtctttgaacctaaaagaggattgtgggacaagtacatcatcatcatggacttcaactcgctttatccaagtattattcaagaatacaacatcgattttacaacagttgagagggacgatgatgagaatgtaagtttttgtggaaattttcaagcaggttgactaatgaaaaacaggccgaagaagagaagatcccagatgttccttcaagcgatgtacctcaaggtgttctaccccgtattattgcgactctcgtcaaccggcgtcgtcaagtcaaggcccttatgaaggataagtccgcaacccccgctaagctcttacaagtatgccattacagaaatttcttttcacttcttgtgataatggctgatgccatgcgcagtatgatatcaagcagcaagctctcaaactcactgccaactcgatgtacggttgtcttggttttgctggttctcgattctcctcgagaccactggccgcattgacaaccttcaagggtcgagagattttaacgcacacccgggagttggctgagtctctgcagctcgacgtgagttgctttccaatgggaaggacctgggatccagctgatagaatgtataggtcgtctatggtgataccgactctgtctttgtcaactccaatgtcacaacctaccccgaagctctcaagattgccaatgagttcaagaagcttgtcaatgaacgatataagctcctcgaaattgacttggacgccgtatttgaacgaatcttgcttctgaacaagaagaagtatgctgctgtcaagatcgatgaagctggggaaagaagtactgaagttaagggtttggatatgaagagaagagagttcagtaaggtttcaaaggatgcaagcgcgtgagtatccgctttggctttgcccatcgaaatatggtattgatgaccatgatagtgcgatactgaaggagatcttgagtggtgaagctacagaagtcgtggttgagaagattcatgaactcctcaccaagctaggagaggctgtacgcaacaacgagattcctatcgatgactacatcatcttcaaggtgagttcgatcatggaagccccactgtcttatgtcgctaaccaccgccttctaaaagcgtcttggtaaaaaccccgaagattacccagacaagaaatctcaaccccacgttcaagtcgctcttcgtatgaaacaaaaaggtgccgctgttcgagctcatgatgttattccctatatcatctgcttggacgaacatggaaagggcggaaagacggcgtctgcggatcgggctttccatcctgatgatttgagaaggcaagggtcggaactgagaattggtgagtcagggtgggctaagtaagttcaaatgatgaaagctaatggcatgtagatcacgagtactaccttgatcagcaaattttacatcccatattgaggttatgtgagactatagaaggcactgagcgagcacgattagcagaatgtcttggtgagtaattatcattcccgacctagagttcaccatctaaacatgtataggtcttgatcctttgagatatacctcgacaggcacagccgaagctcaggaaaaagagttcttcacttttgattcccagatttcggacaacgatcgtttccgcgatgctgatcccctcaatctcgtctgtccatcttgtagcgaggaaacagtatttgtaggcttgcagactgacgcttctgaagtggtacgtctttctgaagactgagtcatgatttgttgctcacatggatgcggcattagtccaatatccgagcaaacggtatttgttgcaattcttgtcagttagtcatccaccccgcctctttacaactccagctcgaaaaccaaattcgatcccatatctcaaaatactatcttggatggatgacttgcgatggcgaaggttgtggattgagaacgagggccatgagtgtatatggaaagagatgtttagggtttatcaaggagaattgctggggtacaatgaggcttgaggtgagtatcggcgctcctcgttctagcatgaagattgaccaataacatccctatagtacacggatgcaaaactgtacaatcagctcttgtattaccgtagtctgtttgacgttgagaagatcctaaatgctgtgcgaggctcgcaacgtttcggtgagcatcttctctacattttttttctaactttttttttggcgctggccgttaacaaagaacgcagacgaaatccgacccttgacaaccgccaatcaaaaagttttatcagaacttgtagctgtcacagacatgtaccttgacaaaaacgggagaagatatgtcgatttaaaggggctgtttggattcatggagaggattaagatttgagagagatgtcgagacgatgaccatcaagtagaagagcggtcgatgtgtagataggatttttagtttgtgttactgatttttggttttcgctcagacgattttttgtacggtatttgcatggattggttttggacttttccttttttggtgcgtttttttagtccatcgagatttggaggtgaaagacatgatacttggtgttgagtggtgagatgagatacagatggcaatattcgctggagtcaggagctgctgctgtccagtcaagaaacgacgagataagcgcaatgcccggcccacatcagcaaccaatgacccgtcccccctccttcctccctcccctcaaccgggagattttcttgatttgaatcgtccgatactgaatgagagatctggcgttcaagataacttgtccttttttcggtaccctgatgagtgcgatacggaacagattacctctcaaatgagtgacgacgacagcggacataaactagttcgtcggtgatcggttgtcggtggttaataataagtagcagacaatttctaaatgcggaacctctgatcccctcggccttcttcatcacaatcttgaatctgcccattctactaccgaatccgcctcgtccattgcttagggcatccaatgcggcgagctctgagaggcccagcgtcaacgacccttaaacccgcagtgacattgaacacagacgcctcactggaaacacgtcctccagactgggctacgtacgccaagctgtcctgcatccctctttccaacccactcacctgtcgaa

SEQ ID NO: 347 - DNA, 6349 bp, Cryptococcus neoformans
aggtccttcgcctcgaacgaatgggaccttggcttccatttccagagcggccataatagcgggaaggatgaaagcgagggtttttccagaaccggtgaaggcgataccaatcatatcacgaccagaaaatctaaaaagcgtcaggacaggatatttcgggtgtgtaaagaaaatgcttacgctgtaggaaggccttgcatttggataggagtcggatgcttgatacctttggcctgaaggtagcccaatatgggtttgggaatcttcatatcctgcaagtatggtcaataaattccagaaaagttgggctgaaacaagttggccacataccgcaaaatggggaatgggcggtggaatattctctccttctacgatgatgtgatacttgtctcggacagcttgctgctcatcttcggtcttattgcgaatgtagtgaggcgctctccagctgcttagttttagttatggaccgatgggaagcttaataagcacgcacgatgtcttcaagctttctgtccatgacacgccttgtgccaattcctgtgcacctgcaagtttcttctgcgctctctccatttcagcaagcaaagccgcttccttttcagcttccctctcggccgcacttttctttgcgtctaaaaagaaagtcagcagtacaaaacaaacactcttgaacaacacacaccttctaaagccctttgctctttgacctcttgggccgcttgcagcagtgtcctctctctccttgccttttctcgcgcacgcgcttcatcctctgcctgctccttcaactcctcctccatctccttttccagttcctcttgagtcttgacttttttggcactgtgctttgctcccagctgcgagagcatttgtgctctacgttttgcaacggggacatatggcttgtagtcttcgggaagctcaaaggcgtcctgtgcctcgggagtaggtgagcgcttgcgtgctgcgaccattttgtgggagtggagatgtatggatgtggatagaaagatcgccgacggatagaagaggatgctggcgggagaaaatgagaaaaggggcgtggtggaataaagaaatggttccgctgttgttactacgcgtgtcttcatcagcgctgagcactgagcatctgccgcccagccatacgatttcctcaccgctccttccttccttcctgccaccttcccacagccaccatggaggtacgtcgccccgccacccgccacccttccttccttccttcctccgcagaaagctgactcaatcacaaccacaggcaatcctcgacttctcaaacgacctcgacgtcgggtatgtatcccgctccatgccacctcttgtacgccgctgacccagtcccagactcatcgaccaggtagtacaggcgttctacaccgggtcaggcgaaacagtgagtgcttcctgttccacgtcgcccgagattctcgacatcacattccgccactcctaaacatgcaacaatcaccacagtcgtctgatgctgacttgtctgtagcaacaaacagcacagcgggtcctcacccagttccaggagaatccagattcatggcagcgtgtcccggccatcttggaaacttctcaaaatcttaacacaaaggtgcgccacatttcgctttcacctgcgaatcacgcaatcactgacaggcgtggaacagtatatcgctcttcaggtcttggagaagcttgtccaggtacgatggaaagccttgcccgcggaccaacagacgggtacgtgccctgggatgtccatggggacatgagctgatgaaatgacaggtatccgaaacttcattgtccaggcgacggtcgagatatcgtcagatgaaagtaggatgaggcgagaaaaggggtatctgaacaagttgaatcttgtccttgtccaggttcgttgcctttgtccgttaaagtgcccaatctaattcaaaacagattcttaaacaagcatggcccaaggactggcctcagtttattcccgaaatctgcgaatcatcccgcactaatctctctctctgcgaaaacaacatgatcattcttcgtctcttgtctgaagaagtgtttgacttttctgccgagcaaatgacgcaagcaaagacaaaagccttgaagcagactatgtgcgcggaattcggagagattttcaacttgtgtaatgaggttttggagaaggccaacaagccgagcttgatcagggcgaccttggagacattgttgaggttcttgaactggattcctctaggttatatttttgagacccaaattattgatattcttgtctccagagtgagtttgacttttcccaagcaagttttcgagtggtaataaccctctgcagttcctcgaggttcccgatttcagaaatgttaccctcaaatgtctttccgagattggtgcgctcaacgttggtcccgagtacaacagcaaatttgtcactcttttccaagtcgtcatgaccagcatcaaccgaatggttcctccccacaccggtaagtatcttgtcgaagaaatggtgcattttagctaattcgatccagacatggccggcgcctatgcctcatccgatgacgaggaccagcagctcattaagaacctcgctcttttcctcaccaacttcctccacccccatcttcgtctcattgaaacaccagaaaacaccgaactcctcatcaacgcccacctctatctcgttaaaatctcaaccgttgacgaccgcgaagtcttcaagatctgtttagaatactggctcaaactcgtcaccgaactttacgaggagattcagtcattaccgctcaacgacatcaaccctctcatgaaccttaacctcggcggtatcggtggtggattgaatggcgctcagggaatgggtcttaacggcatgcctctccggaagaacgtatacagtgacattctttctaatttgcgtcttgtcatgatcgagaagatggtcaagcctgaggaagtgctgatcgtcgagaatgaagaaggagaaatcgtgcgagagtttatgaaggagagcgacacaattgtgttgtataagagtatgagggaagtgttggtctacctgacacatctggatgtggtggataccgagactatcatgacagacaagttggccaagcaggtgtgtcattgtctaacatggggtgaaaaatcagagctgaccaaatcagattgacggttccgagtggtcatggaataaccttaacactctttgttgggctatcggttccatctctggtgctatgagtaggtgttaactctcaccttttaatatcttacgctttgactgacttttacgcagacgaggagaccgaaaagcgcttccttgtgactgtcatcaaggatcttcttggtcttactgagatgaagcgaggcaaggacaacaaggccgtctgtgcttccgacattatgtacattgtcggtcagtatccccgattcctcaaagcccattggaaattcttgaagactgtcgtcaacaagttgttcgagttcatgcacgagactcacgaaggtaagtcatttttaagtcatgttctcctcaagcgaaaagcgagacggctttaacacactacttgcaggtgtgcaagacatggcgtgtgataccttcatcaagatcgcccaaaagtgtcgacgtcattttgtgatgcagcaagccggcgagcaagaacccttcattgacgaaatcctccgtaccctccaccgaatcaccgtcgacctttcacctcagcaggttcacacgttctacgaggctgtaggttacatgattgcctctcaaccgaacaagcctacccaggagaggttaattgaaaagctcatggagttgcccaacaatgctgtgagtccttttttaatgatataggtgatcaggtgattaataagccattgcgatagtgggacaaccttatgcagcaggccgcctctagcgtcgacgtgcttggtaaccccgaaaacgtcaagattctcgccaacattctcaagaccaatgtttcagcttgttcctccattggtcccttcttccttcctcaacttggtaggatctggcttgacatgctcgggttgtacaggactgtcagcgggatcatcagcgacgacattgcggcgatgggcgaggttgctaccaagacccccaaggtccgtgccctccgaacgatcaagaaggagattctcaagcttgttgagacctatgtaaagaaggctgaggatattgagggtgtctacaacaaccttatccctggattgttcgatgctattttgggtgactataacaggaacgtgcccgcggcaagggacgctgaagtattgaacgtcactgctaccattgtctccaaacttggcgtaagttgcaaatgtttattgaaaaagggaaaccgatgaagggatactgacgtgttgtgggtttcagcctatcctcacccctcagattgcccctatccttgacgctgtgttcgaacccactcttggcatgatcaaccaggactttgccgagtaccctgagcaccgagttggtttcttcaagcttttgagggcgatcaacttgacttgtttccaaggtgcgttagatttgaagaatagtaatggaaagtaaaaagctgactcggtgaatagctcttttggagattcctcctggacagttcaagttgatcgtcgactctatcgtctgggctttcaagcacaccatgagggatattgccgacactggtttgaacagtgagtacaattgacatttgtctgcagccatcttttaactccatcgtctgtagtcgcctatgagatcgtcaacaattttgccgcttccacccccgaaatcgccaaccaattctatcagcaatacctcctttccctcgttggtgatgtcttctttgtcctcactgacgccgaccacaaatccggtctcaagatgcaaggtatgcttcttgcccagctcatcgctctcgtggagaccggagctgtccaggctcccttgttcgatcccgcccaggttaccgaccctggcatgaacaatgtcatcttcttgaagggatacatctccgacttgttgtccaatgcctttggccacgtccaacccgctcaaattgcctcgttcgtcaacctgatgttcgagactgcggccgaccacaacaaattcaagctcaccatccgagacttcctcatctctctcaaggaattctctggcgataacgccgagctttacattgatgaacgtgaggccgaggccgagaggagagagagggaggagagggaagcagccagccgagtgccgggtatgttgaagcctgctcagatcgaagacgataccgagttataggggaagggaaggggggttgaagtcgagaaaggggggtcttcggagttgaagtgagaagggaagaaacgcaaggctttacgaggatgactgaaagcagaaagcaaaagccaattgatcgcatttcaacattttgagcccctcttgtggcatcttttcaatcatattcaacaactcgcattaattttttgagaaggaagtggggtctagaggtgccggaagagggcgtcgtgtattatcaaaaaaaggaggtagaggtatactgtttaggcttggagggtgtgtctgtttttcttttcccaatttattttcattatctctttttcctttctctttaccagcgtaacgttttcctcactccacttactaccaacgtacataacaacagaatgaattactataagtgtgtaatgctctatggcgataagtgtcgtcgtcgtgttcacgtgtaaagaatcaagtcgtttcaacagctgccaaaaaaaggaaaaggaaaaaaaaaatgtttgaaaggaatgaattacatgtctatgcagcgatactattgtcaagatggcccccctgatggatgacacgcctaattgtactatataagataaacgacaacttctctctacagatgactagttctattatacattatatacttgtccttgtccctttttgcttccttttccattacactgtgtaggccgcttcatggttggatccaaagatgagacggaggaaagcgaaaagtctcctcactcttcttgaataaattgttgcaatgcctctacggtaacagatcttgtcagcgatgtggcaaaaggataaaaaaggacacgtcggccatgttgatcatggcttacctcttggaggcaggttctcttgctgagctaagcgcatgaccaatgcaaaagattccatctcttgggccatctaaattttccattggcaaatgcatgatcagcttgtttgattcaaaagccgagtgtacagcgccagagggcagtgagcggctgacttacttttaggactctc

SEQ ID NO: 348 - DNA, 5883 bp, Cryptococcus neoformans
agggtgaatgagctggcaacagccatttttattgttattttgaggtatatggaagtgcccgtgagacccagttattcgcacggcaaagctgccaggcgagattttaacatttcaccatcctttaccacggtgtttcggtatttcaatgctgtggcgtatttgcttgtctatcattcccttgcattttcttttaygtaataagaagtagctgacgcgactttcggaagtgagaaacatgagcgcgatctgacacttcgtcccagtcgcgttgctgagtaggttccccacctgatttccccatttctttcaacccatytacagccttcgccctctytgtggcctacacatagaacatggcaagtggagacacatacagtagagcacaatgctgacttcttatcgccagtatatcaaaacaataaccattcaaggtgcgttgcagtctgccattgatcttagcaaagcgactactaatgcgcatgacaggtttcaaatcttacagagatcaagtggctgtagatccattctcgtgagatattccggtggtaattcagtatgagattttattactgaccgatcatcagacctggacacaatgttgtggttggtcgaaatggtagtggaaaatcaaactttttctccggtaagcttcttctcactgaatgaggcctggcctaaactctgcctgtagctatacgatttgtactgtctgatcaatataccaaattgagtcgagaagaaaggcagcgtttgctacatgaaggaacgagtacaagtacgacactttctgcttatgtcgagattgtctttgacagtatgtccgctttatcttcagaatggcttgcctaagctgaaaatttatctagattctgatgggcgcttcccgactggtcgacaggaacttgtgcttcgccgaacaattggtcttaagaaagatgaatattccctggatagaaagagcgctagcaagtcggaagtggatcagctattggaaagtgccggcttctcaaaggctaatccctattatattgttcctcaaggaagggtgtgtaaatagatttgtttcatcgaaaagtaaggctgctgacgagatatcagatcacgcatctgacgaatatgaatgatcgagaacggctcagactgttaaaggatgtggcagggacagaggtctacgagcagaagagggctgagtcaaccagaattatggaagagaccggtgcgttctagtacccttcatgttctgtacaaactaaattctcgtattagacgggaagcgagacaagattcttgagcttctcactaccatcgaggaccgactacgagaactggaagaagaaaaggaggaactcaaagagtaccaagagaaagaccgagaaaggcgctgcttggagtacgcgttgcatcagagagaactggaagatgttaccaatgctctggatgagattgaggcagaaaggagacaagacatacacaatagtaacgagaagagaaaggaattcaatgatcgagaggacgaaatccaggtctgttcttctcgttaattgcagtgattcgctcttctaactgtagttaacagcgctacgaggaagctcttactgcggctaagcattctttgtcgactacacaagcttcgcttaggcagtatgaaaccgagcgggcggatttagtgcgtaacaaaacagaactggaatgcgttatcgccgatttcgagactgctggtcaagtgggagagcataggagggcagagttagctgaagagctggaagtgatgcaacagaaggtagatgaggcaaccgcgagattggaggacctggtgcaagaagctgaacagaggattggggaggaaaaagccgcaagagaagcgtaagttgctgtttcatgttctgctgtcctgaagaactaattttgctgccataggcttgaacctacacaatccaaactctctgtattgttcgccaaacagggacgagcgcagcaattcgcaacccaggctgcccgagataagtatctcaaagacgaaattaaagctctcaaagagcatgagaagaatcaaggaaaacgggtggagatcctgcaaaaggaggtggcgggtgcgaaggaacaattggcacagctttcggccaagtctgaacagcaggtccagggcgagaatgataggagagagaacttgaaaaaaatgaacgaggagattgcacaactgcaaaggaacattgcgggtatgcatgagcagaaaaagtaagtttttttttaccctagtctgccaattgaaggttattaaggtgatttgaagggagctgtggcgggaagagggcaagttggctcagactgaggtcaatgcgaagagtgaaatggaggccgccgagcgttcactgatgggcatgatgaacaaagtaaggaaagcatggcttgtcatcggaagacgtggcgctgaacagacatcaggacacgagcaatggtttaagggctgttcgacaaattgcgaagcgactgaaccttgatggcgtctttggacctctctacgatctttttgaagtttctgataaatacaaaaccgccgtggaggtgacctctggtaacaggttggttttcttttttctttttcttggtgaactcactcctgaaccgaaccatattaatctctgtttgtcagcttgttccacgttgttgtggataatgatgagactgccagcaagctacttgacgttatgaatcgcgaaaagagtggtcgagtgacttttatgcccctcaatcgtcttaaaagtcatagcgtcaactatcccaaagctaacgatgctataccaatgattcaaaagttacaatttgacagggagtatgtcatggcatttgagcaagtacgtattttgggccgtgcatatgcaccattccatgctgaacatctataggtatttggtcgaaccatcatttgtgaagatcttcaaaccgctgcccattatacccgatcccatggtctgaacgccgttaccattgaaggtgatcgagttgatcgcaaaggtgctttgactggcggttatcacgatgttcgacgttcacgcctcgatgctgtcaaagccgcaaagaaatggcgaaccgcatacgaaacagaccacgcgcgtcatgcagaggtgaaagctgcgctgcaaaatatcgaacaggaggtcacaaggaccatgggtcaagtacaagcacttgaggcgaagaaaaggcacatgtcagatgggggagagggctcattcaagctacttacgttaccggcaagggatctagaccaggcaagagatagggtagcgagattagagtttagtctggaagaagctgagggagcatcgagggatgctaaagccaagagagcaagctatgaggaggagctcaggactcctatgaggcaaaacttgacggatgaagagttgagggagttggaaaccttgacacagaatgcggaagcccagaaaaagttgctgtttgaggcaacccagaacagagcaaaggcagtaggagagcgtaatcggttagaaatcgagctttcggagaatcttcggcgaaagagacaggagctacgaggcaaacttgatcgattggaaggtgaagcgggtaatggggaattgcagtctggggaggtggaattgcgaaggagcgagctcaggaatctcgtgcgcgatattgagcagcttgaggaaaaagtttctggtaagtatcccgctctagaagcaacgtcgctgaactttgtatccagagtctgagggccgtgttggagaawtaaactctgaaatctccaaaatctcggagaatctcgagcgtgtacaaactcagcagatggaaaatactcgagccataatgcgtgttcaaaaaaatgctgagcgttatcttaccaaacgacagaccctcatcaacaggaaagaagagtgcaataatgcgattcgggatttgggtgttttaccggaggaagcattctcaaagtatattgaccaaaggtcagataaggtaggtcatgtcatcaaatagaccgggataggatttgacatcgctacagattatcaagagacttcacaaggtgaacgacggtctcaagaaatttgcccatgtcaataaaaaggcgtttgagcaatatagcaatttcacgaagcagcgcgacgaattaatggatcgtcgagatgagctcgatcaatcggctatcaaaattgaagaacttattgagactcttgatcaacgtaaggatgaggcaattgaaagaacattcaagcaagtgtccaagtactttgaagaggtatttgagacattggtcccattagggaaaggagagttaataatgcagaagaagacggatggtttcattgtgagtattgaaggtgattgatatttttagcaaaactaagaggaaccgcaggaagaagaatcagaagagtctttggagcaaggaagagagaaaagtgacattgacagctatactggcgtctccattcgcgtttccttcaactcgaagcatgatgagggtcagcgcatccagcagctgtctggaggtcaaaagtctcttgtggctctcgccctggttttcgccatccaaaagtgcgatcctgcacctttctacctatttgacgaaatcgatgcaaacttggatgcgcaatatcgtaccgcagtagcaagtgagcaacgttccttttttggctcttcctctaccagtattgatcagaatggctttagccatgatacatacgctttccaccagcgcacagtttatcacgactacgttcaagtctgaaatgcttgctcaggctgataaattttacggtgtcttcttcgataaacaaaaggtcagtacgataaaggtgattgaaaaggaggaggccagcgactttgtagaaaccgccgcgcaagtcggacagttgtgatcgagatagaatcaccgttagagtaaaagggagtaaagagagagcacataatgaggtttctgtaaatttacgctttggaagtcggattatcggttgtaattatttgcatcatgcactgccatggtcatccatggccgtcccatcattttttatatatgctactgacggctattgagcgtgacttggtacaattaaaaatcactcaacccgaagtataacaattatttgtttggagctaaatacacctcggccacatcccctctcctaccagagccgcaacaccacctgcagtcataacttctctcagccatttcctagcatcttccacttcacatgctgcaattctgactactcccgcctgcagcttgccatctatctcactaaaactccatgccaaacctggaggctccttcagctggaactgccgagaatgatcggagagatacgcgagatacgagaaaagggtggtaaaatggggaccaaggattagaatagtggcgtagacattgtatggcgacagttggtttgcgataggagacagagagccgccagcattcaaagcaaaatgggaattatcgagcaccatgcgttccctcatgattctctcatctcctacccaaatctcgttcgttgacccgtagctatccatgctccaaatctcctcatcaacttcttgcggcctttgccctcggcctgaattgacccaatcaagaatgagaactgatgccgtcctatctgcaggaaggacgaagcgctgggtctgggagtagatagatgcgcggaagggggaaacagattcaggtaagaggagtaagaaggatgatgaggaaagacgtatgtgcatcctctggcgtgtgaggttggggtctgaagatggcggagaggtatgcaagtgggaaagcgggcgaaggcctggacgacgcttgtatactttggtggtgccctgggtgagcatgacgagcccacaccccgggtcaagcaccacgcttagactgacgag

SEQ ID NO: 349 - DNA, 6110 bp, Cryptococcus neoformans
acccccgagacgcccggggagtacgccgagtctgtttataatgctgctagcgagggtgtcatcgatgctgctgaggccgtgactgagcaagcctccaggcttgctacccagatacgagaagttcttggtgccgtctcaacccaagagcctctggcttcttctgcatctagctacctctcatccctcgtttctgttggctcttccaccgccgccgaggctctctcaactggatcctccatcctctcgtctttgcaaaaagaagcttcctcctccatccactctgctacccgctcrgcgtcctctattcttggagctacacctaccccggagactgctggagagtatgttgaagatgttaaggcccgggcagcaagtgcgcgacaggcagcggakagtttggtgaggaagcatgcggagcagatcaagagggatttggagagggacggaaaaaaggtggaggattattcgcatggccatgggcataaaagagggaaggagaccaaggatgagttgtagagcagacaactgtgaatgaacgtgattttattgcatgtcgttattaatccaaccgcttgagcaattatagacayccaattccttgtagagttttgacataactgagaacacatgattcccccaaacaacgcagcatgcagtaagtaattgctgacagacggacgaggcaggacgtctctaataatagttggccgatagagaagacccacttgggtgtgatcggagaatgccggagttaagcaatgtggcactctgcgcgctcaccctccgctcaccacgtcacgtccgacaacagagacccattacccacaacgtcccataactctatactctctaaactctccccaaaatcgtatatcagtcgacagcgctgagaataacaggccgtccgcaccagtccactccgatttcccgcttcttctgactcgcaacactattgggagaacgaccaagaaggattgagatcctcggggcaagatgcagatgctcacaaaggtcagtcatacagctgggatcctggattagatcggagctcacatttgcatagtttgaaagcaaatccccaagagttaagggcatcgccttccgtacgtctgaagaagcatagaggagcacggagcatggtcccgcgctgacatctcgtgtagacccaaagcagcccttgcttgcggcgtccttgcataatggaacaatccaactatggaactaccagatgggcactttagtggaccgatatgatgagcatgatggtaagtgactcytcataggagaattcaatggcagtactaacatatgttaggtcctgttcgaggtatctgttttcaccccactcaacccatcttctgttccggtggtgatgattacaagatcaaggtgtggaactacaaacaaagaaaatgcctttttactctgactggccgtgagtgactcgaacagctttatgaatgtgacattgacgagtggcagatctcgactatgtccgaactgttttcttccatcgggaatacccctggattatctctgcatccgacgaccagactatcagaatctggaactggcaatcaaggacttgtattgccatcctcaccggccacaaccactacatcatgtgcgcacaatttcacccgtgggacgacctcgtcatctccgcctctatggaccttaccgttcgtgtatgggacatctccggtctccgcaagaaaaaccaagcttctcaagctcccatgtctgccgaagaacaaatcgctcgtgccagccagggtcaagctgatttgtttggcaacaccgatgctgtagtcaagtatgtcctcgaaggtcacgaccgaggtgtcaactgggcttccttccatcctacccttcccctcatcgtctcttgtggtgatgaccgccaagtcaagctttggcktatgtccgaaaccaaagcctgggaagtggacagctgcagaggtcacttcaacaacgtctccatgactatgttccaccccaagcacgagttgattttgagtgcgagtgaggacaagactatcagggcttgggacatgaccaagagaacagccgtccagacctttaggcgggaacacgataggttttgggtgttaactgcccaccctgagctcaacttgtttgctgctggccacgacaacggtctgatagtctttaagcttgaacgagagcgtccccccttctccttgtctggtaatcaacttttctacatcaaagacaaggttgtacgcatggccgacatatctagcggtaacagccaaggcatctgctccgtccgcaagtttggctcccaatacattcctcctcgaaccctcagctacaaccccgctgaacgagctgttatcgtgacatctccttctgataacggtatctatgaacttatcactctgcccaagtctactgcgcctactgctcaggatggcagggatgtgccttcagacggtaagaagggtacagggttctgtgcgctcttcgtggcaaggaacaggttcgcagtcctcgacaagggtgcccagaacatcgaaattaaggatctttccaactctatcaccaagactatcaagtgccctgtccagacgtccgagatattttacggcggtacggcgtccattttgctcgccactccttcttctgtagtccttttcgacattcagcagcaaaagattgttgccgaaatcaatacccctcccgttaagtatgttgtatggagcaccgatggtaacatggtcgccctcttgagcaagcacacaatcaccattgccaacaagtctctttctcaaagcgctctcatccacgagacgattcgaatcaagtctgccgcttgggacgacagcggtgtgctcatatacaccactttgaaccacatcaagtacgctctttctcaaggtgataacgggatcatcaaaactcttgaacagcctgtgtacctcactcgagtcaagggttctgtcgttcactgtctcgaccgttccgccaagccgcaggctattaacattgaccctgctgagtaccgattcaagcttgctctcaaccgcaagaactatgatgaagtcttgcatatcattcgaaatagcaatcttgttggtcagagtatcattggttatcttcagaagaagggataccccgagatcgctctccactttgtgcaagatgagcagactaggttcgatcttgctattgagtgtggtaacttggcggttgcgttggagatggctagggctgttgacaggcatgacgtttgggagaggttgggtgccgctgcgttgcagcaaggtaatcatcaagtgagtgttggttttacgttacatgtcgcgccttactaatacattacagattgtcgagaccgcgtatcagaagactagaaacttcgacaagctctccttcctctatttgatcaccggcaacacccagaagcttaatatgatgcaagtcatcgctggcaaacgaggcgacaatatgtctaggttccaaaactctttgtacctcggtgacgttcgatctcgtgtcgttgtgcttcgcgaaactggccagtaccccctcgcttactacactgccaaaaccaacggccttgacgaccttgccttggagattcttgatgaagctggcttgaccgaggatgacctgcctcctccccctcagaactctggtcactcttccctcgccccccctcccatcatcttctctcaatccgactccaactggcctctcaaggaccttggtgagagcttctttgaccgagcacttgctaacggtggtgtcgacgctttgatcggcggtgaagaaagtggagaacaactggatgcttgggcggcggatgttcctgttgaggaagacgaaggagaggagcaagctgctgatgaggatgaaggatgggatcttgacgccaacgtcgaagtgcctgatgtcgaagaggaagagtttgacggtgaagacgttttggctgaggcggatttgagtcagggtgtcgagcctggtgcgagcgaggatgagatttggcaaaataactctgcattggctatcgaccatgcagccgccggtgctttcgaatctgccatgcttgtgagtggatggactgatctgctttcatgacgatgaaatagtgagctaatgatttatttttacttagttgctcaataagcaagtcggcgttgtcaactttgaacctcttaagcctttgttcctccaagcctaccaacactctcacgtttacgtccctgccaacgcttccctccctcctcttcgactcaatgttcgccgaaatcccgaaaccgccgaacttcgcgacgccctgcctgccgttcctctcaactatagcgagctgaaggcaaccgaggtggccgatgccaacaagtactttgctaggggtaaatttgttgaggcgcttgcaacgttcaaaaatgtattgtcaaaacttttgttggtagttgttgaatccgaggaagatgctgaggaggtgagtttacccttgggtgatgactcctgcacgcgatgtactaacgtcacggacaacagataaaggagcttgtcacctcttgtcgagaatacatcattggcctcactatggaagttgaacgacgacgaattgccgtccaagatcccgaaaacgtcgttcgaaaccttgagctcgccgcttactttactcactgcgaacttgctactcaacatatccaattagcattgcgtagtgcgatgaaggtgttctctgatgcgggtaacaccgccaccgctgctgtgtttgctaggaggttgatcgagacacagcctggtcaggctgtcattactcaagtaggtctagcattggttttgaagtgttatataacggaatagtacattgacattgtctcatcaggcccgtgctgtcatctcccgaggccagcgtaaccctcgagacgttcacgaaatcgcctacgaccaaaacgcatcattcaatatttgcgctgctacccatactcccatttacgagggctcaccatatgaagaaagcgcgtactctggcgccaagtacttgccagagtacaagggtacagtctgcgtggttgatggattgagccaagtcggtttggctggaagcgggttgagaaacatggtttaagatgggttttcgttttgtttttgtaaggactatacatgggagagtagtagtggaagagaaaaagcggtggttggttcagaatcaaaattgtctagatatgatatggcttgcatggaattttatggcttggacaatcatcacgttgaatcggggacctcgaacaaaagatatacatgatgtggcttgcaatagcaacgagcgcacttttctcttcggtatcgaataattgctacagaaatatcaacctttgacgaagacctgcccattcaaattcagcaatgaaagaaattcaagcagtcttttttgggtctggctttggcaccagatgagtataaaattgtctgccccaaaaccaattcttcaacccaataaaatcaaggatcgctgcagcccaatcaaaaagcgcaccataactgcccgctctgataaatccaggagggtttaccttgtcaatgatttttgcgatatcttgcccagccttgtcggctttcatgatgatcctctcggctttttgagagtcttttgtcatgttgtcggcgatcattgagaagttggggtaataaggcgtggggtttggggatttgctgtcaaagatcttttggttaaagtacatatccgtgttgacggtccctatatgagcgccagaatgaatcaatcagtgtactgttcgtcgtagaagatttcctaattacggaaagtttgattcgctcaccgatatggcaattgatgacctgcacacccaagggcatcatctccgacctcaaaacctctgtcatgcactccaaagccgctttactcatactatacccacccttccaagtaaaaccggccttggatagactacccatgttgacgatgacgctttggcgaacttgatttgtaccggggacaggctcgttggcggctttgacaaggagaggggcaaagccttggataagagcaagagggcctatggtgttggtttcaaggacctcccggagagccgggagggaagtgtcaa

SEQ ID NO: 350 - DNA, 6581 bp, Cryptococcus neoformans
tcgtgagcatcgtctgtcattatattaaatatcagaatatacccactttcgcgccctccagctgcttagccctaaccatttcccgatctgacggctgatccacattcctgcgccaccagctacctcctccaagcttctcagaccatttttgagtttcatagttggtatacaatgccagtaatgcatagcctcctccaccaaatgccacacaaaactggaaaattcagtgatagacctcgctggtgtatcgccatactcactactataggtctccaaattgaccgccggggtatactagtatcgataaccgttgagccttccagggcagatcttggtactgcgattcgcttgggagttattctaccgaggtactgtcttgctggtttcggtgtgacgttggaaatattacgacgagaccgaagaaaaggcagtcccacctgttgcgaaaggcaaggtcgactggccgaagcggtgaaaccggataacccgcttaataacatttgtcgagggatcatactggttcaaacaggcaagactcgcgaagttattctttttggtcggttctttagtgcggtgattttatccagacgatatgtacccaagcttgaaattattgcgatcaggacgaacgaaagctgacggaagaatgtcggcaagcgtaacatccatcatcgtttaattagccctccgacaaaaaagaaaaagaaacgatgacgccagaagtacatttcaaaatgacgtggaattctttatcgatatttgactccgccgtggacgcgcctgctgtcaacaacaaacacgcgtaggtcaaaacaatcagaaactataaccctcctcttctttcatttcaccacccaaacctcccttaaacatctttctcagctggtcaacgagaggagtgagaagataatcagcacaataagcccctacaatcaacgtattcgggagagaaaggaagaattccttggaaacaacaggataattaaaggctgttggtgatatgagggtcgaagagctcattttggacggtgagtctgccgaactgagccttaacgacgataatagaagactcatggcctgtaggcttcaagtcgtatcccgtcagaacaaccatatctggtaagtcagatgccaggtcgttccatgacgagtatcctgatgatatccctttctctaggatttgatgaatctttcaatgccattaccggtcttaacggttcgggaaaatccaatatcctcgatgcgatatgtttcgtacttggtattacgaatatgcagtcggtaagcagtattactggattgattgtcagtggtggagactaaaatatggctttcataggttcgagcgaacaacttgatggaccttatctataaacggtacgtgtcactaaaccaagtctgtgcgaaagaatatgctcaacgtggtatttaggggccaagcaggtgttacaaaagcatctgtcaccatcgttttcaacaatgaggacagatcgaaatcgccagttggttttgaaaatacgcctcaaatcacagtcaccagacaagtgtgttcaaagtgttctccaaaatacgagatttggcttatacctttctgtagatcgcggtcggcaatgtctccaaatatctcctcaacgggcataaatccactctccaagctctccaaaacctcttccaatccgttcagctcaacatcaataaccccaatttcctcatcatgcaaggtaaaatcaccaaagtgctcaacatgaagccagcagagattttgggtatggtagaggaagcagcgggaacaaggatgttcgaggagaggaaggacaaggccatgaaaacgatgactaaaaaagacaagaaggttgaggaaattgaaagcgtgcgccaatcagcaaaatacttttagctctcagctgacttcgtcttttcagctgctccgagaagaaatagatcccaaacttgagaagcttcgagctgagaaacgatcgtatctagaatatcaaaaagccacctctgagcttgaacgtctcactcgtctcgtgaaggcgtacgaatgggtcgctgctgttgaaaaggctgaaaaggccacagagactgttaagaaaaagaggaaggacatcgagactgctaaaggcgacataatgagaggaggaaaagagtgtcatggaatggaaaaggagttagaggaaatacgtaaaaagaaagaaaaggtgcgtttcatgattgttgtaacaaccctattgactcatggcatcctgcaggaacaagccaaaggagggaagatccagggtttgactgaagcggtcaacaatttggaacgcgagctggtcaagatcaaaactcagatcgagatcaccgaaagcactctgaaagatgatgccaagagagtcgaaggtgccaaaaaaactgtcggagaggtgagtaacagcgactcaaacgatttggatattgaccctcagatagctttccaaaacgctcgaagataggcgatctgagacttccaaagagagctccgcctttgccgaattgaaagatgcatacgacgccggccaagcggagctttctaaactcgaagaacttcttcagtcacttttgacgggtctctcgtctaatcaaaacgatgaagagaacgcgggcggctacctcggtcaattggcagaagctaaagcccgcctggcagcggctgggacagaagccgagcaggccaaagtcaagattggtctagcggagaaggagttgaaagagaaggaaccgagagctaaaaaggctgagaaggatggagaggggctggtcaaggagcttgcggctaagagagcacaaatggagaagctgagaaagcaggtcgagagtgctggatgggatgaacagcaggaacgcgagatgttggaatctcaagccgagcatcaatcaaagatgaccgaactcatggacgtaagtatatttgacgagcaaagttatctaaggcgtacttacaaaacatgttagaaacgcgacatgcttaaatctcgtcttgcatcaattgacttcacttactctgatcctgaagccaattttgaccgttccaaagttaagggtcttgtcgccaacttggtcgaccttgacgaagaaaacttcagcaactctacggccttggagatctgcgcgggaggaaagctttataacgtggtcgtacacgacgaaaaagtcggctccaagctgcttaaaaatggtaaccttcggaagagggtgacgatcatccctttgaacaaaattgatgctaccaagattgcagctgaggtaagtgcccgcctcatatttttttaccgaatttgtgcaaggtaaataggactgactattgtagaaacttgccgctgctcatcgcgtcgctcccggcaaagtcaatcttgctcttgacctcgttggctacccagaggacgtctctgccgcaatggcctacgtcttcggtcgcacgtttatctgtgctgacaagcgtacagccgaagctatcactttcaacaaatcaatcgcggtaaagtctgtcactgttgaaggtgatgtatatgatccttcaggtacactttctggagggtcagcaccgagcagcggaggtgtattggtgaaggtgcaggagttgaaacaaattgagagggagatcgcaaagcacagatctgcagtagaagaaatcagaagcaagttgcaaagcgctaaaaaagttattgaccaatggaagaaggacaaaaagaatctggagctaagtgagcacgaagtgaggttgctggaggagcagataaagggcagtaatgctaccaaggtgcgcataccagatcaaaggtactgaatcagggcggtactgacatgtctgtagattattgctgaggtggaagcggccagaacatcccttgccgaccttaagaatatcgtcaaccaagctaaggaaaagcagaagcaagcttcagcggattgcaagcgtctcgagaaggagatggccgatttcaagaacaacaaagattccaagttgaatgaaatcaaggtatgttgttattcattatatatggtgtctagcgaggtaaaaatgacccaattgtaacttctatgagtaggcgaatatcactagtaaaaagaacgagcttggaaagaagacattgcaggtcaagacgcgccagaaggcgatccaaaccgcggagcttgagcttcgtaagttgacttcctcttttttcgttctgctatccgagcatttaaatctgatatctttgcagagcaactggaaagtgatctcgaaagtgctaaggctgaggtcgaggaagccactgctgctcaagcgaagacaaaggctgaacacagtgcactgcaagaaagttttaaagcatcacaggtcagtctcgagcttttcattagaactagcaatccagaagctgaaatttcattgacgtatttcattgcagagtgatcataaggctgccgaaacgaagctcaggagcgaagaagctgtccttgtcgcttttgacaacgagcttgccgacttggaacgtgacctcaaagcaaagaaacaggatatatcggatgctgagctctccctcaagaagcttgagcatgatctagggcttgttgaaaaggagaaagcaagtttagtggatcataaggtgaatttggaaaatcggttccagtggatcttggacgagcatcagtaagtggccataatcattcgaattcggagcagatgtactgactggcctttaggttctttggtaaaatcggtactccgtatgatttccgaagtgtagatcttcaacaagcgagggatcagtgtcgagagcttgagtctcaggctaatggaatgggtaagaaaatcaaccctaaggttatgaacatgatcgataggtaagccatcatactcacttccgagcattttggaccatttatgtttgctaatgaaataacaaaagtgtcgagaagaaggagcaagctctgaagaagatgatggctactgttctcaaggataagtccatgattcaagacacaatagaggagctcgaccggtacaaacgcgacgcgctaacaaagacttgggaaaaggttaatgggtgagtgcgatggatccttcctaatcgttagatgctgaaccgtgccatcagtgactttggtctgatcttcgccgaacttcttccgggcaactttgccaaactccaacctcctgagggacaagacttaacccaaggccttgaggtcaaggtccggttgggtagcgtgtggaaggcgagcttgactgaactgagtggtggtcaaaggtgaatctacctcattcgcctggccatattgaataacgtgctgataatcaatctagatcacttatcgcgctctctctcatcatgtcccttcttcaattcaaacccgccccgatgtacattcttgacgaaattgacgccgcacttgacttgcaacacactcagcacattggtcaactcttccgcaacagattcaaaggcagccagtttattgtcgtttctctcaaagaaggactattcacgaacgcaaatgtcttgttccgagcgaggtttcgggacggtacaagtattgtcgaggtcagttgctttcgttgtccgccagtcaatgacgtggggtgctaatgacatttgcctacagagaaccgaaagacggtcaaatgctttgcatagctcgtcgtcggacaaggagaatgcacaggagccagtggcaggtaagggtaacaaacgaacaggggatagccgtgcaccattagctgctcgataattagtggttttccgtgatcttgggtgtttgggatacgtaaattagatttgttgtacgttatatgcattacagatccttaataacatgcttgtgatgcgatacacgatgccaagtcttcaatatgctgtatacagcttatccgtctcactttctggtctttttccccttatttggctctttaccggggactaccatgaggtcccccccttccccgctatctccacccatctccttgattttcattccagcttcaaggctgaacattaaatcccttacagtctcttccaatgtttggcattccacctccttatccttcctccttttgattgcttcgtctctttccctctccagcaccttcactctctccgacaagccttgcgacatcgccctttctgctcccagagcagactgcaagcctttactcagctccaacgccctctccatcttcctctctgccttttccctctccttctccgctttttcgagcccctttaacttctgctccgtctctttccccctcctttccaactcttccaatcgagtttccagcgttgactgtgatttttcataatgctggcgcatggactcgagctgtgaggataagaggtaagaatactcgagagtgatggactcgatggtcgagattttgtcgatatcgtttgaagacgggccggcatgcccttgggcttgcgcttgcgcttggtgctcgctggtgctgccgatatccatggagctggaacgagcaggcgccgatgatgtaggctgggagttgccgagaggcatgactctaggaacagaagaggtgacgagtgatgaagctgatggtagttcaacgagtttaccat

SEQ ID NO: 351 - DNA, 5895 bp, Cryptococcus neoformans
aagaatcatgcccaagctcgaggcttggctcaaggctttgtacgagattgtcgagaaggaggaaggtgtcttcaaggctggctcttacggcgaaatctagagtaatggaattactagtttacaagtcatttattgcgtccgtgctgcgatctaaattgggatagtagcgtgcacgaggcttatgccttgcagtaacacattgcagtaatgcttgtacaatatgtagttgcagttacgtatatgtgcatggttgacagactcgggacgccacagattgagaataatttggttccggtttttttttgatgccgcctctttcgcgacgcgtctgtaaacaaaacaaaacaactgaaaacgaacctcgaatgccataaacattcttcttttctcgtccccatttatagcagccgcaatggcagaattcacactgcaagaacacctcctcgccctctcagatccaccgctgtaccaaatttccgcagaactcgacatcccttctctccgaacatcctccatcgattcctccctttcctccgccattgaagaaatcgcaggtgatccggaatccatcgtgaactcctccccatcgacgttcgacgtcttccgctccatcctcaagcatgcagaccaaccaaacgttgattctggcatactcaccaaattgctggatgtgattgtctcagggctgagttatcactcgagcacggtgatggcgattgtcaatggacaagggtttggtgctgaagccgatatggatgcgccaatggtacataagcagccgcttgaaatgtgggcgtttctgctgcagtggtttgtcaatgccgcagagcgcggggcgggaaagacgaacgatgaaccgagacaggcaatgactgggagaggtaaaaagaagactaccaaaaccgcaggtggagctgggatatcaacatcattcgtattttcagatcacctccccctagtgctcggtacgatgcacaaaactctccgaataccaacttcacgattatggcgtacctcttccgaaagagaagccttcatctcgtgctttgtcaaacccgcataccaactcgccgagacagaggcatacctcaaaatttccgagatccgcctgggaatattcaaagtcatctgtctcgctgtcaaattccatcaacatgcttttggggcccaaacatcgattatgcagaatttgacgtatttcgaacatctctcggaaccgatggcggagctgctggcgattttggaaaaagaatttgatttttcgcagttgggagaagaagttctcagggatgtagcgggaaagagctttgcgcataatgatgcgaaaggtccgaggagtttttcgaggtttctcgttaggctgacagagttgagtccaaggatggtgcagaagcagatgccattgctgctcgcacatctcgatagcgacgtaggtccccttgttaccctttagtccatggatgctttcgggaagattggactaatgttgcgatttcaggcgcaccctatgcgaatggctattgtagagatcatcggtatcctcatcaaagacatttcatcatctgatgaaggtgacgaagagcaaaagacgaagcagatccagaggttctttgagttgttgatggagagatttttggatctgaactcttgggtgagatgtaaagtcctgacaacattgatcaagctctgcgagtaagtggcgtagtcttcattatgcaagaacggacgttgagatagtttacaattaacctgacacaaatagcctacccgccaaatttcctaaacagcgtcatcaaattaccgaacttaccattcgcacacttgaagataagacatcgtctgctcgtcgatatgctatccaactgctgtgtaaactactggagactcatccattcggtgcacttcatggcgggacgttgaatttgcaagagtggcaagagaggtacgaaaaggtggcagaggagttgaaaaaggtggatgcgcaagaattggaaatggcgaaacgggaagtgggggttgaggatgatgatgaggaaggtgaagatgatgaagagcagaaagaggatgaagaagggactaaattcaacaaagaaaaagaagacggggataaagaggaagacgacgaggctcaaaacgaatccaccccaaaacccaagaagaagaaacctcgtcaatcccaactcgacctatccgccatccaatctgaacaagcctccatcgatcccaacctcatcaccaaattgcgtcttaccaagaaatactatggcgatgctctccgattcatcaaccaactggaatctgccatcccaaccttgtgccaattactcgtctccaccacgaaaacagaagtccttgaatccatgcggttctttagggttgcgtacgagtatgatatcgcctcggccgaacagggaatcaagacgatgttgcatttgatttggacaaaggataataacgcgacggctggggaggaaggggaaggaaaagggattcggggcagtgtgattgagtgctataggagtttatatttcgatgtggtgccggatctatcgccaaagcagcaggtgaataggatcacaaagaatatgattgagtaagtatcgtcattcccgtagatttggaaggggaagaggctgatgatgacgcccttttccgggatagacggacgtatggtgctacgttggcagagttgacaagtctggaagagttgatgcgcacgatgatgggagagaatatggtgcataccgatgttgtcaacaagctctggcaagtttacagtgcgtctcctaccttttcttcttttaactatcaaccttccccctgaaggtggagctgattaagaatggtttcgttttgagtaggtacggaacaagaaatccccaaggcgcagaggcaaggggcaatcatcattctcgggatgttggccctggccaagaaagaggtggtaaccgagaaggtggacaaactattgaagattggtttaggaccacttggaatggtaagcaggaaccaaaattaattatagtgcaaagggttttgagagctgatggacaatgtgtcgaatcatagcaagatttggtgctggcgaagtatacttgtatcgctcttcaacgtcttagcgggtctgcgaagaaagtcaaaggtttgctttttccctccgctcaatggaaggtgtgatccacggagactgattctttcatataggctccctccaagacaaaacaatgcgtttaccaatggacaatcctatcttcaccaaactccaagatatcatcgagttttctcccaaatccccccaatggttctccatggctgaacaggctgttaacaccatttacctattgggtgaacagccggatagactttgtacgaagatcataaaagacttgacagccaaggtgtttgaagcgcctgaaaaggaaatggaggtcgagaaggaaaaggagagggaggaagaaaaaaatggagaactggagaatggaaaactggacaatggaaaacaagagatcactgaaaatggtgatgtctccgtgagagcagataacgagccggaaactgtggatgatggtgaaacctctcaaacccaatcccaactcgcccctaccaatgaagaggttgcgcttttgaaagcacaagccagtagctttaggattgctcaaatggttttcattgttggtcatgtggctttgaaacatatcgtttatcttgagcttgtggagagggagttcaagaggaggaaggatgagaaagcaaaaggtaagtccaacgtagcttctttcatctgccattcttcttatagggcattgggagaacggaaaagttgatcgtcaatgcagagaaagcggcagcaaaggctgctgagaaggaccagaacgatctcgacgctgtagcaggtaatgccgaggatgacatcggtgatctcatatccaccatgaaagagaaggaactgctgtatggcgacaagagcttattggccgtgtatggagatttaatcgcgcatatctgtgccagtccaaagaaatacaaagtgagttgtcgatgttaggtgtgggaatcggtggatactgaaatgttttgatgtagtatccttcactccgagaagcagcaacgctgagtttatcaaagctcatgtgcgtctcgtcccagttttgtgaacaacacttgccgttattgttcaagattctcgagacgagcaaagaccctgtcgtaaggagtaatatcgtgatcgctttgggcgatatcgcagtctgctttggtaacttgattgacgacgtgagtaatttcagtctgtctgcactgggacgctcctagttaatacactagagttagaactccgaacgtctctatcaaggcctcgcagataccgaccttgtcgtcaagaagaacaccctcatggttctcacccatcttatcttgaacggtatgatcaaggtcaaaggtcaactgggtgaaatggccaaatgtttggaggatcccgatcaacggatctcggacctcgcgaaactgttcttcacagagctgtcgacaaaggacaatgcgctgtataacaacttgcaggatgttatcagtcatctgagtattggagcacatgccgttgatgaggggactttcgaaaggacaatgcgattcattttcaccttcattgaaaaggtaagcattttgttcgaagtctgtaaaaagatataacaagctaatgtgtcaaaataggaaaagcaggcagaatcaattgtggagaagctatgccagcgattcagacaggcgacagaggagcgacaatggagagacatctcctactgtctttcacttttaccattcaagtctgagagatccgtcaaaaagctcatcgaggggtgcgtcttatatttatactttcaatgaaagatgtcctagactgatttgatgacttcagtctgccattctatcaggataaactccatgaagagacagtgtttagacggttcactgagatcttggccaaggctcgagcgaacaaggcttccaacaagcctgaaactgaattgcaagagttcgaacgggttcgttttttgcctatttctttcaacctttaaacttatgatgcacgtatcagatcctcaacgagcatcaagcaaagggtcttgaagatcaagccctcgaagcggacgtattacgcaaggctaaagctgcgaaacgccgtgccgctaaacggcctcctgcggcgacagcgagaacgacccggagaaagcaagtcattgaggaggatgttgaggaagatgaggaagagacaccaactgtcgatgaggaggaggctgaagaagaagaggcatttgcaccacggaagaaggtgaccgcaagaaaggcgccaccaaggagaggaggaagaaggaagaaagttgtggaaagtgaggatgaggatgaagaggatgaagatgaggatgatgagtaggttcggtaatagtcgtgaacgattatattcttccatatatatgggtgttgtaggatgcattatgattttttggctctcaactcaagtattttaccaatttccgctaggtgtacatcaactgagaagcctgccatttattactactattatgcggtgacaaggaagttctcaaacggtgaaatgaacgggaactgttgcaatgagtgaaagataaaccgcatttatacattctaataataagattgctactctatatcgttcgttttgtaatacaaattctttgatttctctcaactttgccaaaacgcagacttatgctccaaacgccgccccagctccctcttcctctgatatctttggcattttgttctgtctaaagaaaacaataataatcaaagcattcagcacaagccacccgaattggaaccataaggatgcttgcacattggcatagttggtcattcctccgg

SEQ ID NO: 352 - DNA, 6680 bp, Cryptococcus neoformans
gaagggtcgagagtggggtaagctggtgtcggatgggaagaagcaccgccgttgtacttgtattgagcaatcgaagatgacaagaatgtcttcccacagtcagcgctacgctcaatagaattgcattgtggcatctccgaagctagaaacaagatctgagccaattccaacacatgaggtatactcacttacgaggaaagcaacgcagatacatctgcactttttgggctctacaataagtcccatcactctttgagccatgccttggagggtatagacaatgactaaagaattgttaatattctccgctgtttcctggagaatgactgtgccacatggagcttgccgtgaaggcctgctccttgcctgccatccgcatcttttaaatggggttagccaaagataagtatgcgctgaatgtgggtctggctatgttgagtgtatggtcgcgactgtaacttgaagaatatcataggaaatgcagtagtagcgttgtaaataaacaccaccactcccccaacgacgaaatctactaatctgccccggcaaaatttacgcgtcaccttactttttccccgctcgcttttgacacaacgcggtaaacaaaacatcaaaatatcaaggtcaacaacgaacaaagccatcgcgtcgtggcctgcaattttaatacccaacctaggttattccttcctccttcctcgaccacctccttcggtctgcttcaacgtaaagcactggtacaactgtctgctacagttacagtaatccccacctagttcgtctggcgacttctaaatcaccaccaatcgaacacaagtaacaacatccttcgccatgtcggacagcgagtttgatgactttagaatcgatgacgatggtagcgaatccgattattatgtagcgccttccaaagggaaaaaagctgctgtgcccaaaaaaaaggcacccgccgcaaaggtatagttagaatgacccaccgcagtttcgtttcagctgaattatgatttcacaggcgccagcggccaagaaggcagctccaaaaaagattaacaaagccccattagcgtctaagaagcaccccaatgagtcactttccgatgcaggttcggatacagtttgttcgccgcccaagaagaagacgaaagccgacgatgatgatggcgattttggtaccgaatcaagtgcaaaagcacccactagtaacaagaatgcgagcgaagtataccagaaggtcggacagcttgataaatctagattccaataaaactgacgctttcatagctttcgcaaagggaacatgttttgaagcgtcctgatacctacatcggctctgtagaggctattactcagcccatgtggattttgaatcccgaaacaaagactatggtgcacaggtaggtgtgaaaactgtgtaaatagattctttccatttataccgcttcaggcctattacatttgtcccgggtttccttaaaatctttgatgagatcttggtgaacgcttctgataataaggtaagtgcagtgtgtgttatgaggtctgatggcaactcatccacttttacagatcaatgaccctaccatggactctatcaaggtcgttatcgaccgtgagaagaatgctatatctgtgtataataatggccgtggtatccctgtcgagatgcatactaaggaaggtgttatgattccggaattgatcttcggccacttgtgagttcccatatctccagcttaaatgggtcactcagccattcccatggtagactggcaggaagtaacttcgacgacgaccagaaaaagcttaccggcggtcgaaatggctacggtgccaaattggccaacatctattctcacgagttcagtacgtcggctgttgtgttttgaaagcctctgtgaactgatggttatatagtcgtcgagactgctgacaaggtcaacagcaaaaagtacaagcagatcttctccaacaatatgagcaagaagggcacccccaaggtatagaagacctacgaagtcctgataatgataggctgattattactcagatcaccgacaacaaaaaaggcgaggaatggaccaagattacattcaaaccagatctcgaacgatttggtatgaatgggattgatgatgacaccaacgctcttttgatgaaacgtgtctatgatatggcgggtacagtcaaagatgtcaaagtgtttctgaatgatgaacgtatcaaagtgaaaaattttaagcaggtgagtatacacatgtcaatgacagaaaaaggaagctcatctcatccttcatagtatgtagagatgtaccttaacgcttccactactgccacctccgaagctgccggcggtgctgctgtgaccaagccgccaatcatatatgaggtggcaaacaagcgatgggaagtagctttcgcattatccgatggtgaattcaaacaagtgtctttcaccaactccattgccactaccaagggaggtactcatgttgacatgattgctacgcaacttgccaataaactgtatgtttattacgatcttgttcgacgtgactaatgaagtgaaaagaatggatcaaattaaaaagaagaacaaagctgccccggtcaagccatttcagatcaaaaaccacatgtggatctttgtgaatgctctcattgagaacccggccttcgactcgcaaaccaaagagaaccttacactcaagtcatcagcattcggcagtaaatgcgaattgtcggaggagtttatcaagaaaggtcagttgagtacctttcccgcatgtaaatgtttgatccagtccctcattattctgttcacagtggccaaaaccggtatcatcgacaatgtcttgaattgggccaggtttaaacaggaccaaatactcaagaaaacagatggtaccaaacgatctcggtgcgccaatgcgatgtaggcatgtacattcactaacctacaacattcaggatttctggtattgtgaagcttgaagatgcaaacaatgctggcggccgaaactccaagaactgcactctcattctgacggaaggagattctgccaaagctctcgccgtttctggtcttgcagttgtcggacgtgatgagtatggcgttttccctctcagaggtaaacttctcaatgttcgcgaagctggtcacgaccagattgtcaagaatgtggaaatccagcatatcaagcagattttgggcttgaagcacaaccaggattatgccactgctgacagtctgcgatatggacatttgatgatcatgactgatcaggtgagcatgagcgtccagatgcccacgaatattctgacttgaagatcaggatcacgatggctcccatatcaagggtcttataatcaatttcttggatcacttttacccttctttgcttcgaattcccaacttccttgtggagttcatcacacccattgttaaggtctggaaaggcaaaaaagagatcagtttctatacaatgccacaatacgaagaatggaaagcccaaaataacaacggtcgtggatgggagtccaagtactataagggtctgggcaccagtacctctgccgatgccaaaaagtatttcagcgatctggacaaacaccgtttggcatttgagaccatgcagccggaggataggcaactgattgatatggcgttcaataagaaaaaagccgatgatcgtaaggaatggttgcgtcaatttaaagtgggctaaggcgtgacaatgaattgtatattaaagctaatgaatttatttgcagcctggtacctaccttgatcatgatgttcaatccctccccatctccgattttgtcaacaaggagctgattctcttctccatggctgataatatccgctcgattccttccgtggccgacggtctcaaacctggtcagcgaaaggttctctttggttgtttcaagcgaaacctcaccaaagaaatcaaggttgctcagcttgccggttacgtttcggagaaaaccgcatatcaccacggtgaagccagtttgacgtctaccattgtcggcttagcacaaaacttcgtcggtagtaacaatatcaacttgctggaccccaacggtcaatttggtactcgtcttgcaggtggtaaagacgctgcttctgctcgttacatcttcacaaacctcccacggatgactcgagcaatcttccaccctgcagacgacggattgctcaactacttggtcgaggatggcatgagcattgaaccagactatttcatgcccaccgttccaatggtattgatcaatggcgcagatggtattggtactggtaagttcattccagctacaggcattgttgcacagtcaataacaatgatcaggttggagtactgccatcccaaactacaatcctgtggatatcgtcgaaaacttgcgcagaatgatgagaggtgaggagccggagaaaatgacgccctggttcagaggtttcaaagtacgcattacacgtcaaagctgaggccttgctgaatgcgagttatcttttcagggatttattgagcggattgatcaagacaagtacaaagtcagtggcataatcgagaagattaatgacactaccctcgaaattaccgaattgcccattcgaaggtggactcaagatttcaaggaaatgcttgaagagatgaccacagggaccgacaaagtaccccagaccatcaaggtcagtgtctgatcaggaagggggacagcggctcatagtttcatataggactatgaggagcaccacacagataccacagtgcattttcgagtccatatgaccgagaagaacctcgccgatgctgagaaggaaggcttcgacaaacgattcaaacttactacttctcttggtactggtaacatggtctgtttcgacctgaacggcaagatcaagaaatatgccagccctgaagagatattggaagaattcttccacaagcgcctcgaattctatgggcatcggaaggtatgttatcttacccatcagcactgattagtagactgataacaaaaagcaacaccttgccgacgagctaaacaggcaatttgaacgactcagcaaccaggcccgctttgtccatatgatcatcactaaggagctagtcgtttccggcaagcgacggccagatatcgtcgctgaattgcgtagtctcaaatttaaaccttttcccaagaaagaaagggccaaagaggaaggagaaaacgaagctgccgaggaagaagaagacggagacgaaggacaagctagcgactatgattacctcttgggtatggctatctggagtttgacatcagaaaaagtgcgtgtatcgaaaaaatatgttcaaatttgcaattgacaaagagcatataggttgagaagctgttagcagaaagggatgcaaaggagcaagaactcatcgagttgctcaagctcagtcccaacaatatctgggatcgggatttggacaacttcttggctgagtggcaggtaagttgccggtaccttcttctacttacaagctggttgatcattcaaaaatatagcttgcccttgaagccgacattgctgatgccaaaggttcaaaacccaaagcgaaagccgctgctatcaaagcgactcaaaagccgaaaaagcgtgctatgtaaccaattatcactacctcacatgcattatgtgccataatccaatgtttattatgcatggaagcacaattggagctgaatatgtatacagcttatgcatggcaactgaatagagcctatgcatggaatatagatgagtataatgctctgcacttacaccctcctccatctgcgtgtcaaagaggagcatatgcctggaagcaaaaacagcagcttcagattggggtttcacttcggacacccctctacttccactttaggtaattttacaagggcagtcgaaagataacaacgtccaaccctgtaggggggaccttgacatgagtgcaggatgtcagatcttgaggatgatgaccgatgcgctaacaacaatgacgaatctgttctcccttcttaatcgataatttatgtgacatgtacatagttgattgggaaacagtgctatcatccccaccatccgatgtcctcgtgtcttatgtgaagaaaacaaaccacagcgtattcccaccatacataaaatccatggataagtggctgcattttcgtttcatttttttctctttatatggggttggtgttctccggttgacatctgacgcgtctcttgcgtttgcttagtttccgagttccgcgatttgataaatgcatttatttcgcaacaagacactcgtttcaactcctcacccagccagccccatcagcccgcaggaattaccatagtcttatcataagtccagccgccttccacactccagcactcgaacacattctccttcacttcgactattttcggcatgcactcatccagccctaccgcgcccttatcagacatcaatcgcgtcgcggttacttcgacaaagctcgccagaagaacttacggtcggcgttcaaatgcgcataaagagaagaggaaaattggggctacggaatgggaacgttcggagacacctgatgttgatttctcagataacggtcatggagaagatgaattacatctttccaggtccaaacggaggaatgtagaaattggtagtcctggg

SEQ ID NO: 353 - DNA, 6878 bp, Cryptococcus neoformans
tttcgtaaaaagactcactattcacccgattgatcgtgccccttttctctttgccatccttgccgtcgtccttacccttgccatttcgcccactctcttttcttgtgtcgaaatccgtctcgtcgtgggaatagtccccgtcgttgtccgtgtctggcttcatggggatggtagcgccaacgactggttgacaatacgtccgaatgttctataactggaacagtatgagttgagtgggatgggctgaatggaaagagctgagatggacaatctttcgtttcaaaatttttgatatccgggcctggaggagctattactggattgaaagatggatggcgaatattgataattgatgaatgggacttgaaatctgcgccaccaaacacaaaaaggtgagtataaaaagcactactaaattaggctatcgatgataaggtgtacgtatagcctggcggcgtgactgacgattgctgaagtcacgggggatgaagatgggtcgaatagagtaaaaaggaaaggaggcgtggatgataggaaagaggcccgtgcaggaagtataggcagaagaggaaaagctatcagtggctcgaatggggtgggggggggacgctggaacgaatgtggggaaggttgttgcggccagtggttagcgactggcggcgtaactttgctgcttccaacgcatcccagcgaatcacagccgccactgaccctgttcttctaggctgctttcggtccgaagctccgaatccgaaccactatcccctcatccgttaggcccgccaggtacctgacacctgtcgggagttaggcccacgacgacctgcctacgcgttttgagccagatcacaccagtcgcgtcaaccgcaaggacattaattccaacagccacgcacgaacccgaaacacgtccgccggtctcgtgttccagtctttcatcctattcctcccactggcgctccatatattcttccccccaccaaattcataatctaccaatatgccgctccaacggttggagctctacaacttcaagtcgtatcgagaaaaacaggtatttatgacatctcttcggggtcgttttccgaacgctgatcggctctcgtaatcaggtcatctcgtttggcgatgttcccttcgtctctatcataggtccaaacggtgctggcaagtccaatttgatggatgccatctcttttgttctaggagtcaaatcagcgcagctccgatcaacccagcttaaagatttgatctatcgtgggaggagagctgcagctcaggaagccgagagtgaaactcagacacagagtgaaagtggggacaattcaggcgatgctaggtctgcctgggtaatggcagtttatatggacgatgctggtaaagaatggacctttcgccgcaggttcgtcgccttttttaattattaaatggccttggcagattgacgaatatgtgcagtgtgtctatgtcgggttcctcctcgtattttctggatggaaggtctgttgcttggaaagactacaatgctcaacttgccaagttcaatatccttgttaaggcaaaaaactttttggtattccaaggtgatgttgaaggggtggctagtcaggatagtaaagctcttgctcgcttgattgaccggataagcgggtaagtaaaattcaaagcagtggaaatacagccaccaagtatatgtgctcaacaacgatcagttcccttgacttggcgccgtcttatgaagctgctaaggctgcccaggaaaaggccacggaggcgtcctcaacgaattatgcgaagaaaaggagcatgctcactgaagccaaacattttagagagcaacaagaggagatcaaacaatgggaaaggcttaacgactccaaggtgagcgtgtactatgctcactgttagcgcgggactaacgcgtggtataggacgccttgacacaacgcctcatattgtggaaattatatcaccttgccaacaagattagccagtctacccagaaggtcgaggaagcaaacgatcgcctagctgaattcagagccgccagtgtaagcatttcaagtgtcaattatcatgaatgggcactgacggccatgtagagtgaagccgacagcaatttgtctgatgtcaagagagagcaagccaaagcacagttgaatgtcaagaaacgcgaagcaaatctcaagaaagcggaaaaggtttttgaagacaaagtgcgtttacagatcaacgtccaccgttcgcggctgattctcgaaacagaaacccgagctagtggccatagatacccagatcgctcattccgagaaaagggcgagcggcgccgccgcccaggaagaaaaagtaaaaaaggatgagaagaggcaggcagacacggtcaaagagctcgagaagggtttggaactcattacgaaaaatatggaggaggccggaggtgagtgtgcctgtcgcagagaggttgtgggagtttgacagctgatgagcatatcatagagaggcagcggcaaaggagtcaggcttcgggtataactctatcgggagctgacctgaacgagtatcgccagctgtgcgtatacccttggctgacatattcattgacaatggcttacaatcagcgcagacgcgcatccgctaaccttcatgctgttcaagaacgtcagcagcttgaaacgcttcggcgtgaagagaaaaatctcagggatgctcttgcttcagtggaagatcagatacagcaagctcggcgacgacgcgaaaagcttactggagaagttggcaaccttgctgaacgggaagaaactgtgagtcatagtctgtcccgagcctgtctaacatcgtagatgactgccaagatgaacgagatgaatgatgagcgagagcgaatcaaaggccagttggaccacgcacaggccgaaaggcgccggatcaagcaagttatccctgttaatgatctatcattccatactgacgatcattctcagtatgcgggagactgaaatcaatgagcgtcttcaggacacttatcacaagcttctccaagctggggctgatagacgtgaaaatgagagggaggctaagctaaaggagaccctcgctagccttaaacgaatctttcccggtgtacatggtcgagttgtcgacctgtgtagacccgtggcgacgaaatacgatacagctgtcatgactgttctgggtaggaatatcgatgcagtagttgtcgaacacgagaaggttgctatcgactgcatcgaggtgagtttcttccgcccacccaaatttatcatgagttttgcttacagtaaaaccagtacatgcggaatcaacgagcaggacaagccactttcatcccgcttgacactatacaggtgaagcctgtccctgagcggctccgcaacttcgctcgtggcgcccggcttgccattgattgtattgagtatgatcctgctgttgagcgggctatgcagcatgcttgcagtagctcgttaatttgcgataccatggatatcgcgaaatatgtctgctatgaaaggggtcaggaagtcaaaggtacgtcatggtaattttggccgtgcaccatccagactaaaattatccacagctgtaaccctcgacggcactgtgatccacaaaagcggtttaattacgggtggccagggatccggaggaggtaggaaatttgacgataaagaagtcgaaggttagttttttttctcgttacctagctgcttttttctaaattagagtcattaggtctcaataaattaaaagaaacctaccttggccagcttcaagaactttatcgatccaagcctcaagacaaaggcgatgaggctctcctggagagcctttctcggcttgatgctgaatccaatatcgccaaggatgacctcgtgagctataaatggtatttctttcttgagtagatgaacttacctcgttgctgtgtagcatgctattcaagtccgtcttcatggccttcgtgaggaactcacacatgtcatttccactattgaacgtctcacccccgacgtcgaggctcgctcccgatctgtcgcgtcatcagaggagcgtttagctgctctggtggaaactattgagcaggcagatgatgaagtattcgacactttctgtcagaggattggagtttctaatatcagggaatacgaagacgtacaactcagaattgccaaggaggcgaatgatgccatggagagttttgcagctcaacaggcgagagtaaaacatcagtaagcacaaacagtaactgcttcaaaaggcaaacgtctctaacactccaacaggattgactttgagtcctctcagctcagaaatacccgcgagcgcattgcccatcttcgaaacctcgctagcaaagcagaaagcaacgttactgaactacgttctcggcgcgaggaagtccaggcagaactcgaatcccttcaagccgaaattgatcgtcagcgaggtaaactcaacgatgctaatgacgtacgcgacgaagtgattcgccgtgttgatgagatgcgcgagcgctctcgaaaagcgcaaaaaactttggacagggtgatcaaagaaattgcgacgtggaatgatgagatcttgaagtatgcgtcagatagacatgctatctatagaagatgtagactagaagaaattgacctgccgctggtcaaaggaaggctcgacaaagttccgatcgaagaggtaggtggccttgtgattccaaaatggtattcaaccgactcatatctactcaattagcccaccaaagatgaggacgtggtaatgggggatgaggaagctacacagaaaccagtgcaagtcgatgattacggcttggaaccggattttgatgtcttagaagaggaagatagagaggtgagtactattatcgcactagcagttttttgaacaactgcgctgactagagttgcacagaacgaagatgaagaagtcggccgcgaattcgaagctcaaatctccaaaatgagaaatgatctcgaacgtttggccccgaatatgaaagcggtggaacgactggacgaggttgaaagggaactggatgatgcggagcgagaagcggaggagacgagaaaggagagtaaacgagcaaaggacgatttccaggcgataaagaaaaagaggtaagttatcacatcgaaggcttacgggatgattctaatgataaaaaagatgcgatctgttcaacaaggcatataatcacatgtctgaagtcatcgataagatctacaaggacctgaccaaaagtcagaatcaggtaggaggtacagcgtggtttactctagaagaggccgaggtgagtactcaaatgtgctgagtggatttaatcttactaatggacgtcgtgtcttaggaaccatatcttagtggtgtcaattatagcaccatgcctcctggaaaacgatttgcggaaatggaacaactttccggtggtgaaaagacaatggctgctcttgcccttttgttcgccatccacaggtccgttttccagtacaacagacagattcaatcacatgctgacagattgacagctttcatcctgcgcctttctttgtccttgacgaagttgatgcagctttggatgccacgaacgtacagaagctggcaagatacgtacgaagccaggccgacaggaatgtacagttcttgattatttccctgaagagcactttgtgagtaacccattctcagacgaccgtagtgttaacgctcacgcttgatcaaggtacgaaaaagcggacggattggttggcgtatatcgagaacaagaagaaaacagctcaatgactctaactctcgatttgagaaaggtaagttagattgcaattcaagtggcgtaacatgcagtaaagtctgacaattctgcagtatggcaactaggacgactcgttcatttatcagtctatataactcttatgtatgtacagtaataaagatttcgataagggccttttcatgcaaatatgtttttcgctacgcatgttaaccgcagagtccagtggtagtgtagtattcagtagtgtaagtaaccaaaagggttgcccactaagacggcgatatatcagtgtagcgaagagagagagagctggatggcgtaacgaaatatagagtataactggacaatagaacggcaaatagaacgcagtctacaagtgcatacacaaggctctgggcagagagtcaataataatcctaagagcaagcacccaaaagacccgaggaacgacacaacctgggcagagagtcaataataatcctaagaactactctgcccaatcagtaatcgattggaagaagaagcgagaaagaatactcaccaaaaacccgaaaggccgcaacaaggaaagtgccacaattcaggtatagctagcggttacgtgtagagtttctacgttgcatgaagaagaaagaaggaataaagcgtataaagaatgtctatgaaaaaacttccttactgcgtctcggaatcttaacctcgcttaataattctcaccctcctcggttgggtcactcttcgaactgaaagctcccttcctggaggatggagaaaagaagagacgagtctggaagaatctgcggtttgaggtttcgggtgtttgggacggtgtggaaacgtcttcaggagccggttggcctccctttcctctttggttttttttttcatttttgcgataccttcgaggtactctttgactgttctgcaaagctcctcccggctgggcatggtgctcacagaagaatcctgcagacagatgtctacagctgcgttgattaaattcggaaagctgatatccgaggtcagtggctctctatcaccagcagaatacaaaccattgctcacaaagaacatttgaggt

SEQ ID NO: 354 - DNA, 6483 bp, Cryptococcus neoformans
agatccggatccggaacctcttggggggccaacttccggatctcaagtccataggtttttggaaggcccatagagtcaccgggagcctattattaataggcgcgcaactgagttcctctgaaggtcggaatgcattctataaaataatttctgacgcgtagccgtctgccgtcccatctgtctacagtttctataatcatcttctaataattggcatgcacactgagtgagtctgacccgtctgaccatagatatgttgtgacgcaaccagtaaaagcccaattacgtaatcaaattatcgttgtcccgatccaacctcctcgagaaccggagaatcgagatccggaacccccaaaccgttgcacggtgatgttccggatctgaggaagacgactgtagcagtatttacaccacggccaagacgtgagaggggaggacactggcgcatgtgtagcagggtatacctgggcagccttatgtatgtgtctgtgatctcatattgctagtgtatgcggcaatgacagtgcatccaaagaggggtatgcatggagttgggtggcaagaacgacggataagtggcggacgcagggtgccacactcgataacgccggctgggacgagagtgaggccttttctgtgggagagtgtgtgcgcctcactccgtctgcgtttgctgttgccagagaacgagcactaatttcttccgtcgtcacccgcctgcctccaccgcccccgccagcagcgtacaccctccttcgtcgctgtcctcctccgcgcccgccacccacagccaggcggcacctgcccccgcctcctccttgtacacccaaaacatcgacgcgtccactaaacacgtcacaacaaatatgtccgactcccagccacaacaaccccgtcccgctcccctcgtcatcgacgatgagcgcaagctcgagatgttcaaaaacatggaccccggccgtatcgcaaacatccggaaggtcagtgttcgcatccaagcatgtatcccggcgctaaactgtatctgcagcggatcaccgaactgcaatcggccggaagttcaaaagagtcgtcaacagagcttgcaaaactcaagatgattctcgatatgtacgcccgggctatgcaactggaacaagaaagagctgcggcggccaacaagcctgacggtccagccgatacgtccacagcagctagcaccaacggccaagctggcccttcaaatccagcccatgtctctatgaaccctacccaaatcgctcagctccgtactcaggcagctgcctatcaacatctctccagaggccagccggttccttcgtatctgcttgcggcggctcaaggaacgcccccaccaggaattggcggtcaaccacctgtaccaacgggattgaacggcatccagggcaaggtggcagataagactgttgaagctgttgtggaggacagtattgaagcgaaaaaagcaagagaaaaagaagaacagcaggacaagacttctgaaggacctgatggtgcggctcctccagatgggccttctcaacctccgtacgcaatggaatttgacgaaacctccatcatctacccttacaatgcctataccgacccgtccttctactccaagcgcaagtttgatgaagaagtcatcaatcctctccacaaacgtcagcgacttataacgccttctatcatgcctcgcggtcttgacccgtatctccttatggaagaacgaaacagatttatcgaaactcgcatggcgtggaggatgaaagagcttgagaacatggattctacagctggtctcggacagccaggagctggcgatgtgcccaacgtcattgaatctgagaagcccggaactcctatgggtgtgcgagcacgtattgagcttatgggccttcgtcttctaggcaagcaacgactcttgagagaagatgtagtccgcgccatgcatggtgcttcccagatccctgccgaccgttcccagttccgacgcttccgaacacacaccctccgtgatgcacgagcgacagaaaccgctgaacgtcgacaacgtactgaacgtgagcaaaggggcaagcaacgtcaccttgcttatattaactctatctgcgagcacggtcaagctctcatcggtgcgggcgtcagcacagcgagaggtcaaggggctgataagatgaagcgactgggtagagcgatgatgaagttgcatgctgagacggagagggaagaacagaagaggatcgagagaattgccaaggagcgtttgaaggccttgagaaacgatgacgaagaggcgtaccttgctttgcttggtgaagccaaagactcgcgtatctcccaccttatggaccagaccgaccagtatctcgagacccttgctgccgccgttgttgaacaacaaaatgacgatgtccatcgcgatgctattatggccgtgccctttgagcaagaagagggtgtcgctagtgaagagatgtttggtgcgaagagacaggatggtgaggaatctggagcagagcgaagggccggcaaggtggattactatgccgttgcgcacaagattcaagaaaaggtcacgaagcaagcgagtatcttgagtggtggtactctgaaggactaccaggtcaagggtttgcagtggatgatcagtttgtacaacaacaggttgaacggcattcttgccgatgaaatggtaggtttatcatctctagtaagacaacgtcgtgctgacttgcaccacagggtctcggtaaaactattcaaacaatatcgctcatcacttatctcatcgaaaaaaagaagcaaccaggtcccttccttgtcatcgttccactttctacccttaccaactggaccatggaatttgagcgctgggctcctgccgttcgtactcttatcctcaagggatctcctgctgtccgtcgagaggcctaccctcgcttgcgtgccatcgacttccaggtgtgtctcacgacgtacgaatacattatcaaggagcgaccgcttttgagcaggatcaagtggattcacatgatcatcgacgaaggtcataggatgaagaatgtcaagagtaaactgagccaaacattaaatgaatattattcttcaagatatcggttgattttgaccggtacccctcttcaggtgagtatattccatgctgcgtagatgatcatcctctcacaagccattagaacaatcttccggaattgtgggctttgctcaactttgtcttgccaaagattttcaattccgtcaaatctttcgatgaatggttcaacgctccctttgccaacactggtggtgaaaagatggagatgaacgaagaagaagctttgctcgtcgttaagcgtctgcacaaggttcttcgcccgttcttattgcgaagattgaagaaggacgtcgaatctgagttgccggataaggtggagaaggtcatctacaccaagatgagtgccttgcaatggaagctgtatgagagtgtacaaaagtacaagacattgcctacggatatgtctgtcgcgtaagtacttttttcttttgattgtaaaagggctacagagctctaacaagattgcaggaaacctcaaaaacgacaaaacctgcaaaacgcccttatgcagctcagaaagatttgtaaccacccatacgtctttcgtgaggtcgacgaagatttcactgttggcaacacgacagatgaacaaatcattcgagtagcgggaaagtttgaattgttagacaggatccttcccaaactgttcaagacgggtcacaaggtatgtgatacgatggataattgagagacttgtgggctaagtgaagtactttaggttttaatcttcttccaaatgacggaaatcatgacgatcgtctccgacttctttgatttcagaggctggaaatactgccgtctcgatggttccaccaaggccgaagaccgtcaaacccttctttcaacttttaatgaccccaattctccatatcaagtcttcattctttccactcgtgcgggtggtctcggtcttaatcttcaatcagccgatacggtcattatctacgacactgactggaacccccacgctgatttgcaagcgcaagatcgagcccatcgaattggccaaaagaaggaagttagggttttaaggttaatctcgtctggaactgtcgaggagttggtcctcgccagagctcagagaaagttggagattgacggtaaagtcattcaagccggtaaattcgacgaggttactactggtgcagagtacgaagcgcttcttcaaaaagctttcgagaccagtgctgaggaggacaacgaagagaccaacgagcttgacgacgatgagctcaacgagcttcttgcgcgtggagataatgagctcggtatatttacagcaatggataacgagcgcaaggagcgtaaaattgctgaatggcgcgcctctggcagcaagggcgaacttcctccccctcttatgcaagagtctgagcttccaccattctaccgacgcgacattggtcaagaactggctgaggaacttgccaatgaagaagaacaaggacgtggccgtcgaaataagggcgaagtacgctacaccgatggccttacggatgaccagttcattgctgcattggagaactcggatgatgatgtcgaagatgcggcggatagaaagagaaagagggccgagaagaaggctgagaggaagaggatgaatgaggtacttgttcaagccgaggcggagggcagaccgttggatgtcgtcgccaccaaggaagtggttgagcctatcaagaagaagagaggaagaccaagtagctccgtgacgccatctgtgacgggggacgaggttcctacaaagaaaagaaagatggagaaggtgcaagggcctgaagtgcagttgatgaccaagctgttcattgaagtgaataagctcaagtcagatttaggagaggatctcaaccaattcttcttggttccggtgaatcgcaaggtgagcgtgttccttttctggtgcgattagctccatctgacttttttcttttttttttcacaggattatcctgattactatagaattattgcccaacctatcgccatgtcacaaatcaaagccaagattggtaaaccctcctacaatcttgcctccttccgcaacgatcttcatctcctttggaataatgcgcggacctataatcaagaagggtcttgggtattcaatgctgcggaggatatgcaggaggcgttcgataagatgtgggacgatgaggtgccacagtttttggcttcgcaagccgctggggctgagaacagtgttggtgaaacatcggcaggggcaagcggtagcagtacaccaatgttcaagcctgttggcgataaaacgactgctcccaaaataaggatatcgatggggaagaagaagatagaggccgcgatggatggggacgaaagcatggatggaggtgaggacgatgactattagatgtaaatgcgttcgtgtaaggagaattgagtgatcgtgtatatttattgggtctacttctacgagtatgaatacagattggtcttttgcattgtcgcggtatctgcgtaggtaagtaggatcttaaattctgaaattctacgatacgtgacaccacactaattgcatgatacttttaaatatgatagcggtagatattcctctcttcgtctgcaatacagctagccccttatgtgctccccatcgacaagatttgtttgatctttgctgggagatatacaccaaggggatattcgtatccttgagttcatggagcgagtcattcgttgttgttgatgagagatcgagaagaggaggcgctgtcgaagctcttgcatgatggcagccggatgactgggaaaatcaaggccacgccgttaaatgcccctattagttacctgttatgggtcatcatccgtcgtacttaataaagttgtggatctagttttaatataattaggtttaccgtctgttttccgtcgggcggtggcgcgtcgtgctaatacgtagagtataaatagtaggtcgtgtgagaagatgcaactgccttaggtcaattacgtaacaccaaggtaaccggttagcgaccgaggccggtggaggtgtggtgtatttccccaaaaggtgcgtattcgttgagcggataagtagtccgtatatcctctatcctcgtatgtttttcgggcggataccttgatttatataccgcccctctcttaagatatcaacaaactgacatagacatatcggcaacatggtagcctcgcctcctacagcaacgccatcaaccgcgctcttgtctcttatccactctctccgcgccttgcctactcgcctcatccagtcccctccgacccagccacgtcgtgcatctgtagctatcatcatacgcctgagacctgctgaagagctggtttttgaaggacatgagccagaaggatggacaggagatgttgtttcg

SEQ ID NO: 355 - DNA, 6892 bp, Cryptococcus neoformans
cagagagggtagaaagggaatgaagagcaagatgacgggagagggaggcggagaggatgtggtacgacgggttgttaagtggtgaaagggcgatcgactgatacgacgggtcaacctaatccaccaagaaaccatgttgtaactcacagtgacagcgtccttatggccctttaatccagtcacccacttgggctctctttcactgacatcccatacacccatcaccttatcccttcctccactgacaagccattttccgtcttcactcgctgccagacataagatctctccattgtggccatttcctccaccctgggcatgtccaaagttctgaccggctcgacgtaaagtggaagtagaatggcggatgatggagcctcgtttggtggaaatgaagatgtagtagggggtcaaggcggcagatgtaggaagatgcgatgatgtggggatgaaatgaaatgttgaggacgtcaaatggggcgtgatgaagaggtgtatacggcctgacgcttcggcctgatgtaggcgtcaatcagtcactgtaaagaacggatatgaaaatggtaacgtacgacatccttctgaagacgagacgcaataagctctctgtcaatatcagcagcatcgtagtcctgatccgcattggcttcacagtattagcagagcggaaaacagtaaaagaagaagatctcaccagcctctacttcatctcgaactctggcaaggtatcccttagccaacctgactctcttctccgctgccgtctcattttcgtcgatatactcttcatcactcattgctacatcctcccgaccctctctgaaatccatcaaatcaatatcaacggggccattgtcgccctctgcgtccgaagagagattttcatcgttgtcttgatgcttttgctggcgaggtgctgaaggacctgaacgattgttcctcttgcgcttcttctgggattgaaaaaatgggtcaggcatagcgaaggctgcagttccgaatggatatggatacaagatacggctgtgggaagtacgagggaaactctagagaggcgacgacccgtggaggaaagctgaatgcagggcaacaaataagaagactaaaaaagctgataattgccacgtgagaagtggaggttgcaaaagtggtcatgtccgccagcagaaggcccaaaggtttcgagcgcctagcagttcatggtcctcgtcagcaaataggcgcgcgggacaagggtcgggcgtcatcagcgcgccagcacgctggctggaggctgccctcgttcgcttctcgttctctatccatccctcaatctccttcttccatcgacatctttccttcctcaaaccccttttacccacacaggcgcaagtcgccaatcgcaaaatgaaactcaaggacatatcacgcacggcaaccttcgcttgggataacacttcctcttcagcgcccctcctcgcaactggtgctgtcgctggtgccctcgacgaaagcttcagcaacgaatctcagctcgaaatctggcagccagactttggggacgtatcaaatgtcaagcttggtggtgaaggcaagccagctttgggcagcatcaccgttagcagccggtgagtttcctttcaatactgcagtcctcaattgacgtgctatagattcaaccagctcgcatggtcagcaccttccactactcacatgaagggagttcttgctgcaggtatggagactggtgaagttaatgtgtttgatccctccaagattgttactggtgctaggtgcgtctacccagtggcttaacgcgtcgctaacatttcattagtgcggatgaggcacgaatcttcaaaagtgaaaagcacactggtccagttaggggccttgactttaactcaatccagaagaatctcatgcttactggttctgtcaatgccgaggtacgacattatcgtagggcatagctcgaataattcttaaccctttcgcagatatatatatacgatctcaactctcccaacaacgcgcctatccctccgggaccaacttctaccaaactcaatgagattacggccctccaatggaatcctacagtatctcgagtgttcgctgcatcttcatcttcaggcttcacctctgtttgggatttgaaggctgggaaggagattgttagtttgcagtatggcggtggtgctgctaagggaatggagactgttggtggtgtggccggtcttcagatggggaaaagaagaggtatgagtgatgtttgctggcacccagaacaggcaagtcgtttgagttaggaatggagtatcatgttgatcctttttaggctactcgacttattactgcctccgaagatgacgaatctcctatcatcatgcttttgggatcttcgaaatactcgggccccggaaaaaattctcagcggtcaccacaaaggtgttctttccgtctcatggtgtaagcaggatgccgacctcctcttgtcatgcggcaaagacaatcgaacattgtgctggaaccctcagaccggcgagatcatcggtgaacttcctactagcaatgattggtccttccagacctcttggtgccctagaaaccccgatttactcgctacggcatcatttgacggtcacattggtattcactccttgcaaacaaccagcattccttcccaatctaccgagaagctcagtgaggctgctaccgctgacgacgttttcggtgcactcgggaacgagcagccccaggatgaaactgtcaacgtcttgtccctcaagcaagctcccaagtggcttcgacgtcctgtttcagcgacctttggcttcggcggtcttctcgctaccacttccaatcttcctggagcatctggtaaacaccaatctggagttgttcacctgcgaactgtcaccaccgagcaagatgttctcaaccgcgccaaggcgttagaccagactgacggccagcaagaaaagcttgcaaagttctgctctgagagggccaaggacgatgatgaagcgtggaaggctctgcaggctcttttcaaggctaattcgagacaggagcttgtgcaattgcttggtttctctcaggaggaggttgcgaagaaggtgcaagacgctatcaagaagttccccaacgccatcaaggcagctggtgacgctactccagtcattgctccactagaagaggaaagtgtcaaaactcccactgctgagaagcctgaagctatcgaagacgttagcaccacttccgatgccggcgttgagtctcatgacgacaaatctgagaagtccgagactaaaaaaagcgaaaatggccttttcgacgatgagactgctccaggaacccctgccgctgcagccgctgccgatttcttttcttcaatggcctctggggctctgcgtaaccctcagcttgatagtatcgtctctcataagtctgaagctgcggagtcgtctgtcgcggctaccgtcggcagccgtgcctcttccgtaagagacgagattgtcaacaaggagaacaccttccaaatctaccccgaaggtgagagtgatatcgacaagcttgttacccaagctttggtcatgggtgacttcaagtctgctgtggacgtctgtcttgcttttgacagatttgcggatgctcttctccttgctgttcgaggtggtcccgaccttttgcagtccactcagaatgcctactttgctcagcagaccaccagtcgtcccttcctccgtgtcttccaatctattgtaaccgaggaccttttggacattgttcaaaacgctgatttgtccgaatggaaagtcgcctttgttgttttgtgtacatttgccaaggataccgactttggcaatcttgctgagcaaattggccagcgacttcagtacagatggcgagtgctctctgcctctgacagttccgaagccaaagcatccgccaaaattgctcgtcaggacgccactctctgctatcttgcggctaaaaagcttgaaaaggtcgtctccatatgggttgatgaaatggctgaggaagaggaagccgtttctgctactcgatacacttcccatgcgcaggcgcttcagtcattcattgaaaaggtttccgttttcaaagctgctaccggctatgttgacgaagatttgcttactcccaccgagtcggcagccgctgctgaggccggggcaagaacctacaagcttgccggcttgtacgacagatactatgagtatgccgatttgctcgctactcaaggcttagtggacatcgctgccaaatatgtgaagatgactcctgttgactacaagggcagtgaacaagtgggtgagcttgataaggccaggcagagaatcttgagcgctgctggtgggaatgtcggtactaagatggctcaaacaactgggaaggtccaaagtacggccggttcttccatcgcgagaggttacgcgcctgcccaacaggcgtccgcatatgcgtcctcccagcccgcgtatgctcttcagcagcctacgacttacgctgcttcaaccgcgccagcttatcaagcaccaccggccgccagcggaccttatcagcctgcatccacttcgaccgcttacgcacctcctcaacctactccgtcatacggcgactcaaatccttacgcacctgcgaccgtctaccaaccatcttctgggtatccacccaacggttatcgacccagcgaccctcaaccacaaggatatggtgctcctcaaccctcattcggccaaactcaggcaatgcctcccccccctcgtgtcggtcagaccaatgctcctatcagttctcctcctttgatcccaggctcgcaacaacggggtatctcaggatggaatgatgcgcctaccttcgctccaaagagacctcaaagtgctgccaaggacgtcaagaaggcttctgctattttgtctcctttccccaactctgctgatccacttgccgctgctggtgctgggttgaacactgcaggggcggctcctccccccggtaggtcacctcagcctggtgtgattcctccccctcccaagaacgcccgacctccttctattgccgcgaaggtacaacctccgcctaccgttcaacaacagcaacagttccaccagcatgcgcaacatcaacaacaacagcgacagcagcagttaacttcccctccagcggctgcaggtcctccaccctctgccttctcgcgtccccctccccctggtgcccgagccggtcctcctcccggagctttcgctggtccccctcctcaacgcgccctgtccccattgggtcccggtaggctcagctcgcctccagggagccaaataaggccaccttcagctgtccagagaccccccagtcaacctggacaggtgcagtctcttgatggtggaattacgggaatgggcggacctcctcccccaggctctaggatggctgggcctcctcctggacggtcagctacgcctcagcagcagcagcgacagcagatcattcctcctgctacctcaccgtctcaaacgaaaattcagtcaccctcttctgagcaggtaaagcctcgacaccgtgagtgcattctttttccttcgtgtacaaaaggaattaacatctattgatgaagccgctggggatcgatcccatatccctgaagcttcaaagcccatttatgagattctctccggagaactcacaaaggtgaagcaatctaatattcctgtatgtgcagtcgcagttatgtacaatgttaaatacttattgagtactgtatagcctcacgtcaaacgaattgtggatgacaccgaaagacggctgaacattcttttcgatgggctcaataacgagacagtgccaaagcaggcggtggatatgatgaacgagatttctaagggtcagtgaacctttgctctctgttagcccttcttggctaacaattcaacagcgattgccgccagagatttgaacgcagcgttggctatgcatgtggaattgttgactactgccagtggtgatatgacctcttgggctgtgagtccatcactcatttcatacctcagcccaaagctaatcaatatatagcccggagtcaagcagatcatcagactgggagcatgaaaagaaaggagtggatagacaccaagacgttgtccaaatagcttgaagatgcgtatgacaaatgaatatagctcttgcagaatgtctgttcgatgtaggggtttcagtgccggcaaatgcggcagtgatacataggctggcctctattccggatttaactagtagacttcagtacgagaagttactagacgataggcgttagactggacatatccttggaaagctatgatctgcctatttgcacattatcagtccacctgttataagcaaccattaacgaaccacgcggactcgatgtgaaacgtttaagcgttgagagcagctgggacccaggatcaagatgaaagtgagcgccgacaaccggcagagtaaggcacgatgaatgagtaaggcccggcgtacaaccaatcaagcccaaccacaattgatgccgaaagctgagagctgggagctgatgatcatcatccaagaacatccagcatcaaatgtcgacgaaactcgcatatttcacatatcatcataatatcatatctgatacatatacgactaatccttaaccgcctgacaaggcccaataaggcatgtactcttgagttccacgacagtagtatttttttagggttctcaggtcataatagaaatagtagtagtagtggtattacgaggagtacgtataaggtgtgcgatcgctactgtacgacagcagtagagttggactttcgttggtgcgtggaatatataggtacgtagaggtgcgaagtgatgaccgaatgaccgtcgtcga

SEQ ID NO: 356 - DNA, 7008 bp, Cryptococcus neoformans
ccattttaggctgtatagcctttgagcggatcatatctgcaacctccaaggcggtcgcgatgtcttctgattgtgggtacgggaggttgagaggagaacacgccttctctgcgatagggctgtgagcgatagataacaacataacagtaaagtacgaaccagcaagctcttcgaactgcgggtttgtagtgcttccccatagccatgacatgatggatgattaatgtaggaggggcggttgcgacgttggattacagcgaggaatggcggttgggtttgtgctcggcgacaaaggactctcggcgcggaagcaaattgttgggactaggagaagggcggtggcgggcaatggagacagcggatatgggcggggtggagtgccgtatggaagcaagaggctggcagcagacggcgggcagagacaataggagaagtcagagtatgttagagagactgatgatgcatccgccgccgtccacgtcagaaatcagatcgggacaccacctccaccctacctcttgacctaattcccacggtcgattgtcctcacctcccctatcggcgtttcggaaatagtgcgcgaggctttcctctctccgccatccgctactcgctcactcagcatcgggttcttcctgcctcccctattccttcctacctcacacctcatctcttcttcctacctatcacctattccctgttattcccacaggtagacagagaattgggggaaaccactcatccggagacacggccacaagtcttgctaactcgcctcaaaaactcgccaacccgactttggctccgattccatcctatccccgccatattcatctcgccatccatctgtccgacattttgaatccggcacacaaaccgaaatccagcttcttgttgtagtattgtcaagggaaaaaatccaaaaatagagaaagaaagggacaggagtgaaagtggagaataacgaggcaatcggcaaacaaaacgacagcacgccaccatgacggtcacatttccttactcctctgcgcctgtcaaacaggtcaaggagatccagtttggtataatgagcccagaggagatcgtgcgttgttatttcaagccttgccacctccaaaaaagcaatgggagtgacatccgctaatgtttgccacagaaagccttttctgtcgccaaaatcgaatccaccgaggtcttggatgagaatgggaagcaaaaagttggaggtctgatggatcccaagatgggcagtaagtcgtcccgccttgcgcggtgatgaccttgtttaccctttttgtgttttctttgcagccatcgacaggaattttaaatgtcaaacatgtctcgaaggcatgtccgaatgtccaggtcactttggtcatatcgaacttgctagaccggtttttcatcaaggtttcattgtcaaggtgaagaagatcttggagtgtgtttgttatagctgtggaaagctcaaggtcgacatggtgtgttgattcttttatttctagtttgagttggcgctgattgcttggttgtttctctagcgagatccgatggtagcgaatgcggttcgacgtatcaaggctcaacaccgactcaaagccatttgggccctcgccaaggacaagaagcactgtgaacctgatgagctagatgaaaaggacaacggcgatgccacatttgaggacgaatatctgcaggaacaaaaggcggcaatgaagggtcacggtggttgtggtcacgaacaacccgtatggagaaagaagggattaaaattaatgggtgtctggaagcctaccgacaagggagaggggagtttattttcattattttcatccacgggtcattctaaatgttagcaggatgaggctgccgagccagaggaacgcaatatttctccaggggaagtttacaatatccttaaaaagatcactcccgaggacctgcacatcatgggtctcaatgccgactatgcccgtcccgattggatgatccttactgttcttcctgtacctcccgcagctgtccgaccttcgatcgctgtcgacggtggtgccatgcgcagtgaagatgatttgacctacaagctttcacagatcatcaagttcaacggtgtcgtacgtcgaatggaggcggaaggtgtaccacctagtgtcgtgaacgaacagttcgacttgcttcagtaccatgtatgtacatacatggacaacgacattgccggattgcctagagatcaacagaagggaggtagggccatcaaggctatcagggcgaggttaaaaggaaaagaaggtcgtatgagaggtactctgatgggacagcgtgtcgacttttcagcgcgaacagttattaccggagaccccaacttgcaattggatcaggtcggtgtgcccaagagtatcgccatgactttggcatacccagagcgaggtgagttcactgagtactttctgccctcgcatccattgattcacctaaaatttagttactccatacaacattgtctatcttcaaacgcttgtcaacaatggtcccgccacctatcctggtgctcgatactacgtcaaagacactggagaacgagtcgatttgaagtaccgcaagtcaggtgaaccgatcagtttgcagtttggttggattgtggaaagacatttgaaggatggagagtgagttcaatttgtacgaatggaagaagaaagaatctgaattgacaaacgacagttatgtcttgtttaaccgacaaccgagtttgcataaaatgtccatgatgtcccatcgagtcaaattgatgaattattcaagtaagtggattcagtgcgcacatttggacacgcgctaattcgtctgtttagctttccgtttgaacctttcagtgtatgttccgcaagtactttctcaaggcgttttactgacaataatatagtacttcgccttataatgctgatttcgacggtgatgaaatgaacttgcagtaagtacagaaaaagtggagcagcatgggtcgagattgacagatctgcagcgttccgcagagtgaagaaactagagcagagttgagtcagattgcttgggttcccagacaggtatgtgatacgtcaagcgcattcaaatctaagctgatgacggagctagattgtctcgccccaagcgaacaagcctgttatgggcattgtccaggacactctgtgtggtattcgtaaattcactctccgagacaatttcctcgattggcttcaagtccagcacattcttctttggcttccagaatgggacggaaccatccccccacccgccatttttaagcctaaacccatgtggaccggtaaacagcttttatcgatgaccattcctaagggaatcaacatcacctacaaaaacaacgaaaagccttcgcctatcgacgtgacggatgagaatgtgttaatcgagaatggagagttggtgcacggaacgattgtcaagaacatggcgggtagcgccaacaacggtttggtgcacgtcatcttccgagaattgggccacatcgcggctcgagatttcttttcagcggttcagagagttgtcaactattggttattacacttcggtttctccgtcggtatcggtgacacgattgtcgataaggcaactatggcgggtatcaccaatcgaatggtggaggccaaggaggctgtccaaaaattgatccaagaagctgaagcgaaccgaatgaagcccaagcccggtatgacaatccgagaaaccctcgaagcgtctatcgccgcagagctcaacaaggctcgtgattggactggtaagacgactcaggataacctcaaagcggacaacaatgtcaagcaaatggtggtgtcgggtgccaagggttcgttcattaacatttcccaaatgagtggtgttgtgggtcagcagtttgttgaaggaaaacgtatctcgttcgggttccgacaccgctcattaccacacttctcaagggacgattatggacccgagtctcgaggtttcgttgaaaactcgtatttgcgtggtttgactcctcaagaattttggttccacgctatgggtggccgagaaggtttgattgataccgctgtcaagactgccgagactggttatatccaaagaagattggtcaaagcgatggaggacttgaaggttgcttatgacggtactgtgagaaatagtgtgaatgaggtcgtgcagttcttgtatggtgaagacggtatggacggtgctgcgatggagaagcaggtgagcatgatcatctatgagaagaggaaggccgctaacataaaacagagtctggatattatccgactctctgatcaagcatttgagaggcgatacaagattgatgttcttggaggaagtggcttctccaaggggatccttcaagccggtatcgaccaatcatccatctctctccaaaagctccttgatgaagagtttgctcaaatctcggaggaccgtcgtatccttcgttccgaaatctacccggacggtacccccggtcatcccttacctgtcaacatccaacgtgtcatccaaaattctcagcaaattttccacatcgaccctcgtgttccctccgatctggatcccgtttacttgctcgaacaaagagatgcgttggctgatagactgcttgtggtgcgaggtgacgacaagctttcaagggctgcccaaaaaaatgctactcttgtgttcaacatgcttttgcgatcccatcttgctactcgtcgagttctggaagagtaccaccttaacagggaggctttcgattgggtcattggagaagtggaacaaatcttcaacaaggctgttgtcaatgctgccgagatggttggtactcttgctgctcagtctattggtgaacctgccactcagatgacactcaacacgttccattatgcgggtgtggcgagtaagtctgttactggtggtgttccccgtctgaaggaaattatcaacgtcgctgtcaacattcgaactcctgctttaaacgtctatcttgaacccgagtacagcaagaccgaagaggatgcgcaccagatcatgcggaaattgacatacactcgattgagggatattactgccactgttgaaatcttctacgaccccaagcttgactctacggatattgaagaagacaaggactttgtggacgcgttctttgcgatccccgatgaagacatcagactggagctccattccccttggctattgcgtcttgagcttgaccgagccaaggtgcttgaaggtggttatgaaatgtcgcagatcgttgatgccattgccgagaccgtgggcaaagacgtctttgttattcactctgaagacaatgctcccaagcttgttattcgtattcgagtcgttgctgagaaggaggatgaagaactgttgggtgacgaggacatgttcctgaagaggattgaaggcaccttgcttgatcaggttgagcttggtggtatcactggtattactcgagttttcatctcggaaggcaagcaggttgttgtctcccagaacggtgaatacgatcaggagaaggaatggttcctcgaaacggacggtatcaacctgaaggaggttatggctgtcgacggtgtcaatgctttcagaacctactccaacaactgttacgaagtctacgagactcttggtatcgaagctgcccgaaacgctctctacaaagagctcaacggtgttattgagatgggtggttcttacgtcaactaccgacaccttgcgctgttgtgtgacctcatgtgtagcaagggcgctttgatgagcatcactcgacacggtatcaaccgaaccgatgctggtgctctttcaagagcggcgttcgaagagacagtggagatcttgcttgaagctgcggctgtgggtgatgtggatgactgtaagggtgttgcggagaatgtgttgttgggtcagatggctcctatgggtactggtgcttttgatgtttcacttgacatgaatatgctcaaggatgtcattgttgaccaccgattgccggtgcaaaacatgatggctgggggcatggctggtggaatgactccaggaggtgcgatgactccttacgacaacctgtcgcccatgtggggtggagacaagggagctttgggtcacgcggcattctcgcctatccaaagttcagcgaacgacgaaggtggcaactttgcttacatgggctatggtcagtcaccgatgcacggcggtatgtctcctgcaggttactcaccttcatcgcctgctggatactcgcccacttcaccattcgctgttacaagcccggcctacagccctacatctccgtttgcgggtgcggcagccggcgcagcatccccttgggttggacgaggcgggtacggcgctaccagtcctgcttactctccgacatctcctcaatattctcccacttctccccagttctctcctacatcaccatccttctctccatcttcacccacttactcgccggcttctccagcttatggcggtgcgggtgctggaaacagggcgtcaccttattctcccacatctccagcttacagcccgacaagcccaatgggtggtatcacatctccgcaatacagtcctacgagccccaggtacagtccgacaagtccggcgttttcacctacaagtccgtcatacagtccaacaagccctgcgcccttccaggctaccagtccgaggtattcgtatgttggatatctcgtcagtagaatcataatcaagctaacatatatgatagtcccaccagtcctcaattctctcccacttcgcctacctactctcctgccagtccagcttactcgcctacaagcccccaatattcacctactagtcctgcctacaggtgggtctttccttcttcccatagtgggcttatagctgattttcatatagtccgacgtcgccggcttacagcccgacatctccagcgtacggcggtgctgcccccaacggcggtacagctcaacagcaaaacggtcaggc

SEQ ID NO: 357 - DNA, 7181 bp, Cryptococcus neoformans
gattactcaggcgataagcgctggaatttgccttcatcttctctttgcatccggtccaccacaaaaactggcagcatttgcattgccccagatagatctacgtaatttctgactacggggcccgaatgccccggaaaagggtaacgacagcgcacaacagcagcgacttcgagattggcacgtatgtaggaatcggagccctcctcctccgtcctcgtctacaatagtagttttttgaaaagacttgcggccaagttcacaagctcgagtctggtgaggtgtcggctgtgacgagattagcatagcagcagaatcccaccccccagctagtagtttatcagaatacaatccgatctataaaacaagccgaaaacaggatcggaggctcaaaaaaacaagccgatccaccttccataatagttgcaagggtgatcttctataattaagggatagcagaatgaagttgcattacaattcagatagtatatactaatacgcagtaaaagagggtgcatgcgacgtcgtgtgcatgtgttgattaagagcgctcttttcttttcaccgttggcatacgtatcacataaatagttcttctcttgtttctttctaatactgttttcacttgttaccgagagttaaatttaccgaagtcaagtgaacttgtggaaccgtcatgccaaatgataccggtggggccaacagcagcaggcagcagagaattttggcgacaataataattactctatcggctgaacgagcatagatcgggacagatccaagagaggaaaggtctatctacgttagcacgccacgtggtctattttgttcgaccttcacccacgaagactgaccggagtcagcttgggaatggtaacgccgaaacaccgaagacgcgacgcgtttcccagagagtgtcaacaagaaacaacaaaacaacgactcctcatccagagccgcccctttactctagaccttcatttctactctatttgtacttaatatgcctccaaggcgcacaacaagagctgtatctagctcaacagccgctccagcaccatcgacaagaactagaagaggcaggaaggctgctgcgtcatcggctccttctgtggattcagacgaagatgatgggataacagtgacacagggatcaagtgatcaggaggaagcggaagaggcacaggaagaaactaagccgaaagctagaagaggtgtaagcaaagcaaaacccaaggctgtcccagcacctaaaagaaggaacgttggaacatcagtggctttagagaaagaagattctgaggacgagttgggcctgtcgccgcccagaccgaaagtcaagaaggctatcccggctccaaattccagggtaaaagagcagatggttacctcggaggatgaagacgaagcggaagaggagctgcagaatgcccttcgggcccggcgtgcttccactgccactctggcggcttcagaacctcctacgcccacacctcaagctcatgaagaggacgaccgcagcgcgacaccaagggcctcttcaggcgccccagaaattaggattgaaagggcagattccgatgacaatgatgaagttagcactgttggacaaaagacacccacaaagcctcctcgttcttcttctgagaaaccagtgacccctctcagatctccgcatacctccgctcccgctccagcacctcgtcccgcccaatcaggtcccaaatctcggcttaccatccacaagctcgtccttgtcaactttaaatcttacgctggtcgtcaggagattggtccctttcataaatccttttcagccattgtcggaccgaacggtagtggaaagagtaacactattgatgcgcttctgttcgtgtttggttacagagcaagcaagatgaggcaagggaagttgagcgagcttatccacaactcggcgggtaaagagaatctggagagttgctcagtggaagtgtggtttagagaaatcattgatttggtgcgtattttaaaactaagcatggagctccactgatcaaatgcagcctggggccaacgacttccttctagttcccaactctcaaatcattgtcaaccgaaccgcttttcgcaacaactcttcaaagtacactattaacgatcgcacaagttctttcactgaagtcactacactcttaaagggcaaaggcatcgaccttgatcacaatcgattccttattctgcaaggtgaagtcgagtcaattgctcagatgaaggcaaaagcacagaatgagcacgaggatggtcttcttgaatacttggaggatatcattggaacaacaaagtacaaggagccgatcgagcaggcatcattggaatttgaggccttgaacgaggaaagggttgaaaagatgaatcgacttcgggttgtcgagagggaaaaagcggctctagaagtatgacttattgcccatttatgtataggcagttgcgctaacgaggaaactagggtcaaaagcaagaggcagaagagtatctccgagcttctaacgagttaacgaggatgacttcaaagcaatggcagttgtggatgtaccaccttcaaaatcagacagagatcacttccaaggcaatcgtaagcgcttcatcgtagatgataatgacatactaaacactatcgcaggaacgactcgaaagccaacttgccgccgaacaagagcgtaacgcagaacacatcgctacggtcgatgatttgcaaaaagaatatgaagaaagacttgctagcattgcggaagtcaaagcgatgctggataaacttcataaagaggccaagaagtacgagaaggagcaggtcggttatgcagagaagaagaagcacctggagacaaagatgaaaaagatcaaaaagtccatcaccgaggtaagtcaccttggaagatattgatgctgtcgtcgttaacactatccccaggatggccatgccaaatctgaagccttggctgctattgaaagctacactgagcagttggaaagtaaccgtaaaaaggttgctgatctggaggagaagcttgaatcggagcaggctgagctcgaagaggtcgtcgacagtctcaaaggtcggtgactaaaggctgtgatgtatcgtttctgacgtgacattatagataaaactgctgttttcacaacccaaattgagataaagcaacgagagcttgaaccatggaccgccaaaatcagcgaaaagcagtctgccatggatgttgccaagtctgagcgtgatcttcttgccgagaaagctaccggtattctgaaatcaatgcaagaagccgaagagcatttgcaatcattgcgggatggtgatggtgagaagcaagaagagtacgcgaggttaaagaaggaggcgtccaagattaagaaactgactgctgagggcgaggccaaggttgatgtaagtcgttatctaagatagatttcacattgctaatttatcattctagtcaatgacaaccaagtgggatcagctccgaggcaaggtttcagcctcaaggctcaaaactgatgaagcacgagcttctcttgctgctgacaagagcgagaacgctgtgttgagcagcttgaacaagctgcgcgaccaaggtcgtatcaagggtttccatgtacgtgccggaatgttcatatagaatcacgctgacttgtcatatccagggtcggttgggtgacttgggtgttattgatgacaagtatgatgttgctgtcaccactgcctgtccaacattgaaccacctcattgtcgactctgtcaagcagggtgaggcttgcatcgactttctccgtaaaggcaatatcggtcgagccaatattatggttcttgaaaaacttcctcagaaagcgcccaaccctattcagacccctgagaacgttcccagactattcgatttgatcaagcccaaggatccttggttcgcgcctgctttctataaaggtttgggaaacacattagtggcaaacgacttggagcaggcacagaggattggtttcggttcttctcaaaggtggagggttgtcaccctcggaggtcagctcattgacccttctggtaccatgtcgggtggtggtaaccgagtcgcccgaggtggcatgtcttccaagttcaaggccgacaaagtcgctcccgaagttgttgtcaaattggaaaaggagagcgctgacgctgaggctgagctgcaaaagttccaggaagagaagaaagcaattgaatccgaggttgtgagcttgaagaggagattgccggagattgaaatggagatggaaaagattgagctcgatgtctcaacagctactaaaagaattgttgaggctgagaagagattatcggagctcaagtacgttgccaactctttggtttgtctgaaactgacaactgtactagatcccagagcaagcctgatgcgggtgatgaaaaacgtatcaagactctcgacgccgaaattgcctcactcacgaaggaaaccgacaaactgcgcgaaaagtcttcttccatcaatgacgatatcaagtctctccaaaacaagattcttgaagttggtggagttcgtcttcgtgccattcagtcaaaggtctcgattaccaagggccttcttgatcttgccaacgaatctattaccaaggcagaagttggtcaagccaaggctgagagagatgtagagaagcttgaaaagtctattgcgaacaacaacactacgttggaagaagttgtagaggagctcgagctggttgaaagcaacctagaaggctgcaccgcagatttgaacaaggtcattgattcgattcaacaagtaaacgactcgagtgacgatatcaatgaagactttgagcaaagtaaacaactactggaagaaaagcaagcaggcatcaatgcctttagggctttagaggtgggtttctttttcacaacacagaaaagagctaaaggcattgtgcagatggattacaagcagcagattgaagacaatgcgagaaaattgaaagagagccaggaaaagtaccagttttatgagagaaaattggcgggtctagaacttgtctacattgagtaagtatctaaccccctaactccaaggattgagctcacagcaatgtgtaatgcagcgaggatgacgacgaggaggatgacgaaggcgctgtggatgaagagaagaagttgaatgatgctggtgaggcgaatgaagaggatggagcgggtggagggcatgaagatgaagaggctgcagaggcgccttccaggaagaagaagaaacaaagcagcatggaactcgaacagtattctcccgacgaactgcgggctaccaatgagacggcattgaaggcatacatcgccgaacttgaaggtaagtcaaagtgttttgttcccgctctgggttgttgaaacaaggctgacatttggatctgcagatgacgttaagaattcccgaccgaacctcaatattctcgccgagtaccgcaaacgggaagccgagtttctggaccgagcaagagacctcgaaacggttacaaaggctcgagatgcggccaaggcccgttacgacgagctgagaaaggtcaggttggatgagtttatggcagggttcacagctatcactgccaaattgaaggaaatgtatcaggcaagtttgatttctttgggacgcgttgattcaaggaggctaacggaagcaatagatgattacgatgggtggtaatgcagagattgagttgattgatagcatggacccattctctgaaggcaagtcgacgctgcatttggcatatctaacttgctgaataggcgttgtactgtccatcatgcctcccaaaaagtcgtggcgagccattgccaacctgtctggtggtgaaaagacgctggcctcccttgctcttgttttcgcgttgcacgtcttcaagcctacgcctctttactttatggacgaaattgatgcagcgctggatttcaaaaacgtctcgattgtggccaattatatccagtcaaaaacccaggcggcgcaattgtaagtcttgctgtcatgtgggtgtcgagcaaagcgggctaacgagattcagtattgtcatttctttacgaaatgacatgtttgaacttgcgcatcgtctcgtcggtatttacaaaacatccaacgtgggtcttgtcctgcttttggtcttgtcattttagaaaaaagattgacacatgtgtgcagtgtacaaagagtattgcgattgacaataaggatctccgattacaagcccggccgaagagaccgccaggtgttcctccgacaccgggtactttgacgagagtacctctgacgcctacgccgcggagacgagcggaatcacgggtggaagaggacactgtcccggctacacccggtactgtcaacgtatagtcttgtttcttttgctttctatttcctctggactttttggcttttaccgtttcccgcccgactttgcatctgttgtatggcccaaagaatagatattaaagctatgcataattccctgatatgacgagtatgatgagaactgaaatgagatgggatgttttctacgttggacaattagacccagtcacgaggatttttcaaaacctccatgagcttttcttcgcgtgttccggacccttccctgcccaagggggacatgtattcccatcgcgccgtttccggcaacctggcaatgattagaagatgaaaaaaataaatagaaacaactcacgacatcaagatactctctatcctcgcgccgggggtgttcaacccaaacttggtacctctatcatagaccaagttgaactcgacatacctccctctcctgagctgctgccacctcttctcctcgggcgtccagctgtcgttcatgtgcttgtagacgatgggcacgtaggcggggaggaaggcggcagaagcggattttacaaattcgaaaatcttttcagcgcttggtccctgggcgccgtccggcggggcatggacgggggacgtggtggtgagatcgtcaaagaagatgccgccgagacctctgcactcgccgcggtgggtgatggtgaaatacctgtcgcactgccgcttaaagtcgggccagtagcgctcgtcgtgctggtcgcaggcgtgcttgagcgtcttgtggaaatggacggcgtcggcctcgtcgaggtaggacggggtgaggtc

SEQ ID NO: 358 - DNA, 6826 bp, Cryptococcus neoformans
gagtcagaatcaacgtccatgtcctcagagtcatcgtcaatctcaggataaaatcgaagaatttctcatccaaggccatgggatcgcaaaagggcttggtaaagaggttgaggagtaataacgacgatctttgcagcgtcaaaaaagatattggggaagtgatgatagaaatattccattgtggtaaggcgttgtatacgtgtgtataagggttgaatgaagattgttgagagtataagaaacgctgaggagagtgtttgaaaagtggattgagaaaagagaaagaaaagccgaactgggagacggaggggattttatacccaccagcgaactccttgcttatcgattctagcacggccatggggtgagttctcacgaagcagctcaacagctgactgtgtttacacagctcggtgtaaatttcaagcagaggacggtttcctgctaaccaagtcatacaccgccgcagtgcgaaacctcatagagagccgggcgaaggcagaaatcgtcacgttggcgttgataaggatgatacgcactcagattgaaagtcatgatgtggctcttttatcgcgatgacatcggggaagaaagttgctgacgaaagggcagtatgacaggtgcgaatgcccatcgagtgcagtgtggaagtttcgtaggcagtattcatcgctggtcagctcccttattactattttgagatcgtcggtccttcgttgttgttggtccggaggaaaggcggtcaaagccgttaacctcaagataaaattacgtaagctgcaaaaagtcgaactgctcggctacaacatttgactgggaggagttcgatctttgagtccaccacatctctcagtcctcttttcccctttccccctgtgtttatctcttccgatagacctccatacccccaggatcctcctagatatccaattcaacctttgaaccaagaagaaagaggcaaatatcatcaagatggacacctgggcggtggtcgaccagaatgagaagcactacgtctcttcagacgttcctcgtagaatgtaaatacttcctattggctctattattggtccaacctaattcaattgtggtttgtagaaaacatattcagtttcaaccattcacacccaaggatattgtccgaatttcagaagtccaagttagcattgccgagctgtatcagaataatgaggatggaacaagaactacggctcttcaaggacctttggatgcccgtatggtgtgtcttagtcacatatatatatacgcttataaagcgcttaccacgttgcacgtacatacagggacccaacgagaagggaaagaagtgtgcgacttgtggcgaagacactcagaaatgtgttgggcattatggttacatcaagcttgttttgcctgtattccatatcggatactttaggcccaccatcaatatgctctcttgtatatgtaaagtaaggcctttggcatattcttcgtcgccaattactaatgaatgctacagacttgtgctcgtgtccttctaccagagacagaacgcgcttccttccttaaacgttttcgtcgccctaacctcgaatctcttcaacgtcaatctgctgccaaagctgtcctcgcagcctgtaagaagcaaaatatatgtacgtactgcggtgcccccaacggtatcgtcaagaagtccggtcctcttaggatttcgcacgaaccctaccgagcggccaagatggcaagtatgaaggatgagtggatggcgaccttcaaaaatgcggtggcggagaatcaggcggttgcaacgcatttagccaaggctgtggatgatttgaatccgttaaaggtgttaaacttgttcgaaagaattactgcggaggtgcgttcacttcactacatgtttagggcttcgctaatgaattcctaggattgcgagttactatcactacatcctgaagttggtagacctgaagattacatttggcaatacatctctgtaccacctccttgtattcgaccatctgttgcttcagaggctggaaagtgagttttgtcccgtaatccatttggattcttgctgagaacacggcagcaacgaagatgacctgacggccaagctcgccgagattgtcaactataacaataccctggcactcatgatggacttgggtaggggtattgagatgatttcggtgagtagataacgcgaagccaaatttttaaagctaaagggggaaatttagtccaactgggaagtcttgggtcaagcagttgcgctgtatattaactctcaagcacctggtatgcaaaccattggcgtaagttcgtccattaatatacctttttttcgctgagccacgcatagagtaagcccatccgaggtttcgtacaacgcctcaagggtaaacaaggtcgattccgaggtaatctttccggtaaacgtgtcgacttttccggacgaactgtcattggtccagacccgaatctccgtatcgacgaagtcgccgttccagaaaaggtcgccgtcaagctttcatatccagaaagagtgacagattacaatcttcaarttatgcgacaagcgatcatcaacggttcaaagcttcatcctggtgcgaatgtgctggaaagaaaacatgagaatggatccaccgtgcggatctcgctgaatgtcatgaaggatttggaagcgaggaaaagatatgcgagagagttacagattggagatattgtacaccgacatgtgagggatggagagtaagttggaatgatagttaatacggagaggtaatgctaattatgagcagtattgtattgtttaaccgacagccgtctttgcacaagctgtctatcatgtgtcatcgagtccgagtcaggccctggcggacgttccggttgaacgaatgtgtctgtaacccttacaacgccgatttcgatggtgacgaaatgaatttacgtatgtcacctcatcctgtatcaagttagagcactaattgttttgtatagacgttccgcaaactgaggaagctcgtacagaagctctcgaactcatgtcggtcaagaagaacctggttacaccgcgaaacggagaacccattattgctgctattcaggatttcatcacagccgcctacctgctctctcgacgagaccgattctacgatcgacaacagttcacgcagattmtttcttacctcgatgatgccaacttgaagattgagatgcctcctccgactatctggaagcctgtcagactctggactggtaaacaaattttcaaccttctcatgcgacccaataaggaatccaaagtactcgtcaatctcgaagctaagtgccgaacgctcgtcgatcccgccaaggaagaccgttttcctcccgacatgtctcccaatgacggataccttgtcatccagaacagtgagatcatgtgtggtgtcttcgacaaaaacacggttggtgacggaaaaaagaactcggtgttcggtgtcattctgagggattacggacctgaggaagcggcgcaggcgatgaacagattagccaagattgcagctaggtggttagcaaacatcggtttctctctcggtatcaacgatgttatccccggtcctatcctccatgcgtctaaggatgcccgtgtcgagaaagcttatgatgaatgtgacgttttcatcgatcttgctaagaagggcaaattggagaatgcgcccggttgtgaccaagaagccactctggagtcaaagatctcaaagacactttccgacgtccgagaagctgtcggtaagatttgtatgcaggagttgagtagacacaatgcccctcttatcatggccacctgtggttctaaaggtaagtcggctgtatcgaatcaagaaggtcattgctgacaaaaatataggttccgtcattaacgtcgcccaaatggttgcctgtgtcggtcaacagatcattggtggttctcgtgttcgaaacggtttccaggatcggtcgcttcctcacttccgcaaaaaytccaagaaccctccctccaaggggttcgtccgcaattctttcttctccggcctcactcctcccgaattccttttccacgccatgtctggtcgagaaggtctggtcgacactgcagtcaagactgccgaaaccggttatatggctcgtcgattgatgaaggcgcttgaggacttgtgtacacactatgatctgagtgttaggaattcggttggaggtatcgtgcagttccaatacggtgacgatatgcttgatccggcttgtttggaaggtgatgctacgcctgtggagtacgttcgaagttggacgcatgcttgtgtaagttttctccccccgtcttatgtgtgagaggrgctgatgaaagacaatagcgaacggccggtaaccaaggacgagctctgtatccctatgaagttcgccgaatcgctgctcgaatataccccgagtcttttgttcctcccaacttctctctatccccgcctaagaccaagagtcggcgtcgcaaggaacccactccgccgccgcctgtcgttgcacctactctccccaaggagtgggaaggttgtcaccacaagttcagagagaacacctacaagtttgttgtggataagatcgttaagcaaatggttgaccagaggctggcgaggggtttaccggatgcggatgatgaggaaatggcggaggaatacgaggcgttgttgaactcggatgatcgtaagatagctccgttttttcgctgggccaagtcccgctaactatctgtacagctgctgttcagcgtgtactggagaatgccaacaaggttaccgaagctcaactgagttctttcctcgaaaactgtcgtatccgctaccttcgagccaagatcgaacccggatctactgtcggtgccgtcggtgctcagtctattggtgaacctggtacacaaatgacgttgaagactttccattttgctggtgtcgcttcgatgaacgtcacgttgggtgtaccccgtatcaaggaaattatcaatgctgcaaaggttattagtacgccgattattgcggctgagttggccattccagaaagtgaaacggcggcgaggattgtgaaggggcgaatagagaagacagttttgggtgatgtgagtatgcggatatccacatatatgaagatgctgatagaatttttagatcgcggcagtgattgaggagagttggacaaacgcaaacgcctacattgaggttcacattgatatggatgctgtgcgacgactacaggtaggtcttctcgaaggatatgctggccattggaagatgctaatgtttgatagctcgagatttcactggagtccatcaaatgggcattggttagggccaacaagctcaagatccctgagggcgtaagtgcagccactatcctctccgtaattcttactgacgttcctatagtccattcacatttcacaaaagacctcacgtatccgtatttggattgacgaatcagacaaggataagggtgttggtatctacgaacgtctgaaattcctcaagcgcgccatcccttccgttcaggtcaagggtctccctgctattgaacgtggtgtcgttaccaaggacgagaagaacgagaagatccatcgattgcttgtcactggttacggtctgtcagaggtcatgggcaccgaaggtgtcgacggtctcaagactaagaccaaccacgtcatggagactcaacaggttctcggtatcgaagccgccaggtctactatttacaatgaaatccagacgaccatgaaatcgcacggtatgtcaatcgacccgcgacatgtcatgttgttgggcgatgtcatgacctataagggtgaggtgttgggtatcacgaggtttggtgtgcagaaaatgaaagactcggttctgatgttggcgagtttcgaaaagacgacagatcacttggtaagtcttgggagtatckcaccttatctcgttgcgtatagctgactttatcaattccagtttgacgcttctttgtactcaaagaaggacgaaattcaaggtgtatcggaatgtatcatcatgggaactcctgctcctggttgtggtacctctctcgcgtctatcgtcactcccgctccaccactaccctccaagaagcccttgctgttcgaggcggcgtacaaggcgggccagcatagaatgtcgaaggggatgatggtagcggcgtactagggaaatgaagatataagaataggaaatcctaatttttttctttgggcttgagatacatttgtttcttacgattttgttttatgcaccaatttgttacgatctaagatgcatgcatcttaataatctatactatgagagaacaacaggggacacaatgcccgctaccatgaatctatcatccttcttactcatacgcgggacccttcttgggtaaaccgggcgtccatctcacccttgacaacggcgtacacctcgtcgatcgagggagaagagtcgatctcaacaaccttgtttcgttcgcggtagtagtcgacaacaggcagggaagtctcgaggaacgttcctgcttcatgtcagcatatctcagtgttgtttatttagggggctgaaacgtacggaatcgttttacgatactctccttgttatcgtcctctcttccactagtcttacccctctccaacaatcgctgaagcaagatctcctcagaagtgctgaagaagagcacaaagctagatttgcaaacagattcgtcaaacttgagggcctggtccatcttacggggaaacccatcgatgaggaatcgaccaaagccgttcgaccatccaggagcagagggggga

SEQ ID NO: 359 - DNA, 7485 bp, Cryptococcus neoformans
actcgatgttcctctggaggattgatttagtctcttggagttgggtgtttatggaagtgatcttggcaccttggggatcgagttgtccttgtttcccctgttgattggggtcgttgacctggacttgggtttgaataccttgactaccttggccgaacagctctacaagggtggaagcgttaatgccatcatattcaacaactctgccctcattgtaaccaaagaaggggttcaaaacatgccttctcgcgccttggaatcttggctgagattaccagattgtggtcggccgtatgagtacgtcggaggcggtacagaaggcgaatatggctcagcccttttgatttatcagtgacggagggtgatgaatcgcaagaaacgccactccgatatggggttgttggggtaaagaggtacctacatggttcggaataggatgttatagtccttacagccaaaagaagcacaacaagaaggctagagtttctacatcccagaggcttgttcgacaattagcacatgtaagcttgatgaggtcctttatgtaaaacccttcctttatccctctatcactctcaaggagacattattcaaattgcaaggattttgccatattgacaactcatacagattgggtcattgctgtttggaaagcaaatcgaactcaaaaagaaacagatagtcgacgggtcatcagcgaatgcaacatgcatgagaaggcaggcgcgtgtagaagtgcctcgggggtaaaggccgataaacccgccacgtggccctgtgcgtcgtcatcacgcaccgcgtcgggcgctcatgcgctcgggcctcctctcactgccagcaaccagccaacccatccaactaccatctccctaccatttcatagactagaactaccggttgactcatcctctttcccctcttcttctttttgccacccacagtcagcacagcggcacggcaccactctaaaatccccaagaacacagacatcagcttcatcatggcagcgccagagaagcctatcgtgttcactgaacacctccaactcacagccctaggcgtccaacccacctccatctccttccaaacactaacactcgaatcagatgcctggatttgtgtcagagaaaccggcgatacacctcaggtcgtcattgtcaacttgaacgatgctggtgatgtcgttaggaggcctatcacggctgattcggctattatgaacccaagagcaaacgagaagatcttagctctcaagggtgggtcagctacccagaggaaagaagaataagcgactgacacgtgtacagccggtcgacagctccaagtgttcaacctcggcgccaaagccaagcttggtacccaccttatgaacgacgatgtgactttctggacttggatcaacaatactactttgggtatcgttaccgaacgagaagtgtaccactggaaggttatggatggtcagactgctcctaccaaggtgagttgagactaagacatttacgcgctaactagcgacaggtatttgaccgacacgccaacctcactgcgaaccaaatcatcaactatagaatatcacacgacgaaaaatggcttgttcttgtcggtatctcttctaatcccaatgccggccaacccggtgagaacggtttcaagatcaagggtgccatgcaactctactctatcgagagaggcgtttcacaacccatcgaaggtcacgccgctacattcgcttccatcaagctcgacggtgctcccaaccctacaaaactgtttgcctttgcagtcaggtctgctgctggtgccaaattgcacatcgttgagattggtcaccaggcacccaaccctcccttccagaagaaggctgtcgacgtgttcttccctcccgaggccctgaacgactttcccgtctctttgcaagtctcccagaagcatggtattctctacctcgtcaccaagttcggtttcattcacctttatgaaattgaaactggtcagtgtatctacatgaacaggatttccggcgagaccattttcaccaccgccgagtatgagacattgtcaggtatcatcggagttaacaggaagggccaagttttgagtgttagcgtggatgagcagactattgtgccctacatccaacgtgagttcatcatttgctagagctctattgacaatacagaaactctcaacaacccggagctcgctatcaagcttgctactcgtgccggtctccctggggcggacggtatgatccaacagcagtatcaagtttacatccagaacggccagtacggcgaggctgccaagattgccgccaactctccccgtgggttgttgcgaacccctcaaacaattgagacgctcaagaatctccccgctgttcctggtactcttactcccatcttacagtactttggtattttgctcgagaagggagagctcaacaagtacgaatctcttgaacttgcccgccctgttgtccagcaaggcaagaagcagctcctcgagaagtggctcaaggagaacaagctcgagagcagtgaggagctcggtgacctctgtcgaatggccgatatgaacctcgctctatccgtctaccttcgtgccaacgttcctaacaaggtcgttgcttgtttcgctgagctcgggcaatttgacaagattgttctctactccaaaaaagtcggctatactcctgactatgctcagcttcttcagcatcttgtgcgtatcaaccccgacaaaggtgccgagtttgctacacagctcgtcaacgatgagaacggccctctcgttgaccttgaccgaattgtcgacatcttcatgtctcagaacatgctccagcaagctacttctattctcctcgacgctctcaaggacaacaagcccgagcaaggtccactccagacaaggttgcttgaaatgaacttgatgagcgctcctcaggttgcggatgccattttgggcaacgaaatgttcacccactatgacaggcctcggatcgccaacctcgctgagaaagcgggtcttgtgcagagggctttggagcattacgaggatatcaacgatatcaagagggttgttgtacacaccaacttgttcaagcccgagtggctggtggactactttggacgactcactgtcgagcagagctttgcttgtttgcaagaaatgttgaggacgaacttgaggcaaaatttgccgatcgtcgtgcagatcgctaccaagtactctgacttgcttggttctgtcaagctcatcgaactgtttgagcagttcaagagttcggacggtaagtcgtccggctagagattggaatttgaataataagctgacacagagtaggtttgtactactatctcggttccattgtcaacctcagcgaagaccccgaggttcacttcaagtacattcaagctgctacccgtaccggccaaatccgcgaggtcgagcgtatctgccgagagtccaacttttacaaccccgagaaggtcaagaacttcctcaaggaagcccgtctcgacgaccagctccctcttatcattgtctgcgaccgatttgactttgtacatgacttggttctctacctttaccagaacggtttgaccaatttcattgagatttatgtccagcgagtcaactctgccagaaccccccaggttatcggcggattgttggatgttgactgcgatgagacaaccgtgaagaacttgttgatgagtgttaccggcaccttccccattgacgatttggtggatgaagtcgagaagcgaaacaggctcaagctcatcttgccttggctcaacaacaaggttgagcagggttctaccgaccacgcgatttacaacgccatcgccaaaatctctatcgactcaaacaacaaccccgaaaaattcctcaaggagaacaacctttacgaccccgctattgtcggcaagtactgcgagaagcgagatccttatctcgcctatattgcttatgccaagggcttctgtgacgacgagctcatcaatatcaccaacgagaaccagatgtacaaacatcaggctcgatacctcgttaagcgacgcgacgttgacctctggacacaagtcctcaatcccgagtctatccaccgccgtgcccttatcgaccagatcattgccactgccatccccgagtgtgtcgatcctgatgatgtgtccgtcaccgttaaggcattcatgcacatggaacttcacggtcccttacttgaattgctcgaaaagatcataattgagccatcacctttcagcgacaaccgctctttgcagagcttgatgttcctcaccgctatcaagaacgacaaaggcaaagttatgggttatatcaacaagctttcaggatatgacgttgagactatcgccaaggtcgctaccgaggccggtctttacgaggaggcgttcacaatttatcagaagcacgacatgcacgccgaggcaatgagcgtccttgttgaacatatggcttccattgaccgaggcttcgcctatgccaacaagatcaacgagcccgctgtctggagcagactcggtaaagcccaacttgacggtttgcgtgtcaaggaggctatcgactcttacatcaaagctgatgacccatccaactttgaggaagttattgagattgccaaccgagctggcaagcatgacgacctggtgcgatacctccagatggctaggaagactgcccgcgagcccaagattgacactgagctcgcttacgcttacgccaagactgaccgattgcacgatatggaagagttcctcggtatgaccaacgttgccgacgtcttgcaggttggtgagaaatgtttcgatgatgagctttaccaggctgccaagctcttattctcaagcatctccaactgggctaggttggcaaccactttgatctacttgggcgagaaccaggcggcggttgacgcagctaggaaggctggtaacactcaggtgtggaagcaggttaacgctgcttgtgtggataagaaggagttccgattggcgcagatttgtggtttgaaccttgtcgtatgtctccttttctcttagggattcaaagagtgatatgctgatgaaatataggttcacgccgaggaacttcctgctttgttgtcactttacgagaggaatggctactttgacgagattatctccttgatggaggccggtttgggtttggagagggctcacatggtgagatctttttattcgcatgctagcggtggtttgcatgctgactcttgtgtgacagggcatgttcacagaactgagtgtcttgtacgccaagtaccgacccgagaagcgtgcgtattcttattgattggggaatgcgagctaacattgggtcaaagtcatggagcacttgaagctcttctggcagcgtgtcaacattgtacgtaccttctgtctcaaggacgaggcggcctgtactaacattgttgcagcccaaagtcatcaaggccgcagaacaggctcacctctggcccgagcttgtcttcctctacattgtctacggtaagtttcccacatcttttaagatggatggaaatcctaatgcgcagatgtagatgaacccgacaacgcttctttggctatgatggagcgactcgccgactgggaccacgatcaattcaagaaggttattgtgaaggttgccaatatggaaattgcctaccgggccgtgtccttctaccttgctcgacaagtaagtcatcttacattggactttacaatcaatgctaatccaacgtctgcagcccaccctcctccccgatcttcttgctgctcttaccccccgacttgaccacagtcgagttatcaagatcctccaaaccgaagaccacctccctctcgccaaaccttacctcatcgccacccaaaagctcaatctcgccgtcatcaacgaggcttacaacgacctgcttattgaagaggaggatcatgtcactttgcgaagcagtttggagacttatgatgagtacgatgcaattaagttggcgaagagattggagaagcacgagttgttggagtttaggagaatcgctgctttgctttaccgagtgagttgccctgccatggattgggtaaccaagacattagctaatatttgttctagctcaactctttgtgggaagagtctatttctctctcaaaggccgatagattatggcgagacgcccttgagactgctgctgcgagcaaagacattgccgtttgtgaggagcttgcaggctactttgtttctattggcaacaaggatgctttcgctgctattctctatgtctgcttcgagtttgtccgagctgactttgttgaggaaatggtacgtcttcaccccatacttgtttcttagcaatcactgatcagggatgaatagtcttggcgattcggcttgtcagattactctatgccttacaaactccagcaacaacgagatcaagctaccaaggttgcggcgcttgaaaaggaggtcaaagagcttagaactaagaccgctgagaaggaaccggataatgagccaagtaatttgatggggtctggattgggtgggagattgatgattggcggaccttcgtgagttgattcagctttaaattcgttcatccctgacaaattgcatgctcaggggcggaccacccttcatgggtaacatgccgaatggaggtatgatggctcaacccactgggttctactaaatcccgtcccattgaatctcatcccttgttataactactccttgatgcgggtgggagatgtgtgtgataccaaaaaaggtctttttttcgtctagcttttcttttcttttctttatgccttacgaaaaatgcaagtagatatgatctgaacttgattttctgtcattcacggcggatatcattatcaagtcatctataatctcgccaggatgtctcgagcaatctccgtcttctagacaaaagatcatggcatagaggttatcttgcttgacgtgccataatcatacagcaccttctggtctgatttagcccatgacgtcatgcggctaataaacatatagatttcaagaataatggcagaagacatgttctaaaatatcttgaatggcttcatacggaacacagaagatgaaattgatggatggtgtatcttctcgccgatacagccttgtccttgttgttgaacttacaatgtagttgaacttacaatgtagttaaaattcaacaattgtagttcaacaacaaggacaaccaggaggtctagatctacagatgtataactacatacttttttaaccggccccatgcgtagggcgacaggcacggcagcacttacgaacgtcatcctgtgttttcgcaactgtataaatttaaaacaacattgctgatcacaataaaaactactgcgtaagttgtggagcctaacggctgtaccctggataatgatgtaattcctcaaaagggacgatatgacaccaaacataccc

SEQ ID NO: 360 - DNA, 7393 bp, Cryptococcus neoformans
accatccgcccgtacgcccgacactgcgctgctgccactgaagctgacctgttactaggctggagcagacccatccacgccccagaacagcagcccagtcgcccacgccccgacgccctccgcccccacccctctcgccggcactccagccagagagaagccgaccttgagcatcgaacatctcgccgctcccgtattcgttccaaagggtcttgactcctctcccagagcaagcactccaagcgtaccgacccccagcgcccccacgcctcccgtctggccgtcccttccctcgacgggacttttacctcgccaggacgtccaggtgtccgcccagccgagccatgcccagctcgtcgtcgcctatatattcatcatataaggcccggaaaccatcgtgtgtacgcaagtcgtcgagattcctccattggccattaggaccgtcgccgctgagtactacccggagttgcctatgaccgcgatatactcgatcatccaggatttggagaatgctgcgacgtccttcggtggccagagggggtgatatggcatttaagggaagtgtaaacgtttcccattcccatacctcgttaccctccatcgttgccccctctctgccgccgacaccatctcgacagcaggcttacgcccgtccaccttctacaattcaaggacaccgctcacggagatcgtctacagcaacgacactttccttgtctaattttggccccaattctcctggtccccagctctcaaccgttctaatcacccccccacttcaacttttggtcagttctaaggaggcaaagaaatctccgtcgttccatgctgcggctcagcgtgcattagacctgtgtcaaagcagtgaaggggcaaatgcagcctatcttcatcctcgcgaaatatttgaacccttacggcttgcaatctccaatcctcagactacatcggtcccgatcctcgtgacatctctcgatctcctttcaaaacttatatcccactctttttttgccgaacctcatggccctccccctggactccctcctcttccagatcttataacccacactattacactttcatattctgaaagctctccgccccaagtagcccttcaggttgtcaaagcactcatggccattgtcctttccaccgacaaaggcatgcttgttcaccaatcatcccttctgaaggctgttcgtaccgtttataatgtcttccttctttccaatgatgccgcaaatcaggtcgttgcgcagggtggtctgacacagatggtgcaccatgtgtttggtcgagtgatacggcccgatataaagaatgcaacgcctgaaagcggcagaggaagtgtcagtgaaaacgaggcaagaagaaggagtggagtgatgcaggagagcaccacagcaggatcgttaccttcaacacctgcaccagagagacatgatagcgtgaacggaaagatgacgctgtgagtagctttcgccagccgtggtctgcctgcggctgactagtaatcaagcgaatctttcgctgcagagaatcctaacgactctatcccggtcgatcgggcccctatcactgattctgtgaatcacgacgcagcagccgaggccgatattgaagttgaggcgcctcgtcttccgcagcacactgtttcgataccagtccctgccagtgttgctgattccaatggtgcaccttcaaaccaacaagcagggcaaggaatagacgaggaaggtggttcgttcgatgcgatgggcaggcccataccaactgaacagctgtttgtcaaggacgccttcttggtgttccgagcactatgtaagctcacgatgaagcctttagtaacagacaggtaagtggatctccttttagtaaccatccaactgatgtctttggcagcgagaaagacctgcgatcacatgccatgcgatccaaactcctctctcttcatcttgttctcaccatacttcgctcccactctgacatttttgtgaatcctctcgtctgtataccgtcgaactcgtctctagagatgactccgttcctacaagcgaccaagcaatatctggcgttgagtctttcaagaaacgcattgagccccgtgaaccaggtgttcgagctcagtgttgagatcttctggtgtatgttgaaggatatgagggcacaattaaaggtaagtcaatgacaatggtcctgtacgtcagttgaccttgaagagtagaaggagattgaagttcttcttaacgaaattttcatccctatcctcgaaatgcgccattctactatccgtcagaaatctatcatcctcggtgtctttattcgcctctgtcatgatccgcaggcccttgtcgagatttatatcaattacgactgtgatcgttcatccctcgaaaatatatatgagcgtttgatgaatatcgtctcaaagatcggccagacacatttcgcacccccaagcaaagaggaactcgcccaggggggttcaagcaaacagacaagtggatcaagtggacctgctataccaccatcgctgagcacctcggcccttggagaaggtgtaggacacaatgctcctcattacgctggtatgccaccggagatcaagttgaggagacagtcgttggagtgtttggtcgctgcgttaaattcactcgtggcctggtctacttcaaaccctggtaccaaagcagggaatttggaggaaaaccactctacaactgatgccgtcgggaggcatcatgcttctggatcagtttcgggttccattgccgaacttgttgctccaacacccatttggccaacagactcgtcgttgaaatcgtcggtttcaggtatggcatccggtatgaatacacctgatttgggagaggatgacgtgggcaagtttgaatccgccaagcagcgtaagacgaatctgcttgagggcatcaagaagttcaatttcaaaccaaaacgtggtattgcctacctcctcgaacaaggatttatccggtccaactctcccgtcgacattgctcgattcctccttaccaatgaagggctaaacaaagctatgattggtgaatatcttggtgaaggtgatgatgagaatattgcgacaatgcacgccttcgtggacatgctcgacttctccaatatgcaattcactgatgcgctccggatgtaccttcaatcattccggcttcctggcgaagctcaaaagattgacagatttatgctcaagtttgccgaaaggtacatgcacagtaacccctcatctcatttcgctaacgccgacaccgcctacattcttgctttttctgttatcatgctcaacaccgatgctcataacaaaaatttaaagcagaagcgaatgaccaaacaagagttcgtgaagaacaacagagggatcaatgatgggaaggatctgccggaagagttgctggctgggatctacgacgaaattacgaccaatgagatcaagatgaaggatgaggttgaaatccctcaaccggcaacttctggtggtttagcaagtgtagggagggatctgcaacgagaggcgtacgtggcgcaatcagagaacatggctagtaaaacggagtcgttgctcaaagcgatggtacggcaacagcgacgaggcgttgttcgtccgacagatcattatcacacggcgtcacgtctggaacatgtgcggttcatgtttgaagttgcgtggatgcctttccttgctggtatctcagctccattgcaagagaccgacgatatggacgtcgttgatctctgtcttgaaggtctgcgttctgccatccgtattgtctgccttttcgatatggaattggagaggaatgcctttgtcacgactctcgccaaattcacttatctcagtaatgtagcggagatgaagccaaagaacatggaagccatcaagagcttgttagatgtggctgtgacggatggaaactacctcaaggcctcgtggaaagatgtgcttgtatgcgtaagtcaactggagaggatgcagttgatctcgagtgggatggatgtacccgatttaaacaggactgtgtatgtaacttcggctggaagcatatgatcatactaatggagccccaggacaacatcaaccgacaagagaaagccatcgtcatcaaagaagaaggtcccaacggaggaggtggcagaagagtctagatcttcccaggttactgtagcggcagatatggtgttttcaacaagtaaaaacttgtctggcgtgagttatagttgactttattaagtcgttccagctgatattgttaaactagtccgcgattgtcgattttgtcaaagccctgagtgaagtttcctgggaggaaatccagtcttcaggttcttcggctcgccctcgaatgtttagtttgcaaaaactcgttgagatttcatattacaacatgggtagaatcaggctggaatggtctaatatctggttaatcctcggcgagcacttcaatcaggtcagtttatatcttcaggcgcgttaccagcctgtcctgttaatgacactgaatttgctttaggtttgctgccataataatcctaacgtcagcttctttgccttggatgccctaagacaactggccatgaatttcttagagaaggaggagttgtcgcatttcagattccaaaaagattttctgcgaccatttgagtataccattgtgcacaacaagaactctgacgctcgcgagatggtgagtgttttgggctgatttacgccgtgaacgattataaccggttatattaggtcttacaatgccttcaacacatgctgcaatcgcgtgtacaaaatcttcgatcaggctggaggacgatgttcggtgtcttttctgccgcttccaaagttgtcacagaacgtgtctgcagctacgcattcgaacttgttacactggtttaccgcgactacttctccctagtcgtcaaatatggctccttttcggatctcactgtttgtatcacggatttctgcaaagtatccaaatttcagaaaatcagtctacaagcaatcgagatggttaggggtttagtaccaactatgctacagtgcccagagtgtctcttgccccaattaggtgacgagggtaaggtacagcatggcgatgacccaatggtgaagtactggcttcctgttcttcactcattctacgaaattatcatgacgggagaagacttagaagtcaggcggctgtgagtttgctccattatcgtgacataggagcaaaggttgacgctcgatccagcgcccttgattgtctctttgacactttaaaaacacatggatctgggttctctgtcgacttctggaacatcgtctgccagcaagtccttttccccatcttttccatacttcgggccaaatccgacatccgcttcaagtcgcctgaagtccttagtatatggttgtcgacaacactcatctctgcgttaagggatttgattaacctgtacaccgtctattttgaggtaatgcaacggtatctcgatggtttgcttgatatcttggtagcttgcatttgtcaaggcaagtaatcaactcgtgagtaatatgctgcggctgacgattatcttcagaaaatgatacgcttgcgcgtattggcacatcctgttttgaacagctcctagaacaaaacgttcggaagctcagcccagagaaatggatgctcattgtgtcggcattcgtgcagttgttcaagactacgactgcgtatcagctatttgatcccgtgatgtgttccgagattgagccgaccggcaatatggacgaaaatgacggtaggtggtagtaacgaagtggtggtaacatcacattgcacaaagcgggttaggctaacctttaggtatagctcccttccagaaattcgtcgccccagccccccttgagcctgcaaccgataaacctccatctcttccttccaccatcagctacggcgagcaacgacgtatcttcaagcaagtcatcgtaaaatgtgtcctacagctccttctcattgagaccacccatgagcttttgcagaacggcgaggtgtacaataccattcccgccgagcacttgctgagattactggacgtgctagacgacagctggagtttcgcgagaaaatttaatgctgataaggaactgaggatgcagttgtggaaagttggtgagtacctttttagtgagaaagaaaaccaggagctgctgctgatcctgaatcaaggcttcatgaaacagctgccaaacttactgaaacaagagtctagcgctgctgcgactcttgtgaatgtcttactgaaaatgtacaacgatccaagagaagcccacagggcgacccgaaaggacgttgttaagagactggtaccgtcagtggactcttatctttctctgcttgacatatgttcctgacgaaattagcagacttgccaaggaaattattggggacttcaatcttttagatgccgaaagccagccccggaatgtagctgcttggacgcccgtgattggcgatatcttgcaaggatgttgtattctagaaatagattctgtaagttttgctcagtaaaatcttccgtcatctcgttctgaacggcgcgtttctcggtagtttgaacaacacatcacaaccttctacccccttgttaccgacatattagttaaagacgtctctttggatattagaataaaagctacgaattatttgagaagagtgggcgaggtaagggggttgattgaaaagcaatgatagtagtgatagggcaagaaaggcgagcagagtcatgtaaagaagagcttgttattgcctaacttccactgggaacgagattagactcttcttggtttggtgacttagaatcatgtgtataagactgtgaaacatgttcgagtgtcattataaaagcgactaaatgacaaaacatttttttgctccttgactactatttgttgttgctgattgcgaaagcgacccgctgtaggttggctgcccaatttcggccttggtcgtcagtccaggttcgcaggatctggatgactgtcttgttagatcgttctgatataccatcggtctgggggtgatatgctgtggacatctttagcttggtgcccaggagggaattcaaccgacgccatgacgcagcagtgaataacttatcgcagtctgagacgatcgattgtggtaccccatatttagaaacccagtggtcgtagtagagttgagcaaaagcggaggacgtgagcgtcgtgactgttggtatgagagcgacccagccggtgaggcgatcggtaatgacgatgagatagtcgaagctgtgtgattgcggtagtggccccacgaagtctatgcctatgttggagaatttggcgggaggaactggtaatgagtgtagtagtccg

SEQ ID NO: 361 - DNA, 9584 bp, Cryptococcus neoformans
gggggcttgtcgacaacctccttacctattctactgcatcagcaccgccaaaaaggaacctgtcgtatttccacgcacagttgtcaagcaagatttgtccaaactccttgatcttttggaaagtagggcccttggaaggatcggcattgtcgatgtggtacttcatatagctgtggcgtgtggtcagcgcttccttccttccgaccaagtcccattcggctcactcaagaagggcgggatcggcacggttcatctggagacacagtcagcgctgcactttcacaagttgtcgacgggattcgcgtatactcacgatggcgatacatctcgacgtgagctcacgcctgacgatgctctctttgtccatcccttcagcggccattgtgtatgtctccgtcggggaatagaatgggggaggaaggaagcgtgagaagaagagtagaattctttctttgtagcaggcactttacttgtcgaacaccggcaaccaacgctgggggcaattcggttggggatcggaggagagccacgtggcggcacgtggcaatctcggcttcctgaatggcagtcgcgcctggcggcgatcactttctgtatgttcttcgtgcagcgggcggcggcggttggagggtgtctgtgggttggaaggagtggggcgtgggaggtgacgtggatggcgcacggccctagtctcccggcgaacgcagcgcatggcagcaacaacatgaaacacctcgctggctccccatccccaacagaggataaagttgggcatgccgtcggcgttcgtcggatctaactgataagccgcggcgggccacgtttcggccacgttctccgcacgtggcgggctgatcttttggggagtgggggcgggcgttccccagtggtcgcaagttgccgagtgcagcgcgaggaggctcgctacaaaatacatggatttctccgccgccgttcttcactcttccatctccttccttcccgctagcacaggagagtcatggccgccctcttctcttccgcagcgccgatgcgccccctcgtcctccacgacgccgcaacgcgcgtctccgtacacgtcccagcctctccgctctccgcctgggtcacatcccaggtagtcgcccaggacttccaggactccatcgtcggccaacacacgcccgctcccgtcgccgacgaggacgaagagcccagtgcgccctccgttgagccccaggtcaagctcctcgcccagttcttgagctttgtcgccgacagggccgtccaagatgcctctcatgaactttcagaggtgctgctcgctgcctacaacaggttcaacgagctcttcctctccgccaccaacgtccactctctcgtccagtccttcgaccccgagacccgagcagagatcctcaaggcttacttcaaggcctttgcgactgccagggagcagctcggtgacaaggtgcagatcgctcacccttcggctcttctcgaggctgccaaggatggcagcacagagctttacgctttgttcggtggccagggtgtcaacgaagtgggtggattgctgttgaaatgatggctcctcgctaaccttttgcgtagcactactttggcgagctccagttgctctatgatacttacacgcctttcgtcgctcccatcatctctgagattaccgacttgttgatctctctcggccacaaggctgacaacgacggctacacctactattctcaaggcctcgacctcctctcgtggctcgacggctcttctcctcaacctagtgtcgagtactttgcctctatccccctttctcttccccttattggtgtcgcccagcttgcgcaatacgtcatttcttgccgagtcactgacatctccccagcggagatgcgagaaaggttcaagggtgccaccggtcactctcaaggtatcgtctctgctgtcgccatcgcttcctccaacagctggtctagcctgtacgagaacatcctcaaggctgtgaagcagctcttttacattggtctccgaggccaagagggcttcccgctcctcgctatcgaccccaagatcgtttctgactctgtcgagaacaacgaaggtgtccccactcctatgctttccatcaacggtctcggcctcaaggcgctcgagggccatatcaaaaaggtcaactctcaccttgcttccaactctcaaatcggcatttccctccacaacggacctaccaactttgtcgttaccgcccctgccaaggcactctacggtcttgtcaccgctctcagaaaggtcatggcccctgccggtctcgaccagagcaaggttcctttctctaagcgaaaggctgttttcactatgaggttcttgcctgtcaacgttccttaccacagccactaccttgaaggtgctacccagaaggttgagaaggacttgggcgaggaattgtgggatgccaaggctttaggtatggccatctaccacactgaggacggtaagtcattttttttgtgtacgcatccgggttcacaaaggcttacaataaaaataaaaacaggctctgacctccgatcctccgaaatctctctcaccacttctctttgtgaccagatcttcaccaggcccatccactgggtcaaggcttgtaacttcccttctactgccacccatgctgtcgactttggacccggtggtaacagtggtatcggacctcttactggccgtgccattgaaggccgaggtgtcaggattgtcgtcgttggtgaaaagggcaaggccgctgccgagttctacgacgctaccaagatccgacgtgaacctgtctgggccaaggaatggtctcccaagctcgtcaagactcttgacggcaaggtccacattgacactcccttctcccgattgctcggtaaacctcccatcatggttgccggtatgaccccctccaccgtcggcgccaaccttgtggctgccactcttgacgccggctaccacattgaacttgccggtggtggtcactacaaccccaaggctcttcgagccaaggtcgctgaaatccagaggcgggtcaagcccggagttggtatcacactcaacgctttgtacatcaaccagcgacaattctccttccagttccctctctggcaagaaatgcgcaaggaaggtctccctatcgaaggtttctgtgtcgctgccggtatcccctcctctgagaaggctactgaaattatcaccgccctcaaggaggccggtatcaagcacattgccttcaagcccggatccgttgaaggtatcaggcaggtcgtcaacatagccgctgccaacccagactaccccatcatcatgcagtggaccggtggtcgtgccggtggtcaccactcttgtgaagacttccaccagcctatcatcgctacttaccctgcgatcaggcagaaccccaacatcagcttgattgccggctccggtttcggtggtgccgaagatgtctggccttagtgagttgtggctttgcagtttagatttttttaatttttttttttggctgacgaaaaaatcgtagcctttccggtgaatggtccgtcaagatgttcggtctccagcctatgcccttcgatggtgtcctttacgcctcccgagtcatggtcgccaaggaagctgacaccagcgcttccgtcaagcagctcattgttgacgctcccggtgttgacgacgcccagtgggaaggtacctacgacaggcccaccggtggtatcctcaccgtcagatccgagctcggcgagcccatccacaagattgccacccgaggtgtcaagctctggagagagtttgacgacaccgtctttgcccagcccagggagaagagggctgcttggctcgagaacaagcgtgactatgtcattgacaggcttaacaaggactttaacaagccttggttcggcgagaagtctgacggcactgtcgttgccgacattggcaagatgacatacgaggagattaccaagaggatggtcaggttgatgtacatcgccaagcaggacagatggatcgacgtttctctccgaaaccttgtcggcgactggttgaggcgagttgaagagagattcgctggcgtcgacggtatccgcaccaaggagtcccttctccagtccttctccgacctcgacaagcccttgcctactatcgagtctttctttggcacttaccctcgagccaagtctcagcttgtcgctgccgaggacaaggccttcttccttgccatctgtcaacgacccggccagaagcccgttcctttcatccctatcctcgacaacaactttgaggtgtggttcaagaaggactctctctgggctgccgaagatgttgaagccgtcttcgaccaagacccccagagagtctgtatcctccaaggccccatggccgtcaagcacgctactgttgttgacgaacccatcaaggacatgcttggcaacattgaagctctcttggtcaagaagatcttgaaggagttctacaacaatgacgagagcaaggttcccgagattgactttatcggcgccaaacccggtaagcccaaggctggtctcgtttccgagtccgtctctggcgacgtcaggactctcaaggtcggcaagaacgtccccgctcttgacgactggctcgaggtcgttgcgggtgccaacgttagctggcttcgtgctgctttgacctctgtcaacgtcgtccagggagctggctacatctccaaccccttcaggagaatcttcagcccccgagctggccagactgtcgtgatcaagtctgagaacggcaaggctgtctctgtcaccgtttacggtgcagccaggtctttcggtcctcacgcggccgacttcaaggctgtcgagctcactttcaactccaacactaacgccatgtctctcatcatgtacgaggagcgacgaggtgtctctgtccctctccatttcgcctttgcttaccaccccgagcaaggctacgcccccatccacgaagtcgttgaaggtaggaacaagtccatcaaggacttttactggaggctctggttcggcgacgacgaaaagttgccctctctcaagcttgacactaccttcacttgtgatgagagcaaggtcgatgccttggccgtccagaggttctgtgacgttgtcggcaaccagggtgaggcgttcaagtctgctaggaacgagaaaatcatggctcctatggactttgccatcgtcctcggctggcaggtatgtttcttattattattttttgcggaattttaggcaaatgctaatggtcacttatgcagtccgtcatgaaggccattttccctgatgacattaacggtgaccttctcaaacttgttcacctttccaacggtttccgaatgatggatggtgttgcgcctctccgagctggcgacgcttgctctgccgaggcacgtgttgtctctgtcatcaactctgacagcggcaagactgtcaaggtgaagggttacgtrctccgtggcggcgagcccgttatcgagatcagctcttccttcctctaccgaggcaagttcaccgactacgagaacacctttgagactatcgacgaggatgactacgtcgttgagctttccaagcccacttctgttggtatcctccaggcgaagccttggttcgaatgggatgatgactcggttcccctcgatgtcggtaccacccttactttcaagacaaagtctgaattgaggtacaaggacaagtccaccttcagctctgtcaagatcagcggcgccgctttcatcagggacagcaccaaggccctcattcaggttgccaccatcgattacgaggcccacaacttgcagggtaacccagtcattgagtacctcaagcgacacggtactgccgtcggcaagcccactcccttggagaatggctactcccttatcgaggaccctaccgccgccgtcttcaccacccctgccaccaacgagccttactccaagatctctggtgactttaaccccatccacgtcaacccctacttctccgaccttgcttctttgcctggtaccatcactcacggcatgtggtcttctgctgccacccgaaagtacctcgagagcgtcgttgccgacaaccaccccgagcgagtcgtttcttaccaggtcggctttgtcggtatggtcttgcctggtgatgagatccaagtcaagcttacccacaccgctatgagggacggtaagaaggtcgtcaaggttgaggccttcaatcagcgtggtgagaaggttatcgacggttccgccgaggttcttcaaccccctaccacttatgtcttcaccggccaaggctctcaagaggttggtatgggtatggagttgtacaacaactctgaggttgcccgcgccgtctgggacgttgccgatgcgcaccttacttccacttatggtttctccatcgttgacattgtcaagaataaccctaaggagcttaccatccatttcggtggtatcaagggtcaggccatcaggcagaggtacatggacctcacctacgacatcattgacgagaacggtcgagttaagaccttgcccttgttcggtgacattgacctctacaccacttcttacaccttctcccaccctcaaggtctccttttcgctacccagtacactcagattgcgctcgtcgttactgagaaggctgcgttcgacgacatgaaggccaagggcttgattgaccagaacgccgctttcgctggtcattcccttggtgaatactctgctcttgctgctatcgccgatgtccttcccatctcatctcttgccgatgtcgtcttcttccgaggcatcaccatgcaacgtgctgtccagcgtgatgccgagggcaagtctcagtacgcgatgatggctgccaacccctctcgagttggcaagactttcaacgagatggctttgcgagagattgtcgacactatcagccagcaaaagtctgttctcctccaaattgtcaacctcaacgttgccaaccagcaatacgtctgcgctggtgaacttcgtgctctcgctacccttaccaacgtgctcaacatgctcaagatccagaagatcgacctagagaagcttagcacaatgatgagcattgaggaagttaaggagaagttgggtgagattattgagggctgttgggacatgatgaaggagaaagaggagaaggacggttctgtcatccttgaccgaggtttcgccaccattcctttgcccggtatcgatgtgcctttccactctaggtacctctggcccggagttctctctttcaggaattatcttgtcaagaagattgacccctctcaactcaaccctgacaggttgatcggcaaatacatccctaacttgatgtaagtctttttctcggtgtgaatccaccatgcactgacggttgtatagcgccgagcccttcgaggtttccaaggcttacgtccagaagatctttgaccagaccgcttctccccgaatggagacagtcctcaataactgggagaaggaggcttgggaatccccctcccaaaggcaacgattggcttaraacatcttgaccgaatgtcttgcttaccagtgagtttgattgtagatcatagcattggtgatactaattggccatttagattcgcctcccctgtgagatggattgagactcaggacgttttgttcacctacgccaagttcgagaggttaatcgaggtcggccctagccccgtcctttctggtgagtgcccacagcccattgtacaatcatctacagaaccagcttacgcttgcgtcaaggtatggctacccgaaccctcaaggccaagtacgaggcccaggacggtgccatctctcttcaacgacagatcttgtgtcatgccaagaaccagaaggaggtctactacgcgtttgaggatgaggctgctgatgaggctcctgccgccgctgctgcctctacctccgctgctcctgctcctgtggctgcgcctgttgccgctgcccccgctcctgttgccgcttctgccggtcccgctgctgctgttgaggatgttcctcccaaggccgtcgacactgtccgaatcattgttgctcagaagctcaagaagcaggttagcgaggtccctcttagcaagtctctcaaggagctctctggtggaaagtctaccctccagaacgagattcttggtgacctacaagttgagttcgcctccgcccctgaaaagggtgaggatctccctctcgacgagcttggtgctgctcttagcgttggctacgccgctctcggcaagcactccatggctcttaccaaccgaatggttgcctccaagttccctggtggattcaacatcaccgccgctcgagcccaccttaataagcaatggggtcttggtcccctccgaaccgactctgcgttgttcttcggtatccttaacgaacctcccaagcgtctcggttctgaagcagaggccaaggccttccttgaccagcttgctcagagctacgcttcttacagcggtatcagcctctcatctggtgctgctgctggtggagctggcggtgcggccggcggtggtgcggtcatgaactctgaagagtttgacaagtttgtccttaagcaggaggagcacgctcaaagagagatcgagttgttgtcaagatacttgggcaaggaccctcgagaaggcgagaagaaggcggacgaggagaaggtgagttttttctcgtacttgcatggttgtcgcattacttactgacttgataactctaggctaccgctgaggagctccaagctaagctcgacgccatcaagctcgagcacggtgatgcgtacattgacggtattactcccgtgttctcagcacttaaagctagaacatttgactctagctggaactgggttagacaatcatccatccaattgttctacgatatcatccatggtgatctcgaccctagcacggtctttaacgaccctccgtaagtcctgacagtttaatgagttactttttcatgctaacgacaatctgttcaggcgataccgttccaacgcataagtgtattagagttgtctggggttagattgagggttatttttggtttcatgacacattttcttttctcattttctattattatgatgtcgcatagatacctttacgtgtacagaacagaatgcaggtagatccagaatcacaaaatgttgcatattacggacagtaagacaaaatgctgagccgagctgcaaggggaaacaatggtgaaagtgatgatgttgactgttgacgcgtcattgtgtcgccacggaggaacactcgaacccggaactctcgaataatcatctatgttttcgattaccttcttagaccctcttcatcagtctatctactccaactccatgagcgaccaaacatcccagaaagaacccactcagcggccagcttcttccccggcaacactgcctgcggaacaggccccccaagaaactaaactggcggtcgagcctgttgccgagacatcctcgacaccaactgctccaacttcagccggcacagagccccaaatcaaggtctataaccctgtagaa

SEQ ID NO: 362-1000 - skipped (639 entries)

SEQ ID NO: 1001 - DNA, 450 bp, Cryptococcus neoformans
atggccaaccttggtgttcccgtcaagctcctccacgagtctttgggtcatattatcactgtcgaattgaaaactggcgaggtgggtagtcatttctttatctgtcgaaatcatatggctcgcccttcttgttgctaacaatagcgtctgtcgttgctgtagatgtaccgaggaaagttgatggagggtacgtcccgttgtcttacctctccagatcacttgacaccgatgctaatctgctcatcttgccctgtgttttgccattctgccgctccagccgaagacactcttaacattgctctccgtgaaataaccgtcaccgcgcgagacggccgtgtatcccaactcgaacaagtgtacatccgtggtagtatgatccgattcataatcgttcccgatttgcttgcccaggcgcctatgtacgtgtcttcatctcaattccgctcctaa

SEQ ID NO: 1002 - DNA, 314 bp, Cryptococcus neoformans
atgacaagattcacatccgtgagtcgccacatctctctcacatcttgcagctctagatatcctaaccgctacgcaggtctccaacagcgtaacggtcgaaagacccttaccactgtgcagggtatccccagcaagtacaaccactccaagattctcaaagcgatgaagaaggagtttgcctgcaacggtaccgttgtcaagcccgaagttgactctggcgaggaagactctcctgcccccgtcgccaaaaaccacggtgacgttttgcagctgcaaggtgaccagagggtcgccgccaagcagttcctcattga

SEQ ID NO: 1003 - DNA, 399 bp, Cryptococcus neoformans
atgaaggtggaaataaattcctatcgcgcggtagcctactggatttgggacgtttccgacgaacctcacaagctttaccactacgcgccgccggacgaagttggcctcgacgatgacgacgatcaggacgtctgcggtatatgccaagcggccttcgagagcacttgccccgattgcaaaatacccggcgatgactgtcccttgagtaagcgtagtgtatgtgtggagcaaaagcatgatgctgatttgttctgtttagtttggggggaatgcacccacgtttttcacatgcactgcttgttgaaatggatcggtcagaaggaagatgaatcacagcaacaatgccccatggacagaagaccttggggtaagtcttctattaaaagtctgtgctcttaa

SEQ ID NO: 1004 - DNA, 359 bp, Cryptococcus neoformans
atgctttcatttttcagcatcatgcctccagcacccacagttcaacaaattcagagcctctattcagccactgtcaatgcgtcccagcgcttcacttcttataactttcataaatactttcttcgaagagccgacgaagtattcaaacccgtccttgcctcattagctccacccgctggttcggcaccttcagatcctatagacccttccagacttgctcagttttacgaacagcaaaagactcaacttgagatacttgagagggcttcagaagttaacaggatgtatgaaggaccgaagttggtagtggaacatgctcagcctataacaagtggcggaggggctggtatggaagctag

SEQ ID NO: 1005 - DNA, 447 bp, Cryptococcus neoformans
atggtcaaggctattgaagtcttacgacgagtggaagactctcgtaagctccatcccttagaattgtggtcgctatccgctaacccgtctcacacacagacttctggctccgatgtcgtcgtcgtcgactactgggcgacttggtgcggtccttgcaagatgatctctccccactttgccaagcttgagggcaagtttcccaatgtcaagtttgccaaggtcgatgttgaggagcaagaggttcgttacctcccgctgtgcagttggatggaatactcaccccttgcctttctgcaggacattgccaaggaggctcaaatcaaggccatgcctacttttgtcgcctacaaagacggcaaggtgattgagactgttactggtgctgtccccgcaaagatcaatgtgggtctatactcgttttttttgcgatgtcttaggtttggctga

SEQ ID NO: 1006 - DNA, 491 bp, Cryptococcus neoformans
atggccgagtacaaggaagacctcgaaaagactggcgccggtgcccagaagatccacaagatcaggatcaccttgacctccaagaacgtcaagcctcttgagaagtgttagtttgtggttggacggtcgtggatctgaaaaacgggggagaaaggctgatgaaaatctctgtagtctgtgccgacctcatcaaccgtgccaaggaccgagacctcaacgtcaggggccccgtccgactccccaccaaggtcctcaagcacaccaccaggaagtcgtacgtgataattcttaatgcttcctgccggcagggctaataaacgacttttgttttgcacagtccctgtggtgagggttccaagacctgggacaggtaccagatgcgaatccacaagcgtctcatcgacctcaactcttctgccgacgttgtcaagcagatcacctccatctccctcgagcccggagttgaggttgaggttaccattgctgcttaa

SEQ ID NO: 1007 - DNA, 463 bp, Cryptococcus neoformans
atgccttcaaaaggactaattcgtacccgctgtaggtttttgatgaagctcaataacgagacggtcacgatcgagctcaagaacgggactgtcattcacggtaccatcacttgtacgtggatggcttttgtgtccaaaaaagtgctcatgctaaacgtgaaatttagccgtggaccctcaaatgaacacccaccttaagtccgttaagctcactctccgttctcaaccttcatcccaaccacctttgtccctcgactctatagccatccgaggaaataatatccgatacttcatcctccccgactctcttcctcttgatactttgttggttgacgacgcgcctaagcctaagaagaagaaggaaggagctgctgctaggggagctagaggagcagctaggggagcaaggggagccaggggcggtggccgaggcgcgcctagagctagaggaagaggtttctag

SEQ ID NO: 1008 - DNA, 546 bp, Cryptococcus neoformans
atgtcccaacccatctccaagcttgacaatccaagtactctccttcaatctgtctcctcaaatgccgttcacgaaaagatcactatagtgcgtcttgtggccaattgttggcgataccaggcattatactgactaagacatcgttagttaccaggacatgaacccgattactcagcttgtacttttgctctctggcaagaagatcatactcttggaaatgctttgcgatggattatcatgaaggagtatgtgtggccttacaaataccatcagatgtaaaattgacccgctgcagccccgaggtggagttttgtggctacacagctcctcacccgtcagaacccaagattcatctgcgaattcaaatgtacggtgagtaaggagtttgctctatcctgttaaactgcgctaactaagcttatagagaaccaatccgccgtggactgcttacggagagctctctccaacttgcgtgatcttctcaatgctgtgaacgattcttatacttccagtttacagtatgtttgcttatttcatgtcgtataa

SEQ ID NO: 1009 - DNA, 587 bp, Cryptococcus neoformans
atgtctgctgctgatcacggacgagacccctggtacgtccccccaccccccaaaccccacgggaggaaatccgcgaataacttgccgggagctaacatcggtgacagcccgtatgtcatcttgaacgatttcggcggtgcgttctcgatgggtgcgattggcggtggtatctggcacggtatcaagggtgcgagaaatagccccagagtatgttttttccattttgaaacaacgccgtcgagaaacgtttttctgaccatggtttcgcctttatcccaactattcgccgttatcccaactgatgatcacttgatcactcgcctaccttacacccacagggcgagcgtctcgtcggatccctctctgctatcaaagcccgtgcgcccgtgctcggtggtaactttggcgtttggggtggtcttttctcaacttttgactgtgcggtcaaggggtataggcaaaaggaggatccatggaacgccatcatctctggtttcttgacaggtggcagtttggcacttaggtgtgagtcttttttttccgtgtgctgccttgagacgagtggggatgtttgggataggggatag

SEQ ID NO: 1010 - DNA, 539 bp, Cryptococcus neoformans
atgtctgctcaacccaaccccaaggctttccctttggccaatgcccagctcaccaaccaggtatgtctttacaagtcgccatcataaagagataggctggcggatgggttatcaattaaactatattgagaatgtcttggatgggggctgattaggatttttagatcctcgacttgatccagcaggctcagcactacaagcagctcaagaaggggtaagcatattcatttcttctccatccttatcacatttccccttttactgactcttctcgcaattctccttagtgccaacgaagccaccaagacccttaaccgaggtatctgcgagttcattgtcatgaccgccgatgtcgagcctattgagatcgtcctccaccttcccctcctctgtgaggacaagaacgtcccctatgtctttttgccttccaagactgctctcggtagggcttgcggtgtttctaggcctgttatcgccgccagtgttaccaccaatgaggctagggagttgaacgcccagatccaggctgtcaaggttag

SEQ ID NO: 1011 - DNA, 443 bp, Cryptococcus neoformans
atggttgtcgttgttgaagaagtccgtgacgaagccgccgaggaagtcgtcctccaggaaggcgagaacgaatccgatttcgagaccgactctgaagtttcctccactatttcagacgatgacgactttaaccccgccgacgaatctttctacgaccggctcaccgctctcaaagacattgtccctccccagacccgctcaggcctctacaacaagtacaagtcaacaactggttgggcttggtggggtattcagagcgccggctctcttgcctggttggtgagcaccagcgcccttttggttggtttgcctttggctcttgccattgaggacgaagccagggttgtcgctcaggagaaggagatgcagatgcagagtgccggtcagcagcaggtgagtttggcttttttggaacgtgtcataggttaaggcgctattgctga

SEQ ID NO: 1012 - DNA, 555 bp, Cryptococcus neoformans
atggacgtctcccacgtgctcgacgagtacaccgccagcaagtaagtcgtgccagctccccccgtgtcatcccccgctgacagccgcagcaccaccgccgtcctcccccgcgccgcacccgtccacaccgaccccgccctgctcgccgcctttgacgcctcccccctcgaccccgcagcgtacgccgaccgcgagcgccacctgctccagctcaccctcacctccacccacgccctcgtcgccgccctcttcgccctccccaccaccccctcctccgccggccccgtcaccgccttccccccgcccaccaccctcctccccagggagaagcccctgcccacgccaaaggcccccaccaagtgggagcgcttcgccaaggaaaagggcataagccacaggaagaaggagaaggacgtgtgggacgaggagcgccaggagtgggtcccgcgctggggcaggtttggcaagaacaaggacaaggaggaccagtggctgcatgaagtcaagcccggcgacggtgcgtctgtctttcgtcctgttgactctttgcgctga

SEQ ID NO: 1013 - DNA, 620 bp, Cryptococcus neoformans
atgaatcagcctaataggattgactcatggttgttacaagatgatgagaaaccgtgagtttctccatcacaccgttacgaagcacatatatacataaggatcaaaagttaatgagttggactcgacagattaacgatcacggaggaccccaaactgcccaacgcctccactatagtcatacgacgacaggatcatacattgggaaacatgctcagagcgtgagccgcaagccattgaattgatctcatgatggatgtgctgacaactggttaagacaattaatgctcgaccctactgttctcttcgcgggctacaaagttcctcaccctcttgaaaacgacattcttctcaaaatccagaccgacgagcggtcaaatcctgcagaggctctcaaacgtgcttgtcatgaactgatccggcaaaccgtacacatcaaagctcaattccaacagcaagcaaagaacatcgagatgggtatgggtcccgaacaaggagtcgctccagatgcagcaggtgcgaatggggcgtacgatccgtatggggatgggttcgggagggagggcaatgtggtcgtcggcggtgcagtgagggaccaggggcaggatgtatacgacttttag

SEQ ID NO: 1014 - DNA, 722 bp, Cryptococcus neoformans
atgccgacccgattcagcaacacccgaaagcaccgaggtcacgtctctgccggtcacggtcgtatcggcaagcacaggaagcatcccggtggtcgtggtttggctggtggtcagcaccaccacaggaccaacttcgacaaggttagttggattataattatcggggatatggatggggttcagcggagggaaaacgggatctacgaaaggaataagaatgcgtagaagatttgtcggaaatggagaatgagaattttgatgagagaaggatggtgttcgatttggacgacgaggattttgagagttgggctaatttagaatactttagtaccaccctggttacttcggtaaggtcggtatgcgtcactaccatctcctcaagaaccactactaccgacccaccatcaacctcgacaaggtgtgtaaacgaaaagactactatcccggaatgagcagcggctgacatgttgggcagctcatctctcttcctgaagccaaggttgacgctcctgagggtaacgttcccgttatcgaccttgtccacctcggcaagttcaagcttgtacgtattatttgctgtcattcgttgatcactttctgatatcttacagttgggcaagggccgaatcaacaagcctttcatcgtcaagactcgattcgtttccaagttggccgaggagaagatcaaggaggctggtggtgttgtcaagctcgtcgcttaa

SEQ ID NO: 1015 - DNA, 725 bp, Cryptococcus neoformans
atgcgttgtatagtgaatcactggccagtacgtgcgaccactatcggtaagtccttcagcttgttccatccccatattttgctagtaaatcggttggggatgagccgagcttatctgggagatcaggtattgactttaagatccgaacaatcgagctcgatgggaagcgaatcaagttgcagattgtaagttgccgtttccattcttatttatatcaaacagtagtgctgactggtcatgcatgtagtgggatactggctggtaagcatatccgtccagtttgccgcagcagctggcatgcatggggctgttactaattccgcaattcgtcagggcaagaacgtttccgaaccatcacaactgcttactacagaggtgccatgggtatcttgctggtctatgacgttacagatgaaaagtcctttaacagtgagttacaccttcaaacctcggaccattgattgcagccctttttttttacatggcactgaaccgtctcgttagacatccgaacctggctctccaacattgaacaacatgcatcgcccggcgtgaacaagattcttatcggtaacaagtgcgactgggaggagaagcgatctgttacgattgagcaaggacgtgcgcttgccgacgagtttggactgcgtttcttggagactagtgcgaaagcaaacgaaggtgtggaggaggcatttttcacattggccaggtacgtcatgtag

SEQ ID NO: 1016 - DNA, 824 bp, Cryptococcus neoformans
atggtgagtcgtttccgctccagagtacccatatttctcacgcactcatccgaaatagctcatcttctcgtgagtctctctcaccgacaagcaacaatcccgtaccctgccttcgatgtgtcctcaaaacctccaagatatgcacatacgaacagtagcttatttggaactgctcatcgtctagtttcttcaagaccctcacagaccaagtgatcaccgttgagctcaaaaatgacttatcaataactgggactctcaaatctgtggatcagtaggtcgagtcttgcgtctacgaccttttatatatccagtcgcccacaattcagtccagtattatctgctactaggatatgggcaaaggtatgcaagagtactaacatgtaacggctaggttcctcaacatccgattagataatattagcgtagaggaccccgaaagacatcctcatatggtaagcgtatatctttttttgacacatgccaaatgcggaagtgggattctggacggtgaaaagatggcaagcttgcggtgggggtcaattatttgtctgtatctttgaaagaaatataattttcagtggtctatccgggatcggagcccgcttcgtgtccgccacgccccatgccctcttctggaatatttcttttctaaccaagagatgctgacaacgtgcgcttcgacagatggcggtcaagaactgtttcatccgagggtctgtagtacggtatgtgcggatggctgcgcgatcggtggacactacgctgctggaggacgctacgaggcgaggtgagttttgtgtctcgggtgttggcgggtatgctga

SEQ ID NO: 1017 - DNA, 645 bp, Cryptococcus neoformans
atgacgacagacatccccgcgcaacccctcaaaaccactaaagagacacaccccgatttaccgccgggcctcatcatcggccctgatggcaaaccatgtaaagtctgcaactcgtggcaagattgggccaagatcaaagtcaagaagaaggctgccagtggtggagaggatgctgagaagaagaatgtttctgggtccggggcagcagtcggtatggcgggattcggcagcatgctgtctggtgcaggcgcctcaaaagctcctaccaacgcaccgttagaccgaacgccagaccggtcaaattgtccacctgacaccgcagcccttgggcgctctacatggacttttctgcatactaccgctgcttattatccaatcaacgcacccccacagacccagtccagtatgcttaatctcctctcttcactgtctttgctttatccctgctcgtggtgtgccacggacttccaaaaggatatgcgccgacatccgcccgatgtcagtgggagagagagtttgatgaaatggctctgcgagaggcataacgaggttaatgaaaaattggggaaagagaaatttggatgtgatatcaaaaatttggacgtgagatggaaagacgggccggaagatggtagttgcgattaa

SEQ ID NO: 1018 - DNA, 684 bp, Cryptococcus neoformans
atggaggtagaactcccatccatgcctacatccatccgtcaaacataccaaggtcgtcttgcagcctccaagcagagccttgacaaaatcagaaaaactcttgtaagtttaacccgccgtgttggttgtaaattaccccaccttatctgaaagcgctaccttagaaagacctccgtctccaatcccaacgatctgatctcctctccggacctgggttcccccacggagacgacccatacaccgacgatccggaaccttactctacccgatcccgtctactagctggcacgcagactcttgaagatggcaccaccaggctcgataatgcgcacaggattgcactggagactgaaggtgttggatctgaaattcttcgaaatttgagagggcagagagatcaattggagamcactagggatactgcaagtcgccatgttaacgcatccaaacgccttccactaacgccttgtagcttgtccaagcggactcttctattgatcgagcagcgggtacacttaagaagatgatcttcaagtaggtttacctttgtaaacaggtttattttcgctcatttaaactgatttataccatagaatgtaccaacaaaaattcctctcggcaggtatcatcgtcgtccttgtcctgctcatcctcctcgttctctactccaagttctttggataa

SEQ ID NO: 1019 - DNA, 784 bp, Cryptococcus neoformans
atgaggagccacgtaaataaaactaaaataacacctgcttaaattaatagatcccgctttcaccactaaactctgctaattttgcaaccgtaactgccacataggccccctaccggcgttatctcctctcgaaaccccgccgcggttactcgcctcacatctcgacgaattttgtcatcttctttgtcatccagcagcttctcgaggactccatatacttggatagacaagctcttcaaaatgcaaatcttcgtcaagacgtaagtacttctccggcctcctgcatccttaccttggctcacacgtctccagccttcccggcaagactctcgcccgagatgtcctccccacctctactgtctcctccgtcaaggagatgatcgcctccgctgagggcatccccgcctctgagcagcgactcatcttcgccggtgtccagatggacgacgagcgtgcccttgctgagtacggtatccagaaggagtctaccatcaacatggtcatgtctctctgtggtggtggtaagaagaggaagaagaagaactacgtgagtgatggcttagtaatcgtgcacgacaatgtggctgactggcatctgtagaccacccccaagaagatcaagcacaagaggaagaaggtcaagatggccatcctcaagtactacaaggtcggatccgacggcaagatccagcgactcaggcgtgagtgccctgcgcccacctgtggtgctggtatcttcatggcttggcacaaggacaggcaggcttgcggcaagtgcgggtga

SEQ ID NO: 1020 - DNA, 690 bp, Cryptococcus neoformans
atgcagtccggcaacaacgcaggtccgtactcgccacccacccgccacttctccttccaacccactagctgaccgccctcgcagaataccgagaagcctttgccctctttgacaagcgaggcaccggccacgtgccccgtgaatcccttggtgaacttttgcggtccttgggtcagaatcctacccaggcagaggttgccgagctcgagaagactgtcggagccactttcagctatgacgaatttttggcggtgttgaacaggccggatggatggaagcctgccggcactgccggtcagtctcctttcctctcttcctccttgcgtgcgaatttccttctggagtaatcatgctgatgaaaatgcagacgagtttatcaagggattccaggtctttgacaaagctggaaacgggttcatcggtgccggtgaacttcgctatgtcctcacccagcttggcgagaagatgactgatgaggaagtggacgagctgctcaagggcttccctgtccagtcagtctaatcctcttcaaacttctcatagcattcaccgtttactgacatacgcctgcagagacggccagatcaactaccactctttcgtccgatcaattctctctcaataagaatgggagagggagatggaggacggaaatgtattctattctacttgtttcttgacgaactttaa

SEQ ID NO: 1021 - DNA, 725 bp, Cryptococcus neoformans
atggccgaatcatccaatatcatctttgacgacaggttcaccgtcgatgtgggtccttttttttattggttacacatttcaactgaacatttcgtttttcccagactgtagacaaggacggcaagaaatttgaccgaggtgattaatccatattcagatatatttcgcgcgcgcaaggcgactgataaaagatggcaaagtgtcccggataaccgcgacgtcacattcgctttccatgtccctcacgctcgacattgccaacgaactctacccactcgaacagtctgaaacgtttacgctcacactcgcgcggtcgctggtcccgtcggagctggaaacgttggatagtcgtgcggatggggacgaaggcgaggaggggagcgaagtgcggagggtgaagcgagagttgtggaggagtcatgagcaagggttggcggaagattatgattatgtcatgtatggcaaggtgggtaaaggttttgggtgggagaatggaaattgatggggacggtgtagatttacaagtttgacgattcggcgcaaggagaggctcagacgtgagtgttgaaggcgtctcaatggcactcgctgatcaaaggcggtagcacggcatacttttctttcggtggactgctcatggctctccgtggatcgtatcgacatcttgcgggggttgttgttggagaaaacgtgtatttgctcatgcgcaagtaatgaagcgttag

SEQ ID NO: 1022 - DNA, 725 bp, Cryptococcus neoformans
atgtcccgccagctcgacaacgtcaaccccaccatttttgcgccatcagctcccagtttcgtccgaagatcgacaggaaaatcggccaaatcgagcttatgggctcccgaagctttgtcagatgatggggaggactactactccccaggagcgagaagtagcggtagtgtcagtgacgaggaggaaggaagggaagatattgatgcgcaagaggtttatggtgggtcgttttactgcttggtgctgagaaacgagtggcatattccgcttgccaccgtttccaagtctttttgtcaccatgactgacagttccacagaccttctgcggtcaataaccgaccctgaacatccagtatctttggagcagcttcgagtggtaaaccctgaggatattcatgttgctggaaatcgtgtgttggtgtatcttacacctacaatcccacattgctccatgtccaccctcattggtaagctgaaaaccatgtcgaagtttaagagtgggaactgatcatgtaatagggctatcattgagagtgcgattattgagggctttgcctccacgatatagggtggatattcgaatcaaatcgggaactcaccaatccgagcacgcagtcaacaaacagttaaacgacaaggaacgagtacaagcggctttggagaacaagcatctgttgagtgtggtggaaggctgtttggcgactgctggaaagcgtggcgaatag

SEQ ID NO: 1023 - DNA, 676 bp, Cryptococcus neoformans
atggagtgctcattcggtattactggtaagtgtggctacggcacaaacggtatctaatgctgatatttccctatcacaggcaaagactatgtcatcctcgcctcagacatgggtgcgggacgatccatcgtccgtatgaagtctgacgagaacaagctcaagaccttgggtccccacctcgccatggcttttagcggtgaacccggagatacaaacaattttgccgagtatatcgagaggaatatgcgactgtacaacatccggtaagtccctgcgcccgtgttatatgtaacctcaagagttatcttggaagaactggacagagttgatttttttgtttttctgatttgggttactcggcagaaaccatttcccgcttcttccaccagcagcctccgcttgggtccgacgtactcttgcagaagctattcgatcccgacacccctatgctgttaacctccttcttggtgggttcgataccaccacctcaaaaaccccacttgtactggatcgattatctcggtaccaaggcgattgtcccttatgctgcgcatggtatgggtgtgtatgttagtttgagtacgatggataagtggtggtacgaggatatggacaagaaggagggtgtcgacttgttgagaaagtgtattgacgagacggagaagcgtgagtctaa

SEQ ID NO: 1024 - DNA, 726 bp, Cryptococcus neoformans
atgatgagacattgggatattgcagaaactcgagacgctaccatattcaaccaactcatccgccaacatggtcagattaatcacccataacatgcttgcttgccacgtcagtaagttacactctttcattccatccgctcatcatcctgagctttacacaactgatctctctctctctcttttttccagagaactgcacaaaggacaactttcccctcgtcttctcagaggtagagctcgttgaacgaccggcacctatcaatccggatttcatcaagcgattcttgcccaaactcgattggaaggctttggtggatacggctcggtctgtgagtatgagccgggggtggtagtcgcattttcgcccccgaatggtcaagagtattgacttgactatcattacagctcggtgatactagtctccccgataccatgcctgaaaactggacagatgaggaaatacaagctttacaccatgtccttttcgaggtatgtcttgcaataatttcatcggtccagctttaatttgggccgcgagacaacgaacaactgaatgatgtgaaaacagttgcatgtggaggaaggaatcatgacatgtcgagggtgtggccatgcctaccctgtggctaacggtatccccaatatggtaagtcagattttggaatttggtctatgaagcaaaagccaagagggaaaaaagaaaaaggactgattaatttggtttga

SEQ ID NO: 1025 - DNA, 809 bp, Cryptococcus neoformans
atgccgagttccagggggcttcagcccttacacgcgaaaatcatcagcaataacaaacgattattgtttatttacctattattgaacctattaccgacaagtaccctcaagctagcccgccatgtcttattttatgacccagtaagtctcaccagccccgtaatcgacccactggctaacgcgcatagtcttcactctggctggcatgtcgaccaagccatcctcgtcgaagaagatcgtgtcgtctgtatccgtttcggccatgaccatgatgaagaatgtatggctatggacgagacactctatggagtctctgaaaaggtccaaaattttgccgttctctatttgggtcagtatctctctttaatcttgtaccttcgcgaagacctaatgatctgtagtcgacatcacggaagttcctgatttcaacaagatgtacgaattgtacgataattgtacactcatgttcttctaccggtaggtctatcacagagcaatagatctatcattataaatgataacattattatagaaataaacatatcatgatcgacttgggaacgggtaacaacaataagatgtgagtgcgggtatgcttcattcaaatcatttactgatggcgatattctttacagcaactgggctataacggacaaacaagaagtaggcaggccatcagatcaaatcatattttttttccagaaaagctcacatggatttagctcattgatattatcgagactgtctaccggggggcgtccaaaggtcgaggtctcgtcgtttctccaaaaggtgggctacatttttaa

SEQ ID NO: 1026 - DNA, 743 bp, Cryptococcus neoformans
atgggtgcctacaagtatctccaggagctctacaccaagaagcagtccgacgtgcttcagttcgtctcccgtgtccgatgctgggagtaccgacagctcgccgtcatccaccgagcttctcgaccttctcgtcccgacaaggctaggcgactcggatacaaggccaagcagggctatctcatctaccgtgttagggtcaggaggggtaacaggaagaagcaagctcccaagggtgctacttacggtaagcccgtcaggcagggtgtcaaccacctcaagtctcctagaggtttgaaggctaccgccgaggagagggttgccaggaggtgtggtaacttgcgagtgtgagtagagtttgcatgctagaagggacgtgaattgatgtcatgtttagtctcaactcttactgggtcaaccaggacggtgtatacaagtactacgaggtcatccttgtcgagtgagcaaaatattcctctcctacgccaaaccttaactaatatcgtcactctagcccctctcacaaggccatccgacgagacgcccgtatcaactggatcgccaaccccgtccacaagcaccgagagatgcgtggcctcaccgccgagggcaagaagaaccgtggtttgggcaagggttccaagcacaaccaccagccccagaaggccacctggaagaagcacaacacgtcagttctgttctgtttcaccttgcctatccatttaccattgctgacgctccgttga

SEQ ID NO: 1027 - DNA, 716 bp, Cryptococcus neoformans
atgccttcgttgcgaatggactcgccgctgcactgttgctacctggtggcgcccgctgtttgtctcacgtatgagaaagttcagtgggtgctgactgcgtgtcttttgcagaaacattgtcgccaccgtcaacctcgactgtcgtttagacttgaagactattgccctccacgctcgaaatgcggaatacaacccaagagtatgcttttctctgtcctggaagaagcatcaaactgatgtattgtttagcgtttcgctgccgttgtcatgcgtattcgtgacccaagaacaacggccttgattttcgcttctggaaagatggtcgtcactggtgccaagtctgaagacgactctcggttagcatctcgtaaatacgcccgaataatccaaaagcttggttttgaggccaagttcgccgagttcaagattcagaacatggtcggcagttgcgatgtcaagttccctatcagattagaaggtctggcattcagccacggtgcattcagcagttacgaaccggaggtgaatccttctcataattgtctgaattgttttctcacatactttcagctgttccctggtttgatttatcgtatgctcaaacccaaagtcgtcatcctcatcttcgtgtccggcaaaattgtcctcaccggtgcaaaagtcagagaagaaatttacatggcgttcaaccagatctactctgtgttgctcggtaa

SEQ ID NO: 1028 - DNA, 794 bp, Cryptococcus neoformans
atgtatttctctgtagctggtgcatccgagacagcagtggacaggagagaacgtcttcgaaaacttgctttggagactattgacttggccaaagatccctatatccttaggtcagtgcttgtgcttgttacgatgtcaaattattgttttctgacattctgtcattcataggacccatctcggtacattagaatgccgtctttgtctcactcttcacgtcaacgagggttcttaccttgcccacactcaaggaaagaaacatcaaacaaaccttgctaggcgtgcagccaaggacaacaaggatcagacattaatgatccaagctcccacagccgcgcaacaagtgaagaagaaagtgtttgttaagattggaagacctggtaagtcggtttcgacgtccaatcttgcctctcaggagtctgattcacggcccaggatacaaaatcatcaaaattcgagagcctgtcagtcaaaggatgggtttattattcactgtgtctttacctgagataaaagcgggagagaggccaagaaggaggttcatgtctgcttttgaacaacggcgagagattcccaataaagctttccagtacttagttgtgagttctactcaatcggacatttcttccgccctactaaactataggttgtagttggcagccgagccatacgagaccatagcatttgccatcccctcaaaagagatggttgacgttgatgaagacccggagtcgacatgggagcactgggatgccgacgagaaggtttacagttgtcaattcttgtataaataa

SEQ ID NO: 1029 - DNA, 804 bp, Cryptococcus neoformans
atgaacatattccgcttcctcggcgacctctcccacctcgcctccatcctcatcctcctccacaaaatccagacaaccaggtcctgccgcggcatctccttcaagtcgcagctcctctacctcatcgtcttcctcacccgctatgtcgacctcgtcacccacccgctcgtctccgtctacaacaccgccatgaagctcttcttcatcgcgtccaccgcgtacaccctctacctcatgaagttcaagtaccggtgcgcccgctgccaccgctcccgcacgttccgccgctgactgtccgcaggccgacacacgacgcctccctcgataccttccagctctcgtacatctttggccccgttgccgtccttgccctcttgttcaactacaagttcacgccctttgagatcacctggtccttctccatctggctcgagtcggtcgccatccttccgcagctgttcatgctccaaagaacgggcgaggccgagacgatcaccacacattacctcgcagccctcggtctgtacaggggattgtacattcccaactggatgtacaggtgagtctggattcatagattgcatactctacacgcgatccaactgccaaacaacaggtactttaccgaaggcgcctttgacgccattgctgtcgttgccggtatcattcagaccgccatctacgccgactttggatatatcgtgcgtcgccgtccgtccttccgcacgtcccgcagctgactcccgctcaccacagtacgtcacaagagtcctccgcggccaaaaattcgagctccccgcctaa

SEQ ID NO: 1030 - DNA, 835 bp, Cryptococcus neoformans
atgcgaaaatacaaatggaggtggactgaagcgggcaaaggcgaagacgcgaaaagaaaagcgaaaacaaatgatgataataattctcgctttccctgttactacttctcttgccacttccaattttatcactcatcccagacatatctcaacatgacaggtaatggtaagggcgaagacgacgtcagcttgccgaaagctaccgtcctcaagatcatccaaggttcgtcttttgcccgtgtatggtagaccacagcgcaaaactgaccgacttgcctcgcagaaatgcttccagaggatatatctgcatcaaaagaggccaaggacattatatttgactgctgtactggtgagcagacgcctatttgtgtatattgctcggttgtcaagcgcaatattgactgatgaacatcctcgacctgtacagaatggataaagctcatttccacccaatccaatatggtctgtgaagcctcttctaaaaagaccatatcgcctgagcacgtcgtagaagcgctcaaagtgggttgccttgtttttggaacaatatcattatatattgtactgatttaatgagccagcaactggggtttgaagactttgtggccgaggtggaagagtcgaacaaggactttaaacaggctcaaaaggtatgtctacgagaattgtaccttttatagtaggatgtatggctgactttgatgttacaggagcgtgtacgatcacagccagataccaagggcatgacagaggaagaactgctggaactgcaagaacgtctgtttgcgtctagccacgccagatttgcagcagggcagcaataaaaataaaatga

SEQ ID NO: 1031 - DNA, 871 bp, Cryptococcus neoformans
  misc_feature (536)..(536): n=g, a, t or c
atgaacaagagtatgcagcctatctactccaccggattgagtctttccactgatatccacaccaggcgcaaagctcttgttccttggtctcgataatgcgggaaagactgtacgttccacgcggccccactgtcacatctaatctacccactctgacatctccacgtccaccagacccttcttcacatgctcaagaacgaccgtctcgctacccttcaacccactcttcaccctagtgcgcatctttttcttcataaacatccacacatcagttgacagcgttttccagcctctgaagaactcgccatcggcaacgtcaagttcactacttatgatctcggtggtcacattcaagctcgaagattgtggagagattacttcccagaggttgacgggattgtgtttttggtagacagcgccgacgccgagaggttcgctgaaagcaaggccgagttggactctttgtgtaagtgacttgtttggaagtgcaaagtggagcgcggagacacgagttcgctttgggggggggtggcgancaatagagaatacggcggacgcgtcccagctgctaattcttgtgcacagtgtccattgaatccctcgctcaggttcccttcctcattctcggtaacaagattgacgcctacggtgctgtctcagaggagcagctcagacacgagctcggcctttaccagactaccggcaagggcaagattcctctccgtgatatccgacctattgaagtattcatgtgctccgtcgtcatgcgacagggctatggcgaaggtttccgatggctcagtcaatatgtaggttgtctctggactcaacggattggcaaagctcatgtcgcatattaagatctaaataa

SEQ ID NO: 1032 - DNA, 825 bp, Cryptococcus neoformans
atgtctgtaagtgctgggatccgaaacacctcgaaaagatcattcttgatcgagataactgacgccgcacagacgtacgacagcgcacctatgagacggccggatatcaaaaagaaactcgttgtggttggcgatggtggtaagttcgagttctctttcgaatttcgatccttcatcggatattataatagctgatagcttatgattaggctgtggcaagacttgtctattaacggtctacgccgagaatcgttttcctgaagaatacgtcccaaccgtttttgagaatctcatgaccaccgttccttcccctaccgacccttccaaaatcattgaactggctctttgggatacagcaggacaggaggactttgacagactgcgaccattaagttataacgacacagatgtgatcctaatagtattcgcctgcaaccatcgaccaagcttgttgaacgtgcaagataaggtaagtctaacaatttgtggtcagatataaagtggtacaggaggctgagctggctggtaaagtggtatccagaaatggcccatttctgcgaaaatgtccccctcatcttagtttgcactaaaaccgatcttcgcgaagaccaacagaccgtctcccttatggctgctcaaggcacaacaccaatcagtgcttcagaaggtgaacgaatagcaaaggagattggagccagacggtatatggagtgctcagcaaaggctgggatgggtgtaggagaggtgttcgacgccgctattagagaaagcatgaagaagggagggttaaaaaagatgaagggcaggaagtgcgtggttctgtag

SEQ ID NO: 1033 - DNA, 931 bp, Cryptococcus neoformans
atgagccactctcactcaacgcaaacaaacaacgaaggcggacgccagtgtgacagagccaactaccagttctattgaaatctgcactcatctttcatacagcaccgccgtaatcgtacactactagcttattccttcgctactgcaacaaggaaaggcttgttcaatttcctcaacttcacaaacctctgcgcacgggctgcacatccaccttgggcacaagtaagtaaccttttcctagcttcattttactattaacccacttacggggcctagccaagatgtcatcaaccggttgggagattcgtttctccaattctcgtcaaatcccctacttctacaactcggaacgtagcatctccacttgggaacccccttctgaactcagcgcagagcaaattcagcaattgcctggcgcggccaagtatatgaatgtacagttggctcaacctgcaggtggcaaggaaggtcaggtgagggccagtcatatcctggcaaagcatgctggaagcaggaggcccgcttcatggagaaatgtccgtgtgacttaagaacacttcgcaatgcaaactgatttcggacgcaggataagatcacaatcacttccgacgaggctcaagctattatcgaacagcacatcgcatatcttcaatccctccctccggctgatcttcccaaggaatttgcaaagattgcctcaacagagagcgattgttcaagcgcgaggaagggtggtgatcttggatggtttgggaggggacaaatgcaaaagccctttgaggtaagcggccagcattgacagagtggctatatctaataagcggtctcactaaccttgacgcaggacgcgacgtttaacactcctgtcgggcagctgagcgggattgtcaagacggactctggtatccatgtcatcctgcgtactggatag

SEQ ID NO: 1034 - DNA, 926 bp, Cryptococcus neoformans
atggtacttgcctgctcttcttaaatctcatcatatcgctgctgcatctgtgatatatcaatatcaactttcgacatttatccacccacattatcaacacgactcgcttcgattgtcgaaaactcattttctccttggtaaatgaatctcgcagggtggcaaaaacaaccgacgaggaaagaaggaagacggtgagaacaagcgagaattgatcttcaaggaagacggtcagggtgggtcattttccatcattttgctgccagaccagactgtcttctttatccagtgctaaatcaatacttgtagaatacgctcaggttgtcaaaatgcttggtaacggtagattagaagccaagtgtcaggatggcgagtctcgtcttgctcaaatccgaggccaaatgaggaagaaggtacgttttccccatctatctcggctcttcctttttatgctcacttcattaccttcaatataggtttggattgttgtcggcgacatcatcctcctctctctccgagatttccaggacgaccgtgctgatgttatccaccgatacactcctgacgaagctcgtaacctcaaaacctatggagagttgaaggacttccagcttgtggagaaccaggaggctggtggcgaggaggacgaggagggtggtattgaattcgaggaggctgacattgatgacatctgtaagccctttgctctgcacccatgtttgaaaagacagccactgatggcctatgcagagacggttggcgtggttttttgtgtatataaggaatgcatccaactatctagtgtttatcgtgctttctcttttttccatgtcatctggttcataatatcatcgacactgtcatggccgttgtctgcatcgtgcggaattcgaaagaaggggattgggcgaccctctccacttacgtaa

SEQ ID NO: 1035 - DNA, 786 bp, Cryptococcus neoformans
atggaggatatggaagagctaaaggtgcagatgtcagcgctggaacgagctaacaatatccaagggatagaggaggatagaatgaggaagcgaaggaagaccagtgcctggccaaagaacagagagcttgaggtgagtcctgactgttggttatgatgaattgtcgcgtaagtcgcgattccactggccacaccgcagctttctctgccgaaatacgccctccctctcatcctctccatctgcctcgaaacacggcaactgggcacctctatcgcgtctatagcagagtcccatggccaattatccctgacgcaagaccgcggtcttgtttgcaacctcactgtccaacatttagcggcgcggaggaataagagatgtatgctggcgtatttggcgaccagggtgggaggaatcaaggagagatggtgggacgctgggggagggttggcatatctgctcagtcccgctgcaagtgccagtgttaatcctgaggcggacgccccagacctacgctcggctctgagtcctcaagaacttgactttctaaggggatataacaaccttctacttgactacaagagcgatttcctagacgtgctcgacttgacggcagggatagagaagccgcctggggaaataatggtcgatgtgcgagttgtaagggacgctggcgaggtgttcttggatagcggagagagggttgattttaggaagggtcaaaggttcaggctggaaagagcgcaggtggaaaggttaatcatacaggggtacttggaggaggtgtag

SEQ ID NO: 1036 - DNA, 878 bp, Cryptococcus neoformans
atgtcccttggccggtatattggctggtcgatacttgccttcacttatttagtgttggccatcttgcttcgtcttatctttctccaaccttcaaaaacctcgagagcgtcgtatcgacccaaagatgccaaatgttccttgggcgttttcctggggtctggtgagcattcagatagactttgaaattagatgactaatgagtaattgtttataggcggccatactagtgagatgaaggctttgttgtcgacactggattatgaacgataccagcctcgaacgtacatctactgccatggtgatgatctgtctttgagagccgtctcagacattgaatcgagcaagggaggtttgatatcatccaaggtaagcgctttcgaacaccaacgctcagagcctgagcctagactataactgattgactattaaaagatgtactatctgttaagcctcccacgggctcgtcgtgtaggccaaccactattgtcaacaatggtttcagttttgaaaacactctacattgcagccctaaggctctttctaatccctctactgaaaaacccacgacggccattcgttgatcttttgatcgtcaatggcccaggtacatgtgttgttttggttctagtatcatatattcgtcgggtgcgtgttccgtccgttttaacgatcttacaagacctataactgaagattcgcccacttgatagatactaggtttagaatatactcgtattatctacgtggaatcattcgctagagttaaaagcctgtctttaagtgggaagatgatcagaccgcttgcagatcgttttttggtccagtggcccgatgctagtgacagcgataatgtcatacacaaagggcttttagtgtga

SEQ ID NO: 1037 - DNA, 857 bp, Cryptococcus neoformans
atggccaacattaactcagtagacatctctcgtctgaaaaatggtgaagtaaacttaggtgtacggtctactctcaacttcgttcgatttgcgtctgaccgttccctagacatccatcatggccgttcagttcgatggcggtgttgtcatcggtgcggacagtaggacaacaactggttcctatattgtatgtttcattgtgctggtgtgctagtcgtgttagcttacactctctttaggccaatagagtcacagataaactcactcatatccatgatcgtatttactgttgtcgatctgggtcagctgcagacacgcaagctgttgccgatgtcgttcaccagcatgctcaggtttatacctctgtctatgggtcacctcctacagttgccactgctgccgcactgtttgaaaagttatgttatgaaaacaaggatcagctctcggcaggcatcattgttgcaggttgggacaaggaaaatggcggatcagtttacaacatcccactaggaggcggaatgttccaacaaccttgggccattggaggtatgggaaattatctgtttgagacgatgctgctattgaccgaacgaatatcaggttccggctcaacatatgtttatggttattgcgacgctacctatcaagaaggatggtcaaaagaagaaactgtcaagtttgtgaagaatagtaaggcccttctctagtgtttggacatgttgctctgacagtgactgatttaatgcatgattagctctttctcttgcgatggcgcgagacggttcttctggtggttgtattcggatgtgtgtcatcacccaagacaaagtggaacgtcactttatccctggaaatga

SEQ ID NO: 1038 - DNA, 944 bp, Cryptococcus neoformans
atgatatttgcccgctgcctccccatatacagggcccagactcatcatcaacattctccgtccaactacgacatccgcatatccaccactccccccacacgcagacaaataacatcctgcctctcccgagacatcaaacaagtccttctaatgggaaaatcgcaatccaagttatcttctgaagagctggccgagctccagaaaaacacttattgtgagtacgctccgaggccatcagagcaggtgagcagcgctgatcacgtacgcgcgtagtcgacaagaaggtgagagatatttgcatagactggcgtacagtttcctgacgagaatgacctgtcggatcccgcgtattaacaggaactccaacaatgggtgggtgaattaagggatgcgagtcctgagggctgactgtgcccgggaacagtacaaaggcttcctcaaggactgtcctagtggtcaactcaacaaggaaggtgggcatgttcaattttgatttgatttttgcgtctggctgaaaggatgcacagagtttaagaaaatctaccgacaattctttcctttcggtgatcctagtcagttcgcagattacgtcttcaatgtgggtaaccagaacgcgtcgccattagtaaaactgacagttatttacgtgtaggtgtttgacgaagacaaatctggcacaatagaattcaaggtgcgtttgtaccgaggaattacgtggaagatgacgaacagctcatgccattgcaggagttcatttgcgccctttcggtcacctctcgaggtcgtcttgacgaaaaactcaaatgggcgttccaactgtatgacattaaccaagatggttacatcacctacgacgagatgcttcagatcgtacgatctatttataaaatgactggacaaatggtccagttgccagaggatgaagatacccccgaaaaggttag

SEQ ID NO: 1039 - DNA, 950 bp, Cryptococcus neoformans
atgtccttccgcgctgtaatcagcaacgctcaccacccgcagtctgtgatggagctcaacggcggctcagtcgtcgccatgatcggcaaagattgtgttgctattgcgtccgacttacggctaggaaatcagcaagtcggtatcgctgccaactttgacaaggtcttccccatcaacgataaactctactgtggactgccggggcttgctacagacgtatacaccttgtaggtgctatcaagtaaccagtgatcaggacaaatgcttaaacctggaacagacgagaacatttgcgattccgggtgaacatgtatcgaatgaaggaagagcgcgagatcacaccaaaaacatttacccaccttctttcaagcacactatatgagaagaggtgagtgcatccctgactgacattcttaacacatcaaatcctgacatggtgatcataaggtttgggcctttcttcctagaacctgttgtcgctggtctccccactcccacctctcttgaacctcatcctagaccttacatctccacaatggacacgtacgttcttgaacactttacaaaagtcgatataacttatatggattgatagcattggttgcataactacaccgaaggacttcgctgttgctggcacggctgccgataagttgtacggtatcgctgaaggtctttgggaacccgaccttgtatgttgctcttatacctttggttgcattggacactcctgatgaaaacgcttcaataggaaccagaagatttgtttgagacaatctcacagactcttcttagtgcggtggatcgagatgcgttgagtggttggggtgctgtcgtcaacatcatgtatggtcaggactttatatcagatgtacttttcgctgatttcgctatgctgtagaacacatgacaaagtaattactcggacactcagagcgagaatggactga

SEQ ID NO: 1040 - DNA, 912 bp, Cryptococcus neoformans
atgccaactcttattctaccgggggaaacagtccctatcccatcgacatcgaaagccgtcgtactaggccccggcatctcccaatcgactccaaccttacaagcttcctctagtaccgcgtccggatcctcatcagctcagggatatatcgcaacgagactggggatgctgcattcgggaaaaggaaaggaacggagtcagaaattgtggatagaaggaaactcgaagagggtcagttgttgccaatgcaaatgagatagggccgtaacttaaattgacttgtagtatatacctgcgcaaaaagatatagtcttggggataatcattgctagacatgccgacggatatcgtgtagatctgggctcttcgcagatggcccaactcgacgctttggcgtttgagggtgccacaaagaggagtaaaccaaacctcaaggtgggctggttccaattcatgtttgactagacgaaaactgatcgacttacttgatcaataggttggtacattagtgtttgcgcgtgtgatgtccgctagtcgagatatggaacctgaacttgaatgttttgatcccaatactggcaagtcggatggttttggtgagttgaaagggggagtgatggtcaatgcaaccctccagctgtgtagacggtaaatatcttcctactcttgcgtctgttgttcatactaatctgcagtggtagtcttcttgatagaaaccacattgtcttgcccactatcgcttctatttttccttttgagattgctattggtcttaacggtcgagtgtggatgaaggcagagacggtgggcgagacgttggcaatgaagcgtttgatcgaaagcgtggatgatcacatcatccccgtggaagaaaaggcaatcaaggagaaattgcgagagtacctgtcctga

SEQ ID NO: 1041 - DNA, 829 bp, Cryptococcus neoformans
atgaccacccaccacccccgcgcacttcccatcgtccttataaccggcaccccaggtaccggcaagactttgcactcccaactcttagtatctgagctctcggaggccgattcgcctatacccatgaaacacctcaacattggagatatcgtcaaggaacacggatttcatgaaggatgggatgaggaatggaagtgctggattgttgacgaagagagattgttagattggatggaggaagttgtgaatccaagagatggaccggctgagactggtatgttcaaagtttatttagtgttatacccagggtgcgttttgttaataaacgaacatggtaatcttacagggtttgttattgatcaccatgatccctcgcttttccccgagcgatggattgacctcgcggtcgttctcacttgcgacaacggtatcctgcatgaccgcctgaccgcacggtgcgtacacgtctcatttatgcttcattgaatatcgctgaaatctcgctatgaatatacagtaactaccctgccaacaagatttccgaaaatattaccgcggagatcatgatgacttgtctcaatgaaactcgtgaatcctatgctgaggagatcgttgttcaacttcagagtgagggtaaagatgatggagaagtggaagaaaatgtcaggaggatagcgcaatgggcggagaactggagacaaaatcagcaggaagaggaatcatagacatgtatgggacatcgataagattgatggacgctcggattgtagatggtaccgattgcttgtccgtgcttcttgtagaatatattatgtgcattgattcgtaa

SEQ ID NO: 1042 - DNA, 867 bp, Cryptococcus neoformans
atgaccatcgcacgaccaccgatcgaacattccttcccttcggcttttataacctgtcttatcattccattatcctcgttactcacctccagaacaaatcgcaaaatgcctcgcgaagctccgatggcccccgtttcccgatcaaaccgccctagtatcgtaggccctgacgagcctgaagctccgtaccccctcaagcttgaagggaccgttaccaaaggttttggtagaggtgcgaggtatctggggatccccacaggtatgacttgcttcccatggtgtgcctatggtttgctgacgaatacctgactgctccagccaatcttccagacgagtctttgggtccactcaacgatcttggtcttacaggtatctactacggcttcgcccgtgttcatccctccttatccacccctctcccatccgcccttcctacccccgtcgtctccaaaccctctacacctggtcctgagggcaagaaagtcgagagcgaagctcaattggaggcgttacctaccatcaccgcaccttaccctcccgaacaccacgcccagagatggagtaaggaagatgagaaagtttggccgatggtgatgagtgttgggtggaatccttactttaaaaatgaaaaaattaccgctgtaagtcgtgccgcatcctttattaaataccaaatgcttacgctggagagtaggaagtgcatattatgcaccccttcaaagctgatttctatggacaccacatgagtatcgttatccttggatatatcaggcccgaacttgactacgtctctaaaggttagctcaccccaaccatcctctctgctttttatttcccctgcggacgatctttcagattagaggctga

SEQ ID NO: 1043 - DNA, 988 bp, Cryptococcus neoformans
atgtccaatgaagcgaaccgagaattagctagattatggcgtgtttcccgaaccgtccacgagatggttagagatcgagtgagtcttggaactctgtgctctgactttggctgggtagagagagctagtaatgtgatttactaacagggaataatggttaggggtacttgcttgccgattatgagatcaacgtttcgttcgaagagttcaaggacaggcatggtgcgactggatctgtcgagtgagtgtgcccatcctcatgaacctgccatcttgccaggagggctgtcgccatagatggatgaaatgtccgcaagctgacaaatcttcaagccgttccaacatgagcttcgatgccattcacgagaacgacaacaccgacaaaatctttgtgtacttttgcgcggacaagaatgtcagcaaggcttctatgaagacgtatgcatctcttcgcctcggagaggtgacgcatggactgacggctatgcgttaatttagttttattggttctatggacaagatgggtgctaggcgaggaatcatcatctggagtgaaaagatgtcaccggcggccaaaaaggtgcgttgttggccccatcttcgtcttttaaagcgcacatcagctgacgggctgcggtcctcaaaacagacattacaagaaatgcagtccgagtatcacctcgaagatttcccagaatccgaccttctcgtcaacatcaccaaacacttcctcgtccccaagcacaccgtcatgaagcctgaagaaaagtctgctctcatcaagcgatagtgcgtcaagtcctttcaccccttcacccgctcccagtaatcatctgctgatgtagtactattttagccggttgaaggagactcagttaccacgtatcatgatcaccgatcccgtggccaaatactacggcttgaagagaggacaggttatgaagattgagcgagcgagtgagactgctggacggtcagtcatttttag

SEQ ID NO: 1044 - DNA, 984 bp, Cryptococcus neoformans
atgaggcccttaacagaggaagagacaaaggctgtgttcgaaaagctcgcaaactacatcggaaagaacctcgttcacctcatcgacagggatgaggatgacgagtactgcttccgtctccacaaagacaggtatgttctttctagctggactcctgttgcctggaaaggactaacatgaaagaatggccgtagagtgtactatctcccccttcccatgctccacttggccacctctgtcgcccgacctaatctcgtttctctcggtacatgtttcggtaaattctcaaaaactggcaaattcaagcttggtataatgtgtttggactatctcgccaagtacgcaaagtacaaggtgcgtctctatttccatctaccatctctattccaatccctctttcccttatctattatccctcgtccagcttcccttgtctctcgatacggcttgagtcccgggctggtggggtcaggatttggtgtagagtattgagtgttactggaactggaactgacgaaaagacctgtgtgattctggtttaaccctttaggtctggattaagccttctggagaacttcctttcctctacggtaaccacgtcgccaaagcgcatttgggaaggataacggaggatacacccgaacatcagggtgtggtggtgtacaacatgtcggatgtgcctttagtgcgttcccaattttaattcatatccccctccctcttccccccttcctcgtctgaatatggaattgacggggtctgtgctaaccaaattttccaattattcggaaaacagggattcggagtaacagcccgctcaacactcgatacacgtaaactcgatccgacgggtattatcgtcttccaccaagcggacgttggagagttcttgcgtgatgaggataccatgttctaagctctttcaccaggttaggaatagcagtggaagtcgggagggtttggaggaatagacggaataggtga

SEQ ID NO: 1045 - DNA, 1202 bp, Cryptococcus neoformans
atgcagctttcacgaactttcctccgtcaactccggcccgcctcttcttctcgagtcgtcctccgatccttctccagctcccgatccactttctccgagacccctgctggcgacgccccagttaacccaaagattgcccccatagttgacagcatctcttctctgagcttattggaggtttcagaacttgttactgcccttaaggtgcgcccatttccttctcgaatcgcccattttggccgttagtctcatcgcattaccatagacgaaactcaacattactgaaatttccctccctgctgcctcttcccccgcctccgctgctgcttcctcgacatcgtccgaagcccctgttgaagagaagcccaaggagaagacaattttcaccgtcaagctcgagaaattcgatgcggccgctaaggcgaagatcatcagggaggtcaaggctctcatgcctaatatgaacttggttgaggtgagttagaggctacgagcccaaacgaacaatactggagagcgaatgaagaggaaatgagagtgagcggagtgtatcggagaaaatgacaaccagggacagctaaggagagtagaagagaaagaatgagtgggagtgtaacaggaagaggcagaataagagaccaaaagaagagtgccggcgaaaagccatgggatgaaggagcgaatgaggcaaggtcgtatctaacgcgtcgaaagccgtcaattcggcacgttgagacgctgtgggcatatattgcccacggtccttctcttgtgtttacctcacccccctgcgtctttctccttcatgttaatccacggatgtggaatacttcgagagagcgcatgcttgcatttttaggatcggtggtcttgcgagagatccacatcttcttgttctctttctttccctgccttctgtcatatgttggtccgtcgctaaccattatctcttttttctctctacacgcggcgacattcgactactacacggctcgtatatcattcacttcttatcgtactcaacgccccgctcttgatccataacaaccctccgcatcctacttaaccgctgttaccgaaaacaggctaagaagttcgtcgaatccgttccccaaacccttaaagaaaacattcccaaagaagacgccgaaaagcttcaaaagactctgcaagatttgggtgccaccgtctctctgatctaa

SEQ ID NO: 1046 - DNA, 885 bp, Cryptococcus neoformans
atgccctatctcagtgtctttgtaacctctcccgatacccattcggagcgcagatttgattcgggtctcactgttcagcagctcaaggtaaagctcacttgctcttccacgtcccgggaattgcggccactcacttttaataggataagctcaccccaattaccggtatttcacctcagtatcaagtaataaaaatctgtcgatcggccgatcagacctctggccctcctttggcggtgcttgatgacgactcccggacattggcaagctacggtctggaggaatggaattgtattaaagtacgatttccttttttacagccatcgaaagcaaagctaaccctttcctgccaacaggtagacaatatcgatcctaactaccgcccaggggaattcaccgacgaatccaatctagagcgttttgaactgagccctgaagaatacgctgctcgttcagacactgtccttgctcatctgaaagccaacaagctaggacgatttgctgatgctccaaccactctcgattcccctcttcctcctcccccaatgatcatggacccgactatcgtcccaggaaagaggtgtgaggtatcacatggtgaagatgggatggcaaaaagaggcacagtgaggtttgtcggggaagcaaagatcggaaagggtggaatctgggttggagtagagcttgacgagcctctggggaaaggagatggagagtgagtaacagagggagtgcttaaaccaggatttatgctgatcccttgtcagaattgagggcacgagatacttctcatgcttaccaaagcatgctgtttttgtcagatctgcgaaagtcacagtgggggacttcccggaagaggacatcttttccgacgacgaaatatag

SEQ ID NO: 1047 - DNA, 1002 bp, Cryptococcus neoformans
atgtggttttgggagagtgtagatgtggtgaagaaaggtcgcccggagattggcggtgttataacgaggcgcggtattcactttgcacgatacttttgcacttctcaaaatttgttgtccataacatatccccttgttcgccacttttcattaatacaacacccctcacaaatatagcaaaacacccacaatgagacagcttaagcatcatgaaaagaaactcctcaaaaaagttgattttctcagtgtacgtagctactttacaagtctaacctccggatccgaattcactcaaaaggcttgaaaagaatcgaagactgacagacgaccgttgcacagtggaaacaggatgcttctcagcgggaagtcaaggtgatgcgcaagtatcacatccaagatcgagaggactatcacaagtgaatcgaattcacttatcgaaagcagggtcagttcgagtctcccatgctgattcccatctcgtagatacaacaagttgtgcggttcattacgatcattaatccataaactctcacttctcccggcgaacgacccattccgacaacaaaaggaggctgaaatgcttgacaagttgtatgatatgggtatcctcggtacgtcaccaactctcgaaatccacttgcgaaagtcaagtcgaaactaatttcttttccagacatcggctccaaaccctctgacattgaaaacaaagtaacggtctcctccattgcccggcgccgtcttgccgtcgtcgttgcccgtctcaaaatgtccgaaaccgtctctgacgcggtacgcactatcgagcaaggtcatatccgagtaggacccacaccagtgactgatcctgctatgcttgtcacgaggagaacggaggactttgttacttgggttgacacaagtgctaggaagaggactattatgaagtataatgacgaggtgagtgttatctttgaaccttgtggttccttcctctcagttaagcaccaggagagcgatgactga

SEQ ID NO: 1048 - DNA, 892 bp, Cryptococcus neoformans
atgctacgccagcccggaacccagatcaagtatgtgagatatagaacactggaaccagtcatcccagcaagatcgctgatatgtctttataggcttacaaacgtcagcattgtgcgtatgaagaaaggtggtaagagattcgaggtgagtcctgcagtctaagaattgtaaacatctttgatcagtcagtagatcgcttgctatcaaaataaagtctcggaattccgatctggagtgtaagcaccaaggagcccgccttatcatcatcttgatgtctgaccctacaacagcgagaatgatctttccgaggtccttcaaattgaacaggtttttaccaatgttcccaaaggtttagttgccaagaaggaagactggtccaaatgttttggcacggatgatttgaataaagtgattgaagaagtgcgtaatcgatgaaaactagaacgaattctgccgtgacgattggctaaagcacaacatagatcttgaaaaaaggtgaactacaaatcaacaatctcgagaggacacaacacctctcatccctctcccgtgaaattgcaaccatcgtttctgaaatgactgtcgatcccaacacctctcgaaaacacactgttggtatggttgagaaagctatggcagaagtaggattcagcgtccgagccgacagacctgcgaaagctcaagctctggaattgatcaagaaactcgctgaaggggatgtcttaccggttcgaagagtgaggatgagagtacggataactatgcctggaaaggatgccaagagatgcaaggacaagattgtcgccgaatgtgacgaggttgaggaggaggatatgggtatggagtgggaagcggtaggtggctcttacctacggttcagaacgtgaactaa

SEQ ID NO: 1049 - DNA, 966 bp, Cryptococcus neoformans
atgtcgcccttccttccagcactcagatcaggtaagcaccgccgcccaccccgccgccaccgctcaccccgccgccaccgctcacacccaccagccgccaggcccgccgcgttcagacccgcactcgcactcggtacgcacccctgcacgcctattctgactcgcatctaacccgcatctaacccgcatctgcagcccgtccgctctcaagcaccgccgtcgcccccaggccccacacacccacctccgccatcaactcgtacgaccactcgccctccaccactctgccagacaccaccatcgcccagcaaaagagcaaccagttgagtctcgagacacctagaaacggcgccgagtatgtcctttcaacgctcgacaagattgtcaactggggtcgccaagggtccatgtggcccatgacctttggtctcgcctgctgcgccgtcgaaatgatgtatgtgcaatcgcttgtttctgaatggccagttgctcatttggcctcaggcacatggctgccgcccgatatgatcaagatcgactcggtgtcgtcttccgagcgtccccccgacagagtgatgttatgattgtagcaggtactttaacaaacaagatggctcctgcgttgagaaaaggttggtctgaaaaaaaaaaaacggccaatcaaactgacacggccgcagtgtacgaccaaatgcccgaaccccgatgggtcatttctatgggttcatgcgccaatggcggtggctactaccactactcgtactcggtcgtgcgaggctgtgaccgaatcgtgcctgtcgacatctatgtccccggatggtaggttttcattcgccactttacccttgttcccctgcttattttttgcatagtcctcccaccgccgaggcccttctctacggaatgctccaattaatgcgaaagatgaggcgtaacaggcagagtgtgcgatggtaccgaaggtag

SEQ ID NO: 1050 - DNA, 967 bp, Cryptococcus neoformans
atgtcaggcttcctcaactcgatcgggtatctcccctccctcgctccctcctcccacagccactgaccaacctatagtcgtctccgtgcccctaagcgatcccccaccaacactcccactcagcagggcttctttgatcctctcccttctccgggcgtcgagaacgccaaccaatcgtatcggcctccatctcccgggcccaagcccctctatctatgtcagccgtttgtgaaggccgcgctcgttaaaggtagttttaagactatcgttgcgccgcccaagtatgtcgacatcaacgagtgggtggccatcaactgtgagtcaaagagcgtaaatataccgaatgaatgctgacatattttgctagtgtttgatttctatcataacctcaatcaattctacggcgttttgacagagttttgcactatgcagaactgccctacgatgtctggtggaaagacgtgggtttctgtgattcatacggtataatggcagctgatgacttgtgaaaattcagtctaaacttcctttggccagatcacaaccagaggctagtctctctggcggcgccaacgtacattgatttcgtaatgagttggttacaaaagcttttggaggatgaaaatgtcttccctacaaagtctggtaagttatgaagtcccccgttagagaccctacacttaacacgcattcagggaaaccgtttgaccactcatttgcatacacggcyaarcacatctataagcaccttttccgtatttttgcccatctttaccatgcccatttcgagcaagtcctccacctctccatcgaagcgcacttcaattctctcttcgcccacttcctcgcattcggaaaagaatttgatcttttggtaatgaaggaccttatgaccacccagggtatgggacaaggtgttgcggagttgagcgagaagtggaggcagatgggtattttggagtcataa

SEQ ID NO: 1051 - DNA, 931 bp, Cryptococcus neoformans
atggcataccctgcagcccagagccgcttctccgcgagtgcaccgctccccaccaccccgctcgcacgcagggactcggcacgcaccgcgccacacccctcgctccagcagcagctctttggcccgcccgcagccggcgccgcaccccccagcatcgtcgacaggccgctcgcacgcacaaagggcgcagaggtcgccgtgggcgcatgggcattcatgtttgcagagatcgttgcatacagccagagcagggcggacagcgtgtccgatctcgaagcgaggtgcgtcgcccagcagaaccgggccatgctcacagtgcaggctgtcgtcattaggctacgatgcaggccagaggctcctcccgctgctgctgttgcgcaacacccaggcggccgggaccaaagtgcgatcgctgttctttatttattttcgtatttattttgtgtgctaagtatacgtctaggaacccaaaagggaacaccgcctcgttccgatactccaattcatccatacgcaggtgtaccgctattgctttggcagggccgcagacggtctcgagcgcagcgtcgaggaagaaaatgaatgtgtgtcatcactccaacgagcatgttcgcggcgctaacgcattgtgacgtatccaagacatgatcacgctgaaccagccgcctctgacccagtttatatctgtgcccaaggacatgtcgcagctgagctgcgaggcgtataccgcggggatagtggagggtgtactggacggtctcgaggtggtgcgtgttttggcgtggtgtgacaaagctcatccatagacgcagcctgcccgcgtcactgcacacaccgtgccgaccgatgcgttcccccagcggtcagtcatcctcatcaagctggaccagaaagtgatggacagggaagaggcgctgggcaagtaatgtag

SEQ ID NO: 1052 - DNA, 1004 bp, Cryptococcus neoformans
atgagcggacgaggtttctctagaggcggcggtggtggattcagaggcggagcgcgaggtcagttctttcgggagctgctggggacaaaaacttggaatgagcgacaagttggtgaagatggggtttcgctgatgtgttttcggaaatgataggaggacgaggtggtggccgaggcggtttccagcagagggatatgggtcctcccgacactgttctcggtgggtatactcttcgtttccatccaccacaacatcagttgacgtatgtcgacaatgcgttttgcagaaatcggctctttccaacacgacgttgaatccgagatgctctgttccctcacagcacctacaaaaattccctacttcaacgcccccatctacctccaaaacaagacccagatcggcaaggtcgacgagattctcggtcctatcaacgaagtgtactttaccgtcaagatggagcaaggaatgttggcgagcagtttcaagaaggaggacaaggtgtatatctccggagagaagttattgccgattgagagattcctgccaaagcccaaggttgccggcggtaagggtgagtggtcattgccgttgggagatgtgggggtttactgacagatggcccctttgttcctgtcaaacttttgcccattttacagtcgaaagtaagtcataacatgtgtaatagaatatgattaatgatcctttactgattattcgtctacagagcgaggtgcccaaggaggtcgtggtgctccccgaggccgaggtggtgccggtagtcgtggtggacgaggcggcttcagctcacgaggtggccctggcggacggggtggtgctaggggtggtgccggtggacggggcggtttcagttctcgaggtggtggtgcgcccaggggcaggggtggtttcaggggaaggggacaataaggtgtaccaggaggatatgtgtgatagattttcttccattcgtttgctctggatatgtacatgtactttcattttga

SEQ ID NO: 1053 - DNA, 1009 bp, Cryptococcus neoformans
atgtctgctcccggtggtggtggtgcttactcgtgagtccatcgtcgtgatctcaagtctcaagcgacattgatacgtctaagcggtagactgacaacccggtagattttcccttacaaccttctccccttycggtaaactcgtgcaaatagaacacgcccttgctgctgttgccggtgggactacttctttgggtatcaagggtaagttcaacgccatctctctcatgccccttttgcttaccatgagccttctcttatagctaccaatggtgttgtgatcgccaccgagaaaaagtctccctccatcctcctcgacacctctgctcttgagaaggttgccccgatttgccccaatatcggcttcgtttactctggtatgggccctgattttagggtgcttgtcgccaaagctaggaagattgcgcaagcatattggaaggtgtatggagagtatcctcccacaaaggtcttggtgcaggaggtggctgctgttatgcaaaaggcgactcagtctgggtaagtcggcaatgtgcacactggctttgctgcaagtctcgtcggactgatagataaccgcagtggtgtgaggccgtacggtatttctgtgcttattgctggatgggattcccacaggggtcagtccttatggcaaattgacccttcaggatcttattgggcatggaaggcgagtgcgatcgggaaaaacatggtgaacggcaagactttcttggagaagcggtgagtcactcggtttgacaacttaccctaaaatcaaaattcatgcctttttcagatacaacgatgatctttccctcgaagatgccatccatactgctctcctcactctcaaagagggctttgaaggccaaatgacagaacaaactatcgaaattggtattgtaacatgtcctacgcccgagcagatgcaggaaaagcctggggagaggttgcctcctacatttaggaagttgactgaacaggaagtaaaggattacctttcgttgtag

SEQ ID NO: 1054 - DNA, 992 bp, Cryptococcus neoformans
atgggcatcggacaggcatcggaagaagtcggaggaagaaagtgggatgagcctgataattggcgccgggtattggacgaatgggattcggtggattatcttcgattctctgcatcttcgtctgcctctcaacgtcaactcatctgtgcttctttccatctttgcctactcgcccccaatgtccacttccatcctccgcaactccctcgccagggcagtccacaagcgtgcgtacatccacagcgccgcaaaacaccgatgatcaactgacttctcccagcctcaatcctccggacaactcctggtctcatgctcgcccagcgacggtgtgtaccaacaagtttactatagaggagcaatgcgaaaggtgctgaccataaacagactcgcctccaccgagtccgtgactgccgctgagagcattgcccttcttaactcccaaaggcagcaccgacctacgtctcctcacttggccatctaccagcctcaggtttgtatagacctgctctgccatatcttatttcacatcgctgacatatgtccatagctcacatggtatctctccagtttgcatcgtatcaccggtgtcgcttttggaggtgccctttacctttccgccatggcctacctacttcacccccttgtccctgtcatcgactctgcccacctcattcaactcgtgcacgacttgcctggatggttcaagggaagcgccaagttcatcatcgcccttccctttacctttcactgctacaatggtttgaggcatttgaactgggacatcggaaaaggtgagtttttttcttactctcttggatgagacaccgagagcggcaaagtttcgattgagatggtcatgatggcgtgaaaaatcgttgaaatgtgaactaatgcaatttgtagctcttaccattaagggtgtctaccgaacaggttacgctgtcctcggtgccactgtcctctcttctctctacctcgctttcttcatttaa

SEQ ID NO: 1055 - DNA, 934 bp, Cryptococcus neoformans
atgcccacccctttggcgctcctcttatcggcaatcttaataataggcacctacttcgcgatgcccttttggccattccggaaatcgaactacgaccctcgagggaaacactgttacatcacaggcggctcgtcggggttgggcaaggctcttgcggagcggctggtgaagcaaggagcgcatgtcacgattgtcgggagagatagtaaaaaggcggaaggtgtggttgaggaactcaaagtgagtttagagggtaaacaaagagcgcccgagctgattataatgtaggcaatcgcagcaccgggccagatcatccagtgcatcgccgcagacctcacgtcccctatcgcctctactaacgctatccacgctgcgtgcaagccacacgcagaccaagcgcctgactatgtctacctctgtgctggattctctcggccgaaactgttcgttgaaacgacaaagcaagagttgaaagatggacttgatggtgtgtactgggtatcggcttataccgctcacgtgtgtttcgtctgttttcctggattctttggggaaaagctcatggaagaaatgacaggaggcatgccagatgatgagcaaacaacgccgtactggcaaaatcatctttgtcgccagtttcctctcctacgtctcttttgccggatactcatcctactctcctgccaaatacgctcttcgcggcctttcagatgctctgcgctcagaaatgttactgcacaatattgatatccacatcttcttaccgtgtggtatcagcggccctggattcgatgcggaaaataggacaaagccagctgtgacaaagaagattgaagaaggggatacgcctatcaccccggaagtctgtgcggcggctttggaaagtggtgcgtctattttcttacatttatgtaagatgaagaaaactgattag

SEQ ID NO: 1056 - DNA, 894 bp, Cryptococcus neoformans
atggccgtccgtacgtcgctccacccctttagtttgcttcccactcgctcactctttcatcaggtactcaatttgaaaactctaccgacattggtgtcttctccaagctcaccaactcgtatgtcaatgttgtagatattgggcatggcacaagactgactctgttcaaagctactgtctcacagctctcgcttcttctacaaacttctactctgtctttgaagccgagctcgccgatgtcgtgcccatcgtccacaccaccatcggtggcacccgaatcatcggtcgtctcaccgccggtaacagacatggtcttctcgtccccagctccaccaccgaccaagaactacaacatctccgtaactctctcccccccaccgtcgccattcaacgagtagaagagcgtctgtcagctttggggaacgttatcgcttgtaacgactatgtggctttggtgcatcccgacatagatcgagagacagaagagattattgccgatacactcaaagttgaagttttccgacaaactattgccggcaacgtcctcgttggttcttactgtgccctctcaaaccagggaggtctcgtccaccccaagacatctcgatcagaattggacgagttgtcttctctcttgcaggtccctcttgtggcgggtacagtgaaccgaggttcagaggttatcggtgcggggttggtcgtgaatgactggtgtgctttcactggtttggacacaaccgctaccgaggttagcgttatcgaggctaccttccgtgagtttctccccctattaaatatcgattgatactaacaacatctacaggattgcaaggacaaacttctaccgctgtcatcaacgaaatgcgagattcccttatcgaccactacgcttag

SEQ ID NO: 1057 - DNA, 1124 bp, Cryptococcus neoformans
atggccgagaagaagcagaccgttatcctcaccacttctgacgatgagcaattcaccgttgagaagattgtcgctgaacgatccgccatgattaaatctatgatggagggtgagtagtttgttttggccctaggtgtctatttgaggcttgaggggaaaaaggaaatgtggtgatagagcggtgaaatatggtgtcacgtcaagcacccaggaagtgggatcgaagagcaaaacgaccatctccacgtcatccctcggtatcaaccactcatctttactacaccctatctctccaccctcaagccccaacagaccgtattgtaaccgcttgatgtgatctgcgatttgcgagtcgcattacgtctcggcacgaattttcacaccagacgtgtcctgtcaacagtttgacgctgacaaattctttttcctcaacccaatagaccttggtgaccaggagggtcagcccattccgctccccaacgtctcttcttccgtccttaccaagatcctggagtactgcgaccaccacaagaacgaccctctccccaccggtgacgccaacgacgctgatgactctagaagaaagacttctgagattggtgactgggatgctcgatggatgtgagttatacctgcctccttttgtttggagttacaatggaatgattgctaatgggtccgtaattagccaagttgaccaagagatgctctttgagatcatccttgctgccaactacctcgacatcaagcctctcctgtatgtctcaatcggattatcgatcgttcttagtctgttggctgacgagtgtgtagcgatgttggctgcaagaccgttgccaacatgatcaagggtaagactcctgaagagatccgaaagctcttcaacatcaccaacgagtaagtcatatgcctaccatcaagaattctccagcgtgctgattcaacttcagcttcactcctgaggaggaagagcagatacgaaaggagaacgaatgggctgaggagtaagtctgtttcatattatacctagatgtcatcgtttgttgacaaacactttcgttgcagccgttaaacaacttcatgtatggggtgtactttatatttttcgcatgttgttcatatga

SEQ ID NO: 1058 - DNA, 939 bp, Cryptococcus neoformans
atggctatcttcggtctcttcggaagctctgaccccgcccctcaagaatcctcggcctccgctgagctgttcagttccacaaccttcagatcaaacgtcgtcccttcccagccggaagcccaggggtcctccttcatccccgatcctccttcccagtccgctcccgcacccgctcccaccgcacccgccccaacagcccttgatgcatttggatccgcgttcgatcccgctagactccacccattggctggattgagtgaaaacctagattttttacagctcgatgaagaaaagttgaacgaccttgaaggagcggccagtgttttgccaagcaggggctggacggatgatctctgtgttggcacagggacgacttatctttctggttcgttgggtgtatgctatacatcgacatggcgaaaagctgacttggtcgctgttaataggtttggctatcggtggcacctggggcttaaaagaaggaatgtcaagaccgctgggaaacaacccctccttcaagctccggctgaacagtattcttaacggttgtacgagaaggggaagttttatgggcaattcgcttggtgttttgggtgggttaatcttgcactttctcttttgatattacctctaatgtcgtacaaaaagctattttctacaatatctcaaactcttcttttgacgccatcagggggaagcatgatgtacttaatgccatggctgcggcgggtttgagtggagcgatttacaagtcaactggtgcgtctctgcctatccccgtttatgcattcttcagcgctcaattaatctttatttagccggcttacgacccgctcttgttggcgccggtcttggaacagccgctgcagctggctggtccgctttcaagaactttgtgtaatccattttaaggggcacacagttcttcatcatcactaa

SEQ ID NO: 1059 - DNA, 968 bp, Cryptococcus neoformans
atgatacagaattatccaacgatggccctctacgctcctccgccaccatcttaccaagatcatgcagctggacccgtccaacagtgaggtcttctgtgaaaatggagcgatttgcaaactaatgtaacattcgtagccatggattcaacccttacagtgacaacggtggctccatccttgctattgccggcaaggactttagcatcatagcaggagacaccagacagtcagaaggatatagcattcaaacccgatatgctcgaaaagtttggcaattgtgagttgctgcctttggtaacgtcagtagatgtccgaactgactttaccaatctcaacagaaccgataaagtggtcttggctaccaacggtttcgcggcggacggaaacaatttcgttaagagggtaaagcaaagattagaagtgggtccatgagatgtggcttgtgaagcggatagcggatgtttattgatgtgtattgcagtggtatgagcacgcccataacaaagctatgggcctcaaatctatcgctaggatgatccaaaccatgctttacggaaaacgattcttcccttactatgtatacaacattttgggtggtatcgaagaagacggtgagtgattgccgagcattgtagcgaaggcgcatctgaccttttgcaaggatccggagctgtctattcatttgaccctgttggctcttacgaacgagaagcttgtcgtgctgcgggtgccgctcaatcactcatccaacccttccttgacaaccaagtttatttcaagaaccaacaacccgaacctggagctgctcccttcgtccccggtaatcttcccctctccaccgttctttctcttgtcgtcgactccttcacttccgcaactgaaagacatattgaagtcggtgatggcatggagatctatgttgttatggccaagggaaggtcaacagacgatttgcttggggaaggtaa

SEQ ID NO: 1060 - DNA, 992 bp, Cryptococcus neoformans
atgcagtctttaaatgccttggggaacaggcaaatagcgagtttgaatgcagacttgtctagaatggagaatggtgaaggaggcccggcaattcaaggtgagttgcgcgacagttcaaccatatccggaagagttatagacatggcgtatgtcacccttctcacaatgaattggatgcttatccatctctttcaaggtcaaattacgactactctcagtgctctatcgcgactgatagacgattatgattccatggcgaggaaggagatggttaccgttgcccgggataaggccaacacgtaggttcgatctctgtctaattcggtccagcccaaaaagcgaaccgttaaactgattacgccaaaagtcgagtagcaaggttaaaaaatgaacataaggaacttaaatcaagatttgaacaagcaaaaaacgaaagtcaactcaaagtgggttgagcgattgtccagttgcagttccactgatatggtaccaggcccggcaggatttgctcggatcatcttcctcctcttccccctatccatcaacagcgagtacttctgtgtctcagcgtcgcgcgccaaatcaatcatccttcgcagaatctccatttgcttcctccgaccctctctttcggcccaatcaccctccatcatcgcgcgaggattttgctcttcgcgaacacactttcttacaagagtctgagaactctatagatcaatatattgcgcaaggaagagcagtgctggggaatcttgttgaacagaaaggaatgttaaagggtactaagagaagactattggacgccgcgaatacgttgggaatgagtagagaaactataggatgggtggaaaggcggacgtgagtagtctgctggacctgtcatgtggatcctaacagtgcatgaaattagcaaacaagatgcttggatcttcggtgcgggagcaacattcacattgtttagcttctgggcgatttggtattacttgggataa

SEQ ID NO: 1061 - DNA, 911 bp, Cryptococcus neoformans
atgcggtacgcggtgctcgtaacaggcccagcaggtgccggaaagtctactttctgtgcctctctaattacacacgctcaaacgattggtcggtccgttcatctggtcaatcttgatcctgctgccgacaagttcgaatacgagccgactatcgatataagggatcttatcaatttggaagatgttatggaggagctggagtttggaccaaacggtggtttgatatattgtttcgagtgagtaatatgggcctcaggcaaggggaagacgcctgataaaggtattttcagatatcttctcaataatcttgattggctagaagatgaattaggcgcatatgaggacgactatcttataatagattgccctggacaaatcgaactatacacccatgtccctcttcttccccgcctcgccacattcctttctacttctctcaacttcagaacatcagcagtctacttgatagactcgcagttcatgcaggacaagagcaaattttttgcaggtgtaatgagtgccatgagctgtatgctctccttgggaattagcatgttgtgtttgatgagcaagatggacttggtaaaggataagaagggccgaacgaagagagaagttggaaggtaggcatctgcgaattcatagcgtcgtcttggccgctcacaagccttgctcagatatcttgacccagaccccaatctgctacttgaggatatcaatcagggcaccaactcgaagttcaaccagcttaaccgagccgtcgtctcactgatagaagatcagaacattgtgtctttcttaccgctggacgttacatcagaagactctgtaaatactgttctcagtcatatcgacaacatgatgcagtatggcgaggatgaggagcccaaggtccccaaggacatggatga

SEQ ID NO: 1062 - DNA, 1068 bp, Cryptococcus neoformans
atggggttgagtgtgctgaccattttgcatatgtgctaaccctccctgccaacgataccaggactaccacgtgagccatttttctcctcattttgacacaagcttatccctctgtccgagacagcgtggacgaaaatgtatttctcttcgtccccaacctgatcggctacacccgcgtcatcacggccgccgcttccttattcttcatgccttaccaccccaaagcatgtactatgctctactccgtctcgtgtatgcttgatgtagtcgatggccaagccgcaagggctttgggacaaactagcagatttggagctgttttggatatggtgactgatcggtaagtcctcaagccctgtattgtttttctttttgaagactcaaaatgtgaatggttgctgatgtagtcaaaattattagatgcaccactgcctgcctgttgtgcttcctctcaagcgtgtaccccacttattctatgcttttcatgttcctcatcacccttgacttctcctctcattacattcacatgtactcgtacgtccttccgtctctccttttcccgcgaataggagctaacgcggggtggatttcaggtctctcaccacgggatcatctagccacaagactgtcacctctgatgtctcccgtatcctctggtactattacaacgattccgtaggtattttctatcaccaaaccaatccatatccgtctaatcttccaaaaaaaaaaaaacagcgtactctcttcgtcttctgcttcgccaacgaactcttcttcgtctgcctctacctcaaccactactggactactcccttgatggccaactttcccattcccaccgctatcctaacctcggagctcactgccgctcaccccaagttggtcggcggggtgatcaatgtgttgaggaacttgaattggccgcaagtggtggccgctatgactttcccgatttgtgcggggaagcagattatcaatgttgtgcaattctggaaggctagcaagatcgtaagtccaagttcccctgtcctcctttcgctctctttttcttttaaaaatgaatga

SEQ ID NO: 1063 - DNA, 1217 bp, Cryptococcus neoformans
atggagaacactgctaccttcaaaatggttttgtgcggtgacggtggaactgtacgtgcttatttttttatccttcattctcgccccatgctgtttgatggtttgctaacttgaattccagggtatgtaatgtccttctatttacttgtcacgatcgctgcttcatattttgtgcctgactgtgtcatgaatatcagggaaaggtatgtgcgagcgttgttgtgttggcaagattactgctgattttcaaaaacgcgtagaccacctttgtcaaacgtcatttgaccggtaagtgacacgccatctagaaatgcccatgattattgatccctaactcatcaataatatattctaggcgagttcgaaaagaagtacattggtaagcgttaaatggctgtttcaagcgtacgactcgtactgacgctttatcagccactctcggtgtcgaagtccatccccttactttccacaccaacttcggcactatctgcttcaacgtttgggacactgcgggtcaagaaaagtttggaggtcttcgtgatggttattacattcaagggcaatgtggtatcatcatgtttgacgtcacttctcgtattacttacaagaatgttcctaactggcaccgagacctcgaacgagtgtgcgaaaacattcctattgtcctctgtggcaacaaggttgatgtcaaggtaagacgctacttacccttttgttttaggagtgtcactgaacatgccgtgcaggagaggaaagtcaagactggtaatgtgactttccaccgcaagagtgagcactgtttcagcgggcacatatctatgttgtcagccaaacgtaaagtcactaacgccagcatttcagagaaccttcagtacttcgaaatctcggcgaagtctaacgtgagtgcctaatgttcccaatagataggctcagtctcacattgcatgccagtacaactttgagaaacctttcctttggcttgccagaaagcttgttgggtgagtttcaagactttgattcaaacacgattatttgctgacacagttagcaaccaatctctcgagtttgtggctgctcctgctcttgcgcctcctgaggttcaagttgaccaggcgctcattgccaagtatgaagaggagcttaaggctgctgccaacgcccctttgcccgatgaggttagtttttcaatgtgtttaatgagaagattcatctgttaa

SEQ ID NO: 1064 - DNA, 1250 bp, Cryptococcus neoformans
atgccccgcccgcccgaagacccagatgtgagaaacagcaagacattggcgtacatcctccgccacggcgctgagaaggagggtctctatatccgttccgatgggtttatcaagcttgccgatgtcgtgcgtctctcttttcctctttcactctatccgtcaattagggtgctgaagttgtgtttctttgatctttatgttcttttatatatcattatctgtcccctaaactacttgtagctggcaagaccaaaacttaaaggcgtggacgaacccaccatcctccacctcgtgcagacaaacgctaaaaagcgattcgagctattttgggggtatgatccctcgccgcctagaccgaagaagaagcctacgcaggggaagacgaaaaagcagttgcagagggatcgtgagacggcggcggccgctgctgcttctgctgctgttgctgcttctgggacaggagaggggcaagagaaggggaaggagcccgatgcagcgacgatagacattatcgcgtcttcccttgcttccacgaaccttaccgcaccatcgtcttctttgtctataaactccaccgcgcctgccccagcccagagttcaacgtcagtggaccctccagaactccctctcatttcccttcccgacccacacacctctgcctccgattctgacgccaacgccaaagccagcgccagcgccaatagtgacaaccccaagggcgaatactttattcgcgcaacgcaaggccactctatccagctcgagtcgactgcacatctcgaacaagtgaaagatgatgaagaagggaaaagaaaggtaggcttgatggtccatggcacgagatgggagttgtgggatacgttgagtaggtttcttctccgtcttttatatatatatcgaccgagatgctaatggataccaaccaaacagaagaacaaggtctccaaaagatgacccgccagcatatccacctcgcccctggcttctcgggccccatcacccctcggcccaactccacactgtacatttacctcgacctgtccaagcttgtcgccgctgggatcccggtgtatgtcagtgcgaatggggtggtgcttacccctggttccaagggcggggagaatggagagggggcaggagtggggaaagagttttggagaagagcggtaaggaggaaagaggggaagaggtgggttgtgtgggaggatgggagggaggtggagagggaagagttatcaggtgaggagtag

SEQ ID NO: 1065 - DNA, 1019 bp, Cryptococcus neoformans
atgtcgacaactgctgtagaaaccgtcaccacctctcccgcgactctcaccactgccgtcaatgatattaatctcgattcgtatgatgaagagcaagtaagacttatggaagagaggtgcattcttgtcactcccgaggacaaggtttatggcgaaggaagtaaaaaagtctgtaagtgaaaaaaaagaagatagctagctagggtaagctttgcttattctcttctcggtaggtcacctcatgtctaacatcaacactggtcttcttcatcgtgctttttccgttttccttttccgccccgccgatggccgtctcctccttcaaaaacgtgccgacgaaaagataactttccccagcatgtggaccaatacttgctgttctcatccgttgagtatcaaagctgaacttgtggaagagcaccaggcaggtgcgttggccattttgtctatagagattgaactgacttcgttgcaggcgtgaaagccgccgccattagaaaacttcctcaagagctgggaataccagagagtcaacttaagcctgaggacttccatttcctcactcggatacactatctggcgcctagtagtggcgtctggggagagcacgagagtgagtaaatcattgtaccaaggctgcgtcaattgcctactaaccgagacgcaagtcgactacattctgttctctaccctcaacgtggaccttgacctcaaccccaacgaggtcagtgatgccaaatatgtttcaaaatctgaacttgaggccatgttcaccgatccttgtgagtgccttcattcctcagcagccccagttgctaacatttatctgctcatctgcagccaattcattcaccccgtggttcaagcttattgctcgagaccttcttttcccttggtgggatgagatgcttgccaagtctagatcggccgggtgggacgaggagagcggagttggagaggttcgagcggacgtactggctaacggaccgaaaataaatgagctcattcggatgatctga

SEQ ID NO: 1066 - DNA, 1026 bp, Cryptococcus neoformans
atgacgtaataacgtaaaaataaagtacttaactcgtaattaaactcaccattatttgttttcaagaggcagcgaaagctgcagtgcacaagcacatctcatctcatctccagctacgcatcatcttcaatggctgcttcaagggtaggcatcctcaacgacggaggtatgtcacaattggcccccttcttctcgcccactcactttctttttgcacaaaactaggtctcagacaagatgcccgccgtccttacgaactccgatccacatccttccagctatccacgcactcttcttctgacggctcgtctactgccacgcaaggtctcaccacagtagaagtttctgtgtttgggcctcgggaacccaggaatagaggtttggcaagccacgatcgcgcggttgtaagcgtcgaggttggggtggttccgtgggctgctggagcaggagctagacggacaaggggcgataagtgagttgagtagtcaatactgtgcggacaggtctgacagggagtgaagacggttacaggagataggagctgcgatcagacaaacgtttgaacctgtcatcatgacacacttataccctcgaagcgagatcgcaatccacgttcaagtcctttccgcagatggaggtacatatcatttctatgttggacacaataaacccaaaattattaacgcgatttgattaatgtacagggattcttcctacatccatcaacgccaccaccctcgctctgattgatgcgggtatagccctccttgactacgtctcctctatttccatcggcctacatctcctacaacccctcctcgatctttcacaacctgaagaatccgatctcccatcccttgtcattgcatctcttccgtcctctggtaaaatcacgttagcacaaatggagacacgacttcatgttgaccggtttgaggagatgcttactttaggcgtagaagcctgcaaggtcttgaaggaagagatggatggagtggtgaaagatcggacagaaagaattgttga

SEQ ID NO: 1067 - DNA, 1085 bp, Cryptococcus neoformans
atggcccacaaatcacacagacacaaggccctccaggctcagctcgaagctcagcctaccatatcccttatatcccaaaaaactcgaaagcctcccgctccgtccatggacgtagaccaagacgacgacgttcttatcagtaccaacgctgcttcggcccctaataccaccgatccctcagacgctcctgtctctgcgaccaccacatcttctggatttgcccctcttaccgctgccgcccaatccactgtccttaaaaacgagttcagaaggattcctatccctccgcatagaatgacaccgttgaagagagattgggtcaacctttatacacctatggtggagatgcttggtcttcaagtcagaatgaacccgcagcgaaaagctgttgagttgaaggtaagcacacaaccattcattcctggtcaaaatttgttgctcatagcagagaaagacttccgggcacactgtagattctggtgcgattcaaaaaggggccgattttgtcaaagcatatgcccttggatttgatgtcaatgtatgttttaaatatggataacgaaaattcggtcatcggctgatagaacatgtcaggacgctctggcgctcttgaggttggatgacttgtatcttgactcttttgagatcaaggatgtcaagacattacatggagaccatctcgctcgtgctattggtaagctgcttcacgtggtcatgatgcggagattaatgtagtaaccatctcttttaggtcgtatagcaggtgaaggtggtaaggtcaagttctctatcgagaatgccagtagaacacgaattgttctggccgacacgtatgtcctttctgagctgttcacttttagttgaaatcggagctgatcattggggttgcagccacatccatattcttggttctgtacaaaatatcaagattgctcgagatgctgtcgtttctcttattcttggttctcctccaggtatgatcatatttgttgcttttggtagaaggcattcactgacggaaaacccaaggcaaggtctacgcacatctcaaggcagtcggtgcgaggatgaagcaacgtttttag

SEQ ID NO: 1068 - DNA, 975 bp, Cryptococcus neoformans
atgggcgctctgtctgaagtggagatgcgattccctgccgtaattaaggtatatttaagattatgttttattaacacatcccacctactcggtcggttttttcgagcagacggcttggcagacggtattcatccatctctttccacagcctgtcaccaaagcaaacacaaaccagagcattttaaaatgaaccccagatcactcactaccgctgttcgatccttcacccgcagagtcccccttcgacctgctcttcctgccgcccgaacttttgcccctcagcttcaagcgcgagcttacagcgaagagaaggagttccacgagaaggaggacaagcggatagctgatctcgaggccgccaaggctgagtcagacaaaaaggctgctgagtttgaggagaaggtcaaggagttgacagttagtcatcattttctccgccttaccgcagcgtgcggggtcttagtcatgatttgtataactgactttaccggcaatgtagaaagagatgcaatacctccgtgcagacgtccagaccgccattcgaaggaccgccgaggagaaggccaaggcttctgaattcgccatctcctctttcgcccgcgctctcctcgacacagctgatgttctctctactgctctcaaacacgtccctcaacccattcccgccgagaacaaagacctccaatcccttcacactggtgttgaacttacccacaaggctcttctcaaaacttttgagtcacacggtgtgaagaagctcgaaagcttgaagggcgaacagtttgatcccaacgtgcatgaggctttgttcactgttcctcaagcggttgctcccaaaaaggagaacggggagcctcatggccctaacgaaatttttgacgtaagcaaagaaggttggacgattggttctagggttttgaggccagcgcaggtcggtgtcgttgcttcggagtaaaaaggaatacagatgggtag

SEQ ID NO: 1069 - DNA, 1084 bp, Cryptococcus neoformans
  misc_feature (312)..(312): n=g, a, t or c
atgggtattatcgttgttaccagttaccttctcattgcgctattgaacgaaagtgtaattctgtaactatgatagctacacaaagaccatttcctatcccatcccctgtccctctcgcaccatcatctaccgtcctgccgaccacagtaccggaaaatgcgcctgaacattgccccgtacgttcgttaagtcccatttcctagacgccgctgatgtctattttctaccgcagggggttgaatcttcgcaggctggtaaggcagatgcttgtgaaggctgtcccaaccaatctgtctgtgcagaaggacccanagggcctgaccctgatttgccacttatccgagagcggatgagctctgtaagacggaaaatattggtgctttcagggaaaggtggcgtggggaaaagcacatttactgcaggtttgtcttgggcccttgcagcggatgaagagtgccaagtgagaattctctattacttcgacaggtccatggctgatacgacactaggcgggaataatggacattgacatctgtgggccatcgatccctttgcttatgggattagaatcttcaaccatccacacctcggcctctggatggtctcccgcttatgcacttgacaacttagctgtcatgtcgatcgggtttttacttccttcctcgtctgatgccgtcatctggcgtgggccgaaaaaaaatgggcttattaagcaattcctgaaggatgttgagtggggtgatttagactacatggttgttgacacgccccctggaacaagcgacgaacatctgtcgattgtgcagtacttgaaggaggcaggtatcgatggcgctgtacttgtaacgacaccgcaagaagtggcactgcaagatgtgagaaaggaaattgatttctgcaagaaagtcgggattcccattctgggactggtggagaatatgtctggttttgtttgtcccaattgcaagaatgagagccaaatatttgcccccacgacgggtggggcggaggcgatgggcaaagagctcggaatagaattactgggaaaagtgccactggaccctagaattgggatgacttgtga

SEQ ID NO: 1070 - DNA, 985 bp, Cryptococcus neoformans
  misc_feature (78)..(78): n=g, a, t or c
atgtcctcgcctccacgatacaccgaagagccaaatctacgaccagctccttcaaaggcctatggcacaacccccgcngacactgctgccacgcaaccccttctcgcagctcaggcgtctactaatgcccaacgcgcagccgaggaaggttggcgggacgacgaggataatgtgtcggacaactacaagctcggtgtctctgtctctgactgcgatactgaaatccgaatgctctttatccgcaaagtctactctatcctcttgattcaattgctcgccacggcaggagtgtcaattcttctctccttgccgtcggccaaggactttacccataccaacccgtggatcatgtggatcccactgattggtagctttaccagcttgttctttgtctactggaagaggcaccaacacccggcgaatttgatcttgttgggtttgttcactttgttcgaagcgacgatgattgggttggctgtgagttactatgagagccgaattgtgagtagatgagttttcttcttcatctcctattagtcgctgaccatccatcaataggtaattcaagcgctgttcatcactcttggcgtcttcattggtcttacactcttcaccttccaaaccaaagtacgtcttcctttcttctttcccatcccttcactaatttctctacttcttctttgcagtacgacttttcctccttcgcacccatcctcttcattggcatctggggtctccttaccacttacctcatccagatcttcctcccattcaatgccaccgtcgacctcggtattgcctgtttctcgaccctcttgttctctggtttcgtgttatatgacacacagcagattatgaagaggttaagtgtggatgaggcaattgcgggagcgttgacgctttacttggactttttgaacttgttcttgagcatcttgaggatagtgagtgctgtcaacaatgattgtgggaatttggaagctga

SEQ ID NO: 1071 - DNA, 1041 bp, Cryptococcus neoformans
atgcctcagtttgttctctctcaaggggtaagctttcaggcttcatatcgcaatttcctttcttaccaaggctaccagtaaagtcgctgtcgtgactggtgcctctgtcggtatcggtctagctgccgctactgccttcgctgaggccggcgccaatgtcgttctgctctatgcaagaagcaagcatactgaaaagaccgcttccgatctagctgctcgaacgggggtcaaagtcaaggcctatcaactcgacggtgagtgggatctctctctatctttctggctggggtaatcagtcgacgtatgactgacaacctcctgttgttaacagtgcgggactatgacgccactcagcggttggttgaaaatgtcgtgaaagagcttggcaggctggatatctgggtaagcatactttggatacggaatacagaacatatcctgataagttcttcaggtagctaatgccggtattccccaagacgacactatcctcgatggcaaccggaaacactgggaggacatcattgccgtcaactacaccgctgttgtatatcaagctcaaatcgttggaaaggcatttaagaagcaggggaacggctcgttcatcattacagcatctgctgccggtatcgccaacatccgacctactgaccaaggcgtttacaactctagtaaagctgcagtgatcgctctggcccgttcgcttgctcaggaattcaaggatttcgccagggtcaactctgtgtctcgtgagtaaacttcgttatccattggtctaggcctataccaactgtgtattctagctggctatatgggtgatgcacaaggcgcgccggagtctgagattaccaatgccttgactcgtcaggtcctcaaccggacaggggagtacagagagcttgctggtgcctatctttaccttgcttccgatgcttcgaccttctgcaccggcacagatttgtaagtaccaccagtgtaaccatcttctctcatcgtgctgaccaagttgtaaggattgtcgacggtggctatcactgctaa

SEQ ID NO: 1072 - DNA, 994 bp, Cryptococcus neoformans
atgacttacccaaagattcatagcaagaggcattttgttgatttctgttttgtgatggaaagagaagagacgatgaaaaggtgtgttagcgttgaaatatttctgggatgccgccagaaaaacaatcaccgctctcaactttttaaaactgaaggacagccacgtggccaaagtggaggggccggaaatagcgggataagggatgtgtggcaaacggggggagggatgacgcgctgtcattcactcctggcctctgcaggacacttggcaggaaggaacaaggaaggaggaaagaaagataaaccaggatacaagaatagacgaaacactttagcccatcaagctgactcaaccattatggtaagtcccctcacctgtccgtccttctccagcttatcatacttcacgaacaagtcaaacaccctccgtccttacctcaacgccgtccgcgcaaccctcactgccgcacttaccctgtccaacttctcatctcaagtagttgaacggcacaataagcccgaagtagagtgcggcacctcgccagaggttgtcctccatccgttgatcatctcgaggaatgagagcgaaagggtgctcatagagcccagtgtcaactcaatcaggctcagtatcgcaattaaacaagcagatgagattgagaagattctgtgtcacaagtttaccagattcatgatgatgagagcagaaggtttcgttattctcagaagaaagcccttacctgtaagcactcgttgaggcgagctggcgagctatcagcctgttaacaccctggcagggctacgacatctcgtttttgataaccaatttccattctgaatcaatgctcaagcacaagcttgtcgatttcatcattcaatttatggaagacgtggataaggaaattagtgagatgaagctttccctcaacgccagggcgcgaattgtcgcagagagttacctttctacggtaggtttatcatcttcatctcgatag

SEQ ID NO: 1073 - DNA, 1268 bp, Cryptococcus neoformans
atgttctcctccgagatagcgcgtatgaggaaattgggcgttcagggggtaagttctcacgctcaaggctccagtgtatgttatcttgctgataagtttatcccttatactctctctctcctcgctctcgctttgtgtgtctatgtgtgtgtggtgctctcctctcctctcttgccatcggcttgtctttgcaatggatgaacggggggaaaaatagatgcttttccaagcactcaacctcttaacggtagtagcctctgggcttatgatgtggaaaggtctctgtctgtttacgaattccgaaagtcccatcgtcgttgtcctctcgtacgtctcctcatcattctcgcgctttcatttttaaagggtgggtgggctgatacagaggaaaatgtggtgtattatatgatgtaggggatcgatggaaccagcattttacaggggtgatatcctgtttctcataaaccctacggatgtaccgtatgaagttggggatatcactgtttacaaagtgtatgtctctgttttcttctccttttggtcgttctcgagtggtgagctgataggacgtaaaatctggtgatgtagccctggaagtgaaataccgattgtccatcgagtgatagaatcgcacaccacgttagtttttcccttttttccttttacacaaaccatcttacaacctcctcccccctttctcccggcaaaaaaacagaaacacaacccaactcctcctcacaaaaggcgataacaacccgggagacgatgtcgtgctctacaacggtcttcaatggattgagcgtcggcatattatcggtaaagttcgagggtgagtgacttggctcattctctcatatacatccactatccgctatcacctagccactgcttttccatgctctcgtgaaccacccgttgtaccccttctttctgccttggaaatgtggtgtgatatgatggggacgaggaccaggatgaagagggaaaataagctaaccaaaaggcctgataccaggttcctcccatatgtcggctacgtaacgattgccatggtgagtccaactgtcctccaccctctctattccaatcacttcaccctctaccagggccagacgtaaaatagctaatcatggttttcattttggcatcgtaacgaaaatatagaacgattacccgcaactcaagtatgcgctgttgggtaccatcggcttagtcatgctcgtccagcaggagcaatagcagagcttgagtctgatagatggacatga

SEQ ID NO: 1074 - DNA, 1203 bp, Cryptococcus neoformans
atggtactgtccggtaagttggcatgtcatttcacctcgagctgttttagctgatgccggttaggatatgggatattcagtcattatcgaacactcctgtacgccagaacatcatggaatgtatatgactgacgaacttatcttgcagatagcaacccttgaaggccataccgggaatgtagttgctctagcatacagcgctttagggaaatggattgtcacgggtagcgaagacggaacagtcaaggtgtgggacacacggtatatcactctgatcccttgctccatgtgataatatagctgatggattcatcctggtacaggacggctcaaactcaacgtatatacctacatgattgccctgtcaacgacgttgtaatccacccgaatcaaggagaattgataagctgtgatcagtcaggatcagtcaagatatgggacttggcggagaacacatgtacacacgaacttgtgagacacgttcccgttgttcatatcacaaacagatactgacaaaggataggtaccggatgaagatgtacctatcagaagcgttagtatatcatcggacggaaatactctcgtagctgccaatgacggcgtgcgtctcatcttccgttctcacattcgagtccaacaactgactcttgattgaacaggggatggtttacgtttggcgtatcattccagtgccgaatgccaacgctaatctcgtccctgtcaccagtttccgagcccatacaaagtacatcactcgttgtcttctcagccccgacaccaagtaagcatttttccttttcaatctgaatctactaatgcggtcctatttagataccttgcgacatgttcagcagatcatactgtcaagatttggtcaacggcgggaatagactatactcttgaaaagactttgacaggccaccaaagatgggtctgggatgcggcgtttagcgcggactccgcgtatctcgtgactggtaagccttcgatctgccaaaccgctatggagagagctgacaaagtgcttaagcctcgagcgatcatgcagctaggctatgggatttgagccttggggagactgtgaggcaatacgatgggcatcatcggtcagttgtcgttactcactcaaacgttgatagtatgactgattggtaatttagagcggcagtgtgctgtgccttgaacgatattaaccttgcgtga

SEQ ID NO: 1075 - DNA, 1130 bp, Cryptococcus neoformans
atgcagacaatcaagtgtgtcgtagtcggagacggtgccgttggaaagtaagtcctcgtcattccgcatgagcctctcgccggtacactgcaactcacacgatccataggacctgcttgctcatctcgtacactaccaataagttcccatccgagtatgttcctaccgtctttgacaactgtatgtctttctctttcgacgtattagtaatcgtccgctgacttgtatgtgcctgaagacgccgtcagtgtaactatcggtgacgacccatacactctgggtctctttgatactgccggtcaagaagattatgaccgtctccgtcctctctcatacccccaaactgatgtcttcctcgtttgcttctctgtaacatctcccgcgtctttcgaaaacgtccgcgaaaaatggttccccgaaatcgcccaccattgccccggcgttcccgcacttattgtcggtacccaggtggatttgagggacgaccctgctcagacggagaagttgggaaggcagaggatgaagccgattacacaggacatgggagaaaggttggcgagagagttgggagccgtgaagtatgtggaatgttcggcgttgactcagagaggattgaagaacgtttttgacgaggtgagttttgaattgggctgaaggaaggcccgctggttgtaagcggagaggaaccagagagtgatgccaatggaaagggagttatatctcccggtgcccatctagaaggtgctccattccgcgcatcagcttcgtttgcttctttgaatctcggctgcccataacacacatggaaaaggatcagcggctgatgtttttatctcgtaggccatcgtggcggcattagaaccccctatggcgaccaagaaaaagtctaaaaagtgtctcattctttaaagacaccccttctttttggcttccctttcgcccattatctctatctcattcttcgtctatcattcgcttttcatttctgccatcacttccttcttgatccaagatacccaacattcctcatcccttgtcaaatatcagcttgcaatatttttcagaatttgaactttactttgcctcgcccctcgctgttctcaaactcatgtcacattatcgtgttctaa

SEQ ID NO: 1076 - DNA, 1114 bp, Cryptococcus neoformans
atgtcggtactggttcgtccgtccgttccgggtctctgctcatcttcttctctcccgctttaatacaagaatcattcagcatgttgagtgagtcggcccacagagcaatgccactgtatcgtatccgtctgctcacaactcacagtcgtcggtcttaccggcggcatcgcttccggtacgtctctccaattcggctgctcttggccttccggtctcacacagctgatctctcaaaggcaaatcaaccgtctccaaactgctctctgaaagacatcatcttccgattatagatgctgatctcattgctcgcgaggtcattgagcctggcacatccggttactccctcgttgtctcacactttggccctgaccgcatcttgcaggaagacggagtatcgctcgatagaggagctataggtgatatcatctttcatgatcctgaggaaagaaagtggttgaatggggtcgtgcacccgagggtgaagaaggaaatggtcaaacggatcataagatattggctaaatggggaatggtgtgtgatcgtcgatgtgccgctattgattgaagcgggtatgtggaagtgggtgggggatactgtcgtggtatatgtgtatgttcttgatggcgcgccaaggcttacatggaaaccatttctaaccgggtgtctgtgtagcaatgagcgtctccagctgtcgcgcctcctcggtcgccaatctaatcctcctttgacccaatcccaagcttcaagccgaattgcatctcagttaccactrtcggccaagctttcctacgccacgtctgtcattgacaattccggttcattttcagacctgaacgaccaggtcgataggacggttgccaagtggaaggcacagcaaggcggagattccggttggtggtggagggtttgctggttagtaccgcccgtggggctagcagctggtgcattgagcttgctagctgtttggaggaagggcaaaaaagacaggaggagagggagaggagaggtctcaaggagggacaattccgagcaagcatcagaaaggatagagctcatggaactgaaggggggaagacggagaactgcgagtgggagtgtcacggacgaagaataa

SEQ ID NO: 1077 - DNA, 1227 bp, Cryptococcus neoformans
atgtacgcgtctggtgtctgacgcctggcgcaacaagtcaacaagcacaaataataaagacagtcgctgacttctacccactatatctccaccgcagtccctatacaccttcatatacgccactcttatcgtatttaatcacgctctctcaccatatacccccctaactaccaaaagcgtcttgtctatcttgccctagtcgcccattcgacagccacgctcggtccttctccacagtacaaagaccccagccacaccagaagataatccagccactcaagccaaactccattcatttatatttcaatttacaacttcagtttaaacctactttcagtacctcagcagatatggccgatcaaggatacatgtcgtctggttctggcagtggccgtgcttctggtggagaggggagtgacagaaactcgtgcgcatcaaaacttgaactctgaagttactgagtgtactaacgcaggtattatgtgcagaattgttctcaaagtaggcatggttggtgattcgcaaattggcaagacatcattaatggtcaaatacgtcgaaggcagctttgagtgagtgcagcggctttattacacagtgtctaacctgtgcaattcagcgaggattatatacaaacactgggtgtcaactttatggaaaaggccatcagcatacgaaatacagagatcaccttctcagtaagcatatacttgcctctttatctttcgttctcggactgacgaaccacagatatgggatttgggtggtcaaagggaattcgtgtcaatgctccctcttgtctccaatgatgcggtggccattctattcatgtttgatcttacacggaaatcaaccctcaatagcgtcaaagagtggtatcgacaagcacgtggatttaacaagacagctataccagtgttaatcggaacaaaatacgatcagtttgcgtctttcccaagagcagagcaagaggaaattaccagacaggcgaagaggttctcaaaggctatgcacgctccactcgtatgtagataatatcccacttttgacgggttacttgctgacgatgagttggtagattttttgttccacttcacactctattaatgtccagaagatcttcaaaattgttttagcaaaggctttcgatcttaaggcatgttgatttccgtattcttcgggaagggtattaacttttcattcgcagtgtgtcattcccgaaattga

SEQ ID NO: 1078 - DNA, 1229 bp, Cryptococcus neoformans
atgtctcgctcttacgaccgaggtaagtaggggccaagcagggaataaggctacatctctctctggcatcctgtcgagctctaaactcagaaacatcgctgacagtgttcctttagctcttactgtcttttctcctgacggacatgtaagtttgttaacgtgtctgcgatcccagaaggttccgctgatagaacatatagcttttccaagtagaatacgctcttgaagccgtgcgacgaggaacatgcgccgtcagttatcttcaatctcccactgtaaaccaacaactaacccctggcgatttcaggttggtgtccgtggtaaatcatgtgtggtcctcggtgtggagaagaaatcaactcttcaacttcaagatcctcgaacggtccgaaaggttgccatgctggatgatcatgtttgcgtggcttttgctggtaggtcgggttgttttcaaaaccctggtttaataattaatgacgtctgtaggtcttactgcggatggtcgtatcttgattgacaaggcgagaattgagtgtcaatcacaccgactgactgtagaggaccccgtcagcattgaatacatcaccaagcacatcgctggtattcaacaggtgcgctgtttggttttgtttcgcacatctcgtctgattagattccatagcgatacactcaatcaggtggtgtccgaccattcggtatatccgctttgattgtcgggtttgacccacatgacactattccccgactgtactctaccgaaccaagcggtatctactctgcctggaaagcttgttctatcggaagagcatccaagactgtcagggaattcttagagaagaactatgtggaagaccttgagagagaacaggcaattaaattaacagtgaagagtctgttagaagttgtgcaaactggtgcgaagaacattgagattactgtgatggagtcatatggtgttgttaaagtgagtatttattcgaagcgaacttagctggactaagctgatatgataataggcccttgagcaatctgatatcgaaaaaattgtcgctgagattgacgctgagaaggaagctgaggccgaacgtaaacgtcaacgtctggctgccacacaagcagggcaagcatctatggccatgggttcttccgtgccttctggtacagagacaccggccggccgccctcaagaacatgcttcagcccctgggggtgacagtggggtgcaatag

SEQ ID NO: 1079 - DNA, 1279 bp, Cryptococcus neoformans
atgatggccattgaatgcatacaattgaggagaatgacaggtcagtactgcatctctcgaccgcgcatctttaggtgcgtactgatactttcccgcccagctccaagacaagatccatcatctcgagaagtctacctccacctccgtctccaacaccatctcctccgtcacctctgccctctctccctcttcctccatcaagcctccccgaatggtcctcattggccctcctggtgctggtaagggtacacaagcgcccaacatctccagcaagtactgcatctgccacctcgctactggtgacatgttgagggagcaggtcgccagacaaaccgagttgggcaaggctgctaagcagattatggaccagggcggtttggtttccgatgagattatggtcggcatgatcaagcaggagttggagaagaacgccgagtgcaagaacgggtgagttgggtctcttctctcatgtcatcctgatggagcggttgtggatgttaaaccttggcgcgtgggtttgatgggatttggaatgaggttgtactagcttggttatgacggaagtggcatcgctggtgcggaaacagcaatgttcaagccaatacccgtcattttcaagcctgcagcgacaatccattctctcttccgccctcctttggttcctgctgctttccattccacaccatagtcggacattcaacgtgtctcaccgcgttaactcgtctattcctctcctttccatttcccattatctcatcccttgccttcaacactgttcatgcgctgactatctaccaaacaagcttcatcctcgacggtttcccccgtaccgttccccaggcttccaagctcgatgccatgcttgccgagcgcaaacaagctatcgaccacgctatcgagctcaagatccccgacgtcttgttgatctcccgaattactggtcgattggtccaccccgcgagcggtaggagttaccacaaggaatgtacgtctacctttccttcaatcgccatgcacttttctgacccgtcccctacctcttacagtcaacccccctaagaagcccatgaccgacgacattaccggcgagcccctcatccaacgttccgacgacaacgtcggtaccctcaggaagcgattggacacttatcacgcccagactggccctgttgttgactactacaagggtacaggtgtttggacccctgtcgatgccgctcagagccccaagttggtctgggctagcatcagcagtattttggaaagcaagaagaactaa

SEQ ID NO: 1080 - DNA, 1051 bp, Cryptococcus neoformans
atggccgctgcagccgcctttgacctgctcgacaagtacatccccggcgcctcagattctctgaccattgtcaatgccaccaccgcgcaaaacaccctctatccaggtgtcgactttgccgccctcaactggctcgagagattatgggcatcctactacgtctgggtcggcaaccccatcattgccaccggcttgatgagctttttgctccacgaagtgcgttggcgaaatcgcactgaccgttggcgaatacacactgaccgcctgtagattgtctattttggacggtgtatcccttggctcatcatcgatgctatgccctacttccaaaagtggaagcttcagcctgtacgtcggattcacattacaagctgtggccgttgctcatcatcatgcagaacaagcacgtctctcgcgcgcaaatcctcaaatgcaccaaggtcgttcttctcactcacttcacctgtgaagctccccttatcctcgccttccaccctatctgttgcttgttcggaatgaagacttacgaaatacctttttcatctatcggtctcatggctgcgcaaatcgccttcttcttcgtctttgaggacactttccattactgggctcacagggctttgcactatggtcctttgtacaagcacattcacaagctccaccacgagttctctgctcctattggtatcgtgagttactcgcatctttttcatctcttgagtcctccgcttaatattgtataggccgccgaatatgcccatcctcttgaagttttgatcctcgcgcaaggaacgatctctggaccattcttgtacgctgtattcaggaatgaccttcacatcctcaccgtctacgtttggatcactcttcgtctttggcaagcagtcgacgctcattctggctacgacttcccttggtctctccgacacttcctccccttctgggccggtgccgaccaccacgatttccaccatgccactttcacttcatgcttctctaccagtttcaggtggtgggactactactttggcactgatgtcaaggtaagtga

SEQ ID NO: 1081 - DNA, 1147 bp, Cryptococcus neoformans
atgttcagaaactcgtacgactcggataacactaccttctccccccagggaaagctttttcaagtagagtacgctctcgaagccgtcaaacagggttcagcagccatcggcctcaggtccaacacccacgccgtcttgcttactctcaaggtgtgttgctctctcgtggggtcgtggcagctacaatgaagggaacgcttacaaggagcaatgatgtagcgatcaactggcgagcttgcgacatatcagaagaagctcatcaggattgacgatcacgttggtgtcgccattgctggtttgaccagcgatgctcgtgtcttgaggtatgtctttaacattttttcttcttagaagacgacatgctctcttttaaattatcagggttgctaactgcctgtaatatagcaattatatgcgacaaaaggctatgcaatctaggatgacatacggtcgcgccacgcctgtcgctcgtctcgtccaaagtatcgccgaccgcgctcaaacaaacactcaagagtatgggcgaagaccgtatggagttggattccttgttatcggaaaggacgtaggttgaacccttcatctcgccttctgatttcctttctattttttcttttcttttcgaacgccgagctaactcacacatgtcatgtcataacaggaaaccggccctcacctctttgaattctccccagccggcaccgcttttgaatactatgcccactccatcggtgcccgctctcaatcggcaaagacataccttgaaaaaaactatcatctgttccccaacgcctcacttgaagagttgatcaaccatggtctttcggctttgcatgatacccttcaacaggacaaacatctctcctctttgaatacttctatagccattatcggtcctgccgagggacaaggagtggaggatgtgagcaaatcagcagcggcacagagaggtggatttagggtgtgggagaatgaaggtgtggaagggattttgagaggatggaggaggagtaggggggagccagaggaggggccagaggctgaaggcgagtctcaagctgaggcttcagctgagggccagaatgaaggtggggcgggacagcaagagggacagctcccggcggaggacgtgacgatgcaagagtga

SEQ ID NO: 1082 - DNA, 1035 bp, Cryptococcus neoformans
atgggcatcgccatcctctctggtgtcatctcttccctcgaaacccgcgcttctcttcctcgcaaccctaacgcctcttccgaacctccttccggtatctccacccctaccgcctcccaatttcttgatgccccagaagcttcccttcctagcactttcatcgctaccgtcggacgcgaggagaccggccgcaagctcagacgcactttggccgacatgggctctatcgggaaacaagtccaggtccgcgctggtcaagggaacgtcaagaccgtggacgaggccgatgtcatcttggtgtgttccaagcctcagattgcgaggtcgatcttggaggaggaaggtatgagcaaggcattggagggaaagctactcatttccatctgtgcgggtgtgaccatctcccaactgaagagctgggtgcccgagagcacccgggtggtgcgagctatgccaaacactccttgtaagatcggagaaggcatgactatcgtgacccccctgtctgacgctctttctcgaacacttatcctcaacatctttacttcttgtggcagatgtcgattcctcgacgagaagcactttgacgcttgtaccgcccttgcgggctctggtcctgcgtttgtggctttggtgttggaggctatggccgatggtggtgtgatgatgggtttgcccaggtctgaagctttggaactagctgctcagagtgagtattgggtagaagtcatgtgtaacctggattggtatgctgatccatgattgtagccatgcaaggaaccggaagaatggctcttcaaacaggtttgcaccctgcccaattgaaggacagtgtcactagtaagccccattctcattcttcccattcatgcaccatgttctaatcaagccttcagctcccggtggatgcaccattgccggtttgttgacacttgaagacggccgggtgcgatcaacgatggccagagctatccaagtcgccactaaccagtaagttttatctattctctcttttctccggaaatctgcagctaa

SEQ ID NO: 1083 - DNA, 1154 bp, Cryptococcus neoformans
atgcgctccctcccctccaccctcgtacaccgcctcttctccgtcgccacctccctcctgctcttcctcctcgcgctcggacccatcccacaccatgtcgctttcgtcatggatggcaacagacgatacgcgagagagctcggtcagcaagtagagagtggccatgctgaaggtttcaatgccctcagaagagtgagctgccgctactcgcagctccgtacctactaatcgtacatgcaagactctcgagatatgcctacgattgagaataagagcagtgtcgatatacgcctttgctatagacaacttcagcaggtcagaaaaggaagtcggtgctctgatgaatctcgccaagcagcgtcttgcagagctgtgtgaacatgggtgcgcatgtctcagtctacagccttttatttaccagtgataacgcgatttatccttgtaagagacctgctggaagagtatggcgtcaagatacgctttataggccagcttgatatgctgccacctgatgtgctccaagccgtccgcgacatggaggctatgacccaggataacaaaaagtgagccttttgttgttctggaaatctacagctgataagttactctgcagtggcgtattgaatgtatgctgtccgtacgcttctcgggatgagatcaccactgcgatgaaggaaagcgttcggcgggcatatgagggagagcttgctccgaggtgaataaaacccggctgtccagtgatcggttaacgaggatgctaataacgcttaaagtgatatcacagctaaggatgtgttcgattcgctgggagtgtctaaagcaatcaacactgtggacaagagtctgttcgtcaatcccgaagagccagaaaaacttgatatactcgtccgaacatcagatgtcaaaagactaagtgatttcatgatgtggcaggtgagttcattttccagaaaatatggacaaataccgactgagtatcgataggcttcagacgatacccagctgcactttgtcaaaacctactggccagagtttggattatcagatatgttacccattcttcttggatggcaacaaaaggcatggatgcggaaacttggttggtgttgaacgcgagtgtcgagtggtattgtgtgatgcatcttacgatctaa

SEQ ID NO: 1084 - DNA, 1149 bp, Cryptococcus neoformans
atgtcctttctgaccgtttcgagaggtgcgcatctcattgcatgtctccagcatcctgatcgaactgttatgctgattgtatagtaggccctctcgagcagatatccagttcgtagactacgacaatgtccgattccacctgtccaccccgtcatccaagactcagcttcttctctccatgggtatccaatgctggcctgaccttgtcaagtatggtgcccgtgaacatctccaaaacgagtaccaaggctatttcctcgctgaggctgatacagagcctgagtacgatgtcagtttgttgattgatttggaaagattgccggagagcccgggtacgtggcgtccacttgcttgatgacacctggtcgagatgctgatgggtagctttcaccagaggagcgagctgcccttatctccaaaattgcccatctcaagtccaccgcaatgtcctctcctttttttgccgcttttgcagaacaagcgtctcttcaagcatcttacaaggagcctgccggtgcccagcaagcagacttgcaaccatccgaggtcaagggagatttgaagattgtgaagtaccgcgaagaagaagccatcttcatccaagccagccacgatcgagtgactatcatattctctacggtatttaaggaggagacagaccgagtatatggaagagtgttcttgcaggtatgtcggaaagatataataaaggagataagcatttaatccgcttccaggaattcgtggatgctcgaaggctgcacagtcttcaaaatgctcctcaagtcatgtactctaaccgcgagcctcctctcgaaatccgacacctccctggactcaagaacggcgaagattggggctatgtcactttcggtacatatatttactgcttctttatgacgtgtctaacccagtcatatagtcctcttccctcgtcactttgcaaatccatcccaagctcttgcgactatcaaccgtatccagctcttccgcgattacttgcactaccacatcaagtgctccaaggcatacatgcactctcgaatgagatacagggttgctgaattcctcaaggttcttaatcgagcgaagcctgagattgctagtgagaagaagaccgctagcggtaggacgtttaggtcacgttag

SEQ ID NO: 1085 - DNA, 1125 bp, Cryptococcus neoformans
atgtccaacgaagcctctttatgcaacagactctatatacgctcacttttctctatcacagcccaagatgtttatgacaaggtaagcacacacgctgaccagacacagctaacggctcccagatcagagtacgaccggggtgtcaacaccttctccccagaagtgagttcgtccacagttcgtcatctttccgtcactgacgcttcatgcagggtcgattattccaaggtgcgctataaacggcgtgggacaactagcagagaatgctgactcaactattagtcgagtatgctatggaagcgatcaaggtaaatatgcctcgagtctttccaacattcatttctaatccataatcttagcttggttccacaacagttggtatcaccactccccacggcaccgtgctcgccgttgagaaacgtgtcccctctcccctcctcgaatcctcctccatcgaaaaaatcatggaaatcgactctcacatcggttgtgccatgtcaggtctcacagccgacgcccgaacaatggttgagcacgctcgagtcacaagccagatgcacgcgttcacctacgacgagcccattggtgtggagagctgtacccaggcggtttgcgatttggcgctgaggtttggtgaaagtgtggaggacgatgatgcgttgatggtaagcactattctttccatattctgaaccagactttttaactttccatagtctcgaccgtttggtgttgcgcttcttattgccggtatagatgagaagggtcctcaactgttggtctgccccaaatatccctgctggcagcatactgacccccttcccttagctaccacaccgacccctccggtacatttgtccgctatgaagccaaggctatcggctccggttccgaagccgcccaacaaggtctccaagatgcttatcacaagcaaatgaccctcgccgaagcgcaatctttggcgttgaaggtgctcaagcaggtcatggaggagaagctcgacgagagcaatgttcaacttgcgcaagtcacaaaggaaaagggattcgagattctgggagagcaagcattgaagggcgtcattgagactcttgcctagaagaagtaaatgtagaatatgcatga

SEQ ID NO: 1086 - DNA, 1062 bp, Cryptococcus neoformans
atggagaaaaagacgaaagatgccatagatgtgcttgaaccgagagcaattgtcgattaccctgattacgtgggggcttaattaaaatacaggtatgtttgttagcgggtggagttattgagaatctccgtgttacataagctttcccggctcattccaatcatccatccgtctccgccgtcggcttcgtcctcagcttcttgctttatagacgaactcgctgtcgatttcactactctttcactatcgcctatacaacatgtttacaggtctcgtaagcccatatcactctcatattattcacgtaaatgctcatctcctccgcagatagaacatacatctaccatctccgccatctccccttccacctccacctccggcttcacacttactctctcctcctctgcgcccattcttacagactgtcatatcggcgattccatctgtgtcaatggcgcctgccttaccgtcactgagttcgactctgattctttccaggttgggctcgcacccgagacgctgaggcgcacgaatttggggcaagtaaaagtgggtgacaaggttaattgtgagagggcgatggctgggcatacgaggtttggtgggcatatggttcaggtgagtaacccattccttttactttcaatgggaatggaacagctgaacagaacgcgggggagtatagggccatgtagacggtacagcgaccatcatctcgaaaatccccgatggtgactctatccggtacactttccaactccccgccaccaccacgcttctcccattcatcatcgaaaaggggtacatcaccatcgacggtgcgtcactcaccatcacccacgtcaacgacgcccaacggtcttttggtatcatgctcatcgcgcatagtcaagcaaagttgacgttgacagacaagaaagaaggggatacggtcaatatcgaagtggattgtgtgggcaagtatgttttgggaagtgtggagagaatagaggggattgtggagaagatcgtggagagaaagttgaaggaaaaaggattataaaattacttttatgcaggtag

SEQ ID NO: 1087 - DNA, 1196 bp, Cryptococcus neoformans
atggacggaaagtgcctcttgttgagcatgtgccaactcggcatagctgcggttagagggggttaggacctggtgtggagaaggtgaggagtgctcaagatattgattgtggcattctctgaccttgatacgcgttctgcagcttcgaattgaccaaagagtctttgtcactccttctaaccgcaagcttgacgtcaatgtcgttcagtcaaactatcacatcgagcttacaccatccgacgtgggtatgtacgacagagtagtcattcaagatattttgaaggagattgcacaaactcagcaagtcgatttgaatgcaaaacagaggttcaagggtcagtctttgtcctgatggataaattcgcatcgtagctgaccgcaatcacagtggtcatcattaacgaggcggatgctcttactcgagacgcccaagcagcattacgacgaaccatggaaaagtatatgaccaatatgagacttatcctctgcgccaatagcacaagcaaaatcatcgctcctattagaagtcgatgtttgcttatgcgagtggctgcccctacagatgacgaagtaaggcctctttaaactcctaagaatcagttttttactctgagaatagatgtcaacagtcctcaattacgtcgccaagaaagaacgattcatgcttccatcttctgccaacaatgccatccttgaaacatcgcaaggcaatcttcgaaaagctttacttgtttttgaggccatgcggatgcaacaccccgacctgtctggtgatgtcgaggttgccaaacccgattgggagacttattgtggaaaggtcgcggatgcgatcttgcaggagcaaacggcgcaaaaattgttagatatccgggcgaagatttacgagttgctaagccactgtataccgccaacagttgttatgaaggtatgcgaactgctgagaggtcaggagacaagctgacattcgggcttagaccatctcagagaggctagttgagaaggtggatgacacattaaaaccgcaaattgtgcactggaccgcttactacgtgagtccattcagttattcttgctcaaatagaacctgattgtgtgtttcataggaacttcgaatgcgaatgggatcaaaaaagatattccacatcgaggcatttattgccaaggttatgactgtttacaagcaatacacactgtag

SEQ ID NO: 1088 - DNA, 1224 bp, Cryptococcus neoformans
atgaaatgttgcagaaagggatctagccactacgatatccatatatctggtgacgtggaaggctttggaatcttctatctaatgtgggtgaattatctaaactacgttcacttccgattgattttagttccgaagcgtgacctccggccatatccgctgcttctgcatgaaatgtttttgagaagacgtcgaaagtggaaattcctgcaatattcattttcaggtcataacttaatatcaaaaatcgaggacacagctcaatttcgaacatgacaacgccttccaaatcttcgaacaagcggtttcgcgacaacgaatcagaagtagacgagacgggctctcaaatcgagaaacaagtcaatgccacagcttccacttcgacttcgaggcctgccttatcttcccacgagtctgaaggctcgtctgttatgaagactaagaaaaagaaaaaggctcaaacccctggtattgtgttcatctcgagagtgcctcctggtatgactccgcagaagataaggcatttgatggggcgttggggagatattgggaaagtgtatgcgcaacggcgagatggtaagcttccaattcggcccttgcatttccgactgactacgttgctgtagctcctggcggttataacccaaactcggcaaatcagaagaaacaaaagcatgccagcgccaactttactgaagcctgggtagagtttttggataagtccgtggcgaagacggtagcttcgatgttgaatgcgcaagtaattggtggtaagaaaggcgataggtaggtactaacaccgtatttcaaggagttggtctgatatgtactgtttagatggagagatgatatctggaccatgagatacttgagtggattcaaatgggagatgctcggtgaacaaatcggttagtctaatctcgccaaactattggtatacacgactgacgcatacgcgtagcatacgaaaggcaagctcaccaggctcgccttcgaactgagatcactcgggccaagacggagcagaacgagtacctcaagaacgttgagctggcccgtactctggagaaacgtaaagcaaagaaggctgctgccggtggaccttcggagagtgcaccaaaccaggatgctcactccaggagttataaacagaggaacgttgtggagaaacccaaaactctggagggccagggaatggacggggtcttgaataacatctttggatag

SEQ ID NO: 1089 - DNA, 1227 bp, Cryptococcus neoformans
atgggtgttttggtttcattgctctctcgttcggttgttcaaatgagtattgcacctctcaggccttccatgtccgaatcctacgccataaacatgccctcagtcgcagctcaaaccgccccatctcgtacgtattctccgaatcactgctggtcagctctttctgacactcctgcgattgaccagctaccgataagtactctgtcattttacctacatataatgaaagaaagaaccttcctgtaattgtttggctcctggccaaaacgtttgaaactgagtgcgcactattgtcctactagtaatttgatggggaaaagaaaggctcacattgcggggcacagcggaatcaactgggaaattgtcattgtcgacgatgccagtccggatgggacccaagaaattgccaagcagcttgctggaatttacggagaggacaagattgtgagtttttcacgccttttgaatcaaccgcaaagatagactgatattatattgataggtcttgaaaccccgtgcgggtaagcttggtctcgggtaagttctgcttctactaacaaagtcgaatactgatgagagcaggacggcgtatgtccatgggttgaattattgcactggcaactttgtcattatcatggatgccgatttctcacatcatgtatggtttcccttgagcgaaaaaccgcgtgatacatgcttatattgctgcagcccaaattcatccccgaattcatcaagtaagcctcaaaagtgtttttttttcgtaaataaaccactatagctgacgttgctaggcttcaaaaactccacaacctcgacattgtcacggggactcgatattcctctcatccgtctcctaaacctactgcctcctctctttctatcgggcttggtcctggtggggtctacggatgggatctcaagcgtaaactcgtgtcccgcggagccaactacctggcagataccgtcctcacccccggcgttagtgatttgactggcagtttccgtctgtatcgcctgcacgtcatcaaagacatcatctctagatgcacgagcaagggttacgttttccagatggagattatcgttcgagcgcgggctttgggttacactgtgggagaggttccgatcacctttgtggacagaatttatggggagagtaagctgagcgggaatgagattgtcggatatgccaagggtgttgcaagtctatggtggagtgtgtaa

SEQ ID NO: 1090 - DNA, 1104 bp, Cryptococcus neoformans
  misc_feature (6)..(6): n=g, a, t or c
atgcgnaaatatcataggtcacagaacttagcggcgtcaatgtgtacgtcaaccacatcgttcactagataatttgaacaccagactaacttatgatgttctagcgttatacaccctttagttcttctgtctgtggttgatcacgctgcccgagtgcccttgtcgaagaacaagcgagtgctgggtgtgctgttaggacaagataatgggacttccatcaacgttgcgaacaggtcagtcatgagctgaatcaggttctaatgggtcggagagacattaaacaggagctgacaaaacgatgacctttactaacagttttgcgattccatttgaagaagatgagcgtgatcccaagacattcttcttagatttggattatgttgaggaaatgtggagaatgttcagaaaagtcaacggtaggtctatcctcattatcctcgtgcggatcggatggctcatatcaccgaaagccaaggagcgccctataggattctaccacactggtccccgtcttcgctcatccgacctcgagatcactgaactcttcaaacgtttctgccctcgacctgttatggtcattgttgatgttcgaacttctggtggccgaggtgacactggtatccccactgacgcctactttgcagttgaagagatcaaggatgacgggactgccactcaacgaacatttacccatgtctcaacctctatagaagccgaagaagccgaagagattggtgtggaacatcttttgagagacatctcctcttcgtcatccgccccgtcatcttctttactcaccacgcaatccctttctacccgtgtcgcgtcccaactccaatcacttcgtggtctgcacgctcgtctgcatgaaattggagagtacctcgaagcggtacgtagcgggaagatgccaattaaccaccaggtggtgtatcagttgcaggagataattggtctcttgcctcaacttggaggagatgtggagctgggtaaggcattcaggatgggcgtgaatgatcagagtttagtagtgttcttgagctcgatgatcaggacggtgttggctttgcatgatcttagtacgttccctgccgttcgctctga

SEQ ID NO: 1091 - DNA, 1283 bp, Cryptococcus neoformans
atggtgagcaacaccatatcgttgagtacaccctccgaggtgagttacatgtcgtgcggaattcacgaatgaaacgcgaactgaggttatggtagtcctccttgaaggcgagattgagacctcttacacagaggccgacaactcctgcgtcgttgctaccgacactggtaagtcacaaagcacgcagcgcgaagttgcggtgacgagaagctgacttataactgtcgtttatagtgaagaacacttgcaacagtacataattcttgtttaccccacaggtcttcccccaacaccttgtgctgacaggatctgacagtctttgccaaaacctccccttacgtccttgatgcccctgtctttgccctccatcttggtttgcactttgtcaccaaatacaagcacatccataagtgttttgtggacataattggccttaagtggagccgcatctctgtaagtagagtccaagtgattaggtttctgaatcgatactgacaaaattcaggtcgacggcaagcctcacaagtggtccttcatacgagacggtgacgaaaaggcgattgttgaatgcgttgtggatggcactgccggccccgacgctgccaccgcgaacgtgaaaattggtatcaaggatcttcttggtgagtaacgagaagcatgacttcagcacgtgtaattaacgtgtaatggcttagttttaaagacgagcggatcagctttcgaaaacttccaccgagatgagaataccactcttgctggtaagtgactgcagggctgtgaatatgactgcagggctgtgaatataatacacaaggctaataattctgcagatgttgcagaccgtattttctctacatccgtctctctccaatgctctatttcccttcctcctaatacccctctcaccatcgacaaccttgggtctattgccaaggaactcgatttccctaagatgaaggagcttatcctcaaggatgtcctcgacacttttgctaccgacgaaagcgctagtgttcaagctactctttacctcactctccagaagattttggcttcatgccctgccgtcaaggacgcttctatgcagttacccaacaagcactacatgtaagtgctttcatattatcaagttcaaatcagttggcgctgacatttgcaatagacctgtcaaccttagtgcttttggcttggacaataaattgggttacgaaggtggtgctgaggtcttctaccctgctgccgatcccagcggttacatcacggccactgtcaccaggaaataa

SEQ ID NO: 1092 - DNA, 1085 bp, Cryptococcus neoformans
atgtctgaagttgcccgaaagcccaaggacgccaaggcgttcctcactgacttcctcatgggtggtgtctctgccgctgtctctaagactgctgctgcccccattgagcgtattaagctcttggtccaaaaccaggacgagatgtaagtggacctggttaattcagatctaaggaccctgctgaccctctgccaggatcaagcagggccgtcttgctaccccttacaagggtgtcggcgactgcttcgccaggacctacaaggacgagggtcttgcctctctctggcgaggtaacaccgccaacgtcatccgatacttccctactcaggctcttaacttcgccttcaaggactacttcaagtccatgttcggcttcaagaagtctgagggttactggaagtggttcgccggtaacatcgcttccgtatgttttcccttcattgagaggcgtcaacgctaataaaggatttagggtggtgccgctggtgcttcttctcttctcttcgtctactctctcgactacgcccgtacccgtctcgccaacgacaacaagtccgccaagaagggtggttctcgtcagttcaacggtttggtcgatgtctacaagaagaccctcgcttccgacggtatcgccggtctttaccgaggtttcgtcccctctgtcgtcggtatcattgtctaccgaggtctctacttcggtctctgtaagcataaacttaaatctcttgtcaatgatatctaatttgccacttagatgactccattaagcctgttattctcgtcggccctctcgagggtaacttccttgcttccttcttgctcggttggactgtcaccacctccgctggtcttgcatcttaccctctcgacaccatccgtcgacgaatgatgatgacttccggtggtaccgtccactacaagtccatgttcgacgccggttctcagatcgttgccaaggagggtatgaagtctctcttcaagggtgccggtgccaacatcctccgtggtgttgctggtgctggtgtcttgtctctctacgacaaggcccaggagctcatgttcggcaaggtctactctgtgagtga

SEQ ID NO: 1093 - DNA, 1125 bp, Cryptococcus neoformans
atgacaatcgtgacatcatatcgcagaatgacttccatggaccttcgagtgggaggaaagtacaggattggcaagaagattggcagtggttcattcggttagtcagctttcaatttgcatcgaaaagaacgctcatgtcattgcaggtgatatctaccttggtgtcaatatcgtttccggcgaagaggtcgctatcaaacttgagtctgtcaaggccaagcacccccagctcgaatacgagtccaaggtgtacaagactcttgcaggtggtgttggtatccctttcgtcaggtggtatggaactgaatgcgactacaacgccatggtgcttgatttgttgggcccctcccttgaggatttattcaacttctgcaaccgcaaactcagcctcaagactgttcttttgctagccgatcagcttatctctcgagttgagtatattcactctcgtaactttattcatcgagatatcaaacccgacaatttcttgatgggtgttggaaagcgtggaaaccaagtgaatgtgattgacttcggattggctaagaaataccgagaccccaagacacacctgcacatcccttacagggagaacaagaatcttactggtactgcgcgatacacttctatcaacacccatttgggtgtagagcaatctcgtcgagatgatcttgagtcattgggctatgtcttgatggtaagtaatgtgcatccggagattgttcctggctaatatctcattagtacttcctccgtggccaacttccttggcagggtctgaaggctgctaccaagaagcagaagtatgaccgcatcatggagaagagtgagtagagtgcacaatatgtcttctagcgctgattatcgtctgcagaaatgactactcctaccgaagtcctgtgtcgaggtttcccccatgaatttgccatctatctcaactactgccgctctcttcgattcgacgacaagccggactattcttatctccgcaagcttttccgtgacttgtttattcgggagggatttcagtatgactacgtctttgactggtctttgcagccgggggtgaagagctctggtgccactggtgaggacggattgcagggtaagcagaatcacttttga

SEQ ID NO: 1094 - DNA, 1139 bp, Cryptococcus neoformans
atgcaaaaagttcaagagcggccaacggaaaatacacgatatttcatctttcgtctctttgactcttaccggtataccaatacaaaagaccccatcactatgagacaaaagagagccaagacgtacaagagggtaatgaccctttacacccagacttttggatttaggcagcccttccagatcttgggtgagcaatgcttttgatcttattttcggtatactaatgtgaggcactagtttcccaggatttgctgctggaaggagccaagtcagaattgaatatgcctaagcagtttgtcaccgtcattcagggcgagtgcaagccaagtaagtcctagacaaccatgtactaccattaaaccaaaagctgattctgttcgcccatcaacagtgataacgcagtgctgtatggaggcgctttataagcttgggaaacccgtacagaggacaacagatcttgccaagacgtttgaaagacgaaaatgtaatcaccgaacagcactagaaccggatgagtgtttgaaggacgttatcggtgagtcttctctctatcccaaaccatcgttgtaatgagcttacagccagatgcaggagctacaaacaaacaccgatatatcctcggcacccaatccaccactcttctcaccgctatggaccgtatccccggcttacccgtcatccactttaacccgcgcggcgtcctcgtcctttccccaccatcgactgccactatccgagagaagaataaagtagaggaagaaagacgtttggagggagtcaaggtccttgaaggtgttgttgatggaggaaacgtggttggtgcggatcttgcgcctgtgtcgggtggacctgcagagaaaaggagtagaaaggtgaagggaccgaacccgttgagtgtgaagaagaagaagactccaggccaggataaggaaggggagagtaagaagaggagaagggttgaggaagaggaagtgaaggaggatgagaatgaagtgaatgcggaggggaaaagaaagagaaaaaggaagaagaagaagactgcggttggtgaggccattgaagagttgaatgctacgaatgccgatcggacggagaaggcggttgtttctgatgatagtgatggcagtgaagaagaatag

SEQ ID NO: 1095 - DNA, 1030 bp, Cryptococcus neoformans
atggagtttctgccgctgcgcaccctcccagcgccgccacgacaacaatcaacaacaaatcctcattccagacactttcactcttttcgacaccccctcttcatcaaacacccggccgccatcacccatatccatttttgcccaacaaaaccacatcggtatgccgtgacatcttccacaagagtgttgatctatgcaccgaagaccggaaaggtggtaaagactatcactaggttcaaggacactgctcgaagcggagagtttaggaaagatggtaaattagtagttgctggtggagacgatggtgttgttcaggtcttcgacgtgaacagtcgagcaatcttaagaacgatgaaagagcataaccagtgagtcgcatttgataaataagtttttcatttctcatgatgtgtagacccgtccgagtcacccatttctccccgcatcttccccaagtgctctccgcttccgacgatactacagtaaagctctgggacttgtccacacaagcatgtctctccaccttttcgtcccacaccgactatgttagatcatcaattttctccccttccgacccttccctgatactctctgcatcttatgattccactattcggctacacgacgtccgactgccagaagacgaggctaatgtcattactatgcgacatggtggtgctcccgtggaggatatcttggcgttccccagtggaggtgtggctgtcagcgtcggtggacctatattgagagtttgggatcttgcaatggcaggcaagtgcgtgcgagcattgtccaatcaccaaaagaccgttacctcagttgcctttgatggtacaaagggacgagtcttgaccggcggtctcgacaacatggtcaaggtctacgacgttgaagactggaaggttgttcacaccatgcgttaccccgcacccgtcttatctctcgcggtttcccctgatgacacccacatcgcagctggtatgactgacggtaccctttccgttcgtcggcgagatcccaaagcttctga

SEQ ID NO: 1096 - DNA, 1114 bp, Cryptococcus neoformans
atggcctgtttttgcagtggtgactctcgacaaaggccgacagctcgatacgcacaaagaactggcgcagaaacacaggcgcgagaaaatactcccgacgcggtgaaagaggtgccacaagcagccccttgcaatttcccgccatttcgcacccaaactccggcaaagtggcgatcgccgcttttcttcccccgaagcgttctctgcccagtcgcaacagtttcccaagtttcacctcatctttctcttctcttcttctcaaccttcaaccaaaaaaacaacccccagggtatcaccttaacagctcgcaagatgtctgcctctcaaatcattagcaagcgcagaaagttcgtcgccgacggtgttttccaggccgagctcaacgacttcttcacccgagagctcgctgaggagggttacgccggctgtgaggtccgtgttacccacgcccgtaccgagatcatcatcagggccacccacacccaggaagtcctcggtgacaagggtcgacgaattagggagctcaaggctttgatcgagaagaggttcaagttccccgagaacgctctcgagctctacgccgagaaggtccagtaccgaggtctctccgccamtgctcaggccgagtccctcaggtacaagctcctcggtggtcttgctatgcgacggtgagtattctgaacagttgttcgtcttttggatgtccgctgatgatatgtgatcagagcttgttacggtgtcctccgattcgtcatggagtctggcgccaagggttgtgaggttgtcgtttccggcaagctccgtgctgctcgtgccaagtctatgaagttcactgagggcttcatggtccactctggtcagcccgctcgtgactttattgactacgccgtccgacacgttctcctccgacagggtgtgctcggtatcaaggtcaagatgtaagctcttcaggcagaatcaggaggggaatgtaggagctgacaagagggacagtatgaagccttccgaccccgccggccgacagggtcccgccaagaacctccccgacgatgtccagatcaccgagtatgtttattattcagtacacagacgtagaaccttgttcttttgctga

SEQ ID NO: 1097 - DNA, 1160 bp, Cryptococcus neoformans
atggtatgtctacggtttgactgacagtccggtacttatgcagtggaacaacagctccgacgacaaaccagagagaggagagaatatatcttcaagaaatcccaagagtctcaggagagagcgatctacgaacggaaacagaagatcaaagacttgttggctcaggggaaacctctccctacagaattgcggaatgaggtgagagagcttggagggaaggatttagtgcttgatgaagctcagcaaggtgagtggaatgtgtcgaaataggcctcgtggtatagagggtggacaagggcattgtgaagatttgaggctgtctcgaggcataattttgattgacggtgctgataacgatggtcttgcagatcctcgatctcacatcgacgacgaatatgctaaagtcggcacgtacgaccctaaaattgtcattacaacctctcgttccccctcttctcgtcttcttcagttctccaaagtaagttctcgcagtgtttcagctggttttacgtacacttgctaaaagtgttttaggaactccgactggttttccccaactcctaccgtctcaacagaggtaacaccgtcgtcaaagacctcgtctccgcatgtaatgctcaaggtgtaacagacctcgtcgtcgtccatgaacatcgtggtgtccccgacgctctcattgtctcccatctcccccatggtcctactctctccatgacgcttcacaacgttacccttcgacatgatgtcagctccaactcaagtacagtgtcagagcagtaccctcatctgatctttgatggcttctctacaaagttaggtgaaagagtgaccgggatcttgaaggcgctgtttccggtgcctaaggacgatgcgaagagggtgatgactttcaagaacgaaaacgattttatttctttcaggcaccatgtatttgccaatactggtcacaaggatgttcagcttgcagaggttggtcctcggtttgaagctaagcgtgagtcctgccttaaagtccattttaagacgatataagctgatgattcatttgcagcgtttgaaattcgtcagggcactgtcgatcaaaccgaggcagatgttgagtggctccttcgaccttacttgcgtacagcgaagaaacgcaaccaattctaaatgtttga

SEQ ID NO: 1098 - DNA, 1146 bp, Cryptococcus neoformans
atgcagcccggcccttcgaaggatatcttgcggttcaccggccacaggcaccttcggcagcgcattcttctttccatcctttccggcaaatctatgcggattgatggtatacgctcagatgatgtccacgtcggtctcagagactatgaagtcaaccttctaagactggtagagaaggtcactaatggaagcacgattgagatatctgtcacaggtaaggccacattattagtctttcgctgacccttaggkacttctttcattcttcatcctggattactacctgggggtagtttcaatcacagctgccacattggtcggtcaataggatattaccttgaagtactgctcccccttgctcctttttgtaagaagccgttcaacatcacactgtatggcgtcactggtgaagagggacgtgacatgactgtaagttctaagggcttatagaagtgctgatatagataaggttgatatgattcggactgtcacacttccacatttacatctttttggaatttcagacggactcgaactacagattaaaaagagaggatccgctccccttggcggtggccagatttttttcaaatgccctgtcgtccggcagytgaatacyttacatttcgttgataaaggcaaaatcaaaaagattcgaggagtctcgtaagtctgccttccttgtacctttttctaacgatgcagttactccactcgtgtttctccacaatttgcaaatcgcatggtggaatctgcacgatcagtgttgaacagatatgttcccgacgtrtatctctacacagatgtttataaaggagatgactccggaaagtgagttctccatttcatgtacatgagcttatcaacagatctcctggctatggcttaaccctggttacgcaaagtacaacttctgctgtacatgctgcagaatctctctcagttgcaggagaagttacaactcctgaagatgttgctttatttgccagccgtcttcttttagaagaacttagccgtgggggttgcatcgatagcaaacaccagtggctcgtggcgctgctcatggccctcgggaaagaagatgtcagcaagtgcctgttcggtagtttgacaccgtatacgtatgtgaactttagaaactattga

SEQ ID NO: 1099 - DNA, 1314 bp, Cryptococcus neoformans
atgccctccccggccgtagaccttctcaagcaaaagacagcaagcctgccgaatgcccctatcagcgtcgtcgctgccaacaccgtgaagtatcttcctgaacagtagtgctttttcgtactaaaagtgtctcctctagtttgtccctcctactcagcctgtgacggctggaaaccagctgcctacctctgtccctctccctgtcctgcctgcagttgaagctgccaaacgtttggcagcatatgccgctgtggaccgacacatcgcacacgagcacaaggtaagtcatttttgtgtttactctgcaaccggcagttacttgactgcgcacaacaacaggtcattggtatcggatcaggatccactgtcccctacgtcgtggacagaatacttgctcaagggtttgaagccaataaagaccgggttttccttcctaccggcttccagtccaaagagcttatcgttaaagctggcttgactttgggcgacgtggatcaatatgctcgaatcgacgtgaccattgacggtgccgatgagtgagctacttttcaattgctttgaagcaaggtgatcgtgcaggatgaatgcacgattgagcaagtcgacattgatttgctgacttttgtacagggtcgacaacgagctcaactccatcaagggcggcggcgcttgtcagcttcgtgaaaaggtcctcgcagaggctgctgatacgtggatcatcgtggccgactaccgcaagaactctgaagttctcggcacatctgttcgtgcattcctctcttgtctcgaagaccaaactaacgccatgtcacttttctccctttgatatttattcattcgttttccgatgacccctattgaattgattgcctccccgtaaaagtggactaaaggaattcccatcgaagtcgtcccctttgcgtacgccaaagtcctcaccaacctcgcccacatgggctccccacatgttcttcccaacggtcagcctggtcttagcttgcgtatgggtaagatgaaggctggacctgtggtcagcgataatggaaactttatcattgatgctcccttcgctgaggaattgatgcgacagcctgaagaggtacgtgcttccctttggtctttttttttttcttccttgcctcctggacatacagttgacaagaaacatttccgccttgttgtttcttactttagctgttgcacaagatcaaaatgttgaccggtgtcgtcgaagtcggacttttctgtggcatggccaaggctgcgtactttggtaacgaggtgcgtcatttttttacgtacatcaaacagtag

SEQ ID NO: 1100 - DNA, 1120 bp, Cryptococcus neoformans
atgtccatgctaaggaccatgtgagtacatcctcaagaagcagtatcgtcaaagagcatgctaactttcgtttaccatcagcaagcctaaaaacgctcgtgtcaagcgtgctttggagaagagagagcctcagattgtagaaaatgacaagacagctatctttgtccgcggtcaaaactcaagtgacaaagttcgaaatgtcatgaaggatcttgtaagtgttttcctacttgtcgatatcttcgcttttcattgattgtctgttccattgcagtactctctcaagagacctcatgccatcaacttttcccgaaagaacgacatccatccctttgacgacgcctcctctcttgagttttttgccggaaaaaatgatgcgagtctgtttgtaactggccttcacagcaagaagcgcccgcacaacctggtgttctctcgaatgttcgacggtcgtgtgttggatcaaattgagcttggtgttgaagggttcaaggccatgtctgaatttcctgtaagtgtctttacagttcgtcgcatttcaacgctcacaacgtttgctgcagactcttaaatcttctctcggtgtgaaaccaatgatggtcttccattctgacctattcgacacccaccccacctatcagcagctcaaatctcagctccttgacttgtataacggtcaccccatcaccgaagcgccattgcttaccactttggaacatgtcatctctattactgctggacccgtgtctgacacgactcctcttcctcaagttcacttccgggtctacactgttaagctcatcccttctggtactcgtgtgccccgaatccagcttacggagatgggtccttcaatcgactttgttgtcagaagactccaagaacctgatgaagaaatgatgaaagcagctcttaagaggcccaagattgccaagagcgatgttgagaagggtctgggaaagaagaggaagaatatcgagactgacgaaatgggagataaggttggcagaatacacataggcaagcaggatctggcaaagatgcagggtagaaagatgaaggggctgaaggtcagggatgggaagaagaggaagacatctggggccgacggcatggatga

SEQ ID NO: 1101 - DNA, 1323 bp, Cryptococcus neoformans
atgaataggccgccaatacccttggttagtagctctttacacctgtttctcattctctgcgaatcatgaacctatcggcatcttgacccattaaaacacactctggatcgacaaattgagtattttatactgacgttctctccaacagagcaccgtgtctacatcgagcaggaaggcaaaatcgtctcccccttccagtacgttcttttcccctttttccctcctttctgtgcactagccaagtccaacgagttgattctggggtaactagcgacattcctctctttgccgacgagtccaagactatcctcaacagtacgtctcgttcatttatttttaggtaaatcattaacctcttgactctcaatctgtagtggttgtcgaggttccccgatggaccaacgccaagatggagatctccaaggaggagactttcaaccccatcaagcaggacattaagaagggcaagctccgatacgtccgcaactgtttcccccaccacggtacgtcggtttttttttcttttgtcgtcttgccatcgactggttacgctgactgttgcacgaaccgatgcaggttacatctggaactacggtgccttcccccagacttgggaggacccgaacgtcaagcacgccgagaccggggccaacggtgacaacgaccctctcgacgtctgtgagatcggcgaagccgtcgcgtacactggccaagtcaagcaggtcaaggtgctcggtatcatggcgctcctcgacgaaggcgagactgactggaaagtcctcgtcgtcgacgtcaacgacccgcttgctcctcgtctgaacgatatcgaggatgtggagcgacacctccccggactgatccgtgcgaccaacgagtggttcaggatctacaaaatccctgacggcaagcccgagaacgtcttcgcgttctctggtgaggccaagagcaagaagtatgcggtggagattattcacgagtgccatgaggcttggaggaagcttgtgcacggtgagactgccgccagcactgacgcttacaacttggccatgtaagttccaacccccctttctggtccgagtgctaatccgaaccacgataaaatagcaccaacaccaccgtcaagggttccaaggggttcgtctccaccaatgacgcggcttacgcctctgtccccgccgactctcgcaagcccgctggccccatagacccttccagtacgtccatcctttcttttaagactgaaaacccgaacacgcatacgaatgcgagctaactcgtttaatagtcgacaagagcttcttcatctcctccgcctctgcttaa

SEQ ID NO: 1102 - DNA, 1264 bp, Cryptococcus neoformans
atgttttactctgtcaacaatattgcagggatatgctcactacgatgtttagcctggtcgccctccacttcgtccgagaatatggaagctcttgctcaaagtggacaacctccaggcagaagattatctacgctgggtgtccatgggcccttcttctgatagccacaaaagtcagtctatactcgttttcaagctattatgtccacgatacaggagcggttgaccattcagacagtcaaaaacgatacattccggacactggcgacagatactcaattcaagggcaaagtcaaagaggacatgttgattaggttgttggaagcttttgtctggaagattacctgcacgcatgcttacacctgcacattgaagaaggtgctgattggaactgtagccgcggagacagaagatgaatcccagccattcaaatacgtacaagggatgaacgtcctctctgctcctttcctgttcaccatgccctctcagctcgaggcttttcaatgtttctcaacattcatcgaggacggttgtccactctatgtacaaccatctttgaaaggtgtccacaaaggtcttactgtacgttactatatctgctcctagtaggtataaagcgaaagatttgtgagctgattaaaaagtagctgttggataagtgtttagaggtagttgacccagagctatatgatagattagcgagcaagaacctcaaagcagagatttatgctttcccatgtacgtcctctcttatgtcttttacaagctatgactatcagcgactgaccactatcatctttttagctgtcatgacactctgcgcctgtacgccgcccttggaagaagtccttcgcctatgggagtacgtcccttttatatccttctcctcatctcaaatcccaactttttaaatacgtatctatgctgatggcttattcgggattcagtttcctcttggcatttggcttgcatctcaacatactctgtgttatcgcccaattattgcttatacgtcaagacttgatggatacgccctcgtacgtctctcaccacttcacttatttcctcctcttcatgccaaatatgcggcgttactcagttaacgaatgatgaaataatcaaccagaccgatgaaaatccttcgaacatttcccccgctagaggcacggcccgtcatcggcgtgaccgttgccctcgtgaaagatatcccggaggagctgtaccgagaactagtagctcatcctttctcctgttaaatgggagctaa

SEQ ID NO: 1103 - DNA, 1200 bp, Cryptococcus neoformans
atgcctaaggccacttcccagactttcagagctcagcctgcatccgccgctcaacgacctaagaaaggcggcgagtcctctgccgccgcggccgctggaggaggtgcacgaaaccatcttttcgacactgctaagttcggccaacacattttgaccaatcctctcgtcgctcaagggtaagtctagtcctgtatatattgggatttatattggaagcgaaggcttatttttccttagcattgttgataaggcaaacctcaagcctacggatgtcgtcctcgaggttggtcccggtaccggtaatttgactgttaggatattgccggcgtgcaggaaggttgtagctgtggaaatggaccctcgaatggcggctgaagtacagaagcgtgttcttggaaagtgagcatcccgttttcgtcgcgcatctgagagctccggctaatgtcgtgtcaaaggccagagcaaaagaagctcgagttgatagttggtgattttgttaaggccgacttgccatactttgatgtcctcatctccaacactccttatcaggtatacctacatcccttctcaaatcttcacttaatataagctcacttcacactgtagatttcttcacctctcgtcttcaagctcctttcccaacgtcccatcccacgttgtgccgttctcatgttccagcgtgaattcgcccttcgtctggttgccacaccgaacaccaagctatggggtcgtctcgctgccaatgtgcaactctacgcccgagtcgaacacgtcatgaaagtcggtaaaggtaacttccgaccgccacctcaagtcgaatcttctgttgtgaggattatgccaagagatcctcctccgcctgtcaaatttgaggagtttgacgggttgaatagaatcattttcagtagggcgaataagaccttgcgggctggattcaaggcaaagggtgtggttgaattattggagaagaattacaggacctggtgtgcggagcagggagcggtgagtatcaaaaagatggtttatttggtctcacgcttttgctaataacatgtactttacttatagatcattgaagataatttcgacatccgggagaaggttgaatccatcttagtcgaaactggtttcgcggacagccgagcggcgaagatggacgtcgacgaccttttgaagtacgttttgcgttccctcatttga

SEQ ID NO: 1104 - DNA, 1252 bp, Cryptococcus neoformans
atgcaaccctcttatgctcaagaccttggtaccggcactattgatgtaagcttctcacatctcgcgcgttctacgccatactcaccacgctcacagcacggatgctatggctccatgatgaacgtgcttggtgaatgcatcggtgctttgggtatgatcccttgctgcccttgccccaacccgttcaacaacatctctcagggtgccgtcggtttggtctcccggtttggtcagttctacaaggtgagttacgtcccattgtaaccagtccaatgcttatttcggctgcagtctgtcgatccaggtttggtcaaggtcaatgtctgcactgaggatgtcagagttgttggtgagtaaaccagtttagggctagtttgaggcagaagtgatggcaagctgacaactctttcagatgttaagatccaactcacttccgttccccgtcagaccgtccaaactaaagacaatgtttctgttgaagttgacagcgtaatctgctggcacggtaagttgggtctcgatcgcccaatatcatcgctgcttgacgtgtaaactgacctggttgctgtagtcatctccccttaccgagccgcatttggaatcaacgacgtgaggtctgctttggtggagcgtgcccgtaagtgaaatgcgaggaaattgaattgtatctgactttctcatgcagaaactacccttcgtcaggtagtcggtggaagagtatgtttttatatattctgttattttatttgccagtcaatcggcgctgacgtcctgttttaggtccttcaaagtgtaatctccgaccgggagggtcttgctcatgaagttgccgagatcgtaggtattctcctcccgtaacctcgttcagatgctcatttcttattcagatcgaagctaccgccgagaagtggggtgtcgccatcgaatctatccttctcaaggacatcaatttctccgtcgaattgcagcaatctctttctagtgctgccactcagaagaggattggtgaatccaaggttatcgctgccagagccgaggttgatgccgccaagttgatgaggcaagctgccgacgtgagtacccgaagctgtggtaaacatcgctgacttgtgattcaatagattcttgcatcgccagctgctatgcagatccgtcaactcgaagctctccagaacatggctcgatcatctggcagcaaggttgtctttggtatgttattctgatctcgtctcatgatatttgcaattgctga

SEQ ID NO: 1105 - DNA, 1151 bp, Cryptococcus neoformans
atgatgggcctaatcctgttgtccccatcatgtattccgaagaatgtaagagttcttgctggccattattttagcagtagcagactgacacaatatcttttagacaaagatgcaatggattatttccgtgctatcgccgcgaaggaggaaaagtctgaacgtgctctagaactgacagaggtcattgtcagaatgaatccagcacattatactgtttggtaattgcctgagcaccgttttcctaaattgcactgacatggtatatgcaggcaataccgtttctctttgttaacgtctctgaacaagtctctcgaggacgaacttcgactcatgaacgagttcgctgtccagaaccttaaaagctatcaagtctggtgggttggccgcggaccaatgctctcgatgaaattaaaacattaacgtcgttaatgataggcatcatcgtcttctccttttagatcgcatttcccctcaagatcccgtctctgagattgagtatattcatgagtcccttctgcctgatcccaaaaattaccacacctgggcatatctccattggctatattctcatttttcgatccttggtcgtatatctgaagcccagtgggaatctgagcttgattggtgtaacgaaatgttaagggttgatggtaggaacaacagtgcttggggatggcgatggtatctaagggtgtctagacctggagctgaaacctccagccacaacctacaggacgagcttatgtgagtcattcatgttagcaggttcaaaggttgacattgtgacgaagttatatcttgaagtcaattcacttcattccccacaacgtatctgcatggaattatctccggggttttctcaagcacttctcattgccacttacgcccattcttccagctattttaccatacaccgcctccaagccgaacaccgatatggaaactgtcggcacatttcattttcctgtgccttcggatccactgcccgaggatactccgttgcctgtccctctggctctcgaatatctcgcagactctttcatcgaacaaaatagactcgacgacgctgctgaagtgtttgagaagcttagctccaagtatgacaagatgagggccggatactgggaattcagacgaagggaatgtgttga

SEQ ID NO: 1106 - DNA, 1188 bp, Cryptococcus neoformans
atgccacatcactgttccagcgcgacgacgacgatcgcgaccacgtgcgagatctgctcccgaactactagcgcgcagtccagccagaacctaaatccacccttccgacccaacgccgtttgcttttccatcgcttccccttttacccataactcacaaccacccccacaaaatatgtccgcccctcagcccgcctctgccaccatcttcccccccggcgtcacccccttcgcccagcgaaggctccccaagaccatctgcatgtttgacgtcgatggcaccctttctctcgcccgtcagagcgcgacccccgagatgtttgctaccctccgcaaactccgtgagagctgcgccatcgcctttgtgggtggctccgacctcaccaagatcctggagcaggtcggcggggaccaagggctgagcaattttgactatgggtttgcagagaatgggttgatcgcgtacaagttgggccagcagctcgagtcggcgagttttatcaagcatgtaggagaggaggagtataagaagcttgtcaattggattttgaggtatctctccgaagtggacattcccatcaagcggtgagtcttttttcctgtcgttctatacatgtctgttcccacgatagatgctaatgaggcacgggcacagaggcacgtttgtcgaatttcgaaacggtatgatcaacgtctcccctatcggcagaaacgcatccatccaggagcgaatcgattttgaaaagtatgacaaggagcatggtattcggggagacatggtcgccaagctcgagcgagagtttttgcatcttggattgacttttgcgattggcggtcagattagttttgacattttccccaagggtagggttgcttttgtatttaaaggaaggctttgtgattgctaaacgttttcgatttaggctgggacaagacatattcgcttaggcatatcgagggtgaaggctttgaagagattcactttttcggcgacaaggcgagtcaccttctaaccccagccctgtaattcccacaccttttatactaacatatcgtgtatgaacagacctacaagggcggtaatgattatgagatcttttccgacccccgaactatcggccacaccgtcaccagccccgagcatactatgcagctcctcgacgagttgtttttgacgactgctccttga

SEQ ID NO: 1107 - DNA, 1113 bp, Cryptococcus neoformans
atgctttgctttcttgcttacatacctctcttgtatcatacaggtctagaaaacctccccggtgaagtcaccttcttgcttgaagagatccgtgagaaagatgttcgtataagccgtgagttgtttatctctcaacgtcatttctccgctgaacaaagtttagaatatgtacaacgtataaactcccgacacatgtcattgacaaagactgccaagaccctcgcatctcttcctccttcaaatgcgacttttcccttgcctatacctcctggggcattattgccgagtagtcatctgtcccaaaaagaagcgcaatcgcttgctaaaatacaaaatgaatgggctcaggttctcactctgcaagatgagaaagtgaagcttgctgaacgacttgagcgaatagtcttacgtgcaaaagaacgggcaaagcatcaatgggtcaaggtcggtggtatggaaattgaagaggtagaaaagtggagtggaacgggagaactgggcaatggtgaggttgtccttccacccggtggattgggcagtggaatagatggccgaccggccaagaaacgtaaaccgaatattccgtcactatctgtgaaccacacgaaacaggcaatacatcccagcatctcgatgccccctcccccgcccccctcaagaccatcattatccgcgagatcatcacattccaacgtcccttccacttctcacactcacacgtcttcccttgggcagcatggttctcgttccagacgagtgtcagttgcttccgacgaggatgcggacggggagcctgatgaaggagatacggatatggttgatgcggccgatgcggaaggagagacggatgaaactctctattgtatctgtcgacagaagagctatggcgaaatgattgggtgtgactgcgacaagtgcccgtatgaatgggtaggttgtattttcaagaccgttcgcctgatggaattattatgtttgctaatgttgaaatagtttcacgtcaaatgtgtcaacatcagtggaccattgccagacacatggtactgtcccgactgtgtcgccaggtatggtttctcaaatgacaagggcaacaaaaaagcacgcaaaaagtaa

SEQ ID NO: 1108 - DNA, 1106 bp, Cryptococcus neoformans
  misc_feature (244)..(244): n=g, a, t or c
atgatagctacacaaagaccatttcctatcccatcccctgtccctctcgcaccatcatctaccgtcctgccgaccacagtaccggaaaatgcgcctgaacattgccccgtacgttcgttaagtcccatttcctagacgccgctgatgtctattttctaccgcagggggttgaatcttcgcaggctggtaaggcagatgcttgtgaaggctgtcccaaccaatctgtctgtgcagaaggacccanagggcctgaccctgatttgccacttatccgagagcggatgagctctgtaagacggaaaatattggtgctttcagggaaaggtggcgtggggaaaagcacatttactgcaggtttgtcttgggcccttgcagcggatgaagagtgccaagtgagaattctctattacttcgacaggtccatggctgatacgacactaggcgggaataatggacattgacatctgtgggccatcgatccctttgcttatgggattagaatcttcaaccatccacacctcggcctctggatggtctcccgcttatgcacttgacaacttagctgtcatgtcgatcgggtttttacttccttcctcgtctgatgccgtcatctggcgtgggccgaaaaaaaatgggcttattaagcaattcctgaaggatgttgagtggggtgatttagactacatggttgttgacacgccccctggaacaagcgacgaacatctgtcgattgtgcagtacttgaaggaggcaggtatcgatggcgctgtacttgtaacgacaccgcaagaagtggcactgcaagatgtgagaaaggaaattgatttctgcaagaaagtcgggattcccattctgggactggtggagaatatgtctggttttgtttgtcccaattgcaagaatgagagccaaatatttgcccccacgacgggtggggcggaggcgatgggcaaagagctcggaatagaattactgggaaaagtgccactggaccctagaattgggatgacttgtgaccaagggatgagctttttggatgaatatccagagagtccagccactatggcttatttagacattgtgcaaagaataagagagattcttga

SEQ ID NO: 1109 - DNA, 1159 bp, Cryptococcus neoformans
atgctggaggactatcgacggaaactgactgtgagaattagttctctaggtaccaggttaagccccgaaggaggagacagggtaagaccgactaccaggcgaggaggggtctcgtctcccaggccaagaacaagtacgcttcccccaaggtgcgtttttttttcaagtgctaggagaggcaaggccaatagattgacaatttctacagtacaggcttgtcgttcgtatcaccaacaagcaggtgatctgccagatcgtctacgccaagctccaggtatgttacttcgaatcttgtaaggaaagggtttatgattcatgtctaatgcccgcctagggtgacgttgtcttcgcccacgctacctccaaggagctcccccgatacggcatcaagcacggtctcaccaactggaccgcctgttacgctaccggtctcctcgttgcccgacgagctctcaccaagcttggccttgccgacaagtacgagggtgttgttgagcccactggtgagctccagctcattgagcccctcggtgacgacgagccccgtcccttcaagtgctacctcgatgtcggtctccgacgcacttccactggtgcccgtgtcttcggtgccatgaagggtgcctctgacggtggtatcttcatcccccacagcgagaagcgattccctggttacgaccccgagtccaaggagctcgacgccgaggtccttcagaagtacattgtcggtggccacgttgccgagtacatggagtctcttgaggaggaagacgacgagcggtaagtattttgttttgtttttgtgatcaatatctgatgaaccccacagattcaagaagcagttctcttcttaccttgccgacggtgttggatctgacgacattgaggagatgtacactaacgcctacgaggctatccgtgaagaccccaccttcaagcccaccgagaaggacgtcgccaagtggaaggccgagtctctcaagtacaagactttcaagctcaccaaggagcagaagcaggagcgtgtccaggccaagattgccgcttacaaggctggcaagctcgatgtcgaggaggacgaggagtaatctcatggcgtctgaagggtttatgcattcaggcatttgggataacccgttattatggacaaatgttgtaa

SEQ ID NO: 1110 - DNA, 1164 bp, Cryptococcus neoformans
atggctgagcgaggtggtttcggacgtggtcgtggcggtgccggtggccgaggcaggaggggtccccgacgaggcggtaagaaggaggaggacaaggaatggtcagttgcaacgcgtcatttggatggatgagccaaagggatggaagggctaaaacgaaacgtagggtccccgttaccaagctcggtcgattggtgaaggacggcaagatcaagtccatggaggagatctacctcttctctctccccgtcaaggagttccagatcattgaccttttccttcctgccctcaaggacgaggttatgaagatcatgcccgtccagaagcagacttctgccggtcagaggaccaggttcaaggctttcgttgccgttggtgactttgacggtcacgttggtctcggtatcaagtgcgccaaggaggttgctaccgccatccgaggtgccatcatttctgccaagctctccatcgttcccgtccgaaggggttactggggttctcacattgctgagcctcacaccgttccctgcaaggtctctggcaagagcggttccgttatgtgccgattgatccctgcccgtacgtactcgtctatgagctcgatgcccttggtaaattggctgacatttttgttagcccgaggtaccggtatcgttgccgcccctgcttccaagcgaatgctccagatggctggtatccaggactgttacagtgcgttgtatccctctcccagcctgtacttttcgctaacgatcccatagcccagtctaagggttgcactgccacccagggtaacttcttgaaggctaccatggctgccctcgccaagacctaccagttccagtcccccgacctctggaacgttatcgctcctggtcttactccttacgacgagcactcttcctggttggctatcgccgccaagaaggccgccaactactaaattgttgttggaatttagggttttatctagcgggatgcgatttggtcctttgctgcgtctttgaggatttcagtttctttcgtcttgttgtgccggtgcagttgcagaagtgtgattctaaggcatttaagtggaaatgcgcatacgaatgttcataccgaaaccgaacgtcgggtattgaacatggccgtatcgaacgctccttcctcttccgttactaa

SEQ ID NO: 1111 - DNA, 1112 bp, Cryptococcus neoformans
  misc_feature (1037)..(1037): n=g, a, t or c
atgctcaaggacattgtagaacgaacatcttcccctgcagaggctccgaaagccccggcacctagctctaccggcttccccgtcgccgttcatcgctctcagcgaccatctgcgtttgcacgagcccgaagggcacaacaagctttgaaagaagaaggaaagcaggagataggctatggaaaggctgtagataccgtcccaactgtacaggctgcaggaccttcatctgcttcaagcatgacagaatgggaagaggtaaagagacaagtgcaaggagataattcaaagagagtacagaatatgagtcagcaagagcgagaacaggagatcgaggaacttagggagagactaggcgacaagactttggatcttttgaggaaaagggctgaggctcgtcagtcaaagcgcaatcttctagatgtccccaaaagcgaactgtcatctatcgacttggagcagcctttcaatgcaaataacacacagaagattttgcaggatgtctcagaggagaatacaaggcgggtcgacttaatgagcttcgaagaaagggagcaagagacggaggagctaagggaaaggtttggagataagatcatggaagctttgagaagaagggccgaggtaaagttaacagaagggaagagcaacgtcgtggaacgctcagtgaagcccgatgtccctgcttcatcgagtacgtctgtttatatcatataattctctttgaaagcttaacctgtggcaggtatattatcgaactcccaggacgacgacacgaacctcgacattcttaaagccaaatacttccctacccttccctcagagccatcgaaacttgagtggctgcaacccatatctgcgccttcaagcgacaagtcgattaggtttgacctttctggaaaagtactttctgccaaagatacagcatctcttcccacccatctgggcttacatcatcatggagaatcacccgacttagctggctatactttccaggatatattatatctctgtcgatcaacagtaccgagtcagcgtanaaccatgatgggtgtactcagccggatcctaggaagattacacaatggggaattggaccaagctgtccagactga

SEQ ID NO: 1112 - DNA, 1336 bp, Cryptococcus neoformans
atgaggaagaaggaagccagagaagtcaagcccgaatatcaccccgagtgtgagagcccttatcttctctttttcttttttagaagcactcatctgacaacttgacagggaagcttacacgagttatttctggccatatgggatgggtgcgcgccgttgcaatggatccaggaagtcaatggtttgccaccggtgctggtgatcgtgttatcaaggtacgtcgatcattaatacatctcctatattggtacctaatcctggctggaagatatgggatcttgcttcgggagaactcaaactgtcattaactggacatatctctaccatccgagggttagcagtatcagatcgtcacccgtatttgttttcttgcgcggaagacaagatggtcaagtgctgggatcttgagaccaacaaggtcatccggcactatcatggtcacttttccggcgtctattccctttcgtaagcttcaaattttactctctcaaacaaatgattaattttatttcctcatagagtccatcctacgttagacgtactagtcaccggtggtcgagatgcgagcgttagagtgagtgcttgtagtctcgtcttttggccatggctaaagcatcattccaggtatgggacatgcgtacgcgagccaacatcttcacactcactggccatacgagtactgtgggcgatgtcaagactcaggactctgatccgcaaatcatatccggtagtatggatagcaccgttaggttcgtttattctttaaaaaccctctcctcttgctgtttcactgagtacatgctacaggctatgggatcttgcggctggcaaatgcatgaacactctcactcaccacaagaagtctgttcgtgcccttgcgatccatccgacggagtacagctttgctagtgctagctcaggtggcaacaatatcaaaaaatggaaatgcccagagggcatctttgtcaacaactttgtcggtcatgaggccatcatcaatacactgagtatcaactcggagaatgtcttgttttctggaggtaagttatgttttttaccatgggggccgtctcttgactattatcagcggacaacggtactctcacattatgggattacaagactggtttgcctttccaacacctcaaggatattccccaacctggttcactcgatgccgaagcggtgagcccttcagatattctgactcctgctcttgtgcttatctgttctacgtttttagggagtgttctgttctacatttgacaaaacgggcacgcgtctcattacaggtggagcagataagacaatcaaggtgtattccgagcaggcatag

SEQ ID NO: 1113 - DNA, 1394 bp, Cryptococcus neoformans
atgaaacgtattcatcagtggaacaccatcacaagctatataaaatataccaggtacagcatacgcctcttttcctccttcagcctgcttacaatttcctcaggtaaacgttacaagtctactatcagtaccacccctgctcatcccgactttcgcagctcctcttcctcatgtctcttcgcatcctcaccggctcgcaagttgacagcatattagctagactcccactcgacccagcattagagtcccaagccaatgtcttccgagctctcacccgtcaagcgaaaggcgtgaccaacattcaacaaggtgcagcctcaattcaacgcctcacaggctgacggttaactcggacaagttttccatgcttttcatgctttctcgagcgcctactggggcctctggacagactggagggggtgggaaggagcaaaccacaacagcatgtaaaatcgtctctgtgccatccggtagctctgccgaaggtctcccagcaagtaccatcatcatggacgaggtatccggaaaagccaaagccctcatcaatgctcgaaagctaactgccttgcgcaatgcatgtggtgggtatatattacacgtaaccaagcatgttcacgattgtcagccgctgatacttgcatttctaggctcagctgtattcttgtccctctttccagccgtaacgacaaaacatcttcttctttttggctccggagctcaatgtgtatcccacgcacttctttttcttcgtcttcatcccttttcycaagtgacatttgtcgtccgctcaataaaycaaagatcccaatcctcagcctctgcgatccaatcgcaattcccagcagccagagtctctctctcagtacattcctctccttccgatgagctgtctcagctggtggcgacggccgatgtcatagtcaccgcgacttcctcccttacaccactcttcgactcctcacctacttgtcccaagcctggtgctagggtgattatgatcgggtcgtacaagccggagatgcacgaggtagatcaggctttgatgaagcgggcagccaaagtcgtcgttgattccagaaaagcttgcgagagagaagctggtgagattatcgatgctggaattaaggtagctggaggagctggattagtcgaattgggcgaattattagaagaggccggcttgccaggtgctgtcaaagacagcggagatacctttgaaaaagaggtcatcatcttcaaatcagtgggtaataatcaatactgcatattatgatatattaaatgccaatctcttataggttggtcttggtattcaagatgtcgccatctcaaaagttgtattggagcaagccgaaatcaacaacatcgggacagtcatcgaggattatgattag

SEQ ID NO: 1114 - DNA, 1237 bp, Cryptococcus neoformans
atgtccctagccgccacctcgcagcctcttaataagtccttgcatatcaagtatatccaagatcttgacaaggtgtgtcgccctcgttcggggctaaccattcttacatatcttccccacatacaatgctgatcaactctctcaatgacagaaaaaggacttggcctactatataacctctcatcttcggctcaacgggatctactggggactcactgccttatatatgctagggcagccagaagcgcttgaccgggaaggtgtcattgagtatgtgctgtcctgctgggacgatgagactggtacgttggtcatttcaacaagtcgaagtattatatagctgacatcggtcaggtacctttggaccgcatcctggtcacgatggtcacatcttggccacgctttcgggaatccaggttttgctcatggaagacgctcttgatcgggcggatattgagcgtatcatttcttgtatgttttataacttcttttcatgttggctattcctaagttcatgtgcagtccttctcaaacttgttaatcccgacggctccgtatctggcgacaaatggggagagtcagacactcgtttttcttatattctgctctcctgcctttccctcctcggtcgtctttcaagccttacagacgaacaaatagaaggcatcaccgaaaatattcgaaagtgcatgaacttcgatggaggattcggccttagtccgggcacagagagccattcaggacaagtttgggtctgcacagcagcactaaccatcctggatcgactggacctcgtggaccgagatttgttaggagcgtggttgtcggaaagacagctacctaatggaggtcttaacggaaggccagagaagctcgaggacgtaagtcacaccattctaccaacgagacactgactgattgtcgtaggtatgttattcttggtggtgtctcgcctcattatccataatcggcaaaatccactgggtcaacgcggataaattaattaacttcatattgagcgcccaggtaagagagcccatcatttatttatcaaatgttgacatttataggatcttgatgacggaggcataggagacaggccgggggattgggtcgacgtcttccataccatctttggagttgccggcctctctctcctgggctacccagatctacgagatattgaccctgtctactgcatgcctgcagacttgataagtcgtcttggtttgcgtag

SEQ ID NO: 1115 - DNA, 1286 bp, Cryptococcus neoformans
atgtcagacaccccttcctcagacacccctcccaaacgacgtgctgccgataccaccgccgttcctcctcaaaaatcttccaaaatgtccgcgacagctcctcccttcaatcctactcgccctttaacgaaaaaacctgctgcttcattccacgatatcgcccaggaattcaagcccaaagtcaaaactgaggaagtagaggacgctatggaggtggataaggaagcggagggttctgcgagggttacaaagcctctgcctggtgggaagagaaacgtacagagggcggactttgtacccgtccaggcttctgtgcctaagtctactgaggacaaggagaataccagaagattgattgttgtgctttcacaagtgagatttagggtttcaggatgaatgttttacaactgatcgctaacgacgtgctgtttaggcttgcctcgaagcatacaagatttcgtctggctcggcaggcaagagctctgcaaaagaagcaaagtacgctttattgaactgtgacgaccatcagggaatcttggccaagacaggtagagatattgccgatgctcgacctgacatcacacatcaagtaaggcaattttttgctcattcatcaacatcttgacgcttacacgcatttcagtgccttttgacccttcttgactctcctctcaacaaagccggcctcttgcaggtgtatatccatacggcaaagggtgtattgatcgaggtgaaccctagtgttaggataccgcgaaccttcaagcgtttttctgggttgatgggtgaattctaagcgctctacgctatttcaagaatacagaactaatgcccgtttcacagttcaattgcttcacaaactttccataaggggtgttaacggtagcgagaagcttttgagagttatcaagaaccctatcactgatcaccttcctaccaactgcatcaaacttagtgggtgaaatcaaagtcgacctcgacaaaagctttgctgacgtttgtgatagccctttccgccgatgccccaactgttcgattgtccaagtaccttaatactcttcctgagtcccattctgtctgtgtcttcgttggtgccatggctagagggtcagtttcatgatcggtgccgacagctcagtgttaatctatcttgcagagcggacaactttgcagaccaatttgttgaccaaaaggtctcaatcagcgattacagtctttcggcgtctgtggcatgtgggaagttctgctgtgcgatggtaagctctgctgttacttcatcactttga

SEQ ID NO: 1116 - DNA, 1527 bp, Cryptococcus neoformans
atgcagagtagaaaagtcaaacaggcgagcgcatcgaatccgagcagtgagcagaaggaggagcaacagcaatcacgatggaagcaaatgatgacactttcaacgaactgcgtgagatgcaaaaaaaaacaaaggtggaggtggaatgtcagggcgtccaagtggaggcacggtaggagcgaaatggtcggcgataattcacactggtccaaactccgactatgaatccgcgccacaccccgctgccttttcttgacatcttccatacaaacagcctaatgccgaaatgccggacgcgctcgctctcttgcccaccagccagccggcggattcaccgaaaagactcctcacatcctcccaacttgtttctttcatccatcaagcttcggccttttctccccaaccactttccgataccgaaacttcctcctacaccaaggacggaacaggacaagaaccgactttttaacggaaggattcttcaaaaacccaaccaaaaagattgatcaagatggccgctatccaggctcttcctactgaggtgcagaagattgcgaacgagggaactgtcaagctttttggcaagtgggagtctgaggggtgagtggtatttccatctcatggagaataacaggattggccaaaggggaagcagagcttgagatctttgagcgagagactgagaagcgaggagaatgagcaagctgcacggttgaggaatgggaaggtcgggaatacgcagaatgacgactaacgctgtactgcagtgtcgaggttaaggacatctctctccaggactacatcaacgttaaccacgctgtctacgtccgtgagtaacacatctcgtttttgtgtcaaatgtccaatctgacaaataactggcagcccacactgctggccgatacgccaagaagcagttcgccaagggccgtatgcccattgtcgagcgactcgtcaacgcgtgagttggttttgcaagaatggggatcgaaaggaatgtggctgattgggatctggtattagtctcatgatgaacggccgaaacaacggtaagaagatcatggccgtccgaatcgtccaacacgctttcgagatcatccacctcgtcaccgagcagaaccccatccaggtcctcggtaagttctcggtgtgtgaagtagcttgaggccagtggctaatcgtcattacagttgacgctatcatcaacactggtccccgagaagactctacccgaattggttctcagggtaccgtccgtcgacaggctgtcgacgtttctcctttgaggcgagtcaaccaggctatctctctcttgaccattggtgtaagttatcataccctgtgcttagtcaatccgccgccgccactgacaatttcttccagacccgagagtccgccttccacaactccaagtccgtctccgagtgtctcgccgacgagcttgtcaacgccgccaagggctcttccaactcttacgccattaagaagaaggacgagcttgagcgtgtcgccaagtctaaccgataa

SEQ ID NO: 1117 - DNA, 1235 bp, Cryptococcus neoformans
atggtctcgaagaactgttgttcactcattgtgtatagccaaataaatgtaatgacaggaaatgatagagttgagtccactcgggatcatctccatccacgaccccacaaaggagcgcgtcattggcattacgtaattactctctctcgcactcgcgtcgtccctcacagtcatcatcgtcgctcttgtctgcactttctcattttctttattttgctctatatctgtccaagatggccatctcaaacgtaagcttccacggcggacggaggacaccatatccagcgctgacataacgcagcaccccgccctctggaaacagcccgctccagcaaactctgctttcaacgactacaacacctttcccctcggacaaacgcagcgccacaacacttcttcccaccatggtcccatgtcccacacccaacaacctcttgtcaccggtacttctgttctcggcatcaagtttgacaagggcgtgatgattgcggctgataacctcggttcatacggttctcttgcgaggtttagagatatccagcgtcttcatcctctggggaaacatacccttttgggtgtggcgggcgacatgtctgattatcagtggttgaaaagggagctcgatggactcttgtatgtccatctgtggaaaacggcgtaagatgtgatgctgacagaattatgtagacgagaggaatctgctctctccctgaccgattcccacccatcgctttctccttccaatatttacactcttctctccaatctcttctacgctcgtcgaagcaaagttgaccccatctggaacgccgtcctcgtcggtggttgggacgacaccaaaaaagaaagtttcctcgcatatgtcgatttgcttggtacaacttattctgcgcccacactcgcgacgggctttggagcccatctcgcgcaaccgctattgagggaagcatatgaagcaaaggcggggattgatggcaaggggccattgttgacgcaggaggaggcggagaaattgattgatgattgtatgaaggtgttgttctacagggatgcgagaagtatcaacaaggtcagtttatatctcttatgattgaaaacatttgtctgataagaggaaatagtaccaagtcgctactatcacagatgaaggtgtcaagatcagtgactctagatcagctcctacagaatggaagtttgcagagggtttgagagggtacggggcgcagacccagtag

SEQ ID NO: 1118 - DNA, 1269 bp, Cryptococcus neoformans
atgtcaggcaccgacgcgcgaacatcacagcagtcgacttcatcgtgtccgtcgcgactattgactcgtacggtcaacaatattttacgtctttcattcactatcgagcgtctcctctagccaagtagaccttcaacatagatcataatgacagcaacaatcgacgaccaggaaaagaaccaacgatctaacccggaccacggtgtgtgactaaatgtcgtgctttcttgcattgcgctaacatgtctgtcagaggaatatcagtacctcgatctcattaggcgaatcattaacgtaggagaggttcggccagaccgtaccggtacaggaactgttgctctctttgctcctccttctttccgcttttccctcgccgacaacacccttcctcttctgacgacgaaacgcgtcttccttcgcggtgtcattgccgagcttttgtggttcgtttctggctgtaccgacgccaaaatgctctctagccagggtgtagggatctgggatggtaatggaagcaaagaattcctggagaaggtcggacttggccacagaagggaaggtgatctgggacctgtatacgggttccagtggagacattttggtgccgagtacactgatgccgacggagactacaagggcaaaggagtcgaccaattgcaaagggtaatcgacactatcaagaacaacccaactgacagacggattatcttatcggcttggaacccaaagggtcagtaattttgccaactccctgtgaaattctctgcttaaaatatatagatcttcccctgatggctcttccgccctgccacatgttctgccaattcttcgtctcacttcctcctgctgattcaccgggttccaagccaaaactttcttgcttgatgtatcagaggtcttgtgacttaggccttggtgtcccattcaacattgcgtcttacgcactgctaacccatatgattgccctcattaccgacaccgaaccgcatgagtttattttacaaatgggagatgcgcatgtgtacaggggatcatgttgagccattgaagacgcaactgggaagggagcctagagaattccccaagttaaaatgggctaggagcaaggaagaaattggagacatcgatggtttcaaggttgaggactttgtggttgagggatacaagccatgggggaaaatcgacatgaagatgtctgtaagtacagatatttatcagactatccctgtaactaatgatggcaatgtcaggcttaaatcaagcccctag

SEQ ID NO: 1119 - DNA, 1376 bp, Cryptococcus neoformans
atgtttataaaggtgagtgccataaagtgcatatgtggctagcttatcgttgacactcactcgtttacaggcacagagaaagcgactggcagaaaaggtgatcgtgatgccttatatgcctcacagcttgaactaacaataattaagttgctatcaagaagattaaagtaggagaaatgaaacatggactagatatgacagctttacgagaagtgaaatttcttcaagagttaaaacacccaaatattatctctgtacgtttgaacatggtcaacatgattatggcacgatatacatgaccatgctcatccgacccagttactagacgttttctcagtcaagcaaaacatcaatctggtgctggaattccttgatacagatttggaagcggttatccgggacaaggccctgattttccaaaatgcggatatcaaaagctggatggcaatgtccttaaggggattggaatacattcataggaatggagtgcttcaccgggtgagttatggatcactgtcattttgggaccacttcgccagttgttgactcgcggaatcaggatttgaagccgaacaacttattgatcgccgctaacggtgaactcaaaattgcggatttcggtcttgctagagaatttggagacgccggaaacaaaatgacctgtcaggttatcacccggtatgttttctttgatagttatttcttgatactatctaacgtggccccagatggtaccgtcctccagagctcctctttggttctcggtactactctcctacagtcgatatatggtcgatgggaactatttttgttgagctcattctacgagtgccgttccttgctggcgagaccgacatagatcaattaaagaagactttccatgccatggggacacctaccgagcaggattggcctgtgagtctacctctgtctatcactttcctatcagttaaacactttccgtagggatatacaaaacttcccgactaccatgaagttggatcattccctaaaaatccttggtggaacatgatatcatccataggaagagaaggccaagatcttgctcgagaacttttgagatttgatccagcccagagaccttctgcgaagaaagtgagttttgcttgtatgttggcacatggaggctaacggagatcaaggcacttttacattcatttttcacttcctatccaccacccacaccaccaatcgctcttcctaaacctttggctgaattgagaccccgagagctggcaccagatgaaactcaagggaaaccgttgttgacctctggagccggtcaaagtttgaaacgtaaagccgaatcgcctcgcacaagtcaaagtgtcccaagaaaacttatcttcacatag

SEQ ID NO: 1120 - DNA, 1275 bp, Cryptococcus neoformans
atgtgcttatggcccctcatacagtccgctcaagcatcaaaacccgttcctgtggagactcagcatgaggacatgatcgttagtctagcctgtgccatgccttatatcctgtttctgaccaattactctcatcagcacgatgcacagcttgactattatggaaagcgacttgccacatgctcctctgacaggactatccgaatttttaacgttatcaagggagaagcaaagggtgaacctgtgatccttaaagggtatattgtgttgatttccctctggcttggtatgctgatgaattattgccataggcacaccgccgccgtctggcaagtctcatgggcccacccttccttcgggtcaatacttgcatcttgttcttacgacgggagggttttcatctggaaggaagttggacaggggcaaggcaagggaagcggtggagagctgcaagacggctgggagagaatcaaggaacacacattgcataccgcgagcggtaagtccaaactgacggaggataggctaattctgtagtaaactcgatcgcttgggctccttatgacttgggaccaattcttgcttgtgcttctagcgatggcaaggtctccgttctcagcttccaaagtatatcagttcccgcagcagttgagtcttatcgctaattaccctcaaagacgatggatctatagaggtcaacatcttccctgcccacggcaccggtgccaacgccatctcctgggctcccagcgtcctctctaccgtttcaggcgtaagccgctcccaacagccatccaactctctcgctcctcaaaagcgatttgttaccgccggctctgacaacctcatccgaatctggggatttgatgaagagcagaaaaaatggaccgaagaggagaccatcaagggtcacgaagactgggtcagggatgtcgcttgggcgccgaacattggtttgccggggatgtacatcgcgtctgcttctcaggtaattaattattctgaatgtggagaatatttggtcactcacgcaactttactcaggaccgaaccgtgcttatccactcccgcccatccccctcctcttcctggacatccgctcctctcctccccagccttccccaatctcaggaccctcatttccccgatgccgtctggcgtgttagctggtcactcgccggaaacgttctcgccgtcagctgcggtgatggtaaggtcagcttgtggaaggaaggtgttggaaagggatgggagtgcgtcagtgatttctcgagctag

SEQ ID NO: 1121 - DNA, 1348 bp, Cryptococcus neoformans
atgcgtgcgaagtcagacggatacggaacctcctcgccgcgtggaagtggacgggatcaaatcctccgcccagcagccaacgcgcgtccatctgcatggtaccatatccttttatcacctatacaactctcctcgtcacatataatcatacacatcacaatggcaaagctcgcagagaccccttccgtcggctttgacttctcaaactatgccagaaatcagttcttgggccagcgcctccagggcattccgaagggtaacactttctaactcctttcgtcattcacgctgaccagccattccccagcgacctccactggtacaaccatcgtcggtgtcatttacggtggagggagctcaggagaggagccaggcgtctgtcttggtgctgatacacgagccaccggtggacctatcgtcgcagacaaaaattgtgaaaaggtgggctgaattcatggtctgcactaggtggcagcctgttctgatgcaaggcatttgactcacaagttcattagatccattacttagcccctcacatcagatgctgtggtgctggtactgctgccgacacagagtacggcaattgcttccaacacggttctttagctaacgccatttagattcgtcactaatctcatatcttctaatctcgaggtaggtacatatcatgtggtgtacgactattcgattattcgcagatacttacattcaatgccagcttcatgcgctctctcaaggccgacaagcgcgcattgttacggctatgacaatgctcaaacagtatctctttcggtaaatctctcgtcttaattctgctgaggtctcacactgaacatcgtttaggtatcaaggccatgttggtgctcatcttgtgctcggcggtgttgatgccactggaccacacctttttactgtccacgcccacggctccacggacaagcttccttatgtcaccatgggtagtggtagtctcgccgccatggctgtgtttgagagcagtttcaaagaacatatgacggtaagctccgcaggatgaaagagaatgttcactcatcatagcaaagagacaagaagctatcgacctcgttgctagagcgatccgatcaggtgttttcaatgacctgggttctggttccaatgtagatgtcgccgtgatcacaaagaatggaactgaaatgctcagaaactaccagacccccgtacgtccattttgattgatgcaggccctttgtgctaatgacgagtagaatgaacgaggcctgaaatcgcgcaactacaaattccgccgtggaaccactgcttggacaaaagagtctgtgcgcagtctaatcgtcacagaggaagttaa

SEQ ID NO: 1122 - DNA, 1419 bp, Cryptococcus neoformans
atgcgattcgctggtggtcgtcgtatttgctcagagaatcgctcttcaatatacactttcctttccccaactccccatcccccaccacccgcccccatgtactccctcaacaggcttcccaggagctccgcattcaaaaactccgccaatctccttaggcgaaacgccagcaccacttctgctggcggtgtcaatgttgtcggtttcgaaaacaagggccctgctgccacttccagcttgaccgtcgccatcaaagctggttcccgatacgagactacccccggtgtcgcccatgttttgaagagctttgcctacaaggtgggtttcttgggaatttgcgttggatctcgctgattgcgatgtaggccactgcttctgcatcagctttgagaacagctagggaggcggagctgtacggtggtgtcttgtctgctgctcttactagggaacaccttttgctttctgccgagttccttcgtggcgatgagtgagttttacagtaagaagagatgaaggcatccactaaacattaacagagaacacttcctcaacgtcctcgcttccgttctttcctcgtctcaattctaccaacacgagctcaatgagctcgttatccctgtcgttgaggcggagaccatctctgcccaggctactccttctgccatcgccctcgaccttgcccattcccttgctttccgacgaggtctcggtaactctctctacgccaacaagaactaccccgtctccattgacgacgtgaagacttttggtgaagccgctttcgccaagtccaacattgccgtcatcggtactggtatctccactgaggtcctcgccaagtccgttggcaacgctttcggcactggtactagctccagctctaagctctctactcccaaggccgcctattacggtggtgagacccgggtgcctctcgacatccatgctcctgctactgccgcccctaccatggttattgccttcggcacctccgctcccccttctgccgacctcaaggtccttaagcaccttctcggtggtgagacctccgttaaatggactcctggtgcttctcctctggctcaagccgccgacaagatccccggtgcttccgccaaggctttcctccttccttactctgacgcctctctgttcggtgttgttctttctgcccccacaagtgccgaaaccaaggctttggctcaggaagttgccagcatcgtcaagggcgccggcgagttcaaggaggaggaggtgaagagggccgttgccaaggccacctttgaggacgccgctagcaccgaaaccttgtccggtttcgtcgccgctgctggtcctgctgccctcattggttccgttcccgaggcgcagtccttctctggtgtttctgcttcttccatctccaaggtgagtttataa

SEQ ID NO: 1123 - DNA, 1365 bp, Cryptococcus neoformans
atgccatcgttgttgagtgtggtactgataaatatgcgtggaaataggcaatgcccaccccaagttggcagaggctgtcgctgctcgactcggcatcaccctcaccccttgccacgtttcaaagttccgctcccttgaaacttcggttcagattcactcttccgtccgagatgaggacgtcttcatcatccaatctccttcgcctcccgacgtcaacgaccatcttatggagctgctcattatgatctccgcatgcaagaccgcttcagccaagagaatcactgctgtcattccttgttacccttatgcgaggcaagataagaaggacaaatcccgtgctcctatcacttccaagtgagtgaagcacctttttcatttctttctggcggggcatcgtttgcaaagacttgcacgttgctgatgccctttggctctatgttcaatcaaattacgactatgcccacgtctgtatcatcttcatttgtacaatccccaatgaaacatacaggcttgtcgccaacctcctcgccgttgccggtgccgaccacgtaatcaccatggatctccacgcctctcaaatccaaggtttcttcgacatccccgttgacaacctcttttccgagcctacaatgatgcagtacatcaagtctgaaattcccggatggagagatgctatcatcgttagtcctgatgctggtggtgccaagcggtaagtcttttgatcgaggattctgcgcaactccaaggagatcactgactagagggatcatagagctaccgccctcgccgaccaactgaacctcgactttgccctcatcaatcgtaaacgtcggcgggatcttgccgcctccatgtgcctccccaccgttccccctacccctaccggctccgactctggctctgtccactctcatgacatcgacgacgaatcaaacattgttgagaaaatggagttgcttgtcggtgatgtcaagggaaaggtggcaatcctcatcgatgatatgattgacactggtcacacagtcaggttggccgctggtgttctgagggagaatggtgccaaggaggtctacgctttggtcagccacggtaagtatttgcttcatattcactatcctcattgacagattcctcgttgacaatgcgtaaacaggccttctttctgataccaccatggagaacctctcagacctacctgtcaagaagctcatagtcaccaactctattgatcagaccaagcgagtcattgcttgcaacggtttactcgaaactctggatattgcccctgttattgctgagagtatcagacggacgcacaacggagagtctatctccgcacttttcaggccgcatgattcgttctaa

SEQ ID NO: 1124 - DNA, 1180 bp, Cryptococcus neoformans
atgtaccattcgatgcccgacagtcatgaccttcctgcgcaaagcatcgcttcgtccagccggcaaccttcttccattctcaatcgcgcagatcagcatgcctccgaagcagggccaagccgcagtgcttccacggacaaaggctatcatgccgatgttgtgaatcgtcccaaaggcgatcatctcggcgtgccaccatcctccgcctatgcacgtggtcctacctcgcccacctcagagctgtctccgttaagctgttctggtatgacgccgcatctagacatatgcaaataccccacacagcaacttctgcggctgcttgccggattattacaacacatcgcaggctctaatgatcaattacgggcagagcttgaggccgaggaggacgatgaaatggatgagcaacatgtggatgataatacggcaaatgtggactggagatcacgtcctcattctcgggcatcaggaagatcttatgttccttccggcacatcgtcaactgccgagctcttctccgaacccgcttcttcgactttgacctcaccggctctcacatctcggtcgtcctccgcagcatccaatcccacatcgtacccattatctcaattccccctctttactgcatccaaatcatctttatcgcacccatctgccctcttggcctttcatgctaggcatattccctccatttccatcgaagcatacttgttacgtatactcaagtattgtccggccacaaatgaagtgttcctaggtgtattggtgtatttcgacagaatgacgaaattgggaacaccggccggtattggtggcgagagctcgaaggttggaaagaagggaaagggtttcgcaatcgacagctacaacgtgcataggctggtcattgcaggagttaccgtcgcgagcaaattcttttctggtacgtactatccctgtctaacggatcgtactcatcgacaatcatagatgtattttacacaaactcaagatacgccaaagttggaggcttacccccgactgaactcaattccctggagcttcaattcttattacttaatgacttcagattacgcgtgtctgttgaggaaatgcagaggtatggcgacagactgttagcttatgccgaggaagcgggggaggatatcggaacagttggagtggagagaaggcggagtga

SEQ ID NO: 1125 - DNA, 1295 bp, Cryptococcus neoformans
atggacgacaaagaactcgaaataccggtagaacattccacggctttcggtcagctcgtgacgggtcccccgggagcgggtaaatcgacctattgtcatggcttacatcaggcatgtttgcgcattgaaaagcacccggaaagacactgactattcttacccacagttccttacagccatcggtagaccagtgcatatcatcaacctcgatcctgcagtcccaaaccctccgtatccatgctctataaacatcacggaactcatcacactcgaaagtgttatggaggaatacaatctaggaccgaatggggcgatgctttattgtatagaattcttagaggccaatttcgactggctagtggagaggctggatgaggtcttggctgaagagggggggaatggatatgtggtgtttgatacgccgggtcaagcagagttatggacgaaccatgatagtttgaagaacgtggtcgaaaagttggtcaagatggactatagagtgagtaactccgaatatgtctaaaaccgcactacaaggtttgcaaatgaggctgatgcgttatgtagctagcggctgtgcatctcagcgacgcgcactacataacagatgcctcaaaattcatctctgtagttttgctagctcttcgggcgatgctgcaaatggaaatgccgcatttgaatgtgctcagcaaaatagatttgatatcaacttatggagagctccgtaagtcaccaagtcaaagtcaattcgtcacggtcgctgaattatctaaatagcgttcgacttgagctattacacagaagtccaagatctgtcatacttactgggcagtctggattcagaccctcgaacagcaaagtaccacaagttaaataaagcgttggtagagcttatagaaggcttttcattagtcggatttcaaaccctcgctgttgaggtaagccggtctcttctcgcgccaggggaaccaacgacatctggctcaccaagtacttcaggacaaagaatcaatgcttaatatcgtccgtcttgtcgataagatgacgggctacatatttattccgtctggcgacctcgaaggaaccaacgccatcaatacccaagctctgtttggtagtgccatgtcgtcggcgaagcttacaggaagagcaggcggggacgtaagagatgttcaggagagatggatggataacaaggaggcttgggatgaatgggagaagaaagaatggaagagagaagcagagataagagcccagatgggcactggaataccagaagggatgaaaggcggtga

SEQ ID NO: 1126 - DNA, 1401 bp, Cryptococcus neoformans
atgtcctcgctcaaccccgaaattgacggccattcctacaaccgcccggacgctggagctcagactcccgttgacgccaaggctgcgcgaagggcccgtttcgaaaaggtctttgaccagattgccgaggagcttttgacgtatgtcaagggtgagggtatgcccaaggatgctgtagagtggtaccaaaaggtgtgtagctacctagcgtcatgataggtcgagcaaatccttttgccagagaacacctaggtacaaagcagcttgtaaacaaaaactgacattgccataggtactttaccacaacactcccggtggtatgtctcagttttaaatttagtggcacaaaaatcacaattaacgttccgcaatataggcaagctcaaccgtggtatgtccgtcgtcgacactgtcgaaatcctcaagggccgagaactatctgaggaagaatacaccaatgccgctatccttggatggtgtgtagagctcgtaagtgaacatatgtctacttcagaaaataatcctgactcctgtgattagctccaagcttatttccttgtcgccgatgacattatggaccagagcgttacccgtcgaggacagccctgttggtaccgagtggtcagttgctttgctatctatatttgcaccaacggactcatagagctacccagcctaacgtcggtaacattgctattaacgacgctttcatgcttgaagccgccatctattacctcctcaagaaacacttcaggagccaaaagtactatgtcgacttgatggaactcttcctagagactaccttccaaactgagctcggccagttggtcgacctcattaccgcgcctgaagaccacgtcgacttgaacaaattctctctcgagaagtaaattaatatttctcccagtgatgtgccgattcgctgactttttggtcgcaggcaccacctcattgtcgtttacaagactgctttctactctttctacctccccgtcgctcttgccatgcacatggtaagcatgtctattatctggaagaaatatcagagtttacagcaaaaatcagtccggtgttgaggacaaggctgctttcgatctcgccctcaaaatccttctccccctcggcgagtacttccaggttcaggacgactatctcgattgctacggcaagcccgagcacattggcaagattggtactgatatcctcgtaagccaaaaccttctgggcacatatctagacagatccttaccttgtattgtaggacaacaagtgctcttggaacgtcaacaccgccctcgctcacgctacccctgaacagcgtaagatcctagtgagacgcttttgacaaatacttaccgacaatatatctttccatcaagtggaaaccattcagttggttga

SEQ ID NO: 1127 - DNA, 1450 bp, Cryptococcus neoformans
atgttaaggaccacacttacacgtttcaacacttcatcaagtctaaccacactcaaagcaaacatgtccaccactgctgctatcaataccgccaccggcacttctcgaagtattaccaagactgtttacgctcacgaggtctctgaaggtgccggtgccactgtcaggaggtctatcggtactagggagcttcggaatcttactcctttcttgatgtgagtcactttcagctgttgaggtgcaagacttggaatttgggacatcgacaccaaggaatggagaccttacccaaactcacttgagggtatgcccggacaagtgatcgagattccgataggagtcaactatccagatccgagaaagactagccccttaatgactcattcgtaaacttgacccgatatttgtatactgacttcctctcacaggctcgatcattttaaagtccttcccggtgctggtttccccgatcaccctcaccgcggtatgcaaactgtcacttacttgttccgaggtatcttcaagcacgaggacttccttggatactctggaacgtaagtttttttctgtttgaagctatttctttgtaatattacctgctgacacgatcgctttagtttaacacccggagatgttcagtggatgacagccggtaagggtatcgcccacgccgagatgcctatatttgacccggacccaactaaggctgagcctgttgagggtatgcaactttggattgaccttccccagaaggagaagtacattgaaccagaataccaggaccgaaaggctgaagagtaagtctgaatgattaaattttatagtagtggttttgctgatatatgcgtagtattcctgttatccaccctaaagatggagtagaaatcactgttctttctggtgactctcacggtaccaacggctctgttactccggtcggcggtgcttggtacttgggtttcaaacttcagaagcccggggcgagcgtgtatcagcctcttcctgaaggttacaatgccttcatctatagtaagcctttttaatctcatcgtactgacctactactgacaaatactaaaacagtcgtgaagggaaagctgcaaatcggcgacgacaccaagactcatgacaagttcaacttgcttgttctttcttccaagcctggagagtctggcgtgacccttaccaggccagaagacgacactgatgctgaagaagcacattttgttgtcattgccggaaagcctctcgaccagcctattgttcaggtgagtcagtttctcatgtgtaagatgatgatgtgttgacagccctttttcagtatggccctttcgtcacctgcagtcaaagacaggctatggaagcaattatggactatcagacagggaagaatgggttcgagcgtgctgttggttggaagagcaagatcgccaaggatttcaggggttaa

SEQ ID NO: 1128 - DNA, 1217 bp, Cryptococcus neoformans
atggccgcccaagcagcttcagcggcacaatcagacgatggtttcctcgatcaactcatcgcttccatgcccaaatccaccgtcccgcccgaatctggtgtgggccctgcagcgccgaagaaggaagtaacagttgaagactttgaaaagctgctcgactccactcccttgttcatgcgagagactccgaaagatggagacgataatcctgtcttggaagctttgaggagtttggttttcgagggtgaaggagatggtgagtctgtatacccggcaccatcttttgtcttgggtgtagagtgctaatgtatgtgctttttaattgatttatttatttcttgctttgatacagagatcgcaacgaactttaaaaatcacggcaatgagctccatgctcagaaatcatacggtgaagctatcaaggcctactctgaaggtatcgacgcccacccctcttctgcaactttgctcgttaccctttacaacaaccgggccgcatgtcatctcattctgaagaactaccgttcagctctcaaggataccagtgccgttattgcactctacaccgctggcaagattccccagccggacaaggcgctcgtaaaagctctgttcagggccgcacaatcgctagttcagctgagcagatggaaggaggggggtgatgttgtcgaaagaggaaaagaactcgcggagcaagtgaaggaggacacgaaagtttgggatacactagagaaagaagtcgtcaagggcaaaaagagagacgatgatcgggtggagaggataaggcgagacaatatgaccaagcttgcgttgcgcaaagcagtggaagatcggggtttaatagtcgtcgatacccctagcccaccggacaacccccaccctttgcatttcgacgaacaatctattcctaccatcaacgaagaagtcggttggaccccgccgcctccgcatacacccattgttttccctgtcttcttgctttacccaccatacggacaatcagatttcatcactcatttccatgaagatgccgcgtttgaagatcaactttcagccatgttccccgtttctccatcggcaccgcagataccatgggcggaatgggatgagaaacacgagtactatgtgcctaatttagctgtgtacgtggagaccaaagagaggagactgttaaaggtcggcaaggaattgacgttgagagaagtgttgggtaa

SEQ ID NO: 1129 - DNA, 1306 bp, Cryptococcus neoformans
atgtccatccccacagagaagcctgctgggccgagcgcattcacaccgtacctcgatgctgtcgccaacgtcttccaccccgtttccggccctgtcttgaacacttatgccaaattccacggctggaaggagaatatgggtttggtccagcccggtaccgtggaaaacttgaccagggatgcgcagcgtgagtttagggggaacagggagaaaaaaatggcccggaacggctgacaatggcggcagaggtgcaactcgccaactggatgtttgacggtgccagagcagatgtggctaaggtcatttctggtaatcccgccttccagttgacacattccttctctctcggatccaccacccggcccgctgcttacaactttggtgtcatctttgctaatgccaaggtgcgtcgagagacaaggggaaaaaggaagacgatggaaaactaatttgccgcagaccttcttacaaggtggtcttgacggtagcggctctttgaccatgcgtgccaaccaaacttggtccgcccgagacctctctaagatccaggctcaggttaccgacaaacccggccacaccatggttcagttcgaacatgaccacattggagaccactacaccttctcctggaaatccatcaaccccaacctccttgactttaccggtatccacatggcttccctccttcactccgtctctccccgactttctcttggtttcgagactgtgatccaatatcccgaacccgccatcctccagaccgcaacctcttacgtcgccaagctgacctccctgcccaaccccgttgcagcccttacccctaccgcccctggccttccttcccccttcgtccccagctggatagctaccggccatctccaacctgatggcaacgtccaagctacttactaccagaagctttccgacaaggttgacgttgcccttgacttccagaccatcctccgaccgcagtccatgttgggccctgccaagagggaggctctgacaactttggctgccaagtacgacttcagaatggctactttcaggggacagattgacagcgcgggcaaagttggcatgtacctcgaacagaggttcactcctgctttcgccttccttgttgccggagagattgaccacgccaaagtatgttttttttttttacttgktttctttttttccttatgaagacagctgacgcattgagcagaacgcctccaagtttggtgttggcattatgattgagtcctctacgatgacccaggaggagatgattgccgccggcatgttgacccctgtgtaa

SEQ ID NO: 1130 - DNA, 1390 bp, Cryptococcus neoformans
atggaaggactacaaaggctacttcaaggaggacgaggtatgggcatgggcggcgcagctggcggtcagactgtagtagcagacaagtgagttttttagctgactatagtatgcatcatgctgatattacgatgtactatagtggcgaaacagtgcatatttctgctctggcgttgttgaaggtgggcataaaaagtgcaagtgcccgtggagtgtcgctaatggtattgtctctgactaacagatgctcaaacatggtcgggcgggcgttccaatggaggttatgggtctgatgctaggcgaatttgtggatgattatacggtgggttcatttttcccgtttctcaagtctaagcttacgggttggcagatctcatgtgtcgatgttttcgccatgcctcagagtggtaccaccgtgactgtcgagtccgtggaccatgtcttccaaaccaaaatgctggacatgctgaaacagaccgggcggtacgtgtattcgtgtcttactgtcggcagatttcaatactaaaagattatcacgacgcaggcctgaaatggttgtcggctggtatcattctcatccaggtttcggctgttggttgtcgagcgttgatgtcaacactcagcaagtaaggcttattaagcttcggaatgatctgcgtgcgctgatcgatatgcttcttagtcattcgagcagcttcatcctcgagcagtggctgtcgttatcgaccctattcaatccgtacgaggaaaagtcgtcattgatgccttccgatcgatcaaccctgctgcgcttgctaccggacaggaatcacgacaaacgactagcaacattggccacttaaacaagcccagcatccaagcgttgattcacggtcttaacaggcattattatagtgagcatcacgctatcagaatttgtagtatatatctgacccttcattaggcttggcaattgattacaaaaagacagaagctgagcagggaatgttactgaatctgcataagcgtggctggactgaagggttgaagatgaaggactttgaggagatggagcaagggagccaaaaggccatcgaggtgagtcatcattagactcgctccatgcccagtgatgggagactgacgatcctcagaacatgctcaatcttgctgttgcctacaccaaatccgtacaagaggaatctactatgactgaggagcaattgaagacacggcatgtgggcaaattggatcccaagcgacatctgtcggaggcagctgagaaggctatggaagaccaagtgattcaaagtctagccatgggagttttggccgagttgtagatgtagatagctcaatatcatgctcgaaaacgacaataacaattcatacaacagctttgcagtcctga

SEQ ID NO: 1131 - DNA, 1392 bp, Cryptococcus neoformans
atggattggattcaccttttcccatctcaactattctttcattactttttccccaccaccagaaaagaaaagatgtctaactcaccacccacgttcgaatcgtacctcgtcgttggtggatgcggatttctcggcagacatattgtcgagcagctcttgggtaggggagagacgcaggtctcggtgtttgacattgtccaaagacactttgattcgtgagttgttggccatctttcagagcgttgaataaagtgtgatgttgatgggatgggtagtaatgtcaacttttacattggggatttatcaaacccccaagacgtcgagaacgcgctcgccaaggtacgttcttccccctccccacgtttcccactcattacttctttccgcttctatgcgtgtgttaacatccatctatgaccgtatctagtctcaagcaacagtagtcatccatactgcttcccctacccacggtatgggccgtgcattgtacgagaaagtcaatgtcaccggtacccgtaccctcctcgacgccatcctctccccttcctccaccgtctccaagctcgtctacacttcttctggcggtgtaatctactctggcaaggaggatatctgcaatgccgacgagaggctggattatcctgctgtcccattggatgcgtataacgagacaaaggtcgctgctgaaaagatggtcttggaggctaacgggcaagaaaaaggaggtgaaggcggggccaagctgttgacctgtgcgatccgtccagcggggattttcggtccgggcgacagacagatgatctctggattctacagtgtcgtgaaaaacggccaaaccaaatggcagattggcgacaacaccaacttgggcgacttcacctacgttggcaacattgcccacgcccacctcctcgcggcagacaaactcgggtccgcctacccttaccacgcgctccgcgaacctctgcctgctatcaacatcacgctcggcgattatcgtatccccacttcggccgctcggcctctcgggccgaacgagcaccctacacaggcggatctgttggctgcacagcgctttgaaggcggttgggtggatgagaccgatttgaggccagtattgaggacaaagatggaccaattcagtgcggatgcgcaaagggacgaagatgagaaaggcgacgaggaagacgaggggatcccgatcgccgggcaagcgtatttcatcacgaacggtgaacctatttacttttgggatttcgcccggaccatctggcgtcagctgggtcacgttcccccttacaccatcgttctcattcaccaaatatcccccgtaattactgatataagttgaccatatcatcagcctgtcctgtagggtgtttgaattgctag

SEQ ID NO: 1132 - DNA, 1506 bp, Cryptococcus neoformans
atgttacataatagaggctggccgggagaaaagccagaaaaaggcgtgagcagagaattgaagtcggcggtcgccgtaccgataggagctcgcgcgtcgtcgatgacctctcaacgtcaagcatatagggtgtcattcgagctcttactctcagactgtcctctccagaacctatatcacggacctcaacgtcaaccacagactatacgagtgaccgtccaacatgtctcgttcatcttacgatcggtgagtgtatcccagtacaccatccgagaactgcattgacgtcgatggtttagatatctcaccatcttctctcctgaaggaagggtgcgttgcaattcgctgtttgctgagcgtgttgcatagatttttggaaggctaacatgcgaattgattgctacactatagctttatcaagtcggtaagtgcttcgtaccgtccattgaattcgcatgttgcttacaattcgacagagtatgctttcaaggccatctcttcagccggtatcactgctgtggccataagaggcaaggacacctccgtggtcattacccaacggaaagtccctgtgcgtggaacatgttctggagaaaatgagcgcatgctaatatgacgattacaggacaagctcctcgacccggagaccatcacccacctgtttcaaatcacccctactattggatgtgtcgtgaccggcttgatcggtatgttgaacattagcaaaagaatgggatgggggggacaggagctgatattatgaggtagccgacgcgcgggcgcaagtgcagcgaacacgatcagaggctgctcagtttaggtataaatacggttatgagattactcccgaatctcgtaagccaggcagtgtacatcagagctgactctgttgctaatatgaatgtagtcgcgaagcgtatggctaacatcaaccaagtttacacccaacgagctggcatgcgacccctcggtatttgtgcgtcttgcgagtcttgttgctgggaatatcaactgaattgtccatgaagctatgattttgattggtcccgatgacgaaagaggacctcaactgtttaaacttgatcctgcgggatattttactggctacaaggccacttcttcaggacagaagcagactgaagccgccaactatgtatgtcgtttgctagtgtttcctctaaatttcctaatgcgatgtagctcgagaaacgatggaagactttggaagctgagaagaaggatttggatcgagcaggtgtgattgaggttagtggacattccttgaagtacctcctgccttctttactgattcagtcttgttattagatggctattgaatgtctctcgtcaatttgcgcaacggatttcaaggcgtctgaaattgaaattggtatttcctcattgtcaccggatgagaagcacattgaaggacaggatggaaggtttaggcagatggacgagcgggagagagatgagtggttgattagagttggagagaaggactag

SEQ ID NO: 1133 - DNA, 1360 bp, Cryptococcus neoformans
atgtccgccacacagttgccagaaatcatggatgccatcttgttcaaacatccctacaaagttgcggtcgaacaggtcccgactcccaagttgcagaccgaaggagatgtcatcatcaaggttcatctcgctggactttgtggtacgttctattattatgaccaccagagggtggaactttaggtttgacaaatatttgctatgtaggctccgatctacacctttacagggctaaagaagatgctgggaaagactatactatgggacatgaggttgtgggaaccattgtccaaaagggcaaggaagtgaacagcttcaatgtgggggatattgtagctgtaccttttaccatctcatgcggtgagttgcatactttggctagctatgtatgcatgtcctaaccttgagccagggaaatgctattactgctcaacctcccacaccgcccgatgcacttcctcagccttgttcggtactccttcccttccgggttgccaggccacctatgttcgtgtccctcttgcggcatcttgtcttttactcaagcctccacaactgcctgaagagttgatgcttttgatggcagatatcttgcccacgggatacagtgcggcttggaacgcttggagacttcttgatcggggaggggagcgtggtggaaaaggagagaagaaggatatttgcgttgtggttgggtgtgggcctgtgagtctctgcattagcatttccaattgagtgttcagtcaagccaaatactcgacttaggtcggcctttgtgccataacttctgcgcaaacactcttttccaaagtctttgccgtcgatcctacgcctgcccgccgagagttggctatcaagcacggagctaccgctcttgttcctggcgaactgcaatcagccgtcatggctgccaccgaaggtcgtggtgctgatgccgttctggaggttgtgggcaatcaaggggccttcgatactgccttgagcattgttaggccttacggagccgtcagcagtgtgggggtgcatgccggggagctcaagattgatggtggtttgttgtatgacaagaagtgagttttatcatttaatgagggtgggcagatgacaggatgtagagttacggctgccgaacgaggaaaggtgaaacgtgagagaagggtgcataacatgcccatgctcatgttcttactcgtagcgtgaggcttcaatttggacgttgctctgttaggcacttttatccggcagctctagaagtgctcatgaacaaccaagagctcttcaagagctttattgagtataaggtcggtttcagtcaagctgaagaggtgagtgtccagccacgcaattatactgtagataa

SEQ ID NO: 1134 - DNA, 1384 bp, Cryptococcus neoformans
atggctcccaaagacagaacatcagagtttcactccacactcaattctatcaagtcacgctcagccctcaccaccaacagggcaaagggcaaacagcaagatagagaggcgaaacagccgttgatatcgaatggtccaggtcagactggagcgaagagcgagttcgggaagatggcgggtggaatagcaaaagacattaatgcgacgacgttgaagctgcaaaaactggcacaatgtgagtacgagcggaacttgcattgatcgcgactctaacattcacctccagtggctaagcgcaaaacccttttcgacgaccgtcctgtcgaaatctctgaactaacctacatcatccgacaagatattgcttctttgaattcccaaattgcccaactccaagcatacatcaaatcttccaaggggggtaagggtggttccgccgcttcgggaagtaaggggaagggcaacggggggaaacaagaggaggagcataacagcaatgtggtgatgcttctgcagagcagattggcgaatatgggaatgggtttcaaagatgtgttggaattgaggacacagaatatgaaggccagtaaggatagaacagaacagtttatgcataccgcgcagggaagctcggtgctggctcctgctgagagtgagtcacttcttccctcttaccctctctccgctgatcatcgtttattagactcgcttctgttcaaccagccgggagatcgcaaaggaaaatcccgcgccaacacgcctactcccaaccccagctcctccctctctaacctaggttctaaaaggggagagaaggaaggacaggacttcctggctctggatattgatggggatagaggagagagcgggattggaatgggaggcgactatcagcagatgcagttggtcgagcagcaggtgggtttttttttcgttttcacttgagtcgtgtgagactccttcccatgcctgtgccatcaccccgcctacgaaatccacgcccgatcgctgcttcgtccactcgcttacactctctcgtttataggacacatacatacaatcccgctccaccgccatcgaatccatcgaatctaccattgccgaactcggcaacatcttttcccaactcgcaacaatggttgccgaacagcgcgagacagtccagcggatcgacgcagatacgacagatatcgccgcaaacgtctcgggtgcgcagagggagctgttaaagtattatgcgagcgtgagtagtaataggtggttgatgttgaagatttttggggttttgatcatctttgtaagtccatttgttcttttgctgttggcattctttgtcctcggaattctttgttctcggaagaggaagacgctgatggtgatttag

SEQ ID NO: 1135 - DNA, 1447 bp, Cryptococcus neoformans
atggtgtgtaaaatcacattgcccgaccatcgctaatgcgaagaaacagtccgtttaaacatccggactcttggaaacgactatgacaagacggaagacgacatcaaggcgcttcaaagtgtgggtcaaatcatcggtgaagtattgaaacagcttgacgatgaacgatgtatgtttaattttgcccacacaatctgacaccgacactaacccacccacagtcatcgtcaaggcatcttctgggccccgatacgtcgtctcctaccgacccactttacccgtccacaagctcaaacccaccacccgagtctccctcgacatgacaaccctaaccataatgcgtatcctcccccgtgaagtcgaccctatggtttacaacatgtctcttgaagatcccggatcggcttcttttgccggcatcggtggtttgggcgaacaagtgagagagttgagagaggttatcgagttgcctctgatgaatcccgaattgttcgaggtgcgatcatccctatctattttttttggcgggcaaaaggggcgatactgatttgatggcagcgagtgggtatcaacccgcccaagggtgtgttgctctacggtcctcctggtacaggaaagacactcctcgcaagagctgtagctgctactctgaataccaactttttaaaagttgtctcttcagccgtacgtctcccattcttgttaattgcttccccatcaccactaatgcatactgctaacccttccctccttttctcgtagattgtcgacaagtacattggtgaatcagcacgtcttatccgagaaatgtttgcctatgccagagaacacgagccatgtgtcatttttatggacgaaatcgatgctatcggagggaggaggttctcacaaggaacaagtgcggatcgagagatccaacgtacccttatggaagtgagtctagtattactccttctctttctacccgtcttctctaaccgctttcccccttagcttctcaaccaaatggacggttttgaatctcttggtcgcaccaaaatcattatggccaccaatcgtcccgacacgctcgaccccgccctcctccgtcccggccgtctcgatcgaaagattgagattccccttcctaacgagcaaggtcggttggagattttgaaaattcatgcgaaaaaggtgaacaagagtggggatattgattatgaggcaattgtgaaattgagtgatgggtttaatggtgctgatttgaggaatgtttgtaccgaagtaagtcgtctttttgctttcccctctctgttgtaagacaggaatttgacggattatttgcattttttttctctaggccggcatgtttgctatccgagatgatagggatgctgtggtccaagaagactttatgaaggctgtcaggaaactaaacgaggcaaagaaacacgagactactatgtga

SEQ ID NO: 1136 - DNA, 1403 bp, Cryptococcus neoformans
atgtctcccatcgccaatggcaacccccacggcagctctttcagcgtcagggaacccgagaggaccggcgaggtaagcaagaagatgcactccaaggttgttatcatcggctctggtcccggtggtcacaccgccgccatctacttggcccgagccaacctcgagcctgtcctgtacgaggtaagcatccatgattgtttgggctgtatagatattgacgacatccgcagggaatgcttgccaacgggtgaggactatcgtccagtcacatcgcgtggtagccaaggctaacactttccttagtttcgctcctggcggtcaactcaccaccacgactgacgtcgagaacttccctggtttccccgagggtgttaccggtaccgaaatgatggacaagttccgagctcagaggtatgttatctgttctttgcaaatttaatccgataatcgggataatctgctgaccaacgtttgtcttatagtgagcgattcggtaccaagatcatcaccgagactgttgcgcgtgtcgacctctctgtccgacctttcaagtactggactgagggcgaggaggaggaacacgagttcatgaccgccgacacgtaagttttttttcgttcgacaatccccctatggttcgaaacgtgattgacgcatccaaacagtatcatcatggctaccggtgcttctgccaagcgtcttttccttcctggtgaggatacctattggcagtctggtatctctgcttgtgccgtttgcgacggtgccgtccccctcttcaggcaaaagcccctcgccgttatcggtggtggtgacagtgcggccgaggaagctacttgtgagtagcgtattttaaataattgtaaagggagaagacttacaagttatgtcagaccttaccaagtacggttctcacgtctatgtcctcgtcagaagggacgagctccgagcttccaagattatggctaagcgactcacttctcaccccaaggttaccgtcctttggaatgtaagttgcttctttcgtcgtcacgcgaaagatgtaaaggagctcataggaatatttagactgttgctactgaggccaagggcgacggtgaagtcctcacgtcacttaccatcaagaacaccaagactggtgagatcggagacctccccgtcaacggtctcttctatgccatcggccacgagcccgccacttccctcgtcaagtctcaagttgagcttgacagcgatggatacatcaagactgttcccggcacctcccagacttctgtccacggtgtcttcgccgccggtgacgtccaggacaagaagtacaggcaggctatcacatctgctggttccggttgcattgctgcccttgaagctgagaagctcatcagcgaggaggaggctgatga

SEQ ID NO: 1137 - DNA, 1216 bp, Cryptococcus neoformans
atgatatcttcaagaggatcagtagaaggcttgtaactatgttctaacgcagcctcaaggtctggtcgaacccttctcctaccgaaacgcccacaatccactttcctcctgttggacgtcctctggcccgtatgacagaaaaccttaatctacaaaaggctcttcttcgacgtatcgaagaagcaggtaaaggcatcgtcgacattcgtgaaaactccagagtaagggagatgcgtcttggcgaaggtggtcgttgggttggcttgcggatcggagatgaatgggtccggggatccctagtagttggagcagatggcccaaactccccagtcaggcatttctcggagattgaatcgtacggtcatggttacaacacccacgccgtggtcgctactctcaaccacgaccccgatcctctctaccccaacactaccgctttccagcgcttcctctctaccgggcccatagccttcctccctctttctgacacatcatctacaatggtatggtccactcttcccgaaaacgctgctgctctcaagaaactttctcatgatgcccttactcaaatggtcaacgctgctttcactctgcctgaagagacactttccagcttgtgcgaggccatgctgtctgctcagtctgaaggaacacctttgacagcgccccaaatcgtcactctcatcgctaccctccccacccctcttacatcctccgatcagcccatcatcccacctgccatcacatccatccaccccccttcggtagcttccttccctcttcgtatttctcacgcgacatcctacctcggagaacgtaccgctcttgtgggcgatgcggcacatacgatccatcccctggctggacaagggctgaacatgggtttggctgacgtcaagtgccttgcagaagtcctcgaagagaccagacgattgggaggcgatttgggtagtcttgaaggtacaaaaggttatcctaaagagcgatatcctttgaaccatttgatgttgagtgcgacggataagctacactacatctttcgagcgaggaacgggttggtcaactgggtgagaggtactggattcgatgtaatcaacgagttggggcctattaagcggattttaatgggcggtgcgggatccggagtcggacttggtggtgcttctgcgagaacagaaaaggaacgggaatttggaagagcgcgtgcggaagataa

SEQ ID NO: 1138 - DNA, 1239 bp, Cryptococcus neoformans
  misc_feature (952)..(952): n=g, a, t or c
atggggctcacgagttggtggccggcggcaaggacgagccacgtggagttcgcgtggggatcggaaacgggtccgcgttgttgttattctcgagattcttcgttgcgcaggatctggcgtgcagatacacctgaacgaggcagcgtacggcagagcaacgctgacatcccagccacatacaccatgtccgccatccgcactctcgcaaaccccgtcaccgcctgcttctccacctcgctctctccccgtgccgcattccaccgctttctccatgcgctctccgcctccatccgccgcctcgacctctcccgcgacccgagcaagaccttgaaccgcctcaagcagcacaggttcaccctggccaacacgctgccccgcgcgttcatgcttctatgtgcatcctacagtctctacatcatgaccaccccgcccttcccgctcaagcttgggatacccatcgcgtacgtcgccgctgtcatcttgccgatcacgtctcagtttgtctggcctgccacacccatctttgcatggctcatcactttcttctccgcccgtttcatcccttccgggcgccggccagaaatccacgtcgcccttcttccagctcttgaatccgtcctctacggcgccaacatttctgatctccagacaagatataccaacgctttccttgatgtggtcgcatggctgccctacggcgtgttccatttcactcttccattcgtcgtggctgttatcctttggtcgctgggacctaggggtgcggttcagttctggggcttggcctttgggtggatgaatttgctcggtgtagtctgtcagctcctgttccctgctgccgcgccttgtaagtatctattttactgtatcgctcaaacccacatacttaatataccgagcagggtacgaaatcattcacggtcttacccccgccgactattccatggccggntctcccggcggtctcatgcgtatcgaccgcgtcttccactcttcaggctataccaacgcattcggttccgctcctcttgtttttggtgccttcccctccctccattccggatgtgccgtcatggaagcgctcttcctttcccatttcttcccatctctcaagggtctgtattggggctacgtcggtgtcctctggtgggcgaccatgtacctctcccaccactacctcatcgacctcgtcggtggagcttgtctgagcgtcttggtgttttacttgtgcatgcctga

SEQ ID NO: 1139 - DNA, 1440 bp, Cryptococcus neoformans
atgatgagccgttgtgcgtggaatggtaagatgatgctgacagatatctagttcgtcaaatgtggctgggccggaagtaacttccccgattatggcaagtccgagcaccgaagagagatatatggcctgactgacgtttctttctccagtcttcccatctatcgttggccgccccatccttcgagccgaggagcgtctcggtacttctcaactgaaagatatcatgattggtgacgaggctgcagagaatcggtcttacctccaagtcactcaccctatggagcacggtgtcgttaagaactgggaagacatgcgacatctttgggattacacgttcaatgagaagatgcatatggaccctcgaggcaagaagatcttgttgacggagcctccaatgaaccccaaggcgaacaggcaaaagatgtgtgaggtaatgtttgaggagtatgggtttggaggtgtttacgttgccatccaggccgtcttgactttgtatgctcagggtgagtaagaatgttacatgctttgatgtcttcctcgctaaagtggtaaaataggtttacaaacaggtgttgttgttgactctggtgacggtgtgacccatattgtgcccgtgtacgacggtttcgccctaccacatttgacgcgccgtctcgacgtggcaggtcgggatgtgactcgatatctgatcaagcttttgcttatgcgaggatacgcatttgagcgcacagcagactttgagactgttagaggtatcaaggaggctttatgctttacgagttatgatctggaaatggacaagaagttggccgaggaaacgactgtcatggtagagaactataccgtgagtgaatcattgagttcgagggagtgtcctaagctgattcgatgatagctccctgatggaagagtaatcaaagttggttcagagaggtatgaagctccggaatgtatgttccagcctcatcttgtggatgtcgagcaacctggcgtggctggtaagtcgccgtttatcatttcctttatattttgctaacgtgtcgcagagctcctctttaacaccatccaacaagcggctgtcgacacacgtacagaactttacaagcacattgtactttctggtggctcatccatgtacccgggtttcccctcgcgtctcgaaaaagagatgaagcaattgtacttgacacgggtgttgggtaatgacacttctcgtctaaaggtgtgtccttgggttttacttgtagaatggtgtctaaagatgtatcgcagcactttaagatccgaattgaagatcctcctcgacgaaaacacatggtgttcctgggtggtgcagtgcttgccgatattatgaaggacaaggacgcgttctgggtaaccaaagaggagtgggaagagcaaggaatccgggcattggacaagctcggccgtggggattga

SEQ ID NO: 1140 - DNA, 1315 bp, Cryptococcus neoformans
atgtccatcctccgtgtcggtacgttgcacctgcgctcggtctgcaaagctcacactacaatagctcccgcgctcagggcaaaggccgtccccagggctgttcccctcgtctcaaagcgcaacgccaacgacctctcaatcacctcccctcccaatccctctgcctccgttcgcccagctatcagatacgggcctcctaccggtggccggtcttcagactctggacgcaccgtcaccgtcttcggttctaccggtttcctcgccaggtatctcattcaaaaacttgccaggcagggaactcaggtcattgtgccttaccgtgatgaggatgaaaaacgtcgcttgaggccatgtggtgatttgggacagattgttcctcttgaatgggatgccaggattcctgagcaaacagcagaatgtgtcaagcatgctgatgttgtgtacaacttggtcggaagggattacgagactaggtgagtatcaacaacggtccatgactctgcagtacaactgatctgtatgtaggaactactcttatgacgacgtcaacgtcaaggttgctcagtccattgccgagatttctgccgacatgaacatccctcgtctcatccacgtctcccacatcaacgccaaccccgagtctccctccgaattttaccgcaccaagtacgctggtgagcgagccgtccgagatgccttccccgaggccaccattgtcaggccatctcaattatttgggcacgaagactggttgctcaacgccattgcccgtaagtatgccatcaaattaccatttgaatacagctaacattacctaggataccctattctctgcaagctgaacaatggcaacacgaagcttttccctgtccacgttgtcgacgttgcccaggcccttaacctcatgtttgatgcccccgtcacttccactgcctcgacctttgtccttcccggtcccgagctctacaactatgccgagctcgaaaggcttgtttctgccctcaccctccgacccatctcctccgcccctagcctccccaagcctgtcgccaaattccttgccaacctcgttaaccgtggtctttggtggcctaccatctctccagatgaggttgaaaggatgttcattgacgatgccggtgcggaagcattccaggttcactctcctggtcccgatggatggaacgctcctcccaggccgcagattgtcggtgttaacggtgagcccgtcaagagctgggccgatttggatatgcagcccgacaccatagccgagcacgctatcaagcctctgcgacgttaccgatcaacgtaa

SEQ ID NO: 1141 - DNA, 1396 bp, Cryptococcus neoformans
atggctgacgacagcgtgccccttccctaccccaacctcaaggttccgacttggtattatcaggtgcaacatgttgactacaagaaggacgaagcggagaagtctttctgggaggctgtcgagaaagatggtatgtcccacgtggacaggacttcgagctctctacatgaacaacctgctgatgacccgaacttctacgcgtagaaatggctccatatctcaagagcataaactctgacaagacggaacttatccagaagctggaagaaaagaacaagcagcaggtggaggagtatgatcgtaaattgaaagatgcggaagagaatgaaggggacagtgagatttcggagttgttgaggaataaggcgatgtattttgttaggataggggataaggtgggtttgcgtttggtagtttggtggggttgagtcgctgatcgagacgacttgtattgtaggagcgagcgctgccggctttggagattgcgattgaaaagacggcaggattgggagcaaaaatcgatcttgttttggccattgtgcgaattggattgttcttctctgacatccacctcgtcaccaccaacattacccgtgcaaacaagtaagcgcctttctttatgggagctatattttaactgatgtattctagtcttatcgactctggtggtgactgggaccgaagaaatcgattgaaagtgtatcgtgccctccgacatttgactatccgagagtttaaagaggctgccgagcttcttatcgactcattgtctacttttacagcagcagagttgatggagtatgacgagtttgtggcgttgaccattttggctgctggtgttggatgcgacagaaagggtatcaaggacaaggtaaatatgataattcctgatacaaaagcgcagctaacaaagatgaaggtcctcgcgagccccgaagttaacggtgccctccccaacatcccttcattagccagcttgacgaactctctctacaagagcaactattctgctttcttcatcgccctcgccgaagttgagcaacagtatcttctcaccatcccctatctcgtcccacatgcccgatattatgtccgcgagatgcggatcaaggcttactctcagcttctcgagtcatacaggagtctcacgatggaaaggttttgccgttcatttggcgttagcgagcagtatatggacaaggacttatcgaggtttattgcgagcggacgattggcgtgcacgattgataaagtgaacggggtgattactaccaacaagttggcgagccagaacaagacagcgatgtatgaacaggtgctcaagcagggcgatgtgctcttaagcggtgagtacttaattccttgttataaagtacgtatgctgacgatgatatag

SEQ ID NO: 1142 - DNA, 1371 bp, Cryptococcus neoformans
atggccaccgttaatatccgacgagatgtggacgacaagttctacgtatgttgttctttggtatctaatgagctaagacaactgattcatcgacttagcgttacaaaatgcccctcctccagatcaagattgaaggtcgaggcaacggtatcaagactgttgtgcccaatatggaagacattgcgcgagccttgaacaggccgcctacctacccgaccaaattctttggttttgaacttggtgcccaaacatccatggccaacgacaggtatatcgttaacggtgctcataccgctgaccgtttgcgagagctccttgacgttttcattgagaaatttgttctttgtccctcttgcaaaaaccccgaaaccgaaattgtcatcacaggcaggtcgggtcacgaggacatgcatcgtgactgcaaagcttgtggtcgtcaaaaccccattgatatgcgccacaagctttctgtctttatcatcaagaacccacccaagaagaaggacaagggtggcaagaagggcaagaagtctggtggtatgacggccgaagccaacctcggtgggccaatggtgtttgagaagacagaggatggtagtggtgaagatgatagttcccctgatgcgggcattgcgggtgtccctaccactggcaccgaaattgacgcggtgcttggacgtggcgaccccatcctcggtgaccctgatgccgctgaggcagcgtccaagaagctcgccaaacttgacgttaacggtggcggcgatgaagaagaggacgaggatgccgattcaccttatgcrgctttgggttcttggttggagaacaacaaagaagccgatgacgcctctatcatcgcgcagatcaaagatctcgggattgctggcaagcacaaggttttggtagagattggtcagcatctgttctcggatgacatctgtgacgagatcgccggtcgaactgcccttcttcaagctgtaaggcactttcgaacatgtcaacaaacgtatcagctaatgatttctctagcttgtgacgtctgagaagcatcaaaagtctctcttgggtggtatcgaacgcctcatcggtctatccccttctctcgagtctcttattgccgctggcaccacttccaagattctcatggtattgtaccaagctgatatcatcgaggaggacgttgttcagcagtggggtacccacgttagcaaaaagtacgtggacaaggacaagagcaagaaagtcagaaagaatgccgaagccttcctcaaggtaagttattttctgatctttacaaagcaaggtgaatattgacagagttcatttcagtggctcgaggaggctgaggacgagtctgacagcgatgaggagtga

SEQ ID NO: 1143 - DNA, 1368 bp, Cryptococcus neoformans
atgccgtcaaattattctccatgccttgtggtcccatcatccattacggacggtcgatgtcaagctgcttctccagatggatgtccatgctcctttagaagagtgagttgtttctcaaaatgtccaatacataacgctaatatcgcattattcagatgcgacgaggtcatgcgaccagctatagacaggaaggtcctccatccaatgcattataagaaacagagaatgcagtggtccttgaatgattctttcaagaagggcctgagaaatgccttgacaggattgtgagtctcgtcgcaatagttatatcaaaccaaggctaactcagcttcagaggaacatcaaattcgttcggtgtaccctttgaaagacatcaggcaactgaccttgatcttccctccgaggacgagctcgtggcgtatggcgaggatacgtttgagtctattctcaaatacatggtgtcttccggtctcggtacagaattctctggatccagaccacagcctgaggtcctccagctcttacataccagcggcctcatgacagactcgtgagtgctttccgagaagagtgcgtactgagctgaccatgtttgacagtgtcgatatgaacggaagaaatcccaatataaatcggctcacaatcacttccaaaggctttcaatttttgctcgagaagagacagactcagttgtgggagatactcatgtactacttgagtgccaaagaagtacgtccctatcaaaatgacaatgtactgataataaggcaaactctgaacggtcatccgaggtcttgtcaatgttcttctccctcggatgtatgcaactaggacaagactattccgcgtccaactccttccctggcgctcaagaagctctcgacgatctcgcccaatacggtttcatttacaaatcatcgcctgacagcgatcaattttggcccacccaccttgccacctctttgtgttccggcgacgcttccgccatccaatctcagagtgcagacgacaagcgtttcctaatattggaaaccaattacaaaatttacgcatatacttgtaagttggcgatatacctattattgcgcgcgatttcagcgattgtatctgaccatggagcagcaaacgagctcgagatcgctatccttaatctctttgtcgacattcgcattcgggtaccccaacctcgttgtaggaaaactcgaccgtcagcacggttaaagccgccatggaaaagggtatctcagcccgacagatcatcgcctatttgtccagtcatgcccatccacaaatgtacaactctcccccaccattattacatcccaccattgtcgatcaactttatttatgggatcgagagaggaatag

SEQ ID NO: 1144 - DNA, 1416 bp, Cryptococcus neoformans
atgcaccttggtttacggtttggagcagcctgcccggaaacatcatcgctgacacatgttttgcttgatctctttttttcgcttcgaccatatatctccatctttacagatcactgtatctcaatcgctcagataaattttatccggcatccgcgcgtccagtcctatattagccccaacaggccaactgaaggttgtttgaagctgctccacttgtttgaatcgaatatggttgctgtcgctggaccaaaggctcctggggtgggcatctcgtgaaacaaaagccgggttgacatattgctgatatcttaacctatagcccaggttcggtcagagtgtcgtgcccaatcttaacatcaaacaaatctgtccgaactgtaggaccgatcctcccaatattgttgaggagtatgccaagggtgatctagtgagtagaacgacagaaaaagcttcgtgaaggtggtctaacgcaggataggtttgtgccgactgtggaaccatcctaggtgaccgtatcgtcgatacgaggagcgaatgtaagtcagctttgatctttttctttttcatcttctgttttgtctcctactgactaactaacagggcgagtaagtataagccgcttgcagaatgtactcgcacgactaacttcattagacatttgcgggagacgagaatggggacgatccctcgcgtgtcggtgatgctggcaatcctcttctcggaagtaatcacctcgacacaatgatttctcacaaggacggtcgaaccggtatcgctcgagatctcaaccgcgcacaagcacgagccaacactctgtccaatggaatctatggtaaatcttctgtggcacaactatccgctgtcttctcccgtatcggagaaaagtgtgacgcgatgcagctccctcgcggtgtaagagaacgtgctcaacacgtttacaagattgtcgatgaggcgcgagcaatcaaggggaagaatgaacctgctgtcattgctgcctgcattgtttacgcttgcagagatgccaaggttcatcgtaccttccaagaagtatgcaaagccctcaaaatcagtaagaaggagctcggacaggtcttcaaccacgtcaagagtgttgttcagtcttccagtgctcagggttcgatggtgtctgtccacggatcaaacaatgcgcaagaatctgctgaaggtttattgggtcgttttgcaaactatctggatctgggcaacgccgtgttcaatgtgtctaagcatatcgcaggggaagccgttgcaaagagcgctatcgacggcaggagtcccgtgtcgatcgcagcaggtgtattgtacttcacatgtgtactgttggggaagagtaccaccgccaaggatatttctgcaatgggaggagtgtcagagtcaaccacgaagctgtga

SEQ ID NO: 1145 - DNA, 1420 bp, Cryptococcus neoformans
atggctgccgtcgagaccccttccaaggttgctgcttctgcccttgcaaacattgacctcaacaccgccaagaaggcttccgagcccactctcctttccaagctccaagctgctgctcctaccaagcctgtcgtcgaggaggcccaggctgcccccgaggatgacgttgaggagtaccgtaagcgattcgtcggcgacctcgattgcgaggaaaaggacgagcccttgttgaaggagacgaatgcgaggtttgtcttgttccccatcaagtaccacgaggtgagtcttcaagcccttttacgcgttgacgcgtcgatggatgctaacattaggcgcagatctggcaaatgtacaagaaggctcaggcctctttctggactgctgaggagatcaaccttgcccctgatcttcacgactgggagaataagctcaacgacaatgagcgatactttattgagcacgtccttgccttcttcgctgctgtaagcatgttcttcttttacgcgtcgcgctgccactgactcgacgcttagtctgacggtatcgtcaacgagaaccttgttgagcgattctctgccgaggtccaggctgctgaggccaagtctttctacggtttccagatcatgatgtgagccagcttgttttcgttgccacgtacaacctcactgacatgacaacagggagaatatccacgccgagacctactctctccttatcgatacctatatcaaggacactgctcgacgaaacttcctctttgacgctattgacaccattccttgtatccgaaagaaggccgactgggctcttcgatggatctctgacaagcgatcttgtttcggtgagcgactcatcgctttcgctgccgtcgagggtatcttcttctctggttctttcgcctccatcttttggctcaagaagcgaggtctcatgcctggtctcaccttttctaatgagctcatctctcgtgacgagggtctccacaccgactttgcctgcctcctcttcacccatctccgaagacgccctcaccccgacactatcgccaggatcatcaaggaggccgtcaccattgagcaagagttcttgactggtgagtttgcccatgcagttgatttttgatcaccgctgactttttcatgtagacgctctccccgtatctcttatcggcatgaatgccaaactcatgtgccaatacattgagtttgttgccgaccgtcttcttgttgccatgggtaacgagaagatctggaactctaccaacccctttgactttatggagatgatctccctccaaggcaaggccaactttttcgagtctcgagtatctgcatactccaaatctggtgtcaaccaggccgtcggtgccgccgatcacaacgccatcaagaagggcttttctctcgacgaggacttctaa

SEQ ID NO: 1146 - DNA, 1430 bp, Cryptococcus neoformans
atgtccgcccctgccacatctgaagctggaccttccagcaccaaccccccttccgtcgagggcaagaaacagcctgtcgtcatcctctgtattggcatggcgggatcggtgtgttttcgttctagcttttcctctttggtcccctccactaacagccttcattaaaatacagggcaaaacgaccctcatgcaacgacttaactcccacctccattccaagaatacccccccgtatattctcaatcttgaccctgccgtaacgcacatgccttactcagcgaacattgacatccgggatacggtcgattacaaagaagtcatgaagcagtacaagctcggccccaacggtggtatcttaacagcgttaaatctgtttaccacaaaatttgatcaggtattggggtatgtggagaagcgggcggagactgttgagtgagtgcatatgtcccaatcagttgagcctgtgaactgacagagacacagctatatccttgtggacaccccaggacagatcgaaatcttcacctggtccgcgtctggtgctatcataacggatgctattgcttcttctcttcccaccgtcgttgcctacattgtcgacacaccgcgaactgcgtcccccgttaccttcatgagtaacatgctttacgcttgttctatactttacaaaacgaaattaccattcatcatagtattcaacaaaatcgatgtgcaacctcatgagtttgccctggactggatgacagactttgaaaaatatcaagaagcgttaaacgataagagcagagacgagcatggggaaggaagttatgtgaacagcctaatgtcaagtatgaaccttgttctggaggagttctataacaatttgagggtaagccggatcagctaattgggctctgggaaagaactgatcagtttcaggcggtgggtgtgagcgcgatgaccggagagggtatgaaggcattttttagtgcggtagaagaggccagaaaggaatatgagacgtatgttgtattattgtttagctcttcgattggctaatatgatttagcgattacaaacctgaactagatcgtttggcagctgagcgggccgcacagaccgaagcagacaaaaaagctcagcttgagcgtcttatgcgggatatgaatatttcggactctcctcggtccggacctggtggtaacccctttggtcctcatgcccgtaatgaccgtgaagatcgatactatgatgacgagggcgaagcgagtgacatcgacgagcaggagcaagaagctatcaggagacaaatggaggaagaagaagaagatgcagaagcggaagaattgggcaagttggacgtagaagagccagagatcggaagcttggccggtggagctgctgctgctgctgcgagtcggggcgtaacatggcctgcgcccagatag

SEQ ID NO: 1147 - DNA, 1355 bp, Cryptococcus neoformans
atggccgccccctctgaaactaccatccaactatcgccagaagctgaggcccagtacgagagaatcaccagaaatctccaagaagtaactagcggggaggttatcaggaaggtcttaagcgaagggaaggtcgtcaaagcttactggggcactgctcctactggcaggcgtgagtttaaagctgtaggcgtataacaatgagattatgctgatatatgcagcccacatcgcctattgcgtcccgttgctcaagatcgccgactttttgacagccggtgtcaatgtcaaggttttgcttgctggtgagttgattgttatgatagatgttgcattgatcgattattgatgctctttttatagatgtacgtccgatgttaccatattcgttaccgtcacttctgacctatgtcgcagctccacgctttcctcgacgcctctaaatctacactcgaaaccgtccagtaccgagtcaagtactactcaaagcttctcataaccgtcttcactgtcctcggtgtgcctaccgacaagcttgaattcatcacgggttccagctaccagcttaagcctgactatactctcgacgtctatcgattccacgccttgacttccaccagagaagccgagcacgccggtgccgatgttgtcaaggagtcagagtcccctcttatgagcagcttgctctaccctggtcttcaggctttggacgaacagtacctggatgttgatttccagttcggtggtgtagaccagcgaaagatcttcatgtatgccgctactttccttcccaagttaggctactccaagcgtgcccacctcatgaacgccatggttcctggattgtccggtggaaagatgtctgcttccgacccaaaatccaagatcgacttcctcgacactgctgccgacataaaaagcaagatcaaggctgctctctgtccccctggagaggttgagaacaatggtgtcatcgcatttatcaagactgtgctcattcccatccaagctctcaggattgaacaggccgaacgaaggggtgagaaggctcccgttggtgaaggaagctttgttaagcctggcgctcctgagggtaccattttctccatctcccgacccgagaagtttggtggtgacattcacttcaagagttacgaggagctcgagaaggcatacgttgctggtgatattcaccctggagacttaaaaactggtgttcaggaggctctgattcaattcttgggtccgattaggaagtctttcgacgaagacaaagagtggcaggaggtcgagaggacggcttatcccagctcttctgttgcccccactgccgaggagcccaagaaggcggtgagtaa

SEQ ID NO: 1148 - DNA, 1565 bp, Cryptococcus neoformans
atgcttcggctccaatccctgggttccctcccggcccatgccgaaccagcttggacagtatctttcaaccctacccgctctctcctcgcatcatgctccacagatcgcacaatccgtctttactcctacattataccctcttcctccgatggtttaccaagccaggacgattcccaggccgtgtttagtcttgctaaggttatagaaacggaccacaagaggactgtgaggagtatagcgtggtcccctgatggacgaacattggcaagtgggagctttgattcgaccgtcggtgtgtgggaggaggttattccgctttcggatgacgaagaagaagaggatgagggtgcacaaggggtgtataaaccggctggagtggactcggatggagatggggatggggggaaagagaaggagtgggaatgcgtgacgacgttggaagggcatgagagtgaatgcaaatcggttgggttttcgagtgatggggctctgctcgcgagttgctccagagataaaagtgtatgggtgtgggaaggtaagtccaatgaagtttaatgattatgaatggttctaatgcttgatttgtttatatatttttttcggtatagtccaaccggacgccgattttgaatgtatcgcggtcatgatggagcactctcaggacgtcaagtccatcgcctggcacccacacgaagaggtttgttcattttcgtttatacctttcccttcatctatttctcaggcatttattacctcttgagacaacaattgctaacgttgaattgcgatacagatcctggcttctgcgtcatacgactcttacatccacctcgcttacgacgaccccgattctgactggtgcatcttccaaaaactccatccctctctcccttctactccactcaccatcccatccacttccccgtcacatttaattgatgcgttggttcctacggaagaagagaagaaggcagaggcggagttgcaagtcccgccgttggaggaggatgagactgtttggtgtttagcttggagtcccgacgggaggtggttggctagtggaggtgataatggtggaatccgtctttggcaaagaacgtatgtctttgtatcgtacacatttcgagaccagatgccggtagtgactgactgtaacctattgcaatcacagaggctcacaaccagactcggcgttcaaagagatcttacacaccgccgctcactcgcgttcagtcttttctctttcttggtccccaccctatccatccgccgagtctgccggctccaccgactctactgatttagggatgctcgcttctgcgggggaggatggtaagattatcatctggcaaatcaccgtccctccatctccttcttccgcttcacaagaaatagataatgaacaaatctcgatcagaccgattgccgcccagaaagatgcgcacggcgtgaacgatatcaactcggtagcgtggtgtgtgagagaagataaaaagggatgggggatgttgagtagtgcgggggatgatgggagtgtcaaggtttggagggtcgtcagggattaa

SEQ ID NO: 1149 - DNA, 1544 bp, Cryptococcus neoformans
atgagacactttacaggttcgtgtgcctcgcgtacagtacctcccatctagataatcagctcaactctttcacgtctcgccgggtgttgtatagtcaactttggtccccaacatcctgccgcgcacggtgtgcttcgacttatcctcgaacttaacggtgaagtacgcatgttttacgacaagcttgaagttttggtctgattgcgttgggaattaggaaatcctccgtgccgacccacatattggtcttcttcaccgaggtactgaaaagctcatcgagtacaagaactatacacaggctttaccctactttgatcgactggactatgtttctatgagtgtgtattgggaaaaaaagagaaaggcgagggaacaaaactgattatgccgctacagtgaccaacgagttgtcttactccattgctgtcgagagattgcttaatattgaagtgccggagcgagccaagtggattagaacattgtttggagaaatcacccgtgttcttaaccatcttatggccgtcctcacgtgagtatcctttcttgcctgcctttttgccctgtacctgacgggctgtatacagccacgcgatggatgttggtgctcttactcccttcttgtggggtttcgaagagcgtgaaaagctcatggaattttacgaacgagtatccggagctcgtatgcacgcggcctacgtccgacctggtggcgttgctttcgacctcccgcacggcttgctcgacgatatcttcaagtgggctacacaattctcctctcgagtagatgaagttgaggaggttgttaccgggaaccgaatctggaagcagagaacgattggtattggacctgtaactgctcaacaagcgttggactacagcttttccggtgttatgcttagaggtagtggtattccttgggatatccgaaaggtggctccttatgatgcgtacgacaaggtggagtttgacgttcctgttggcaagaacggtgactgctgtgagtgttttgttcttgttatttttagtaaaaagaagaagaagaagaaactgaccatgcattttagatgaccgatatctctgccgagtgcaagaattccgagagtcccttcgaatcattggacaatgtcttaacaagatccccgacggtgcttacaaggttgacgaccacaagattgtccctccccctcgagcttccatgaaggaaagcatggagagtcttatccaccatttcaaggtaagccatcatccagtctcagggtgcggtatatgatctatggctaatctattcatctcctttttagattttctctgaaggttactctgtccctccaggagaaacatacgccgctatcgaagcccccaagggtgagatgggtgtctacctcgtttccgacggtaccaaccgcccttacaaatgcaagatccgagcacccggtttcgcccacttggccggagcggactttatgatgaggcaccacttcttgccggatgcggtcgctatcattggtactatggatttggtgttcggagaggttgacaggtag

SEQ ID NO: 1150 - DNA, 1474 bp, Cryptococcus neoformans
atgcacacctctctccgtcttttatcacaaaacatcaaacaagcccgcataatggttcgtgcccctcttcgcctgccgctgggccacactgacattggcgcccacaggccaaccccgtgtacatcgtctccgcctcccgaacccccgtcggcgcaaaggacggcgccctcgccaccgtctccgccccgcaactcggtgtcgtcgccgtcaagcacgccgtcgagagggccggtatcaagccagagcgcgtcgaggagctttacatgggcaacgtcgtccaggctggtgttgggcagtcgcccgccaggcaggtcggtatcggtgcagggtgcgtctgaaaaagaaaactggaaaaagaaaaaactggaaaagaggtgctgacaacagatgcactatagtatccccgagactgcagatgccaccaccatcaacaaggtctgtgccagtggtatgaaggccattatgcttgccgcccaaaacatccagcttggccagaggggtgtcatggtcgccggtggtatggagagcatgtcccaggctccgtacgtttttcgcaaatgtatcgcagacaaaacgagccccaggctgactttgtaacaaacagcttccttgtcccccgtcagacacccgcgttcggccactttgagaccaaggactctctcgtcgtcgacggtctctttgacgtgtacaacaagttccccatgggcaactgtgccgaacacaccgccgccaagctcaagatcacccgtgaagaccaggacgacttttgtctctcgtcctacacccgcgcccaagaagcgtgggccgccgacgcgtttgccgatgagattgcgcccgtcaccgtcaagggccgaaagggagatgtcgtggtcaaggaggacgaggagtacaagaagcttttgaaggacaagtttaggaccatcagaccggtctttgtcaaggagaacgggaccgttaccgctgccaacgcgtccaccctcaacgacggtgcttccgccgtcgtcttggcttctggcgaggttgtggagaaggaaggcttgaagcctcttgccaagattctcggtatgtctccattcttcttcgttgttatacccattattaacacctgatctgcaaaaaaggcttcgccgacgccgcttgtgctcccatcgacttccccaccgcccctaccctcgccgtaccccttgctctcaagaatgccggtgtgaccaaggacgagatcgccctctgggaattcaacgaggccttttccgtggtgggcgtcgcggctgaaagggtgctcggtttggacaggtccaaggtcaacgtcaagggcggtgccgtcgccctcggtcacgtacgtcctttttcttatactctccctcccccttctttcaacaaactggccggcggaggtgacggagccgctgggttgggccctgtaccagagtttgatcgtgaatcaggtactatagcaatggtcggaatatcataa

SEQ ID NO: 1151 - DNA, 1712 bp, Cryptococcus neoformans
atgagtaaggccaagtagggtgtagtttatttctgttcacctgtcttctgcagcggatgttgatcatcataaaggcgagaatgtagcaaagggcaggggcttcctacagcatggttatatcagaatgaataaggattggttatatacgccaaaggcaaaaatcatttgcaggaagggataggagagatgggataagaaagtgccacatcagttattttccgcagaattccgcatttcttcgagatttcgatttcaccaaggacaataagaaacgtcaagaaacgccccttcgcgacttgtaaacacattatttgacccaaagcttacaaaatggccgactcaaagcagtgagttaatattctttcgttgacggagtatgaacaaacaaattttgctgcttggaaacacgtatactaacgagaaaccgcccatacagatccaaccgcgactgggctgccgatgatgtggatggtgcgttcctttccagctttcaaagtctgcctgcctcttacaaaaatgattgattagccgatgagcttcccccaactaccgaatctaccgatgccaacggtatcacaactatagttagctggaagtacaacgcggatgatcaaaaggtcaaggtgaccaggagagtgaggagacggttgcaggtctccactgtgactcagacaatggcggagaggaagcaatggccaaagtgggtgtttatatggaaggtataggaacattaattcttaatttggacattgcagattcggtctcgacaaaggaaagcctcctggacccgacagaaagactaccattatcggagagaaccttcatttcaagatcgcccccatcagcaaggtatgtgccgtaagcgtgataatgattttggtctgaccatgccgtagatccaacgtgttgaacctgaacctgaaacagctgtcaaggctcccaccggaaaggcggttgtctgtcgactctgtagtggtcaacattacactgcgagatgtcctttcagggaacagcttgctgctatcgacaatctcaatgcagacggagcagaggaagagcaggttgttgtttctggaactctggccgccaagggtgctggtgagacaggtggcaaatatgtccctccgtgagtagtgtgaaggctggcccagtagtattttgtcttatgctgtgatagatctcaacgcgcaggggccactggtgctggcgactcaatgttccgagctcgagacgagcttcctacccttcgtgtcacctccctttccatcgatgccgaagaagacgatcttcgggctttgttccaacctttcgccaagaatggcaagcttggaagggccaatatcgtcagggatcgaaacacgagggtcagcaagggtttggcgttcgtcagtttcgagagcaagagagatgcagaggcggctatggctcacttgaatggccgcggtaagtacaggttttcccatcagctaattgcttgtgccggtaaaactgattatacattacccaggttacgattcattgatcttggaggtcgcctggtcacagcctcgaggagaacgaacgtagttgtagtatataggagtgtgttgatgcggcttaaaagcggcgagcggtgttatgccgccttgtatatgcagcccgatacccatacgaaaatactgtcatcgtttattgaatcaataaagaaggaagagcatggacatgcggcctga

SEQ ID NO: 1152 - DNA, 1438 bp, Cryptococcus neoformans
atgtcttgccccttccacaccaccacaaacacctccaaccgcagtcccttgccagaccgtgcacttctcctcgcaatgaagtcccagacaaacactttcattctcggcacgcgcaagtcaaacctcgccctcgtacaaacaggtcacgtcgcagacgatcttcgacgtctccattccggcgcaggcagcaaattcggcgagactagagaggaaggtgacgatgccgaacaaggtgatgtgccttttgtgcatccctacactttctccattgagtctatgaccactgttggtgaccgaaaccagactaccccactccacctcctctccccttactcctctacccagcccgcaaaatccttatggactgatgagctcgaagctcgactcatcaacggtcactttgacatgctcgtgcactccctcaaggatgtgcctaccgttctcaaggacggatgcgaaattggatgtatggctaagaggcatgatcctcgcgatgctttggtagtcaagcagggattaccgtacaaaagactggaagatttgcccgacggagctgttgtcggtacaggtagtgtgaggagagtagcgcaattaaagagggctttccccaatctcgtttttgaggatatggtaaattttgtttttgctaaaaaaataccttttatgccatgcttactgccgatatgcagcgcggaaacctcaacacgcgattcaacaaactggacaacccccaatcgccattttctgctcttattctcgccatgtctggcctcgaacgtttaggtatggcccatcgtgccacgtcgcccctttcctctccaaccctcatgcacgctgtcggtcaaggtgctcttgccatcgaaattcgatccaccgaccctcgcgttcgaaactgtttaaggggattaggccattggcaaactgaatggtcttgcggtgccgagagaggttgcttgagggttttggaaggaggctgctctgtcccggtcggtgtagagtctgagctcgtcgagcttgacgaggacgaggttgctgcgcatcccgaactacttgagggtgtggaggatcctttcaagggccaagaagagattcctcttgaaggagactcacctatgctgtggttctctggtcttgtagacactactccgccccctactccatccacgcccactttttcatctcactctctccctccactttgaacacgcctagcgaagctcactctccattcttgtgtcacctctactgatggatccaaacatgtcctttttacccctcctcctgtccttgtacgatcataccgtcaagcagagcagttcggtgaagaatgtgctcggagattgagagggatgggtgcaggggaaatcttggatgagatcaacaagctcaggaaggagcgagagttgagggacttggaaagcgctatcgagagaagtag

SEQ ID NO: 1153 - DNA, 1522 bp, Cryptococcus neoformans
atgggagagggcttcttttctgatatggccacagtctacaaccaatgcccagtcagcagacaccctaaaacttgctcttcgtctccttctgttcatctctttgggcacgaaatagtcctcgacgtgtccatcccggcgcttatcctctccaccgtcggagctgctttcctactccgatacactctctccatcttcaggcttttccttgagcttactgtcttgccaggaaaggacgtgagtgcatttcatattcaatgtacaacatatatggtccaagggagactaatacctgacatcttctttctcataatttagatcaaatcgttccagtctcgaaagggagagacatgggctgtggttaccgggtgtacttcaggtatcggcctcgaatttgctcgacagcttgccgccaaaaagttcaatattatccttgtcggtcgaaggcagtctgctcttactgatctttccaaggaaatcggtatgtcacacgttccattttgcctcgactcaaataaacgaatgtccaatgaccggctgtttgctgattacgacgtggatgatcagagagcaagtacgatgttcacaccaaatctgttactgtggacgtttctacccctggtagtgctcgagacgacgcgctcactcagcttgagcttttggcccaaaaccttgacgtgggtattctcagtgagtcctttggatctttccccggccacaaatagatcttttgaggctcacgtttgtggacatacagttaacaatgtcggtgcatcacacagcatgcctgtagctttccacgagactgagcgttccgaaatgagccgtatcatcgagaccgtaggtcctcccttgctccatcttctctctcctgtttcccacataagagcggccaactgataacttcttccccaaaatttccacagaacgtcacctggacctatctcgtcactcgctccatcctcccatcaatggtcgcccgctccaagcaaaaaggcgctcccaaatccctcgtcattactatcggttccctctccggacgcatcccctctccgctccttgcgagctattctgggacaaaggctgctttggctacttggacaaaggcattggcggaggaggtcaagcctcagggtgtgatcgttgagcttgttcaggctgctttcgttgtaagcccctcttatcaaaccaaatgccggccagagctaaaaccctccaaaaaggtatccaacatgtccaaaattcgtaaatcttcacccttcgtccctacccctgcgccttttgttcgctcaactctcaactctatcggccttccgcgcggtgcccaaggccgtccgcatgagcgcacacccttttggtctcatgctattttggactatgtcgttgggtttgcaggctatgtgagtgagatggcagggatcaaggtcatcctcgggatgcacaaggatattaggaagagagctttgaagaaggctgctagagatgagaagaaagcggagtaaaaagagtgaataaagcgagatag

SEQ ID NO: 1154 - DNA, 1602 bp, Cryptococcus neoformans
atgatgctgatattcagtatagaaacctatcattctccaaggtccgcttttatctcttgcaactcaaaacgcatttcagctaaatgtgccgtgtctataggtcatgagcgatctctcaaccaaatcgtctttaactccgaaggcgatcttctcttctctgcctcaaaggatagtgtcgtcaatgcctggtacacctcaaatggcgagcgactggggacttatggcggaatcaagggcggcgatgggcacaacggtagcgtctggactgttgcggtggattgtaagtcgaatatcctgtttagggtgttattgggtctataaatggaagtggggatggaaggagatctttgtttggtcggcaagggcactgcagaaacaatgatcacgggaggaaaatcgacctttaccttgggcgaggtttttggacttactaatcatgaaatacatagctcaaacaagatttttacttactggcggtgccgacaatgcgatgaaactgtgggaagtcaagactggagaatgtttgtacacctgggagttcctaaccgctgtgaagagggtcgcatggaagtgggtcctgttttgtgtcaaacggacatggaaggtatactgatccaagaatcagcgaggatgatgacatgttcttgagcattactgagcagagaagtggacagcctagtgtgattaggtgagttgacttcttcgtcaacgttgctggagtctgttaacattgtttctagaatattttccatcaaccgagaggaccccagatcccgttcgtctacctacccttggtttttcttttcttttgctattgctgacgcacgtgcagaatccaccacccctatcactgaaatgcgcctcagcgggtctcgtgccaccgttgccatctgggctcctttgtctgattatattatcaccggccacgagtctggaaagattgccaagtacgatgttaagactggagaggaggtgcaggccgttgaggatgagcactctgctttgatttccgacatacaactgagcccggacgggacttatttcatcacagccagtaaagacaaaacggcgagagtgagtgggaatcgtaaggattgcagagttgtcgctgattgtgatgtgactcgtagttgtgggacattgaaactcttgaggttatgaaggtctacaccacagagactcccgtgaacagtgcggtcatcacccctgatcgaccatacgtaagtgttaccagactccctttggatagatcatcttgctcagtatcgttccagatcattctcggcggcggtcaagatgcgatgaatgtaacaaccacctctcagcgagcgggtaaattcgagtccaggttcttccacaagttgtttgaggaagaggttggccgtgtaaagggtcacttgtaagttctacttcgccttccgtgcgcatcttcagagcatactgactttgtgcagcggtcccatcaacaccctctcggtgcatcctcaaggacgggcctacgcgtcaggtgctgaagacgggtttgtgcgtgtgcactggttcgaggagtcttatttccgtagtcggccttttggggaccttgagcctgagcccgaggtatag

SEQ ID NO: 1155 - DNA, 1369 bp, Cryptococcus neoformans
atggccgagcaagaaccacaggtccagtcccaacaacaaaaacaacaaaaacaaaaacctcaacaacctccttcaggcgaacccaaagccaaatccgccaaagagctcaaaaaggagaaacgcgccgctgctgtcgcttcccgagccatccctaccgaaggaggagttccagagggtccacaaggtggtaaacaatcatccagcactgccacttctgatggccgtcgctctcccgtggttcatctcaacccttcttctcaaaatcccgcttcttcagccggcccttccgcccctcgcagacctcccaaccactctgaaccctcagcgcctaccctctccgttatccagcaaaaccttttcttctcccatctgccacaccaggctcctgccgataccgtctccgccctcgacacgggcaagatccacccgataatcgtccgtgtgggtgtgctgatgaacagtggacagttgaggggtgcgaatgcgagaacgatcgggatgatgtcggcgtttaaagaggtgattagggattatgaatgccctgatcaagcggttttgtggaaggatttgccagtgtatttgagtccgatgattgcttggctggaaacttgcaggcctaaaggtgtgggaggcggtaatgctatccgatggttgaagagtgagatcaataggttgggtgagaagggggataaatccgaggcagaggtatgtgatttttcctccttatgctgtaaaaggaaagctgataatgtgtagcaaaaatcgtatttggtcgatgcgattggtctctaccttcgcgacagaatagaatttgcggaccaggttattgcagacagcgcaaaggaaaagatcaagcctggagacactgtcgtcactttcgctcggtaagcacatcgctatctattgaattgtcgactcacggctgacggaacacaagatcatctgttgtcgaaacggtcttactcgaagcctggaccagcatgcgagaacaagaccccgatgcaaccttcaacgtcgtcatcgtcgactctagaccccttctcgaaggtgaaaagcttctcaaagtgctcaccgccgccggccttccttgtacttacattctcctccccctcctctcctctatcctccctcaagccgacctcgttcttctcggcgcctctgccctgcactcggacggtgctctctactcccgcgcgggtactgctgtcgtcgccatgctcgccaaggaacatcgcgtccccgtcgttgcttgtgtagagacatacaagtttggagaacgtgtggtgcttgatggtgtggcgacaaatgagttgggtgatgtggagggtttattggcattgccgacaaagaagccgtttgcattaggtaa

SEQ ID NO: 1156 - DNA, 1504 bp, Cryptococcus neoformans
atgacagtcaacgtgagttcctcctctattgatgcgctttagcctccaggggtcctgatagaagccttcttcttcattagctggaaacgaagaccttttgagagacaaagaggtcgctctcatcaagttgggcactctctacagagattcaaggtatttatctatccgtacaatgatctatagaacctttctgacacttgtctgtgacgacaattttggtagcatgctcgacaagttgtctcagttgataacggactctagaactttcatgtcacatatcgcaaaagccaaaacgactaagctaggtgagcttgcttccccagccttttaagttacgacattaatcagtcaattccaaagtgcgcacactcctggaccttttccctcaagattcaaaggatatgcagatgaaggtcattcaagagaatatagactgggcccgcacagaaaagagggttttcttgcgccaaagcctggagataaaactcattaacgtgtgaggcctctttgtttgagaagactatgttagatcttcttagctgactacaataccaatcagcttgttggatgccgagaaataccaagaggccttgactatcacccaaactcttctcaaagaactcaaaaaattcgatgataagattatcctgaccgaggtgtatttattggagtcgcgtgctgcccatcacatgcacaatcacgcgctggcgaagacggcactaacctcagctcgcacaactgccaacagtgtatactgtccgcctacgcttcaggctcaacttgacctgcaatctggagttatcatggcggaggacaaggattacaaaacagcgtactcctacttctttgaagcctttgaaggtttctgtcaatccgccgagagagacaatagagcactgagcgccttgaaatacatgctgttgtgcaagattatgatcggatccgtgagtgggatgtttggctaactcgcccatatgctgatgaagtctggattcccccagcctaacgacgtcttctcgttgttatcattgaaaagcgccgccccctacataggcaaagatgtggacgcgatgaaagcaattgcgacggctcttgaggaacgcagtcttgatcttttcaagacagctctgcaaaattattccgaccgtaggtctgcgtagtgtgaagacttaacagctaacggctcctccagaattgcagaaagacgaaatcattcgttcccatctctcttatctttatgacacgctcttagaacagaatcttatcagagtcattgaaccctattctgcagtcgaactgtcatggatagcttcagaagtggggcagagcctgcaagtcattgaagacaagtgagttattgttttcgttctctttttacaaagaccgacaattatttaacctatttttcatccaggttgagtcaaatgattttggaccaaaagttctgtggtattttgaatgaacgcatgggtactctcgaagttcatgatgattattcaaatga

SEQ ID NO: 1157 - DNA, 1441 bp, Cryptococcus neoformans
atgtcgtacgttaccattttcatatccgttctttacagtgactgattgacgcctacatcaggccgaagcgtcaggccgtatacacctcttcatcacgccccatttgacgtcctcaacatttcatttcatccccacatcatcgcatcttcctacatctgccgccttgaccccctactacatcttcatttccaccaaacgaggctccatcatccgccattctacttccactttacgtcgagccggtcagaactttggacatgcccagggtggaggaaatggccacaatggagagatcttatgtctggcagcgagtgaagacggaaaatggcttgtcagtggaggaagggataaggtgatgggtgtatgggatgtcagtgaaagagagcccaagtgggtgactggattaaagggccataaggacgctgtcactgtgagttacaacatggtttcttggtggattaggttgacccgtcgtatcagtcgatcgccctttcaccacttaacaacccgtcgtaccacatcctctccgcctccctctcccgtcatcttgctcttcattccctttctaccctctctgtcattgacacattctttggccatcaagattctatcccgtctgtctcttctcttaagcccactttggctgtcacggctggctcccgagatcgatcatgtcgatggtggaaagtcgaggaggaagttcagcttgtcttcagagcaggtgggaagactaggaaggatttaaaaggtttaatgcccgcggaaaggaaggaacgtttgggaggaggatggacagagggtgttgagccggaaaaggagaaggacagcaaaggcaagggaaaagaatttatggaaggttcagttgactgtgtttgcatgcttgatgatcagcatttcgtctctggtggtgatagcgggtaagtctcattttccgcaacttgtatcctgtcttaacatatcttgtagatctcttcttctttggcacactggaaagaaaaagcccatcttcactcaggctttcgctcatggattcacaccgatcactgcagaaaaccctatttccgctccccgctggatcacttccattgcagctttaagaggtaccaacctttttgcctctggttcttgggatggccaaatcaaattgtgggctatgaaccaagaattgaaatctttctcttatgtcgatgtcgaaatacccgccaaggggttcgtcaactctcttcaactcagttctcttccttatgagactatttctcatgcttctcttccggagtcaggagaaaaggagagtacaaatgcaaagtcagaaattgtgttggttgctgctgtaggccaagaacccagactgggtcgatggatgagggataagcttgtgaaaaacggagtgttggtcgccagactcgagctggataggaaaggcaaagccatgatgatctag

SEQ ID NO: 1158 - DNA, 1476 bp, Cryptococcus neoformans
atgcgtttatcccgtatcctcactgctatatccctcctgctatcgccattaatatcctctcttccccacgaacagctcgatcctcagctatccaacctttttggaaatgacaccacgacagacgggcataccaataactgggctgtgctagtctgcagctctcggtactggttcaactatcgtgtaaatatcttaacactccacactcaagctactggcggtatgtgaaactaatgaatactgtcagcacatggccaacacactcgcaatgtaccgaaccctaaaacgtctcggtcttccagattccaacatcatcctcatgctagccgacgatgtggcctgtaacgcacgcaacgccttccctgcgacagtctacgccaacgccggaaaaatgctggatctgtacggagaagggatagaggttgattacaaagggtatgaggtaacagtggagagctttttaaggttattgacaggccggcatgatgctacggttccgcgctcgaaacggttattgagcgatgcgtcgtcgaatgtgttcatctatatgactggtcatggaggaaatgagtttctcaagtttcaggataatgaagaggtttcggcgtatgacgttgcggacgctatcgagcaaatgtgggagaagagaaggtcagtgccagtttgtgtttgtgcgggaagagcacacgcttatgattcgttaaatagatataacaagttgctttatgtgattgatacctgtcaagcaaacacaatgtactccaagttttattctcccgaaatcatcgctacgggatcttcatctttgggcgaaagctcgtactccgtaagactaccacctcttgtttcgttaaaaggctcggctgacgaagagcagcatcacaatgacatggatatcggcgtcgcagtcattgacagctttacccacaacgtccttcaatatctcgagacagtgggcaagacttcacgtaacagtcttcaggaattcgcgagtcgttcttttggtacctgtttaggtgttgacagctaatcatcaaataacagttcaacacgtatgatcctgccaaaatcttttctcatcctggaatatcaacttccctgagcagtgtccctccggaacaaatccttattacagactttttcggagctgtagctcgagttgaaatatcgccccaaagtgcagagctgcccttggaatctcgactaatagcttccaaagatggttgggagcatacgagcttgagtatcaacgatggtagtcttacggaggagatacccgaagtgttacctaggaagatagaagggaccaagaaaggcaatggggagtggaatcggcctcttgtggataaaacgagtgaatggggattcttgcctccataccttatcggagtcgtttcgttcatttggctttatatctcgttgggggataaggaagacaaggatgacagtgaagaagtaagggaggaggaactttga

SEQ ID NO: 1159 - DNA, 1591 bp, Cryptococcus neoformans
atgcggtcttctcctgtgattgaaatatctccagcgtcatctgggaccgctatattccaacacaatcccaaaggagacgcgacgcttagacgagaatgggaaccagggtgccagccagatgagctatatgacgctttcttacctgcttggagagcaagtttgcgaaggcttctcgtaaggcgcctgagaaacgagagtacgcaaatggcagactggcaaaaacgagtaagaagcgaagctcgcgataaatatttctattggactgcagtattcggaagtaagtacagtttcttctgcattatatggaccgccgtcattgtgccaaatttgaaacctgctgatgtgagttgtattctcgaagcgcacacgtttttcatgatgtttttaccaattctctttttctttggccatccattggaaggcagagggtaagtacgttcccgtactttgactgtagctggtctgatgcaccttgagcctactgcatgtcgtagggttaggtatatacatttcatcgtttgccaaggatttggtgtgcactccacggccgtacagtcctccagtaattcggttaagtaagtcatgacaagtgcaacatatgcacagctcatcgcatacatgatggacaggtatgagcactcatcatcatgaatatggtcagtgtactggtgtccaagggaacaggatggatagtgacatcttgattcaggctttccatcatctcactctacaaactccgtcagtattgcgctgtatttgggacaatggatattcaaactccaggatcgcctgggatggccgactgtactacttagctggctgagtacatcatccaatcttaaaattcagttcttgtatctaaccccacaactagtgctagcagtgtatatgacaagcgtcataggcggcagagtgtacacgggcatgcactccatcggcaagtgttttatatatttctctctgccctcgtcatgatacttttctaaatcgcctacagccgatattgttggagggagtatcatgggtgtggcttgttggttattttggattgcaattggcgataggaacgaggcatgggtgaattcgggctcttggacaggtaggacacgtcagttctggagtatgagtaacatgatcgttaataacgtaacagttcctgcgatcattgcacccctagcgtttactttgatccaccgtcatccggaacccttcgaagcttgtccatgctttgaagacgctattgcggtgcttgcagtcatgcttggttccactttaggccaatggttcacagttgcaatctggccgtccattaaggtccaaaatccgactgccttctattcgtataacctggcaacaattattctctctataatgttcagattggtttttggtgagtaatctttttgacatatcggtatacatcacctgcaacataatacaaagggctcggaacattgtttgcttggaggctccttgcaaaatatacacttcgccaagtgcttcctcctgtgtttcgcagctgttctctcttacttcattcaagtttaccagctcgacgattctacatctctactgcgtaagtgaagcctaa

SEQ ID NO: 1160 - DNA, 1695 bp, Cryptococcus neoformans
atgcacaagcttgacgcgtaccttctgcctcctcttaaattcactcattccccacattcctctgcacccgtcagaggctctcctccaatcgctcatacctttatccgcaaccccacttcaggcaggatcgactgacccatgtccaactgctgttaccatggaacctttctccacttcagtcttcaaggttctcacttgaatatttgctactaccaccaagatctgcactagaggccgaatagatatcatccacaaccaatatccatctaatatctcctcttcatccctattttctttttacatctattccatctcccagtcccaaatccacctcatgcctccctgcgatgtccggtaatggctcctcatcctttgcagccccaccgtcggcacgcattctcgtcatccctcctcaattccattctatgacagccggcgcaggggcaggccttgtatcatccatcgtaacatgtcctctcgatgttgtcaagactcgtttacaggcacaggcagcctcggtacaccacaaggactaccaaacagttgaaatgatcattaaggatatatggacatcaggcggcttcaggggtttttataggggactaggaccgacactggctgggtacttgcctacatggggaatatatttcaccgtgtatgatttggtcaaggacagattgggagcttgggcggcgcatagtggtgagttgtccagaaggagattaacaggagaatattagctgatacccgttgtagatttacctacaaaaccgtcgatggtgcatattgtagcagcaatgacggctggagccaccggaacgtgtatgactagccctttatgggtaatcaagactcgattaatggttcgtgctcgattccatcgctatctgcgccttgttgtttggaaatgctaatatccaagttaggcccaagtaggtccatccgatcaagcacgatacagaaacactctcgaggcaatagtagacatttacagaaacgaaggatttagagcattttacaaaggactcttaccgtcattgatgggcattagtcatgttgctgttcaatttcctctctatgaaaaagcaaagtcctggtccggtaagtctatctcaaaagtattgctttgtaccatagctgaaaggcaagggatgcagataacaacacagagggcgaccattcctccttaacaccttcaacgatccttatctgctctgcattctccaaaatggttgcttcaatagcaacctatcctcatgaagtcctccgaacccgtctccaaatccgcaaatcatctcctaaatccaattcttctagctccgttttcagttccaacccttccaaaccttctcatccaccattaccattctcctcaatgcctttcaactaccttccatccgcggatggcaaatctcatccaccattagacgcttccgactccacagcttctcatgcccaccctccatcagatcgccagaccagacccttatggcgttcattgatcaagttccgtaaggaaggcgggattatcgatacttttttgagtataaagaaccaagatggttggagaggattttatagagggttgtctatcaatttgatcaggactgtgcccagtagcgctgtcacaatgcttacgtgagtgcgatttttttttttgaccgaaaaagggcaataaccgtattccatcactga

SEQ ID NO: 1161 - DNA, 1464 bp, Cryptococcus neoformans
atgtctccttccgtgttcaaaatatcaccaggtatcaattcatacgactggggcaagaaaggctcagcgtccctagccgcacagcttgctactacctcaatcccagacttttccatcgatgaggacaaggcctatgctgaagtacgcgtttttttaaaaagtttgccgactatgcactaacgcgaatcagttatggatgggtactcaccccaacaatccatccaggttatcggacaacaccttactctctgaacacctgaaatctcatccagagcttatcggctcctccgtgtcttccaagtttgaggactgcaaggacggctctttacccttcctcttcaaggtcctgagtataggtactgctctcagtatacaggctcaccctgataagccgcttgcgaagaagctttttgacgagaaacctgatgtctacaaaggtgtgtcattcccttctactcgatgttggacgccaagctcattgatggcgctatagaccctaaccacaagcccgagatggccattgcccttactcctttccttgccttccttaatttccttcccctttctgtgctcctcttgcaccttttgaccgtccccgaactgcaagagtttgtcgactcttctcttaccgaatccctagcctcatctctcggcctacctacatctcaaccacccgatacgtcccttttcaagcccacagaatccccagccactgctgagcagaaagacattctcaagcaaatttttgccgctcttatgtcagcagataagaaacttgttgaagaagctatctccaaacttatcaagagatatcaagcgaagcgagatataaaggagaacgagaagagtcttgtggacttagctttgaggcttaatgatcagtacccgggggatgttggtgtcctatgtgtgttcctgttgaacgtcgtggagctcaagagaggcgaagctgctttccttggggccaatgagcctcacgcctacattgagggtggtgagtaatttcatgctttcatgggaaagctgatcgatatctgacggaaaccagatatcattgaatgtatggccacatcggacaatgtcgttcgcgctggtcttacccccaagctccgagacgttgacacccttgtctccatgctcacatacgaagctgctccaggcaacaagcaactactccaacccaccccatttcaaaaaggtgatgatactaccaaactctacgatccccctatcgctgaattctctgttttgcgtactgagctttctaaaggaatgaagacttctcaccggcctgtggaaggtcctagcttgtgtgttatcactgaaggggaaggtgttgtcagaaatggaaatgatcgatcagagtttgtcaggggtgatgttatctttgtgggagctggcaaagaagtggaatgggaggcgattaagggattagagatgtttagggcctatgttgaggcttaa

SEQ ID NO: 1162 - DNA, 1536 bp, Cryptococcus neoformans
atgaagtcgcccatcttcgccagctggcgcacgctaacaatccgcttcggcaaaagccccgcggcaaggaggtactcctactctggcggcagagctcctgaacctacacccacccccaggacaagtttgccaggcgagaatgatcactcgtatttccctcctcaatgggacgatcgaccgtccatgccgccatccgaggtctcgtacggaggtcccccatccagcacccctggtgcgccgccctcgggctatagccagtacccgcccaactgggaagctcagacaccgggaggtaactggaatggcgagagacccggtcggttagggaaaagaagggcgagagatgaagaggatgatgaatatgagcggaataagagggttgtttcaggtcccgtggcagggcaagcttatagcaaaaaggtgactgtcgttgctgagcactgtatgttccctgcatcccatttacttgactgtccttttttttggaactgatcatctgtggtaagataattctcgaccagaagtaggcgtcgagcgccgtgaattctctcccattatcggcctcaaaaaattcaacaactggatcaaatctgtgctcattgggaaatttgcttataggcctcgaggaaaagttttagatgtagggtgtggaaaaggaggcgatctgaacaagtggaaacaagcaaggatcgcactttatgtcggactcggtaagttgccaacatcttcccaagggtgaacattcactgcggcgttgctgataagagtgggctgggtacgtagatgtggcagatcaatctgtacagcaagctgcagacaggtacaggcggatgccgaaacccggattcgacgcattcttctatgcgcatgattgtttctctgtacgcctccctcccacgttttcccttccatgccgcatcctattatatcgttgtctgacagctttttttttttttttgaaatgtgtcattagaatccattgagtgacgttctcagccccgagcttcagatcaaagacctctacgacaatgtcaccatgcagttttgcatgcactatgcgtttgagaatgcagcaaaagcaaggatgatgattgagaatgtgtcgagataccttcgccggggaggtatctttatcggaactatccctaatgctgaattactcttgcaagtggttttttttaaagaaaaaaattcttgaaacaatgctgattacagtccatccccacagagaaagactgaacgagctgccggaccgcgatgaggaacttcgatttggcaactcgtgctactctattcagtttacagagagaagacataaaggcgtgtacggccacgactatcgattctacttgacagatgcggtggaggacgtcccagagtacctcgtggactgggaaaatttcgtctcgtacgttctttttttttttctcaggttgggtactgacgacaccacacgtccaggttggcttccgagtctggacttcgattggtctacaaaaaggcgttccatgagattctccaagaagaaaaagatag

SEQ ID NO: 1163 - DNA, 1644 bp, Cryptococcus neoformans
atgggcatggcaaagtgggtgtgtgaaataagtgtttacgtaacccagtattcacgcgacgggcccctgcttgacgcgaactgtgcgttgttgggtgttcgttgtcgttgtggaacggatttcttcctgctcagctttctgctctccatctgtttctctcacacacccgccccactctgcaatggcttcaagacccacaagagcgagaaagcaggcgaagaagggcgtacagctcactctcatggtagtcggtcagtcaccgcctccccttcccacaccgaacaaccctctgacaccacacaggcgcatccggcacaggtcgcaccacctttgtgaacaccctcgtagagtccgtcctcctcgaacacagcacagccacccttctctccaatcccgaggacccccattccgccctcgacatctccctcgtaaagcaggcagctgcccaggccaacgtagagcaacctatacgcatcaagcctacaaatatcgagctcgaagaagagggtgtcaggatttcactgacagtggtggacacccctggctttggagatggtatcgacaatgagtactggtgggtcgtttatttcacggcaaaaaaatggctggggctgatggaagggcagtttccaagagatttcaagctatcttgaacgtcaatatgacgatatcctggcggaggaatcaaggatcaagcgtaaccctcgtttcaaggacaaccgagttcacgctttactctattttatccctcctacgggccatgcgtgagtaacgatatctatttggtgttccaaaagctgatattcaacagtctccgagaattggatattgaattgatgcgccgactgtctcctagagttaatgtcattcctgttattggcaaggccgattctcttactccgtcagagcttagggatttcaagaagcgtgtaggcgtcttgttttatctccgcaataaacaaagctgatggctctgcagataatggaagatatcgagtactatggtattcccgtctacaactttccctacgacgccgaagaagatgacgaggagactattgctgacaattctgccctccgtgcccttcttccatttgcgattgtcggttccgaggaggagattttgattgacggcgagcctgtgcgaggaaggagatacccttggggtatcgtcgaagtggacaaccctgaccactctgactttacccgcctgagaagtgctctccttgcgtgagacttttcgttgcagattcaaaaaaaatcaaaagctgacatgatcgtagctcccacttgacggatctcaaagagattacccacgacttcctttacgaaaactaccgaacagaaaagctttcacgatctgttggcggaaacgacccgtaagtttaaatgtatgatccatgattcccgcttatgttctgtagcgactcttccatccaccccgaggatatggccaaccaatctgtccgactcaaggaagaacagctccgtcgagaagaagaaaagcttcgtgagattgagctcaaggtgcagagggagattcagatgaagaggcaagaattgttggccaaggaagacagtttgaaagtgcttgaagccaggctgggtacgtcttcatcttacatatctcaacggaaatgctaa

SEQ ID NO: 1164 - DNA, 1461 bp, Cryptococcus neoformans
  misc_feature (96)..(96): n=g, a, t or c
  misc_feature (492)..(493): n=g, a, t or c
atgaaagcaaaggtgcttttttttctcgggcgattatgagatccctagctaacgtttctgcaggccgctagccaagctcaactcgctcccacctcnctaggagctcttagctccaatgatcaagacatctcgaactcctctttcgatcttggaaatgttactttccatgatgtcattgacacttcgctcacgaaggactcctcatcaaaagcctttatgcgagagttgcgcaaagtcatcgaacggagcgatgtgattattcaagttcttgatgcaagggatcctgaaggtacgaggagtcgttgggtggaggatgaagtgcggaaaagggacatgcaggggaagaagctgttgggtgtgttaaacaaaatcggtgagttttcacttatgaggagaagtgaatgctcatccttgtaataagaccttgtaccaagagcgaatttagaggcatggcttaagcaccttaggcattcttttcccacaatgccattnnagtcctctactcaaagccaaaagcagcatttatcccaaaatgccgttcctcttgcccaaccgtcaactgttccaggaaagcaagctgtccttcaagagcttcccacgacttcagcatcccttggtgctcctgctttgcttcatctcctcaaacaatatgccctttcaacaccacacagttcgctcacagttggtgttgtgggttaccctaatgttggaaagtcttctctcatcaactccctgaagagaagtcgggcctgtgcagtggctgctatgcctggcaaaacgagagtggttcaggaagttgctctggacaagggtgtgaaaattttagattgtcctggtgtagtattggaggatgtgggtagccatatggaaggggaagaaggcagaagaaggcaagcggaaatcatgctgagaaactgtgtcaaagctgaattggtgcaagatccaatctctccaggtaagactgtcggagggtattacaaaaatcattagcttatatgaggtagtggaagtgattttgaacaaagtggaacctgctcaattacagaaactttacaacatccctgcatacgatgacgttcgcgatttcttgatcaaaatggcactcattcgagggcgactcggcaaaggtggtgtccccgaccttgaagcttccgccgttcaagtactccgagattggaatagcggcaaaatctcttattacactaccccgcctaaatttcacccatcatctgcgcctgcacctgcacctgtcgtaactcctgttctggcaccaaatgaggcagcgggagatatggaaatgggtggcgacaaggttggagatgccaagattcttaccactctaagtgaagccttcacaatcgaggggttatttgataatttgggtgacgatgctgcctgggaaggagagggtgtggtcaaagaagagggaattgccgaagagtgagttacctatcccaatag

SEQ ID NO: 1165 - DNA, 1459 bp, Cryptococcus neoformans
atgtctgcaccagaagtattccagctctccttcggccctctaaccggcgtagctttcagtccagacaggactcgtatgtttctcttattgataccccttgtgcacagctcacacgcccttataatagacgttgccgtctcacccaacaacaacgaagtccatatttaccagcgacaaggtgcggaatggattcacaaggatacccttgctgaggtatgtttttctatcgtacctcgtaataatcattgtgttgacacgtggacgcgcacacctcagcacgacaagctcatcactgccatctcatgggctcccaactcgaaccgtatcgtcacctgctcccaagaccgtaacgcctacgtctggactcctactgagtctggatggaaacccgcccttgtcttgctgcgaatcaaccgcgcggcgacgtgtgttaagtggagtcccaacgaagacaagtttgctgtcggaagcggtgcgagaacaattgcggtctgttactttgatgaggagaacaattggtgggtatcaaagcatgtcaagaagcctttgaggtcgactgtcttatcgattgattggcatcccaacaatgtcttgttggccgcgggcactgctgaggccaaggcatacgttttttccgcttatatcaagggtgttgactcgaagtaagtgagatttcgttgatgctatgcaaccgaatgctcacgtatgacaggcccgagcctacagtttggggtgagaggttgccgtttggcaccatctgtggcgagtttatttctcccgatggcggttgggttcacagcgttgcgttttcgccttccggtaatatcctcgcctatgtttgtaagttaatcttgccaaaataaaagtaaatgattctaatatcctctcagcccacgactcttccctctcaatcgtctatccttccggcccaggtgctcctcccgctgctcactttgccctccgtctcccttcacttcctttcgtcgacctgacattcacctctgaatccgccctcattgccgcgggacacgattgccaacctatcgtcttcaccggctccgaatccggctgggttctttcccactctcttgatgatccttcgtccggaggttctcgtccactgaccccgaccgctaccggctctcgttccggcggggtcggtaggctgggcaacaacgaagctttcaacatgtttaaggctgccgactctaggggtcagcgaggcgtccccgctcccggcgcaactccgaccagtgcgggcttgacgcctgtaggcgctgatgggttgttgacgactgtgcaccagaacacgatcacttgggttgagccttatgagtggggacagggcggagaggttaccaaggttggtacggcgggtaaggatgggaggttggtcgtttggcccgttacagctgccaagtctggtttggcgggcaggatggccgggttgtcggtgtag

SEQ ID NO: 1166 - DNA, 1680 bp, Cryptococcus neoformans
atggcggtgtcttgcggggaagcttacgcgtctttggcgagctggcaagatggaagctggcaagagggagcaaggggaggaggacgcgcgacgcgtgggaaatatattatgcaggaggaagcaaacgaggaggaagaagaaatgaacaacgcgactcgcgacgcagctacgcgccccgcgtcgccccaccatgtggcgaatttgatcccgtactcattacgtaacctcaggtcaaaacaaaaatcctcttccccttgtgcggccaaaagtctgccgcacagcgaggcaccttgccaccacatccaccatgagcgcaaagaaccagaagagaaaggccacggacatcccggcagacagcacagaggtccaggacaagaacaagcggcacagaaaggataagcgtgagtaaactctgcctgtcgttctcatctcactttctcatcacaatgcagcatgggacacggatgatatcgaccactgggctatggaggaattcaaggcgcccaatcccgagacccacaaaccgttccttgaagaatcttcgtttgctcttctcttccccaagtaccgtgagccataccttcgatcagtttggtcctccatcacctcggctctcgaagcctacggtcttgcgtgtgagctcgatttggtgcaaggtaaaatgactgtcaagacgacgaggaagacttgggatccgtatatcatcttcaaaggaagggatctcttgaagctattggcgagaggagtgaatgcgccgcaggcaatcaagattttggaggatgggattgcgtgtgatatcatcaagattggaggtatcgtcaggaataaggagagatttgtcaagaggagacaaaggattgttggacccaatggaagcacattgaaggtatgttttaaatgccatctacatttgataatgtcgctgaccctcaactaggctattgaacttcttaccgaatgttatgttctcgtacagggcaacaccgtctccgtcatgggttcttacaagggtctcaaggaagttcgacgcatcattctcgactgcatgaacaatattcacccgatctatcgtatcaaggaactcatgatcaggcgagagttggcgaaagaccccaagctggcgaatgaaaattgggataggttcttacctagtaagcatatctttgtatcatgcttcttcacatacaccagtagtaaccgatatcaattttagagttccagaagaaacacctcaagacgtcggagaagactgcaaagaagaatgccgctttggaacgagaagcagcgtctgcttcatctgccaacgccaatcacattccgctcggtacctcttccgcgtccatacccgctcccgctcccgttcccgttcctgcatccattcctgctcccaccacttcctctactgaaacgaaggagaagaagaagaagaaggtatatacccccttccctccacctcaacaaccctccaagctcgatcttcagcttgcttctggagagtacttcctcaaacccaaagaaaaagaggcgatcgacaagagaaagaagatggaaaagcaaaaggaagttgcccaggaaaggcgcgcggtaagggaagaagcatttgtggcgcccccagaaaagagagacgagacagtagaggagaggaggaagaagaggagaaaggcggaagagtttatgtaa

SEQ ID NO: 1167 - DNA, 1632 bp, Cryptococcus neoformans
atgcaactaggttgccgattgtattacataatcacccattgctctatatgcatttcaggctcagttcgcggattgttcttcgttcatcggtctcttcgttcgaatcctctattttcgcgttgtttactctcttgtgcgagcccatcttttcatttaccggcatccaacagcccttttccaacgcgctataccatgaacggatactacgacccccaacaacaccaatcgactaatatcgagatcccgcaaggccctacgaatcaaccacgtcttctccttcgtaacctcaatgagacggacgccactttccacctttctggcgtggagctcgcctatgcgaacagtctgagaagagttatgatggccgatgtgcctactatcggttcgttttcataattttttttgcttgcgcatctgtatactttgctgacataacgctcttgcgttcctgtcgttgtcgaatacgtcgcaaatagccatcgatcaagtcctctttatgcaaaatacaacgcctttagcagacgaaatgattgcccaccgtttaggtctcattccccttatctcccgtaacgtctcgaagggacttcgctacactcgagactgtgactgtgacgaaggatgttattactgtatggtaactttgagattaaaggtgactttcagtgggaatgatggagagcagttcatgagggtgacaagtgatatgttggaagtggtcccgagtcctggtggggtacgtttctcttccttttctttcactatcgtgcggcgttacccatatttcttactccccgctgatccttctgacttcttcatctagcccccgccccccaatccttatggacctccacctgaactttcagaagaagatcgcatcatcatcaacaatcgtgatcctgaaatgggccagcctattggaaagggaaatcccactgtacctccgatattgatcgcaaagatgggcaaggggcaggagattgatgttttatgcaaggcttataaggtgattttgccgctacatcgtgtcttcctgcgctgtaatactaatggactgccactatagggtatcgcgaagcaccatgccaaatggtctcccttatcaactgtagcctttgagtatgacccctataacaaacttcgtcatacaacgcattggttcgagactgatggtatgttttccatcttcccctgctcggtgttcctggtctttttatatcctaatatatgtcgctagaacgtgcggaatggcctctctcttcaaatgccgcgtttgaaacccctccaaatcccgcagaaccattcgactacaatgcggtcccgtccacattctacttctccgccgaatctgtcggttccatccccgtccgttccgttgtcgaacaaggtctcgaccttctgatagagggcctcgcaaatgtcgtgttgggcgtacagaaagagattggtggcgaagaggaagagggggaagatggagcggccgcagatggagttgttggggatgggatgggcgtgggcatgggagggggtttggtagaaccgaatatacctgcggggataggtcaagatcagatggccatggcaggtggatacggagggtacggatctcagcagggttatggaggttcatggtag

SEQ ID NO: 1168 - DNA, 1562 bp, Cryptococcus neoformans
  misc_feature (1558)..(1559): n=g, a, t or c
atgtccttctccagagcttccagcaacgccctcaagcaggccctcaagtctaccgcctctcgacaggtcgccaggaggtcctactctctcctctccggcgccgcccctagggccgccatggctacccgacttggcgtgagttagactctctcaaagtaaatgcttgatcgctgataggacgatgaattgcaggccactcgaggcatcaagactctcgattttgccggtaccaaggaggttgtctacgagcgtgctgactggccccttgacaagctccaagagtgaatacaattcttttttctttttttcttcggagccggcttcagggtcactacgcgttgctctgctctactttgagcgaaactgttaactaatgcggcaacctgtagctacttcaagaatgacactcttgccatgatcggctacggctcccagggtcacggtcagtccctcaacgcccgtgacaacggcctcaaggttattgtcggtgtgcgaaagggtggtgagtcttggaagcaggctcaggaggacggttgggttcccggagagactctcttcgacatccctgaggccatcaacaagggtaccatcatcatgaaccttctctccgacgctgctcagtctcagacctggaacgagattgcgcctcttatcaccaagggcaagactctctactttgcccacggtttctctgttgtctacaaggaggacgtgagttatcttttattctcctttgaaaacggaaatgatgttgacagccgtctagacccacgtcattcctcccaaggatgttgatgtcatcctcgttgctcctaagggttctggccgaactgtccgaactcttttcctcgagggccgtggtatcaactcttccattgccgtttaccaggatgtgaccggtcacgccaaggagaaggctgttgcccttggtatcgccgttggttccggttacctttacgagaccaccttcgagaaggaggtctactctgacctttacggagagcgtggtgttgtaagtatctctggggcggcacagaaactgaatcaaaatactcattgaattttttttacagcttatgggcggtatccaaggtatgttcctcgcccaatacgaggttctcaggaagaacggccactctccctctgaggccttcaacgagaccgtcgaggaggccacccagtctcttttccctctcatcggcaagtacggtatggactacatgtacaacgcctgctccaccaccgcccgacgtggtgctcttgactgggcccccaagttcaaggagtgcgtcaacccctttgcgttcaaaacggctcactaacaatttcttcagggctaaccttcccgtcttcgaggctctttacaactccgttagggacggttctgagacccgacgatctctcgagttcaactccagaaagacctaccgagaggacctccagaaggagcttgacgagattgacaaccaggaaatctggagggctggtaagaccgtccgtggtctcagggtaagtgctgcgagttacaatggatgttttgttttcccgctaatgcttnntag

SEQ ID NO: 1169 - DNA, 1438 bp, Cryptococcus neoformans
atggttctctcatatagcgccatcgcaaaacccacagcggacactcccaaggtaatctcaatgactgcctccaaacaagtcttccccgaagcttttgaggcattaccggctcctgccgctgaagagtctcaagagctagaatctcaacccgaagctcttgcacaggcgtccagttctaccatcgaggcccctatttcgagcgaagaccgaaaagtcattcagcatttgatccttgatgctggacctctgttgtctttgacgccgcttcgccatctcgctacgagcttccatacgaccccgatggttcttgcggaactgagagatcctaaagctagggagcattgggagaggcttgcgttgactggggtcaatgtcaaggtcgagtcacctactgctgaagccatggcccagggtgggtactttgttgattattcatgatttactgtgtgctgacgaacatacagtcactgcttttgcgaagaagactggtgactttgcggtactttcacaaactgatttgtccgttgccgctttgacttatcagtatgaagtgatggtgaacggtgtcaagaggattaggactgagccccctcaagcgaagaagcctagtgccaaggggaaggagaaggagaaggacaccaagcaggcggaaaagaaagatgaggaggtccaagagaacaaaaacgaaaaggaaggaaagcccgaggaggaggatgttgaagtggaagaggcgattcagtctttgagccaaattattattgaaccttcaacgaaaagcgagctttcagtaaatgatgtttccaccaccaaccggtcccatacccagacctcagtcccagcttctgcccatgcagaggatcctgaatccgagggcgaatggatcaaccccacaaatctcagcacccatcggtctcgagatctgggtcttatcactccttctggatcaacagccaagcctccggccgttgcatgtatgaccggtgattatgctgtgcagaatatattgttgggaatgcgattgggattggttggcgaaggcggtaaaaagattggaaaggtgaagagttgggtattaagatgccatgcctgttttaagtgagttagtaactttgctttatcttgaacatgtctgattctgtgatagagtttgcaaggatcctagcaaacgattctgtccatcatgcggcaatgctacgcttcttcgtacttccgtttcaacatccgctaaaactggtgaacaaagagtgcatctcaagcagaacttccaataccgcactagaggtaccatctattccatcccggaccctaagatgggcagagccaagggtcagcaaaaggggggaagcggcttaattttgagagaagatcagagggaatggcaggatgcaatgaggggagatagaattaaaaaggagaaagaagaaaggaaggcggctaa

SEQ ID NO: 1170 - DNA, 1683 bp, Cryptococcus neoformans
  misc_feature (31)..(31): n=g, a, t or c
  misc_feature (77)..(77): n=g, a, t or c
atggccgtcgactccgccccggtgagttggncaaaaagtctaagggaaagttccttcatgcggctgacgtccttaanagcaaatgcagaaatctgctgacccaaacgctcgattgactgatactctttgcaccagtcttcggagacggtgagtcatgagtccgtacgtaccttttatatgctcacgtctcgtattttaaggcaaattgttggatccttgaacgtcgctctcgcaacggctgctctcatccagaacatcgtcagaagcgctagatataacaccatcgacgaattactggccttaatcaaagctgttgggcggaaactcactgaggccaaccctaagggtatgtacagctatcacacatctggaaatgtatctcatgcttctcgtagaacttgccgccgccaatatcattcgtcgaatcctccgtctcattcgggaagaataccgcgccgctgcagccgcccatgtctcatccgcccctaactccatcccttctacccctcttatgggtcccagcacaccaggtatcaacgcacctttagatcactacctttctgccgcccaatccgccaccgtcgacgctcagtattttcccactcatatccaaatgtcccgccagacttcactctcaaactttgtggccatgcgtcactctcgagctcagatggaaaggagtggcgcccttagtggagggacagcggaaggatactcagcgaatacaacgaatttgtttgcgacccccaatgggaatgggcatggcagaggttcttctggaatggcaacgccaagggcgagtgtggatagcgatgagtttatgaagcatagtgctaagctcaagccgttattgattcaggccattgaggaggttgttggtgagctggagaccacgcatgaggatgttgccaagggcgcaagagagcacattcactcttcgtaagtatcgcgcattcactttgttcccgcgggactgctaatgcgaggtagcgaaatcatcttgaccatgggccactcgagaacagtcgaagctttcctcaagcaagcctacaaagaccgtaaatttaccgtcgtcgtcgccgaatctgctccgtcctacctcggtcactccctcgcctcttccctttccgcctccggcatccccacccttctcatccctgattcctccatccacgcccttcttccacgtgttacaaaagtcatccttggcgctcactctgtccttgccaatggcggtttgttcgcgctgtccggatctcttgcttgtgctctcgcggcaaagacacattccaagcctgtcgtcgtgactaccggtcaatttaaattcgcgcccgcgtggaatttgtaccatgaatacggagcggtggatttccagggacctggagctgtgattggggagcaggggaagggtggaggagggggtatggaaggggttgaggttgtggatccatattacgactatattaggcccgagttggtaaatctgtttgtgacaaatgagtaagtgtactttttggatgtagagtagcacgtggctaatttagtctgtagaggcgaccacccaccatcttacatctaccgcttgatcaaagaggcgtacgatgatgaggatgtagagatctagtcacagtgacatctgtatatgcatttcttcgaataaggtattttctatgcttggtataa

SEQ ID NO: 1171 - DNA, 1476 bp, Cryptococcus neoformans
atgcccagcccgtctccggaggcatcctcctcaatgtctcaacctggacctccatcccgctccccttctcccgcgtcctccaaccccgacgctcctgaagcatcgcacaacaagacgttcgcagacctcggtatcagtccggagctatgccgagcatgtgcttcgatgggctttaagaaaccttcagatattcaggctgaagcaattcctcatgctttagaaggcaaggatatcattggtcttgctcagaccggttccggtaaaacggcagcatttagtttgccgattctgcagacattatgggagaatcctcaaccatttttcgctcttgtgttggcgcccactcggtaagtcttttggataaacttggacgtattctgataaagctgtagtgaactggcgtatcaaatctctcaacaagtaacctctcttggatctggcatcggcgttcgcacggctgtcttagtcggcggtatggatatgatgtctcaatctatcgccctctctaagcgacctcacattattgtggccacccctggtcgattaatggaccatttggaaaacaccaagggcttctctcttaaatccttaaaatatctggtcggtactttttttttcccctgtgtgttgtgcttacgcccgtatcaggtaatggacgaagccgatcgtcttctcgatctcgatttcggacctatcatcgacaaaatccttaaagttatcccaaaggagcgtaacacataccttttctctgctactatgacgaccaaagttgccaagcttcaacgtgcttctttgaataagcctgtccgcgtcgaagtctcttctaagtactcgactgtctctaccctcctacaacactatctcctccttcctcttaagaacaaggacgcttatcttctttaccttgccaacgagctttcttcatcttccatgatgatttttacccgtaccgtcgccgactctcagcgattatccattatccttcgtcgtctcggtttcccagccatcccattgcatggccaaatgacccaaagcctccgactggcaagtttgaacaagtttaaatccggtggaagaagcattttggtggccaccgacgttgcttctcgtggtcttgacattcctctcgtcgatctcgtcatcgtacgtctattcttacaccttcgcttgaacgcagactaatctccagcttcagaactacgacatgcctacaaattctaaagactacgtccaccgtgtcggtcgtactgcccgtgcaggtcgttccggtaaatccatcactctcgtcacgcaatacgacgttgagattcttcaacgtatcgaatcccatattggcaagaaaatgacttcttttgatgtcgacaaggaggcagttgcactcctgaccgacactgttgcgaaagcaaacagggaagcggcgttggagatgagggagagtggtactggtggtggaggtggcaagcgaggaagggataa

SEQ ID NO: 1172 - DNA, 1608 bp, Cryptococcus neoformans
atgcacccggaaacgccaggtggaggtcggactcgtagcgcgcagtgtggaaggaagggattccgactggtggcgacagctcgtggcgggcgttgtaaggatgaacaggaaggatatgacggcagcgcgtggattgaaagcatgatggaaaaagggcgtgacgatggcgacgggatattcgagatgcgagcaatgtgtgattgcatgctaacgctgtgtctagcactaagggtgcggccgagcagggccttcaaatcgacggtgacctcatcaactccaactggaatgaggttgttgacaagtgagtagaggtggtatgtgctttagatgaataagtgctgacgagtggggtagcttcgacgacatgaagttgaagggcgagctcctccgtggtatctacgcttacggttttgagcgaccttctgctatccagcagcgtgctatcatgcccatcgttactggccgtgactgcattgcccaggctcagtccggtaccggtaagaccgctaccttctccgtttctatcctccagagggtaagtcttatctaagcagatatgatgtgcgggtttcagttgctaagccatcttttatctaatagatcgacaccactgttaagaagacccaggctcttgtccttgctcccacccgagagctcgctcaacagattcaaaaggtcgttatcgctctcggtgactaccttaacgtcgactgccacgcctgtgtcggtggtaccgccgtccgagaggacattgccaggcttaacgagggtccccacatcgttgtcggtacccccggtcgtgtctttgacatgatcaaccgaggtgctcttaagaccgaggccgttatgatgttctgccttgacgaggccgatgagatgctttccaccggtttcaaggagtccatctacgagatcttccagcttctccccggagagacccaggtcgtcctcctttccgccaccatggcccctgaggtcctcgacgtcactaagaagttcatgagggaccccatcaggattctcgttaagaaggacgagcttacccttgaaggtatccgacagttctgtaagtcgcattgtaccacccagattcagacatgtacatcgctgacatcccattagacattaacgtcgagaaggaggagtggaagctcgagaccctttgcgacttgtacgagaccgtcaccatcacccaggccgtcatcttctgctctacccgacgaaaggtcgactggctcactcagcagctccacgaccgtcagttcaccgtctctgccatgcacggtgacatgaagcaggaggagcgagaggtcatcatgaaggagttccgatccggttcttcccgagttcttatcaccaccgaccttttggcccgtggtatcgatgtccagcaggtttctttggtcatcaacgtgagtatacatctatagtcgaaagtggagttggagagattattgacaattcaacgaccagtacgacctcccctcttctaaggagaactacatccaccgaattggtcgaggtggtcgattcggccgaaagggtgttgctattaacttcgtttccaacgaggacaagaacatgcttgaggagattgagacttactag

SEQ ID NO: 1173 - DNA, 1526 bp, Cryptococcus neoformans
atgtgcgggagggcggggagcgttgtgctgtggacattgtgtgcgagttgtttgagtgtggaaagcgacgagtatacgtacattacgtagtgtttatatttggagacgcatccggtccaccgtgggaatcgccgcttctgtatcttttctccagccgcttctccactcacttcttcgtcactttatccaaatatgtcacatcagcgcacagcccatttccaggtgccacctctccagatatcgtgggtccatacaagccccatgccagcgcaagctcacattccagccgtacagctccgtcctccacggcggtatccatcatcctactctcagaacatggcaggccaacgggcggaacctcacaaagtctatgcttatctaccccatcttcatctccgacgaccctgacgctgaacaagaagttgcaactttaccagggcagaagcgatggggtatcaacaagctcgaagcgttcttgaagcccttggtggaaaaaggcttgaagagtgtgattcttttcggtgtgcctgttactatggaaaaggcaagttgcattttggatttcggtgtgacggtgcaaaagggttgtgtctgatatgccttgtacactaggatcctcgtggcagcgctgccgatgacgaatcgacccctgtcattcaagcgctgaaactccttaccaacgtcttcccccaactcatgctttgtgtcgatgtttgcctttgtgaatatacgtctcacggtcactgtggcattctctcgtctctccccaatccagcccactccaacgcccccactcttgacgcggaggcttcagctcagcgtatcgctgaagttgctgtcgcctatgccaaagctggtgcgcactgtgtggcaccaagtgacatgatggatgggagaatacgagcaatcaaatatggactgatgcaagtcggattggccaacaggtgcgctttgatgagctattcggccaagtttgccagcgggttatacggacctttccggttagtcactccgtcctatccccgaatttctttttgacttttagtttggtctgtctagagatgccgccggaagcgccccttcgtttggcaacagaaaatgctatcaactccctccgaatgctcgtagcctcgctagaagagctatcgtgagttcttcaaataagagtttacgatatcagtgctaagctaccatagcaacgagatgctagcgagggcgctgatatcctcatggtcaagcctgctctcccttacctcgacatcatatcagactgtgcacaatatgcccctgatcatcccactgcctgctatcaagtctcgggtgaatatgccatggtcgtcgctggtgcagagaagggcatctatgatttgagggaaatggcgttcgaaactaccgaaagcatggttcgcgcaggtaagtgcatttttgcaagacttcgcgccacttctcctgctaattgagacgtatacaggagccagcataatcctgacatacttcactcctcagttccttgactggcttgatga

SEQ ID NO: 1174 - DNA, 1813 bp, Cryptococcus neoformans
atggaccgcttgatgggtacgatggggggagcggcggtgcaggcgtatcgagatgcgagcaggcgtaccggaccgacatttgttttatcaaaagttgacgttataacgtgggtgaaagagaagaagagttacgtatgtgcggaatcaaaatttacgcgacgcgtcaaagggacgaggccgggcaaacttgttggttcgttgctcgagatcgacgggatatataacaaacccaccttttcatctccccagtcttcactttccactttcatctctatatcaaccatatatacaccagcctcgtccacatacactcgcccttttttatacccacgtccaactctttttccgtacacggccccaacagtcgacgcgcgagaccacagtatcacaaacaaccggccgatatcctcgccctgattcaacgcacgaccagaaaaccatgtctcttgacaactatcaaaagattgaaaaggtcggagaaggtgtgtttccgtaccgtaccaattgacccaacgtcgcttccccaatgaacctttgataaccaaaaaaaaacagggacctatggtgtagtgtacaaggccaaagacatcaacaccggccacattgtcgccctcaagaagattcgccttgaagcggaagatgaaggtgtgccaagcacatctatcagagaaatcagtttgttgaaagagttgagcaaggacgacaacattgtaaagtacgttttccaggcaagagcaactgcatgaagaaagaaaaaactgacaagaatataggctgttggatattgtgcattccgaagcaaagctttacctcgtattcgagttccttgatatggatttgaaaaagtatatggataccattggtgaaaaggacggtctcggtcccgacatggtcaaggtaaacatatctgctccttacaaacttggatacaccccggctgacttttttctttgattcaaccccactaaaacagaaattctcttaccaactcgtcaaaggtctctactactgccacggccaccgtatcctccatcgagacctcaaacctcaaaatctgttgatcaacaagtcgggtgatctcaagattggtgatttcggtttggcgagggcgtttggtatccctctgcgtacttatactcacgaggcaagtttttctccccactcttcaagctttttgatggtatggcttgatgctcatgtgtggcgggcaggttgtcacactgtggtaccgagcccccgaagttcttcttggctcaaggcattactcgactgctattgatatgtggtccgttggatgtatcgtcgccgaaatggccactcgtcaacctctcttcccgggcgactctgagattgatgaaatctttcgaattttccggcaagtttaatcctttgctatcgaaacgtgtggcctgatcccaaatcgcagagttctcggtacacctgacgaagacgtatggcccggagtcaggggcttgcccgattacaagcctacctttcctcaatggcaccccgtcgaactggcagatgtcgtcaagggatttgaggccgatgggcttgacttgattgcccagactttggtctatgatcctgctcaccgaatttcaggtatgaattcgcgtctcttgggagctgcgatgagctaatccactcttcttcttttttttaaaaaaatagccaaacgcgcacttcaacacccttactttgacacggtcaatctctccgccgcataaatcctagaacaatttacccccttttttctaaaagtctctccggaatactcttccttgcactttttatcacacacgtcgactag

SEQ ID NO: 1175 - DNA, 1603 bp, Cryptococcus neoformans
atgccgtggaaaaggagacttcctcaaaacctcttttggctcatccttcaagttttttattcatcaaaaaactcttcgccaaacatgtctcacaggaagtacgaagagcctcgacacggttcccttgccttccgtatgtcctgcaaaaacagacctttcaaaagcctgggctaatagtgatacagttcccaagaagcgtgccgcccgacacaggggtcgatgcaaggcgttccccaaggttagttgggtttcagttcaaggataacatggggctggggcggattgtggatgacttgtacagatgaatgaggaagggagagaaggagaggaaagatggggatagaaggtctcgaaagaaagaagacaggtgttgacattatcgaaataggacgaccccaagaagcccgtccacctcaccgccgtcatgggttacaaggccggtatgactcacattgtccgtgacctcgaccgacccggatccagtgcgtattactgtccgattgtcatcaaaacgtggtctgacaaaattttgcagagatgcacaagagggaggttgttgaggccgttaccgtcattgagaccccccctatggtcgttgtcggtgctgtcggttacgtcgagactcctcgaggcttgagatctttgaccactgtttgggctgagcacctcagtgacgaggttaagaggcgattctacaagtgagtattgtttttgaatactcatcggagcagcttttaacgaagtttgcaggaactggtaccgatcgaagaagaaggccttcaccaggtacgccaagaagcactctgagaactccggcgcttccgttgcccgagagcttgagcgaatcaagaagtactgcactgttgtccgagtcctcgcccacacccagatctccaagactggtctccaacagaagaaggcccaccttatggaaatccaggtcaacggtggttccgtcgccgacaaggttgacttcgccaggtctcacttcgaaaagaccgtcgacgtcggctctgtcttcgagcaggacgagtgcattgacatcattggtgttaccaagggtcacggttacgagggtgttaccgctcgatggggtactacccgtctccccaggaagacgtgagttatttcatgaattttataaacatggctgacacatccatagtcaccgaggtctccgaaaagttgcctgtatcggtgcttggcatccttccaacgtcatgttctccgtggctcgtgccggtcagcgaggttaccactctcgtacttcgatgaaccacaagatctaccgtatcgccaacggtgcttctggttcttcaggctctactgagtttgacctcaccaagaaggacatcacccccatgggtggtttcgttcgatacggtgttgtcaagaacgacttcgtcatgatcaagggcacttgtgttggtcccgtcaagcgaatcgtcaccctccgaaaggctctccgaactcacacttctcgtgcccacaccgagaaggtcaccctcaagttcattgacacctcctccaacttcggccacggtcgattccaggatgccgctgagaagaacgccttcctcggtcagctcaagatcaagtctga

SEQ ID NO: 1176 - DNA, 1590 bp, Cryptococcus neoformans
atggcagtggcgactcagaagatgcccaaagctccaacatctgcccctggaggtagcatcaaggtatgtcctgattgttctatttctatgcacaaggaggttggattctaacaattgtaattagacctactatcagaacaagatcgaagctgccgagcttgacatcacccgtaaaacacaaaatcttcgccgtttggaagctcagcgtaatgcccttaacgctcgaggttagtgatagccagtcttatcatatttgacaatcgaagatggctgtcgttggcccatatgtgcactcgtaactgataagctgcatagtgagactacttcgagaagaattgcaggttttgcaagagcccggaagttatgtcggtgaggtcatcaaggtgatgggtaagaagaaggttttggtcaaggtgcagcctgagggcaagtacggtaagtagcaatgatctcttaccagaaaaaaaaaagaaaacagtgctgagcatgtcgcagtggttgatttctcccccgatatccctatctctgcccttacccccaacatccgagtttcccttcgagccgattcttacctcctccattccatccttcccaacaagatcgaccccctcgtctctctcatgatggtcgaaaaggttcctgacagtacatatgagatggttggtggtttggacaagcaaatcaaggagattaaggaagttatcgagttgcctgttaagcaccccgaactatttgagagtttaggtatcgctcagcccaaaggtgtcttgctctacggtccaccgggaacgggtaagacccttctcgctcgagcggtcgctcatcacaccgactgccgattcatccgagtatctggttcggaacttgtacaaaagtacatcggtgaaggttcccgaatggtgcgagagctgttcgtgatggctcgagaacatgcgccgagtatcattttcatggatgaaatcgactctattggaggttcgcgaggagaaggagctggtaagagtggagactcggaagtgcagaggacaatgatggaattgttgaaccagttggatggatttgaggccacgaagaacatcaaggtttgtctctttatagtgggaactcttgtgcagggctgactctgatacaggttatcatggccactaaccgtatagacattctcgattccgctctcctgcgtccgggacgtatcgatcgtaaaatcgagttccctcctcccaaccccgaggctcgaatcaccattctcaagattcactctagaaagatgtctctccagcgtggtatcaacttcaggtcattggcagaaaagatgggcaactgttcaggtgctgaagttaggggtatctgtaccgaagcgggtaagtgcctttgtcttgtttaaagtttgagagacagcgctgatgatgtcgttgcaggaatgtacgcactgcgagagagaagacaatatgtcggtcaggaagactttgagatggcgatagcaaaggttttgaagaagaatgccgacaacaacatgagcgtgaacaagctcttcagttagaagtttttttgatagtcagctatgaaacgttttgcatttgtgtattttga

SEQ ID NO: 1177 - DNA, 1641 bp, Cryptococcus neoformans
atgggcggtggttttggtggtttccatagtgcaccccctccgtcgtaagtacttatacgtctacaaggggagaagctgacgaaatgcagagcatacgatgattatttcaaagcttattcaacagccgtgatgggcggaagagaacgtccagaggtgatgtatggcggcaagagtgcgtccgttctggccctttccgggatgagttgctaacttttggtgtcaacagtcattatgcctccgtcagcgttagccagactttgtatgcctcgttaagaatttgacgaactacctctgacaatatatagccgcgctggacattccaagtccctggacgttccaactccgcaaccctcgctcacccacccaacatatcacccatgccggtgtgctggagtttattgctgaagaagggattgtacatcttcccgcctgggtatgtccctgttttcctgtatcgatcgtaactaacgtaaagtagatgatgaagcgacttaatctcgaagaaggcgaccccatacggctaacgggcgccaagttaccaaaaggaaagatggttaaaattcaagcccagaatacagatttcctccaagtatccgatcccaaatctgtgtaagttggcttttcattcttctgcttcatgcttggctcaaaccgtgcatagcctcgaatccgcccttcgtttctactctactctttcccctgacgacatcattgaaatcacgtacaactcactcacatttgaattcctcatcatgtccgtcgtcccagaaggtcctggtatctctgttatcgacaccgatcttgaggtcgactttgccacgccaaaggggtacgtcgagcctccccgaccggaaccgaagccgatccccaccatggcggataaactcaacattgacttgtcttcgaatgagcccactggctcgggggcaggtagtgtatcgggcggcagtcggcccgggacgagtatgggtacccagactccggtggaaagttttactggtgtaggtcagagtttgagtgggaaaaaggttaagggtaaagggttggcgaagaagattgaagaggtcgatccgagttcaaagataaaccgagccgagtgagtctttttattctcattagctaccagtcactaaccgaagcagcggtcctcgaataataaactcatcctctttatcatccaccaatacgcaagtcccctcagcactcatccttcctgaaggaaagttcttcttcggtttcaaatacatcccttacgatccctccaaagcgcctaaaccctctctcgccgatcaacagaaagtggagctacagcctttcggaggggaagggaataccttgaagggtggaaaaagaattggaggggaagaaggaaagggaaaagagaaggctgctgaagacgagaaagaagacccatgggcaaagctgggtagcgggaatactttaaaacggacgaccaccacagccgcctcttcgtcttcaacccctgcacctgtatctgcgcctctggaggagtttaaggcccgtaaggcgacggagcaggagatcattgatgccaccatgttggatgaggatgatttcatgtttgaggacgaagaggatgacgaggatgatgtgatagagattgattccgattatgattag

SEQ ID NO: 1178 - DNA, 1674 bp, Cryptococcus neoformans
atggtcatagacgaatcggaggagagcagcgacgaagatgaagaggtgagttgtgaaacctttgccacagcgctacacgagccagccaactcatttctgatacctagggagaattctatactgaaggcgcagacgatttactcgaagctcgtcgaaagattgcaaggtattctttatcaaaggccagagcacgaatagctcgtcagagaagagaatacagcgttcccctgggaaaactcgttaatgctcgaaaggaattattcaaagagctcaaagtacgttttgccactttttctgcagcatgacaaacgctgatcgatcctcgcaccttgcgacagtcattcaacaactttggctcccaatttggagatgaccgtcccttatccaccatccgtttttcaccatcctcccaatatgtcctcacgacctcttggaccggcgacacgaagctttgggatctaccgaacctcaatcccatctctacaaaaaggggacacacggaaaaggtcggaggagccgcttggcatccgtttgcgacagtaggagccagtgaagaagctgtcaactttgcgactggaggaggcgaaggcgatgtaaagctttggtctttgtccgggtacgtattttctttttcctcaatccatcccgtcttgtctttttttctaaccctgccgtgtagtgaaaaacctctatcgaccctttcaggtcacacatcgcgagttggtcgactcgcttttcatccttctggagcctacctcgcttccgcaggttttgacggtacatggcgtctctgggacgtcgagtcgagtaaagagttgatgatacaagagggtcatagtaaagaggtctacgctttgggttgtcaggatgatggggcattgattgcttctgggtcagtttcatttcctcggattagaggcttgaattacaagaaaggttggatgactgacaacaaatgtacattatagaggattcgatgccattggtagggtatgggacttgagaactggacgaactgctatggtcttggatggccatgtcaaagaaatacttgctatggactttgctcccaatgggtaagctcttgtttgctcaacacccccccttccttctcgctcatagctgataatgcgtgttctgctttgataggtaccaaatagcaacaggatcaggtgacgataccgtccgtatctgggatctgcgtgcactcaagacccaatacatcatccccgcgcacaagtctagtgtggccgacgtcaaattctttagatcttccggtgaaatgccaccggtcggcattcagggattgccgctctcgtcccgctcggcaaacgttgatggtatggacgtggataagagcaacgatacagaagacaatgaaaaggaagaaaagctgagtcgttccggcatgttcctcgtcacagccggatttgactgcaatgtccgtatctggtctgcagacgaatggaatatggtgcgcaacttgtcgacggatgcgggtaaggtgatgagtgtggatgtctcgggagatgggaaatttgtggcgagtgcaagctatagtcgatcgttccatctgtttgggggagagaactctttgtaggcatgtacacttgctggaaagggagcagaccacagatggaaacagaagagacgaaaaaaacatatgcattttga

SEQ ID NO: 1179 - DNA, 1505 bp, Cryptococcus neoformans
atgcactcccgaccagtcttccttcgtgctcttcgactccgacaacagccactccccgcccgccgattcctccctccccagtcgctccgtcccctctcatctacagcccgtctcttggacgagtcgaaaaagtctgaacaacaatcacaaaagaaaaagtcaaccaacgatgagcctatcacccctcgatctccgtgggccgttttcacccaggtcttaaaggaggagattgagaagaacaaggggtggcaggacaatgtcaagcagttgcaaggtgatgttgacaagttcgccgatagtgctgctatgaagagggccaaggatgtgtatgagaagactagggtgagctggttgaatgaataatttacacgcaatttctgattttttctagctcaccaacttgatcaaaaacaatcctcgaatccaatctgcagtcggtgatcttcaaaaggctggtatctccgtgcacgacgctgtccagcacgctctcgccgattccgaagttctcaaggccatctctgccgctaccaaccgtttcgtttctgccgcctctagcgctactgcgcccattagagacacaaaggcgtacaagttgatggctgagagtctcgaagaggcctttgaagatgagagtggtgttgggagtagatatggtggttacgaggagaaggaggctaggagaaagaagagggagatgagggctaagaaagctggaagagctgccatcaaaagggtcgaggaaaatcctgagtgagttgagtgcttccgatataacggcgtcagctaatcccacttgtagagctggtgaggctcttgttctctccgacaagcccgagtccgtctctcgtcttgcgtttatcaaggaatcccccacctatcaacgtatgatggagaattactatgagtctgactctcccttcgtttctgccatccgaaccatcggtaccaaggtcggctctttgttcgaagagaacgagaccgctcaagtcatccgtgccatgaaggctttagaccccaattttaggatggacaggtggactggggagttgagagagtacattgtacctgaagttgtcgatgcctatctgagtgcagacagggaaagcttgaaggcttggtgtggtgaagctgtcagtcaaaaattctccgctgataaacaaccagactgacactctatagacctttaacgtcctttgggcgaccatgggccaattcattaaacaaggccttgtttccgactcgaagatcctcgacatcaagcatgttgacattgctcacggcaaaatgcttgagaacaacatcccagtgttcgtcattacctttgccacccaagaacaactcctcttccgatcagccaagaccggaaaggttgttgttggatcagaggatgatgttgagcagtgcaggtacgcgatggtgattacgaggttggagtcagagttggagaatgagttgactggcggctggaaggttgttgaggtgagttctctttctctctcttctga

SEQ ID NO: 1180 - DNA, 1709 bp, Cryptococcus neoformans
atgagtgagttccttgatcagtacaaaacgctcgtcagactctgactgtctgccagtgcatctagcccgcaggttatgcagctcttctacaggcggctgttcccttaccgcccgctctatctttggttgaatcaagaacagagtaagtcttaccgccgtgcaggcttcgacagcggaattgacacggatttagtacccagcaagttattcacccatcgtgaattcgctttcacattggcaggagacgtctaccttcgataccaatctttcaacaatgtcgatgaatttaaagcttctattgccaggcatattccatcacgttttgagattggccctcaatatagcgcaagagtatgtccatgccactgaaacagcgttcctctgctgacgctggatacagccgaaggacaggaagacgcttgcctctggcgctcttcaaccacagaggcgagagctggtttttgatattgatatgaccgattatgatgagatccgaacgtgttgcacggacaagactatttgtaagcgatgctggggctttattgccgccgccgtaaaagtgctggatcattctctccgaggtaggttgtcaattggcattgaaactttgcggatagttttcttattaatctatatagaaacattcggcttcaagcatctcttatgggtgtactctggtcgacgaggtatccattgctggatctctgatcagtcggctttggatctcaccgatgatcagcgacgagcgttggttacttttttggaagttataaagggtggcaaagaacaaagcaagaaggtcaatgtgagaggaccaactggtgatgctgccctccatcctttcttgtcgtgagttggaccatcgtgtaaaagatctgtggcattacataattaaccccaaccatagtgaagcactcgataccctcaaaccattattctctagtctctgtatctacgaccaggattgtttcaagggagaaaagggatgggaagcattgcttgccattttgccaactgatagaggtgagcagtattcgtaaatttggtggatcagacactgaacatttgcagctgtcattggaccactaagggccaaatgggaaaagaactcggatagctcaagcgaagaaaaatggcgggaacttatgagcgagattgcaaaacataagaaagaggaggcaatcatggtatgtgatataaaatttactcgaattcatcgctgactcacattcatttgcccctctagaccaaattcacaaaagcagtagaagacgtcgttttacaatacacctatccgcgtatcgatgctgaagtttccaagcatcgtaaccatttgctcaagtctccgttttgtgttcatcccggtaccggtacgtcgaaggaattcttccatcgcttcatccaaactaatacaagtcaaggtcgagtttgtgtccctataaatccgtctctgatcgacgaatttgatcccgatacagtgcccactgtcggtcaattgctaaatgagctcgacaatgtcaaggctgaggaccctgaagctgctggccggcgtatggaaggtaagttttctttccaggccatatcttttctatatctgtactgatgaaatgtgcagactacgagcacacttcactgggaccttacgtggagatgtttgaaaagcatgttgctgcagtcctgaaggatggtcggaatgcgaaaagaggtaa

SEQ ID NO: 1181 - DNA, 1935 bp, Cryptococcus neoformans
atgctcaaatcgctgtgcttcgtgatccgccccgcaattgttagtagaccgcaatttcggctccccaccatcgcaagattatcgcttcgacaatttcagaatcagccgcagtctgttggattcttcactatggcacctttggaaaccagagcgctcgcactgtgcccctccgcgaccatttgtccaccgtctcgtattggaacgacggagctcgaccgttcggcatttgacttggacgttcagatactctctgcggtagtcgaacccgggatgattgggaaactgagatcacatccttctttaaaggagtgagtgcttttagaggctgaattgctattattgctgactattgttagcttggttttggatttgcccaagaccaaaccaattgtggagtgccctgctgaactggcccctgttgctgctcgagacgtcaaaggtctcaaattgctcagatttcatctctctagggaaagcgatctgcccgaagaggcgaaagaagttttgaaaggagcaaaggctctagtcaaagaggttgttagattaggatacgacaactggaacgcttgtgagtattctcggctgtctgattgtgataaatcactgacattgactcctcctcagcggagatccttggggcctgccttcctaccacaaaaagcgaggatattccttcttcattcacaacaacaggtcatataggtcatatgaatttgcgtgaggagtggttgcctttccgatacctcatcggtcaagtagttctcgatgtaagtttccgtaatgagcgcgaatttctgtgacggtcgctaatataacatcagaaaaatccgggtttgagaaccattgttaacaagcttgatacaattcatgcccaattccgatattttgacatggaagtgatcgcgggcgacaatgactatattgcgaccgtcgtaggtatcgttccttataagttaaaaatgtcagctgatgcttttaagaatgagtctggatgttcttttaccttcaatttttccaatgtatactggaactctcgtcttcatcacgagcacgaacgtcttattagcctatttcctcctggctgtgtcattgcagatgtcatggctggagttggacctttcgctatccccgctgccaagaagggatgctacgtgctcggaaatgacctcaatcctgagagtgtcaagtggatgagggaaaataggcttagaaataaggcaggtcaccacctcgaatattctgagattatcactgacattctgcttcaggttgaaccgacattgcgagtatcagaaatagatggatttgagttcattcgcatcgcgccacttgaagtttggacccgtccatttgaccctgcccctccccccaaggtgtctaaccgtcaacgagatcgtgaagcgaaagaagcacgacgcaaaagggaacaggcaaaagctgctggccaaccagtcacagaggctgcccctatgtcagttccctctgaggaagtcgctatcaagccccacccgcctcagcctcccaaactaatttcccacttcattatgaatctccctgattctgcgatcaccttccttccctcatacgtaagctgctacactcctcttctcgctgagagatcattcatcgatgaatatggtggtgaagaagaagcaaagcggaaggtcgagatgcccatggtgcactgttattgtttcactaaggaaattgaaactggcaaggcagagatagacattttgcaggtgaggccatacttcagaagcggaaactgtattgacgagccgatagcgagcatccacaaacttatcttttaacctcacaccgcaagtcgaaaattacaaccttcatcacgtccgctccgttgcccccaacaaagacatgtactgtctgtcatttagattaccccgggaagtggctttcaggcataacggatag

SEQ ID NO: 1182 - DNA, 1690 bp, Cryptococcus neoformans
atgtccattgcaaggatttttggtatggggctccgtaacaagcgagtatcaacgactgcttttcgctacaacgcaaatcggaattccaaagtgcagttgcgctcaatagtgcgatacagacattcatctccaagtcaagaatttgagacaaactccgcagaaattcgcgtcaacagtaccaccataactatcaaacaacccgacgaggatgatcttcagtagtgagtcgacgacaatggcattgaaggctgactgttagcgaccatttctatcttttcgatcactgccgctgtccgcaatgtttccaccctcgcaccaagcagagactgaagactttatcccaggtacgttgcggtcaaagtttatatgccccaatctctcgtaatttgttaccataacttatccttgcactactagataccttctgatatacaccctacagccgttgcgctgagtagatcaggtttgcatatcacgtggtcgacgccgtctgcccatacgtctttttttcccgctggcttcctcaggcgagcggcatatgagactcaactttctgagcatgtagactgtcgtgacgagtaggtgtccctctattcatggatattgctgacaacgctaaactagccgcacactatggaactctgagatatcaaaatcacctccttatgttgcgtatgatgacattatgtcacaacaggtacatcagcatgaacaagctgtactgcaggtcttgaataaagtggtcagtcaaactgtagcatggcattcaccttgccgccgacgaaactatgttgttgacgattgactcgtagcatcaatttggcttctgcttcgttactggagttccaatagatgcaaaggaaactgagacacttattaaatctataggtcctatcagacagacccattgtaagtggaagtaccttcatcttgaccatatgcagtatacagacactgatacatctaagacggcggcttttggtcatttaccgcagacttaagccatggtgatctggcatacagtgctcaatcattaccggctcacacggacaccacatattttacggatcctgccggccttcagatctttcatcttctatcacatccttcacctgggcaaggcggtaaaactctgctggcagacggctttcatgcagcttcgcaactttcagccgtcgatcctgcctcttattctgttctttcgcggctccctattccagctcacgcatcagggaccaaggggactctattgagaccactgattagttttccggttctgcgacatgatgaatgtggacgcctggctcaagtaagatggaacaacgaagatcgcggaattattgggcatggctggtctgctacagaagtccgccaatggtaccaggcggcgcaacgattcgaatcattggtaaaaagtgagcaaaacgagtattgggtacagcttaatcctggaacaatgttgagtaagtcacaactgcccgtctttggtctattggctgacagcttacatttccctttcgtagtaattgataactggagagtcatgcatggacggtcagagtttacgggatctcgcacaatgtgtggtgcttacattggcgcggatgactggcattctcggcgggcagttctgacggaacggcatggagatgtagggggaatggacgacgtatggcgcttcggttggtaa

SEQ ID NO: 1183 - DNA, 1570 bp, Cryptococcus neoformans
atgtcgatcgacccagctggatcacaggcatctcgccaactccccatcaacctcttcaccaggtctccaacagatgccatcccccagtctacctattttattccctccgcctggcgtcgattccaactctcagaactcataaaccaggttctcggtaacaccgctgaaaatggaagtaaaacctgtgccatttgacttccttgtaaacggtgaagttcttaggggcagcctagaagcgtgggtgaaaaagaacaggggaggagatgaagaaagtcagattgatgttgagtatgtgaggagtgtgatgccgccagaggaggctgcgagggtcgaggtcgaggattgggtgtctggcttgagcttaagcaggaaagggtacgttcaaatgatgcagaaaagatttatttgctgacatcctcacagatacgtgcttctttcatcctacctatctcacctgcaagtcctccctctttcagctgctgctcaatcatcctctgctctttacactcttcccctccctacttcccttggtgctacatcctgtacctgggtttctcctcaaactcaagaaaccgacattctcgtcgctgccggcggtgttgaccgtcaaacccacgtttactctattccctccctctcacccgacactgctgatgctcctcgcgaactctacacccttcacggccacaccggtcctatctcttctgttatcgctagctcctccggtaaagaaattgtaacaggttcatgggacggtaacatcaatctctacgtccttcccgacgcggagccaacagaacaccaagttcctgccgaccccgtgtcttatctccctggccaaggtaccaagaagcgtcggaagctcgagaaagaccaagaaaaggctcctatagaaggtctcactgacggtgatgctaccggcgaaggtggatggaggcgggcgcctgatgctgtcatgcgtggccataccggcagggtcggcggcctcgtttgggacaagcttgacagtggtaagatctggagtgctggctgggacggaagcgtgcgtggatgggaggtggagactggtgctgccggagcgttgaggcagggaccgtttgataagtctgcgctgtgtgtggatcagtggaagatgaatggaactttggcgaccggtaatatggacaggacgatttgtctttgggatactcgacaaggtcagtcactgtcgtctcatccatcactagctacacatctaactcattttttttccttagctacctccctgatttcccttacgcttcccaccacgtcccccgtcccctctgttacatgccaccctacatccccattcaccctcgcctctgccacttactctggcgtcgtccaaatctgggatatccgatcacccaagactgcccttttcaccgtttcaaaggcgcagagcaagttggccgatcctaatagaaaggttacgaagaatggcaaggttttgggtgagaggctgttggcggttgactggaatggagaagttttggttgcgggtggtgaagacggcgaggttgggatctggcgagcgagaggagagtaa

SEQ ID NO: 1184 - DNA, 1710 bp, Cryptococcus neoformans
atggctactgaaaaggcacccatagttggatcttctgcatcgacgtctttacccaccctatccgtgcaagatggcactcttccattgactccaggtgctcaggggatgcagacaggcacaattgacgggcatcggcaacttcagagtcctgtgtctcgtagtagtagtgcaggcgaggataagatgagagaaaaggcgagggatgcccaggagcaggttggtacacatgacaatgtgcgtcattaacttgttataggcagcgcaagcccaggccaacctccatcacgcaacgcaacaagcgcgcgttgccgccatcaatgccgccgctactcaagctgcccttgaaacagccgcccagctgcccgcaactgctagggtcccagtttccggtgggggagttgagcagggtcaagcaagacgcaaaacagctggccgatatgctctatctgatttccttattgaaagaacgtacgttcattctcctccaacgtcgtcgtagcttatgaacttttagtttgggcaccgggtccttcggacgtgtgcatttagtgcggtcacgccacaacggtcgcttctatgccgttaaggttctgaacaaggagaaggttatcaagatgaagcaagttgaacacaccaattctgaacgagagatgttggtgcgggttcgacacccatttctcgtcaacctctggggaacctttcaggatgtgaataacctgtatatggtcatggactttgtggcaggaggtgaactctttagccttcttcgtaaaagtcaagtacgttgcgccaatgtagcccatccacagactattaacatttgtggtagcgattcccgaattctgtcgcgaaattctacgcggccgaagttgctttagcgctcgactatcttcattcactcgatattatctaccgagatcttaagccagaaaatctacttttgggtgcagatggccatgtcaaggttaccgactttggttttgccaagtatgtacctgatatcacctggactctttgcgggacaccggattaccgtgagcgttttgatcttcagacgcgtgtactggcatactgaaacaaatcagttgctccggaggttgttcagtccaagggttataacaaaagcgtcgattggtacgctttaggggtattaatatttgaaatgctggtgcgtttttatgttgatgttgcgacaatatgatttgggtctgaatcttgctcaggcgggttatcctcccttcttcaccgaagacggcaatccaatgaaattgtatgagaaggtgatattttcgacagatagtattcatccagagcttacacttttgtctagatcattgctggcaaagtccgctatccgacatactttgacgcacttgcgaaagaactcttaaaaaatctactgatcggggacctcactaagcgatacggtaatttgagagcgggctcttctgatatatttgcccatgggtggttcgcagaagtcgactgggacaagctgtacaggcgcgaaatcccggctccatatgtgcccaagattgacggcgaaggagacgctagccagtgagtcggtcctgatatacaaatcgaaatctctgcccgaaactgaaatataaaatgccatgcaggttcgatcgctaccaagaggcggatgttagtgcttatgggaaggttggcaacggtccatatgatcatttcttcacggagttttag

SEQ ID NO: 1185 - DNA, 1710 bp, Cryptococcus neoformans
atggaagagatcggcattgacctcaaaatggaggtgaggaagaatcgtgaagagccggacaacatggggtactgactttgacgtaggatccctccctcccagctcaaatctcggagaagcaaaatctcctcaactctctgcctagtggcagtgaagaactctacagtacttggaagaggcttgaagcccatcgagagtttttacagctccaagaggtacggctgctgtgttgattgttgatttgaactgagctgattaagcaatggcacaggagtacattcgtgacgagacccagaacctgagaagagaacttttgagggcacaggaagaagtcaagcgaattcaatctgttccattggtcattggccaattcctcgagcccgttgatgaacgacgagccattgttggaagtacaactggctccaattatgttgtccgaatcctttccactctggatcgtgaacttctcaaaccatcttcttctgtggctcttcaccgccactcaaatgctctggtagatattctcccaccagaagcagattcatctattgcgatgttgggagcggatgaaaagccggacgtgaagtactcggacattggtggcctggattcacaaaagcaggaaatcagggaggcggtcgagttgccacttgtacaacaagacctgtacaggaagatcggaatagatccacctagaggcgtgctgctctatggtcctccaggtgcgttgatctctgtctagagttccagttgaaggctaaaacgtaatgataaggtactggtaagactatgcttgttaaggctgttgccaacgcaaccaaggccgcattcatccgtgtagttggctccgaatttgtgcagaagtatctgggtgaagtgagcgaatttttatccacctctgaaagcatgactgacaaatgcgacagggtcctcgtatggtccgagacgtttttcgattggcccgagaaaactccccatgcatcatctttatcgatgaagttgacgccattgccacaaagcgtttcgatgctcaaaccggttcggatcgtgaagtgcagcgtatcttgatcgagctacttacccaaatggacgggttcgatcaacaaaccaacgtcaaggtgagtgctgtttatttggacattcgcaatatctgggtttattaatttttgcattaggtcattatggccaccaaccgagcggatactcttgaccctgcgttgcttcgtcctggtcgtttggacaggaagattgagatgcccaatccctctagacgtgagaggcgcttgattttccagaccgtcacttctaaaatgaatctgggtcccgacgtcgaccttgaggattgtaagttccttagttatgcagagctcgtggattttacggattgcactctgacgccatgacagacgtgtcccgaccggacctgctcagttctgctcaaattgcctccatctgtcaagccgccggtctccaaggtaaatcatttagtgcagcatcaagacaggagctgacctatgttcaatgccttatagctgtgcgaaagaaccgatatgtcattttgcccattgattttgaggaagcctggaaggtgagtgcagagtgccacactcgcgactccgcgtcggcgctttgaaaaacgccgcgttcttgccttcatttgtcgtctttcgaaattcaaagctaactcttttgtttctcttttcatcttag

SEQ ID NO: 1186 - DNA, 1745 bp, Cryptococcus neoformans
atggtatgttcaggttgttactgtctgatgagtgctgacagttgatcttccataagggtcaagcaccatccagcggcgctggaaacaataagaaaggcaactccaaagacaacaaagacaaggttggttcttgtgtttcgatgtagcatcgcaagagattgatttgctgactgacttcggtagcctaagtgggagccccctgtgcctactcgtatcggtaagaagaagagacgcggacccgatgcgtcgtcccgacttccagctgtatatcccaccactcgatgcaaactcaagttattgaagatggagaggatacaagactaccttctcatggaagaggaatttgtgtctaatcaggcatcgcagtctggtgaagataggacggcggcagatcgaactcgggtggacgagcttcgtggctcgcctatgggagtcggcactttggaagagatcattgatgacgatcacgccattgtgtcttccggaggtggatctgaatactatgttgggatcatgtccttcgttgataaggacctgcttgaacccggttgctcagttctccttcaccacaagacgcacgctgttgtgggagtgcttgccgatgacaccgatcccatggtctctgtcatgaaacttgataaagcccccactgaaagctatgctgatattggaggcctggaaagtcaaattcaagaaatcaaagagtcagttgaacttccacttacacaccccgaactttatgaagagatgggcatcagaccgcccaaaggtgttatcttgtatggagtacctggtactggaaagactcttcttgcaaaagccgtcgccaatcagacatctgcaacatttcttcgtatagtcggctccgaactcattcaaaagtatcttggcgatggtccaaagcttgttcgggaactattcagggtggctgaggaaaacgccccaagcatcgtcttcatcgatgagattgatgccatcgggacaaaaagatatgactcgacatccagtggcgaacgggagatacagcgtacaatgttggagctgttaaatcagctggacggttttgatacgcggggtgatgttaaagtcataatggcaaccaacaaggtgagtcatcttcgcttacaagattttaacccgcgttgttgactagtttttagattgaaaatctcgaccctgcgctgattcgtccaggtcgaatagacaggaaaattggcaagtttgcccatagcgatagcttacctcgtgctgacttagattctcatcagaattccctcttcctgatacaaagactaagagacacatctttaaattacacacatcgcgaatgtctttggcagatgatgtagacatcgaggaattagtcatgaccaaggatgaactatctggggcagacattaaagccgtttgcagtgagtgtttcatgtcgtgaccatcgctgacaattagccgaggccggtttgctggcattgagggaaaggcgaatgagggttactcgtaccgtaggttcatgtctaaatataggacatctgttgttgttgctgacttttgggggataccaggatttcaccacagcacgagaaaaagtcctgtatggaaaagacgagaatactgtaagtctatctgcctttaacaccgctgacgctgtagcccgcaggcctgtatctctaagcgtacggagactggagattttggtttatgtagtagactgcatgcacttcaatcaagccgtcaattcttggtga

SEQ ID NO: 1187 - DNA, 1750 bp, Cryptococcus neoformans
atgatcgacctcattcatcgtaagcacaaactcacgcccgctcccacaaagacgcacatcagctaacatgcccttgttttagtccaagccgacaaaggcggtaaccctgacatcgttcgggagtctcagaagaagcgaggcgccagcgtcgagctcgttgatgaggttatcgcaatttttgccgagcacaagaatggtacattaactcctgatatccttctttcttttgctctcgctcactgtttgacttttcttagccaactatgaaatggagaatgccaagcgagaactcaacctcctccaaaaagaaatcggtcaaataaaaaaagcaaagggtgatgctaccgagttgcttgccaagaaagcagacatggacaagaagattgcggagatgaccactcgagtagccgatcttatcaagaagagagaccaaaaggctggacagattgggaacattgttgaccctcagaaccacgtttctttgactgaggcaagtttgctaagcgcctggtcggggaaaggaacatacagctgattgattttataggacgacaaccctgtccttcgtttatggcaccctgagcctaaccacaagggcaattctcaacttctcgaccaatctgacaagcccgagggtattatttcccaccatgaagtcctcgctcgtcttgaggcctacgacactgatcgcggtgtcaaggtcttcggccaccgtggtttctatctcaccaacgacggcgtcgaccttaaccaggctttgatcaactacggtctcgatttcttaaggaagaagggattcaaaaaggttcagcccccgttcatgatcaagaaggagattatgggtgcgactgcgcaacttgaagactttgatgaggctctttacaaggtttctggaggtgctgaggacatgtacttgattgccaccagtgagcagcctatctctgcctaccacatggacgaaaacctcgatcccaagaacttgcccctccagtgagtacattcgtctttcaactgcaaccatagccgttgactgaaaggaatttaaagctatgccggttactctacatgtttccgaaaggaggccggttctcacggtagggacacttggggtatcttccgagttcaccaattcgagaaggttgagcaatttgtcgtctgcgagcccgaggcttccccagccgagcttgacgccatggtcgccaactctcgcgagttctacgagtctctcggtatcccgtatcgtctggtcaacatcgtctctggtggtctcaacaatgccgccgctatcaaatatgacttggaggcttggttcccttatcagggagagtacaaggagttggtctcttgctctaactgtaccgactaccgtgagtcccaagactgatcaaatgaaataaagctaatgaaggcctcagagtcaaggtctttgaacgtccgactgggtttcaaggaaaaggacaagaagaccggttttgtgcacatgcttaacggtacactttgcgccactgaacgagccctctgttgtctcgttgaaaactaccaaacccccgaggtgatttttactctttttttactcttcagtccgcaaaaaaatgggcattgaggctgacgatagttgaattcataccagggtctccgtatacccaaggttcttcaaccttacatgcaggggcgggacttcttgccctataccgccgagttgccaaagacttctaccagcaagggccccagcaccaagagtaaaaagtaa

SEQ ID NO: 1188 - DNA, 1573 bp, Cryptococcus neoformans
atgccccgcccgctgcccctccccgccctcagggccgcgctcccccgcccacaccccctccccctccgccgtctcgcctccaccgcgccgcccccgcgccgccactacctctccaccgccctcctcctcggcggcagcgtcctcctcgtcgcgtactactatgactccaggtctctcctgcacgagcacgtcgccatgccgcttatgcgcctcgtcgcagaccccgaacagggccacaagctcgccgtcagggtcctcgcatgggacaagtgggcccggccgagagacatgggtgtcgacggcgccgagctgcaagcagaggtaagatttctgtaaaccgtatgcgcagcgctcaaacggacactgtgcagcttttcggcatgcatctgaaaaatcctgtcggcatcgcggccggctttgacaaggacgccgaggccatcgatggtctctttgacctcggtttcggttatgttgaagtcggaagtgtcactcccgaaccccaggtatgtgtgcagactatgaaatcgtatcatatcctgatccatgcagcccggtaaccccaaacctcggtttttccgtctcgaagaggacgatgcctgcatcaaccgatatggattcaactctcttggacacggccacgccctcgcccgacttcgtctccgtctcgccaagtttgctcaggatcatccttccctcttcccgtcccctctgcctgcaaacctcgtcccacccgcgggtttgccgaggtcattgagagccggacagctgcttgcagtcaacttgggcaagaacaaggccagtgaccctgattcaaacgacgactacattcgaggcgtcaggacgctgggaccttttgcggacgtggtcgtgatcaacgtgtcaagcccgaataccccaggcttgcgcgctctccagggcaagcagcagctcgagcgattgttgaacgatgtcgtcgaagaaaggaacaagatcgcccagggaaccggactgcccaagattgcagtcaaagtcgcgtcagacttgagcgaggacgagctggcagatgtggcgagtgcggtgagaagtagtggtgtcgaaggcgtcattgttagcaacactaccatccgaagaaaagagctcaatcttgtttccggtaaagtgcccgcttctcttttctcttcaagctgacggataccacaggcaaccaagaccagatcggcggtctctccggcaagcccctcttcccttacgctctcaatgctctcaagactctgcgcccgcttctccctccgtctgtccccatcatcggctgtggcggtatctcctccggctccgacgccctcaccatggccaacgccggtgcttccatcgtccaagtctacacctctttcggcttccgcggtgtaggtaccccccgtttgatcaaggatgagattacagagcacctcaagggtgaatcatggaagactcacgtaggccgcgactgggcgtcttcaggtcaaccgatgggatgggacgagaaccgtctcaagcaagaaagccaagcgcttgtcgacgaggccaacgggctggcagagctcttgcgacagtctaa

SEQ ID NO: 1189 - DNA, 1637 bp, Cryptococcus neoformans
atgagccgccccctccgaatagggtttatacacccagaccttggaataggtaagactgattgactcgtgttatgctaactcggcaaggcggggcagagcgtctcgtagtggacgcggctctatctctcaaaaacaaaggccaccatgtcacgatattcacttcgaggcatgatccttctcggtgctttccagagactatagatggcactcttccagtccatgtcctcggatcgtcccttcctcgatcattccaccccaaattcccattcaccatcctcttctccatcctccgatcccttcttcttgctgtccttctcctcacgtctcttcttttacccggtccgctatccattgccaaccctctttcgcctcttcaagggttcgatatcttctttgtcgatcagcaaagtgttgctgtgccgcttctgaggtttgttagcgggacaaggatcgtattttactgtcatttccccgacaaactgcttagcggaggatgggagatcgatgtgggcaaagataaggccgtggtggagagaaaaggtgttggcatactgaagcgcatgtaccggtggcctatcgacaagctcgaggagtatacgactggtgggttgtccgcacattcattatgccgtggctgaccagtatgacaggtcaatcggacatcatcatctccaactctgaattctcttctcgcgtttttgccctcgctttcccttctctcgcccagaaacctcgccgagtggtctacccttgtatcgacctatcttcttacacatcaacttcttctgatgtcaaggatggaagcgtcaaccttattcaatccgatcgacctacaatcatttcttttaacaggtttgaggcgaagaagaatgtggacctagccataaggacttttgcaaaacttcgtgacgatgatctcatctcaaaggaagagtttggaaatcttcgatttgtcgttggcggtaagtcatactacgttttgaccgttaagaagctaattgcaaccaggggggtacgaccctgatcaacgggacaatgtccaaactcttctccacctccaaaacctctgtactaacctctccttatcacatcataccattccctcttcctctccaatctctcccaacacgcaaatcattttcctcctcaacttttcctctgcccagcgcgcccatctccttacttctccttctaccttagcgctcttgtacacacccaccaacgaacatttcggtatcgtccccatcgaagccggggcctgcggattacccgtattggcatgcgataccggcggtccggtagagaccgtcgttgatttttccatcccttccaatgctgagaacggcacgggtctcctacgaccaccccgagctgaagaatgggcaccagcgttgaccactctcctccatctctcttcttcccaacgctccattatctctcagagtgctcaaacccgtatcgccgaaaacttttccttggctacgatggggacgcagcttgagaaggcttgtcgggatgcgctagcgatgggtgatttgcatgttcaagttggggataagctgatttggggtggactgggattaatgggttttgcagcgggtgggttgggcgttatttggatggtatggggggtttga

SEQ ID NO: 1190 - DNA, 1988 bp, Cryptococcus neoformans
atggcacgtactgtactgtaccagtacaattgttctctctgtcggtgacttgcaggagaggcgcgcccgcgaggtttcaattacggtatcaccgcacttatcgtatttaggtgattattttattgttaatttttatttacctcctctctacatacttgcaatttgtcttcttaaaaattttgtgatcgtttatcttccccctcaatttaattttcaacagaacgttgatttctaccgctgtaaccgtacatttgtttcacatagctaaggcacttctcacttgccgaatcactcaaaaatacttctgtggaccggatatctctagccagtaatcaccatgcctaaagacaagaaaattcagaacgctttcaaacgttcagaagtccatcggaaaacaaaacgtgaaaaagaacaagccaagctccaacgccgtcttgaggtatcctccttgctagtgttttcaccaagctccggctaattccctcaattatagataaaaaaggctgaaaaagacaaagtaactggggctgctctccgcgccgagcgtttgtcaaagaatatccctgtaaccctcgataatactcgtgtttacgattccagttcgtatcttacagcaaatcctgcatccctgcaaaacttggctcaggaggcgaaagaagccagtgcattgatcaatgagaatgatcttatggggaaacaaccatccaaggaattaagtaacagagaagatagcgccgttttaacatccggcccgtcaagtgaccaagaagaggatgcggacgggtcaagtgaaatgtctgataaggaaatcgaagaaaagctggatggagaagatcaagaagcctccgcaatgcgagacataactactcaatcaccaccccgtatcttgatcaccacatcaccgtctccttgcaaacaaacttatcagttttgcgatgacttgaaaaatgtttttccgggtggagaattcttcaaaaggccaaagggtagaggatttgaaattggcagggtgtccagatgggccagtaaaagaggttatcgagctttgattgttgtaaatgaggatcataaaatacccagtgagtcagcagtccgtgcactgttccatcggtttttctcacagatattcagatgctatcaccttaataaacctgccttccggacccaccgcatacttcaagctttccagtataacactttcgtccaacatatacgtaagtttttttttcactattggtatttttcatcggacactgatcttcacattcgcgcaggggcatgctcgtcccactccccattcccgtgagtcttgtgattatctgattagggaagacagtactgatgtttaattatctctagcggagctcatactgaacaatttcactacccttcttggaaatagtgttgggcgactgtttgggtcccttttcccaccccagccgcaatttcgagggcgtcaagttgtcactttgcataatcaacgagatttcctctttttccgtcgccacaggtaagctagtcgatcgggataatttcttcaaattactgatccacgaaaaaggtatatgttctcttctgccacttcggccaaactccaagagattggtccgcgctttaccctaaaacttcgatggcttcgaaaaggccttccatctgtcacggctcccgacggtcacgcctctattggcggggatcctgcggacgaaatatacggaactgaagttgggcccagtaaggaggaaattgcacaagatgagttggatgaagaagatgaggcactgaaagagattgggcaaccaacccagaaaaagaatgtttatgaagggaccgaagtgcctccgctcgatgaggagcaggagtatgagtggaagtggaaggttagttgctcatcgttcaacaaggcttgttacatgtcaatgcttatggtacgctttatagccgaagatggaagtatcgaggagaaccttctttttatgatgcaaaattga

SEQ ID NO: 1191 - DNA, 1746 bp, Cryptococcus neoformans
atgcctctcgatctcaactatgcaccagggtctgaagatgaagaggaggacaacatcgatgacgaggacttcccaggcccatcttcacggaggcaagctagaggagctgctggaaagggcaagggcaagaacaaggacgtaggtactcagtcgctacctgatggctctcatttgacaagctatccgatcagaccggaaggcaggcttgggaaggggagtaccagaagtcatgggatatcgttcaagaggatgagagcggctccctagagtctgccgtagagactctgcttgcacgaggcagacggaaaaggtggatttgttctattacgcctctgaaaggataaggctgacctgcaccgcagagcgttgatgtcagatactcccgtgagacggtctattatccggcacgtgttcattatcatcgacttgtcagaatccatgttagataaggactaccggccgacaaggtacatgcttcacaagtacccgctctcgggggtcagcgatactgatctttttaaccagattcgaggtcatcctaggatacctccgaacatatgtcgtcgagtggtttgatcagaatcctctaggccagatcggtgtcattgccatgcgtgatcgattatcagaagtcttgatacccatgggaggcaagtttatcccccctcacacttgccgtagctctcaactgaacgttacagcctccaataggaagtcccgaagagattgttcgcgccctttcggacaagcgtaaactcgaaccgtcaggcgaaccgtccctccaaaacggtcttgtcatggccaagggcggtatggcccatttaccctctacctcttcccttgaaatcctcgtcatcttctccgctatatccaccgccgaccccgacggaccgatcactattcacaatgtgctcgatactctggcaacagggcatatacgtacatccatcctctctctctcgggagaaatcaagatttgtaaacaaattgccgagcggacgggaggtaaattcggtgtagctctggatcaagaacatttaaaagatttgttatgggaaactatccctccgcccgcgacgaccatcgcacccgtcacagccaatgtccgttcagcactcgccgctggtggccgtggtccgaaccaaacaggggagcgagcgcctgcaggcgatctcatggtgatggggttccctattcgcttaccccttggcggagaaacaatgtgtgcctgtcatgggttgttgagaaagggaggatatctctgtccgagatgtgggagtaagctttgtgatgtaccgacggattgtgaggtatgtgggttgatggtggttagcagtccccatctcgctcgaaggtaggtcacttcatgtttgattgaaacatggttttgctgatcgaaccgcgaaaaaaaaaatttaaaaaaaatagcttctggttcttattccctgtggccaattatggtccattatctatcgaggatgtggtggaatcgagcgagacatgctttgggtgtgatagcgagttttccgatgtacgtctctttgactctcttaatcatcttttgaaaaactatgtatcgctaatcaagaggtcaaggctaccgcgatcaatgctggcgtagcccaagttgaagatggtgtgagccccacgggacggtatagatgcgccaagtgcaagcatgatttctgtgccgactgtgatctctacatccacgacacactacacacctgccctgggtgttcgtaa

SEQ ID NO: 1192 - DNA, 1859 bp, Cryptococcus neoformans
atgcgtctcaccgcgaaactggcagtattcagtttggtcgctgcagtatcagcacaactagacggtttagggagcagcagcaaagctgcttttgctctcaaacaaaagcctgatagtagagtggctcgtaatgtgctagagggcaaatcggagggctactgttctgtaagccccacttgtttctagaccagtatttggttccaatagctgacataggttatccgtagccctctggtcccattgaatcaacgcactgtctttatgagacagtagagtcccttaaccagcaattgttcccagttttacatgagcttgtggaaacacctttcttcaaacattacaaagttgacctatataaagaatgtccgttttggtacgaaaatgggttttgtatgaacagaaactgtggagttgaagagatggatgaggtgcgtctttccgtgtggtttgtttggtagtatgttgacagcttgggatagaatgagatacccgaaaaatggcgagcaagagcattgtcagaggtcaaagtatcatcggaggtgagtaattacgagcctataaaaacctggctaacgtgatcgacatcaaaagagtgacggtgtgtccagctgctactttaaagaacaagatttctgttatgtcgaggacgatgcggatgccagtacgtttttgatcgattattatgagagtcgtgcatcacatctaatatccattgtagatggccagtatgtagacttaactctgaatcctgagagatttaccggttatgctggtgactctgctcacaatgtttggagagcaatctacgaagagaactgcttcggtctttcggaggcatccctttccgaaatgtctaaagcttccgttggcatatcgggtttgggaagcaaggggaaaagtgagctggcgtctgctgtggtaggagctggaggtgtaagcaagccgtcaagaggcatcaatgctgctcctggatggggcttctccaagctgagcgaaggatggggaacagaaatggtaaaggcaccacttaacggggaggagatgtgtgaggaaaagaagatctactatcgagtcatctctggtaagttacacttttcagaggttgtcaacagtaaactcattagacgcttgtaggtcttcatgcttctatttctattcatatttgcgccgactatcttgatcaaaccaccggcaaatgggcgcctaaccttgaatgtttcatctctcgtcttgctacccatcccgaacgcctgtccaacgtatatttcaacgctgttctgctccttcgagctgtcgcgagagctgctccgtatttggaagcctacgacatcagtacatcgccagccggtctgctgaaagagggtgataagaaggcaaaggctcgtttaggagaagtcctttctttggctggtggacagagtatggagaagggctttgatgaggctgatttctttgctggtgaagactccggggtaagtgacatccctctcttgatacaggttggtccctaacttttgaaatagatcctaaaggagcaattcaaatctcatttccgtaatgtttcacgcattatggattgcgtaggatgcgacaaatgtcgcttatggggtaaacttcaagtctctggtatcggaacagctttgaagatcctttttgagcttgacgacagggctctcgagtaagtcctctctcggttgttccaataacctagctaatcttcatgacagccctaaagttaaccctgatcttctccaacgctccgaagtcgttgctcttttcaacacccttcatcgtatcagtgaaagcttggcgtctgtggagcagttcagacaaatctatgctgccacccaaaaggctga

SEQ ID NO: 1193 - DNA, 1823 bp, Cryptococcus neoformans
atggtgcctttgtgtgcggtacctgctggacggagctaattctgggttgggtttcggttcatcccaccagtgcgcgccctgctgctgcgccctggccagatccctgagcgatccatcgcgcttcaaagtcttgatccttgttcggggctagcctctctttttcttccttccatcctccttccttcctcacagccttgccccactcgcccatacaatgaagataagtgcgcccccactgcccgctccagaaggctaacccgctccgccccacacgctctgatcctcgtcggtggtttcggtacccggcttaggcccttgaccgtgagttctccgccgctgctgcccttcaccgctcaccccgccacagctctcgtggcccaagcctctcgtcgagttctgcaacaaggtgagtccccctctcgtccgtgcgcgcccacatgctcatcccctgcgtccaggccatgatgtgagtcgcctagcctgcttctcgtgacacgtgtcacggcgcgtgcagatgttctagaagcggcacgtttcatcgcgcgatgcggccactgacagtcttcccacagcttgcaccaaatcgaggctcttgtcaaggtgcgtggcccagctcatatgcccagtcgcactgcctgactcttgttacaggcgggtgtcaaggacatcgtcctcgctgtcaactaccgaccagaggtcatggtctctgtactcaaaaagactgaggaggagtttggcatcaacatccacttcagcgtcgaaaccgaacctctcggcactggtgcgtgaataacgataaacagtgacgcgcagactgatgtgtaccaaagcgggtccccttgctcttgctcgcgaaatcttgggcaaggacgactctccgttctttgttttgaactctgatgtcacctgtgtctatccctttgaggctttccggtaaggcttgtgcagtacctccatctcccgccactcgtctgactatttgcgcagagacttccacattgcccacaagtgcgaaggttccatcatggtcaccaaggtcgccgagccttctgcctacggtgtcgtggtcacgaagcccaactccactgtgattgatcgattcgtcgagaagcccgttgaattcgttggtaacaggatcaacgctggtatctacatattcaaccccagcgttttggacaggattgaggtgagtctgtcccatggcaaagggtaacatccaagctcacgccttttccagctccgtcccacttctatcgaaaaagaaatcttccccgccatcgccgccgaccaacaactgcactcctttgatcttcaagggttctggatggatgtcggtcaaccaaaagacttccttgccggtacctgcctttacctttcccacctcacttctcaacattctcccttgttgactgatccctctcaaaacaagtgggtgtatggtggtaatgtgatggttgaccctgtgagtcgcgctttacaaagtaccgaggaggctctaacattgttcgatagtctgcggaaatcgaccccacagccgtcatcggccccaatgtcgttattggtcccgacgcgaagattgggcctggtgtccgtctccagcgatgtgtgatcatgtccaacgctaccgtgcgagaccactcctggattgccaactccattgtcgggtggaacagcacggtggggcgatggacaagagtggagaacattacagtgttgggtgacgatgtgacgataaaggacgagctctatgtcaatggtgcatcagtgttgccccacaagagtgtaagtgggaaagctcgtccaagctgctgtgttggtactaa

SEQ ID NO: 1194 - DNA, 1634 bp, Cryptococcus neoformans
atgcacagctccaacccatttataaccaaaccaaattctcccaagaaatccagaggaaatagttccacctctgactctaccctagcgtcccttcgccagggtatgggccggatggacatctcttccaagggttcctcaatcccttacaccattgacgtccgagagcggaaagactccaaagatactcgccgagaacttgaccgtttcgtgcctgcccgtcctgcgtccctctcgcacaattctcattccagctctactttaccgacattagctatcgatagtgctgggcatacccctgatacctctgtcgatcattccttatcccaggaccaatcgacactctcacttcaagcatctctcggtctcaactctaaccgccgaatcctgtccttccaatccgccccaccactcgcgtcccacgctacttcccatctcgatgcccarcgaaactaccttcttcaatcatccgcctcggccaaccggggcactggatcccactcgggtaaagataccaagaagcgagcaccgccgtacatgccggagagagtgcttgatgcgccaggatttgaggatgattattacttggatttgattgatkggagctgcgccaatagggtggcgatkgggtkgggggatatgggctatgtgtgggatgcggagacggggagtgtgagtgctttggraagtggtgccgagtgagttctatctcatcgataaggataatgctgataaggttcagagaggatacgaataaagttacatccgtatcatggtccaacgacggtgcatacctcgccattggtcttgatactggtgatatagaggtttgggatgtggaagagaataagaagatgcggacgatgaagggccatttagcaagagtaccggtcatgagttggcacgggcatgttcttacttccggttgtagggacggaagtatctaccatcacgatgtgagggtcgcgaaacacaaggttatggagttggtggggcataacgcggaagtgtgtggtcttgcgtggcgaagcgatgggcagtttttggctagtgggggtaatgacaatgtcgtcaattgttgggagtgagttctttcaactcggaaacgtagcaagtctgatgtgagtagcggccgtatcggcgcttcaatcctcaacgacgaaggaacaccccgcggtgtcgcgaaatggacaaaacgaaaccatactgcagccgtcaaagccatcgcttggtcgccctggcaatcatctctccttgctactggtggcggaactgccgacaaacacattcacttctggtccacttccaccggcgcccgaactgcttctctgcctacttccactcaagtcacatccctcattttttccccacattcgaaagaaattctcgggacacacgggtatccggataatacccttacgctgtggacttatccgacgttggagaaaatctgggaggtgccagcgcatgattcgaggattatcagttcggcattgagtccggatgggacgacggtgtgtacaggcgcgggagatgagaacctcaagttctggaaagtatgggaagtgaggcaggcaaagaaggagagggaagagggcgagagtgggagaggcaagacagccgtcaggattaggtaa

SEQ ID NO: 1195 - DNA, 1881 bp, Cryptococcus neoformans
atgtccagcgcagaagaggtatgtgctgtacatccacatcatatgccacacagttgctgaccatcccaccagtctgatcaggccatcgaagtaagccataccattcaatattcctcttccttgaagctggctaaaagcggctgcagctaacattgccgaactcagatatggaggtaccgcaagcttctgaatatgcttgccaactcccgaggtgccggcacctcttgtatcaccctcatccttcctcctcgatctcaaatttctcaggcgtctaatatgttgactaccgaatacggtaccgcttccaacatcaagtctcgtgtcaatcggtaagctcttgttgttctctttttcttcctctttaggaacatatatgcttgtgttttagggtctctattggggggtttgatgcttggtggaacaatggaagggtttttttggacggttttcaatgcgctttcggaagaacggagatgatgggtcagggcaggatgacatcacgatttgtcaagctgccttgggatacagcgaacgaactttttaatcggctttcggggctaagagatacgccagaacataatgaattagctgacacttttacttcctagactttccgtcctttccgccattacttccacccaacaaaaactcaagctctacaaccgagtccccggacaacggtctttgtgtctttgtcggtacggttttgaacgatgaaggcaaagagaagaagatttcctttgcacttgaacctttcaagcctatcaacacttctttgtacatgtgtgatagcagattccacgttgaggcgcttgaggagcttttagaaaatgactccaaatggggtttcattatcatgtaagtaacccctttttacagtactctagcaaaactaattttatttttgtcttttcttgatagtgacggtaacggatccctcttcggtactctctccggtaacacccgtgaagtcatccacaaattcactgtcgaccttcccaagaaacacggccgaggtggtcaatccgctcttcgtttctcacgtctccgagaagaagctcgtcgaaactacgtccgaaaagttgcggaacttgctgttcagcactttatcaccgccgacaaggtcaacgttgccggtctcgtccttgctggtagcgccgagctcaagactgatttgagtggaagtgatctctttgacccccgattgctggccaaggttgtcaaggttgtcgatgtgtcttatggtggtgaaaacggtttcaaccaggctattgagcttgccgccgactcccttgccaatgtcaagtttgtacaggagaagaagcttatccaaaagtacttcgatgagattgccctggacactggcaagtactgctttggtatcaacgatacactcaaggcgcttgagatgggtgctgtggagactttgatcgtctgggaaaacttggatatgacccgaaacactttgcgtaatgccgccggtggtaagtttgtcatcatctcacatcttatcccatcacgattatgtcccattaaccttggaattgggattttatagaggaaatcatcgtcttctctacccccgccgacaaggatcgagagaagttcatggacaagtctaccggtctcgagatggaacaagccgccgaaccccaacccttgctcgaatggtttgccgaaaagtatcgcgaattcggtgctaccctcgaattcgtcaccaacaagtcgcaggaaggctcacagtttgtgaaaggatttggtggtatcggcgggttgttgagatacaaggttgatttcaatgatttgggtgatttggaagatgacgatgatgagttttacgggtctgacgaagacagtggtgcgttaattttgcctttttaa

SEQ ID NO: 1196 - DNA, 1850 bp, Cryptococcus neoformans
atgaactctgctagccctagcaagattgctgtcaagtttgaggatggtcttgctcccggcgagggcaaggaaggcgagaaaaccattgctcccaagaaaaatcgcaacatgattgagaggacgatctggacctttatcatgatcggcggcttcatcggtaggtctttaccttaccctccaaattccatgctcagagtttttttgcagttcttctctgtatgggtcacccctacatgatccttctcgtcatgttgtgtcaaacgcttgtctacaatgaggtcactgctcttttcgaccttcgtgaccgtgagttattgacataatcgtgtaatataatgtcatctgatgactggaacgtaattcagacggtggttccaaggctgctactcctggagagcaaggcgacagctggaacaagactatcaactggtctgtaatacccaacaattcctttcttattaatactaaacagttctgtcaggtatttcttcgtcgtggccaactacttcctctacggcgaatctattatctattacttcaagcacattgtctttgtggacgcttatttcatcccctttgctcgcaaccaccgatttattagcttcatgctttatgttgttggtcagtatcctttctcttgatgactggcgcatgccactgacttgtcttaaaggctttgttgggttcgtcgcaaatctccagaggcagtaccttcgtcagcaatttgctctcttctgttgggtccatatttcactcttgctcattgtggtgtctaggtgagtcttggttttcatgattcttctccagataactgaccctgatagccatttcatcgtgaacaacattctcgaaggtttggtgtggttcttcgttcctgcatccttggtcatctgtaacgatgttatggcatacgtttgcggtgcgtgtcctgtctttgactgttctatcccagttgctaatgtacacgtacgtacttgtaggcaagcttttcggtaagactcctctgatcaagttgagtcctaaaaagactgtcgaaggcttcgtgggcgctttcatctgcactcttttgttcggcattgctgtgagtcttcgatattgctttcaggcttggcagtgcatttaccatgacgttcagtggggtacattctggatgcgatatccttacatgatctgccccgcccgtgatcttggtaccaatgtcttctctcaggtgacttgccgacccaaccctgtctttatgtggcacagtttcgagtttaccggtgtcgccaggcaagctcttcagactatcgtaagcgtcattctgccattaagatttttttcgggccattgctcattcttttaatgtagctcggccaccccccaccttccatcccctacgctcccttccaaatccactgtctcgttatggccaccttcgcctctttggtggctccctttggcggcttttttgcttccggctttaagcgagctttcaacatcaaggactttggtcactctatccctggacatggtggtatgactgaccgaatggactgccagtaagtgttgggcagtttgtggttgttgtgtagatgctcacgagcattgctgcaggttcatgatgggtcttttctcttacgtttattacagctcactcatccgagtacgttaaactgaattcatcttcttctgacgcttatgcttattttctgtttctagatccaaaacgtgactgtcggtggaatcatgcaggctgtagtcacttccttgacccagcctgagcaaattgagcttttgtatgatttgaagaggttcttggctgggcaaggagtcaaggtctaaatacctttcttgttgagaggtggtga

SEQ ID NO: 1197 - DNA, 1651 bp, Cryptococcus neoformans
atgtccttaccgaaagaatatcggtctacatcgaacttagtattcagcccaccaccccaaatttcttcgttaccgccacgctcaccgccaggtcacgcccgtccatccataggagacttcctaccctctccgggtccgggcgctttcgctcaagcaggaccgagccgcggacgtacaatgcacggtatagaaatcgaggaggaagagaatgttattgaggaggacgagtttcagttggctaggggatattttgatctgaaggaatacgaccgggtagcatgggttctgagggacgcccagggaagtcgtgcgaaattcttgagatattactcaatgtatctcgtgagttccattgtcataataaactaaatcgctaaaaattcctagtctgcggatagaaaagcacaagaatcactgccacatttcctcgataccaaagaagaacgtcttgctttctaccctgccctctctgctcttttatcagagctcaaaaaagagagcgacccttacctgatctatcttcgtggactatgttatatgcgtctggatagacgccctacagcgattaaatgttttatggacagtgtaaggctcaaaccctataactggagtgcatggagccagatggcgcaactggtatcctcagcggacatggtaggttggctacggaaggtcgcaaagggcgcagctcattatgctgcagtttatttcgctaaaagaggagctaccctcgacaccaatgcttacctttttcgctattaattgcatgctggaccttcacactgctacggacctcgtcatgaacatgattaaggagctactggaaattttcccttccagcgtacaccttaaagctcaacgcgcactggtgtattaccatatgcgaggcgagtggctccttttccacatttgattgttcgttaatataatgcagattttgaaaccgccgaagaagaattcgatgctgttcaacatttggatccattcagaatggaagaagttgacatttactccaatatgctgtatgtgatgaacaagcaggccaagcttggaaagctggcgcatgagtacgcagagatagataggaatagagctgaagtgtgctgcttaattggtaaggctcattgtcatactgtgaagatgccactgacaagcgataggtaactactattcatcaagatctgatcataccaaggcaatcacctattttaaacgctctctcatgctcaaccgagaatatctccccgcttggactctgatggggcatgaatttgttgaactcaaaaactcacacgccgctatcgaagcttaccggaaagctattggtacgtcgctcccgcgtttgtgaagttctgccgcttatctcatgtggttaagatgtcaacgcaaaagactatcgagcatggtatggtcttggccaagcatacgaattacttgatatgcctatgtacgccattgagtactataatcaagcaacatccctccgtccgtatgactgtcgaatgtggaccgctctcgcgactgtatacgaaaatctccaccgccttcctgacgccatccttgcgcacacccgcgctctcctgggagccgatcgggtccaaacaatgaccatcctcctcaaattggcttctttgcacacaacgttggatga

SEQ ID NO: 1198 - DNA, 1788 bp, Cryptococcus neoformans
atgtcccgacaaccccctctcgttatcgacaatggtactggttacacgaagatggggtacgttcttaatggttatctacacgtatatgctagcacatagcttaatgtctatgcgttctagcttcgccggtaattcggaaccctcttttgtgtttcccaccgtcatagcaacccatcaatctggcggttctggtgcgtcgtcctcgtctactggtggcgctgggcgcgccccaccacctatcgccggcaagccttcacatctcgccagtaaaagaggaatcgaggatttggatttcttcattggtgacgaagctgtcgccaactccaagttggtaaaatccggtgtctcctcaagagctgtgctaatactgggcgtaggacttattcactccattatcccatccggcatggaatgattgagaactgggatcacatggagcgtttatgggagcaatccatcttcaagtacctccgtgcagagcctgaagaccactatgtgctcttggtatgccttctcttatatgatgaaagacttcgtcttattagagactgaccacaattcttgatcagactgaaccgcctcttaatccgcctgagaaccgagagaacaccgccgagatcatgttcgagtctttcaatgtgcaaggattgtgagtgaaggatctagactggtagtcagagctcacaagctaatttggcacattaaaggtacattgctgtccaggctgtccttgctctcgcagcctcttggacgtcgtccaaggtgactgagcggacactcaccggtgttgtcattgactctggagacggtgttacccacaccatcccccttgtgcgtaaagttctggttaagctcaatgatgattcgactaagacaacccactcaggctgagggctatgttattggctcttcgataaagcacatccccattgctggccgagacatcacctactttgtgcagcaactcttgcgagaccggggtgaaagtgcacacatcccccctgaggaccagcttagagtagctgaaaagatcaaagaggactacacctatgtttgtcaagatatcgtcaaggagttcaagaagtatgattccgatccatacaagtacttcgctcgatttgctggcgagcacagcgtgactgggagggtgagtttcgatacaggagtgacgaaaatcactagctgaccgcccatatcagaaatacgatatcgatattggctatgagcgattcttggcgcccgagatctttttcaatcccgagatttattcctccgacttcctgactcctcttcccgaagtggtcgacacagtaatccaaacttctcccattgatgtccgacgaggtttatacaagaacatcgtcctttcaggtggatccactatgtttaaggactttggtaagaggttgcagagggatgtcaaaggcatcgtggacggcaggattgcgggcagtgaagagaagtcaggcagtttaatgaaggtgaattaccgactattgtttcaaacccaaaagctaacactgtagaaaagtcgagcggcgttgaagtcaatgtcatctcccacaagaggcagaggtatgcggtatggtacggcggcagtttgatggcgtccactgtaagctatttgctctgaccagctcgctcgaatgtctcattaattcacttttcacagcctgaattcttcaacgtcagtcacagccgcgaagactatcaggaatacggtccttcccttgtccgcaggttctcggtgtttggaagtgcaacttgagtgtaggttgtcatcaatag

SEQ ID NO: 1199 - DNA, 1653 bp, Cryptococcus neoformans
atgctcgctacaatgaaccccatcagacccctttttcgctctactcccctccgcctctgccacaactccctctcttctagaatacctcgccgcacgcttgtcacccccacaaacctcgtccacgccaccgtctccaacgttaccgtagatcatgttaaggaagaccctgcagagcaccaatcgggagagcaaatcgctggcgaacacccttctggcaaaggtatatttttgtactttactatggtctagtggcgaaagcatgcaatgctgactcgttgcttcgtttatcagaaatgttcggcttcaagctcaatcccgtagctaccaagactgggggcagtgccaagtctggaggccgacctatctacctcgacatgcaggccactactcctatggaccctcgtgtgctcgacaagatgcttcccctcttcaccgagcaatatggcaacccccattcacgaactcatgcatacggatgggaagcggagaaggccgtcgatgaggctcggcagcaagtcgctcaactcgtcggtgcccaaccgaaagatatcgtgtttactagtggtgcgacagaaagcaacaacatgttgatcaaggggattgcaaaattccaccaatcaaagaagaagcacatcatcactacccagactgaacacaagtgcgtgctcgactcttgccgatggctctccacccagggcttcgaagtcacttatcttcccgtcctcccgaacggtctggtctccatcaacgaacttaaggctgcccttcggcctgacacttcgctcgtgtctattatggctgtcaacaacgaaatcggcgttattcaaccccttgccgagatttctcaagccatcaagtcatgggccaaggaaaatggtgtcaccaaacccttattccataccgacgccgctcaggctgtcggcaaaatccccatagatgttgaagcgttgggtattgacgccatgtctatttctggtcacaagctctacggtccgaagggtgtcggcgccgcttatgtccgacgacgaccccgagtccgacttgagccacttatccacggtggtggtcaagagcgtggtcttcgatcagggaccgtcgctgcacctcttgtcgtcggtcttggtgaggcttgccgcattgcggagaatgaaatggctgccgaccatgcaaggatcaaggctttgagcgataggttgattgagggaatcacgtcaaaggtagagcacatcgtgaggaatggtgatgtcaatgggtatcccggttgcgtcaacttgtcattctcatatgtggaaggcgaatcgcttctcatggccctcaaggtaagcccttttcgcaatctaactactttttatatactgattttcggccttaggacatcgcactctcatcaggatcagcatgtacttcagcttcccttgaaccatcctatgttcttcgtgctctcggtgccgctgaagacatggcgcattcgtcccttcgattcggtattggccgattcaccaccgaggaagaaatcgaccttgtggtgcagaggattgtcagcgtggtcaacaagttgagggatatgagcccactttgggagatggtgcaggaagggattgatatcagcaaaattgagtggaaccagtgagtctagtctctgtcagctattga

SEQ ID NO: 1200 - DNA, 1682 bp, Cryptococcus neoformans
atggaggaagtccatcttttacttttattatacaggggagaaacggccaacgaaggaaacgaacggcgcaccttcatgattcatgatcggacgcgcctacaacgccgcccaacgcgttcgtcgttctttctgtcagtcgtcaatttctccgtcaccattttgttgttgctcacatcacatatctctcacctttacatctcctgcttccatccgacctttcgcctctgctttcggtgcgccgctaacattatggcatccggatcgtcatcgaataataaacttatctcggccactgccaaacataccgatgctgagggttacgaaatgccctggtatattcgctcctaatttcttaacaaagatttttccaactaataacaatttaaaagggtcgagaaatatcgtccggtccttttggacgatatcgttggcaactcagataccgttgatcggttgaaggtcattgcagaggatggtaacgtgccgcatatcatcatctctggtatgccaggtatcggaaaaaccacttctatacattgcttggcgcatgcgcttctaggagaagcgtacaaggagggagtattggaactgaatgcgtccgatgagcggtgagttaaagcaagttgatcaagggtaaatattgatgtggaaacagcggtatcgacgtagtcagaaacaagataaagtcgttcgctcaaagaaaagttaccctcccacctggaagacacaaaatcatcattcttgatgaagccgattcgtatgtgcaactgcaattctattggtcccttgtaaactgaaattattggaaaagaatgacagccggtgctcaacaagcacttcgtcgaactatggaaatttactccaataccactcgattcgccctcgcctgtaacatgtccaacaagatcattgaacctatccaaagtcgatgtgcaattttaagatatagcaagctcaatgacgccgaagtattaaagcggcttaaggaaatttgcgatatggagagcgtccgtaatctaccagtcataagcagttcaggggctgatgaaattacagatcaagcacaatgatgaaggcctcgcagcactcattttcactgctgagggcgacatgcgtcaagcaattaataatctccaatctacgtggtcaggttttggttttgtcaaccaagataacgtattcaaaatctgcgatcaaccccatcctattgtcattcgccaaatgatcaaagactgccagcatggcaaaatcgatgaggcccttgcaagagtgaacgcactctgggatcaaggatactcggcggtggatattgttgtaaccgtattcagagttgtcaagggcatggaggagttgccggagtacttgaagttggagttcatccgggtgcgtcgaaaaagtgtagcagaggaccatccatgacttaactgatttcacttgcaggagattggctggactcatatgcgtgtccttgaaggcgttggaacgctcgtccagctgggcgccatgattgctcgtctgagcaagttcactcttcctccaaacgccctcaaaatatagccagtttaaaatcctttgtatgcagcacttcaagcattacaaatctgatacataaggcacagatcccaaataagttaatgagaccaaatacttttacccaatatctattcctcgaacgctcctaa

SEQ ID NO: 1201 - DNA, 1851 bp, Cryptococcus neoformans
atgaggaacgaggatatagtgagtttgttcttcagatgtcaattttgcggacatgacgccttcctgttcaattcttttgcttccagacgattttcaatgggtcacagaggtatgatagaaaattgggctggtttggagatgaactgactgctctgtgaatttataaaagcggactcagtgggcagaaaagggggacaatgaaataatcgatacttaccgattttctcgatgcatacacacccctggtaaatgtaacttatagagctgatctctggctaccacatatctcaagagctaagcatagtatgcataactgaaggagatatgtggatttgaatgaaattacagcaaacaaagcacaaattacagcaaacacggtgatgcattttgaacttacagcaaacgcgggtcgaatttacagcaaaaacctatctatctcgcttggttgtatccgctttcaggtgtcccgatccctgtacgttcggtcaaagcgcgtcaaaagtctgaaaagagcttccgctgtggtgatgttgtttttcgccgatttctgatgttggtttctggaaagtactcgtaaagtccttttgtgttccccttctatacccttactttttttcacagccttaccccgcaaccatgtccaaggtattctccatcctcggtaaaaatctcaaggccaacaccaaggccgagttggaaccttatatctcccagttggaagaaatggaagatgttgaagaggttcatttcggtggcaattccttgggtgttgaagcctgtgaggctattgccagcgtgctcaagaagaaaaccaatttgaaggtgagaatcttgttctcatgtgatcacagacgctcatgctctttatgcaggttgtcgacttggcagatatctttacgggccgactcatttctgaaattcctcaggccctctccgctttgtgcaacgcactctctgatcacacctctttggtcgagcttgatctttctgacaatgcatttggcggtcgatgcgcggatgccctcgtgccattcctacagtccaacacccatttccaaatcttcaagctcaacaacaacggtctcggaccatggggcggttctgtcgttgcaaaggccttgcttgataacgccgccaagtgtgagaaggaagggaaggagtctagcttaaaggtcgttgtctgtggccgaaaccgattggaaaacggcagcgctcctgactgggctgaggcgtttgggaaacaccgaaatttgaaagaagtcaagatgccccaaaatggtatcaggatggagggtattcaggctcttgctgagggcttgtctaactgcaaggagttggagcatctcgacttgcaagacaacacagctaccaagaccggaacccgtgcgattgtcaagcacctcggctcatggcccaatctcaagcacctcaacttgtcagactgcttgctcggttcagccggcggtattgccctcgctaccagtttgagcctcggatctaatcctaagcttgaatcccttaagctacaatatggcgagatggacaagcgtgctatcgagctattgagtgtagctatctctcagcatctcaaagaattgacggtgctcgaattgaatggaaacaggttttctgaggatgacgaatgtgtagaggagttgaaaaaagcattggagctttggggtcatgaagaagctctcgatgagtgtgagtttttctatcagtacgaagaaggtttccgctgaatgtacacgtagtggatgacatggaagagccagagtccgaagaggaagagagcgaaaaagaggaagagcgggaggaagaggagaccggcgagccggacgacggtgttga

SEQ ID NO: 1202 - DNA, 1598 bp, Cryptococcus neoformans
atgaggtacgtagtattcggcaacatgatatagactcaactgatgatatctatatcctagcctatcaatgtcgacgacattattgagcgaaaacgtggcaagcccattagagcgttcaaggatcgaaagagaaaacgagatgaagacgctacctcggaggatgacctagaggaagatgaagaggaggaaggggattccaatgatgattcagatgccgcgaaatctggcgacagtgaagaggacgaaatggacgttgacatgagcgaaggggatggtgacgaagaggatgagaacgaaatcgagagtcttaaacgcgaagacgagagtgatgaagaggaagaagaagaggaagatgattacgatgaggaaggtgaaaacgaggtcgtcgactctgattcagaatcggaggaagagactgctgctgagatcgctcgtaaggacgcattcttttcgtcagacccaacgacaaccgaccctacactcccttcctcattcaccgccatgaacctctcgcgacctctcctacgagccctcacttctctccaattcactgcacctacacctatccaggcacgtgccatccctcttgcccttctgggcagagatattctcggttctgctgtgacaggttccggtaagactgctgccttcatggttcccatcctcgaacgattatgctatcgagacaggggcaagggaggagctgcatgtcgtgtcctcgttttatgccccacacgagagcttgcagttcaatgtgaagcggttggaaaagctctcgccgagaagggtggcctagacgtccgtttcgcccttctggtcggtggtctttccctcaatgcccaagcacatacactccgcactctacccgatatccttattgccactcccggacgattaattgatcatcttaccaacaccccgagcttcacgctttccgctctcgatgttttggtaatcgacgaggcggaccgaatgcttgaagcgggttttaccgatgaattggaggagatcatcaaggcatgccctcgttctcgacaaaccatgttattctccgccacaatgacagattcggtggatgagcttgtaaagctttctttggataaacctatccgagtttttgttgatcccaagcgcaacactgccaggggactgacccaagaatttgtcaggatccgttcggatgattcgagatcacccagtttgttggcactgtgtaagaggacaatcagagaaaaatgtatcatatttttcaggagtaaggcccttgctcaccagatgaggatcgtatttggtttgtttgggttgaaggcggcagagcttcacggtaatctcacacaggaacaggtaagtcttcccagctagtaccgtataagaattatgctgacatcctcacagcgtctccaagccctcaatgacttcaaagccggcacggtcgattatcttcttgcgaccgatctcgcatctcgtggtcttgatatcaagggtgttgagacagttatcaattatgacatgcctggtcaactcgctcagtatactcatcgagttggacgaactgctcgtgctggccgcaaaggtcgctctgtctctctggtcggtga

SEQ ID NO: 1203 - DNA, 1608 bp, Cryptococcus neoformans
atgggaaaacgaacagcagacgcagcagaccttcccgtgtccaaggcggccgccacaggccaggcgacggcgcgggagcccgccgccgacgacgagatgggcgagtttgaggacagatgggaagacgagatcgagagcgaagaggaggtcgtcgagcacgatgcggacggcgaagcagatggcaagtcgtgctccgtctgccgcccaccgtactgacaccccgcagacgactttacgcccgcccaggaagacgccgagcccgctgccgcgcccacccagacgtacctccccggcacagccatcgccgaagacgagcagctcgtgcccgacaactcggtctacctcgccctccattcgctctcctatgcgtggccctgcctgtcgttcgacgtcctgcgcgatagcctcggcacagaccgcgcgacgtacccgcacacctcgtggatcgtcaccggcacgcaggccggcgaagtccccggcgagggcaaggccaaggacgaggtcgtcatcatgcgcctcggcaacctgtccaagacccagcacgacgacgacgatgattccgacgacgggaaagacgacgacgacgacgaggcggacgacgaagatgccaccctggactttctgaccatcccgcacgtcggttcggtcaaccgtgtgcgtgcggccccggctcccgtaggcggcgccgtgcccgacccgtaccacgtcgccaccttttccgagaccggcaaggtccatatctttgacgtccgcccttatatcgacaccctcgccggtccctcgcgcccccgtcaaaagctgccagtgcacaccatctccaaccacggccgcgcagaaggttttgccgtcgagtggggagctaccggcctgctgacgggcgatatcgaccgcaaaatctacttgaccaccctcacaccctccggcttcaccacttcccccaacccttacctcagccacacctccagcgtcgaggatcttcaatggagtcctactgaacctaccgtctttgcctcggcttctgcagacaggaccgtcagggtctgggacgtgcgtgcaaagggaagaaggagtgtcgtcagcgtcgaggcgcacagcgaggacgtcaatgtcatcagctggaataaaacagtcgactacctcttggtttctggcggtgatgagggtggattgaaagtttgggatttgagaatgttcaaagagtcagtcgcctctgtaaactctgctatctaccccagctaaaatcttttatagcacaccatcccccgtcgctcagttccagtggcataccgcacccatcacatccgtcgaatggcacccgaccgactcttccgtctttgccgcctctggctccgacgaccaactcaccctgtgggacttgtccgtcgagcccgacgaggacgaggcgcctatcggccccgcagacgggaacatcaccgccgtcccaccccaattgctgttcgtccaccagggacaaaaggatgtcaaggagttgcactggcacccccagatcccgggcatggttatcagcacggcgtccgattcgtttaatgtcttcaagactatttcttgctagagttttttttttttttgcagatattccatgtgtaa

SEQ ID NO: 1204 - DNA, 1786 bp, Cryptococcus neoformans
  misc_feature (215)..(215): n=g, a, t or c
atggtggcaagcaaggtgtcagtgccgatgactgggaaaagatcaagctcgcggatgaggtgcctgaagctgtcaaggagcccaagaggatgactcactccagacataccagcagggcgtaagtcatttcttttttgcgaagggcggataaaatcatactgatctgttctagcgagcccgctcttcccagaacacctaccatccctgaagctgangaaattagcgctcctgcgactgtcaaggagcagaagattactccttttgatgttgaaggtggtgtcgatgcttccggaagggagctcgccatgtaagcatctttttcaaagggttttttactcgtccctaatatctttccagcgactatgagaaagtcacaaaacgatttggtgctaccctcatctcccaagaattgctcgagcgatttgagagactcactggtcagaagcctcatcctctcttgagacgaggtactttttactctcatcggtcagttcattctcttgttctcaagcccgatgcgataactcattattatggcagagacttcaacttgatcctcgatcgatacgaaaagggacaacccttctacctttacactggtcgaggacccagtagtgactccatgcacatgggccaccttgtccccttcatgttcactgcgtaagttccatcatcttcatctcgatgcgtgactgatgaatgtgtcagttacttgcaacgggtcttcaacgttcctctcgtcatccagatcactgacgatgaaaaatacctccttgaacgagacgccaagaagcagcaggagctcatgaaaaagatcaaggccaagaagcctcttgatctcctccgatactacaagaagatgggccaggacaacatcaaagatatcattgcttgtggtgtcatccctgagaagaccttcatcttctccgacttgaacacagtcaggtatgtcgcaacttccctgcagtaaacacccttctaaccagactacagtggtgtcttctacgagaatgtcaacctcatctccaagactatcaccctcagccaaagcagaaacattttcggctttagcgactctgacaacgtcggcatgttccactttgccgccgttcaagctaccccttcattctgcaactctttccctcaaatctttggtactcgcgacgacattcctgctttgatcccttgtgccatcgatcaggacccttacgtgagtactctttcatctcttacttcgaaatgtgcgcagctgaacattcattcaagttcctcctcacccgagactctgccgaccgattgggctacaagaaacctgctctccttcacgccaaattcctcccagccctccaaggtgccggtaccaagatgtccgcctcgaaggagaacaccgccatctttatgacagacgatgctaaaaagatcgccaaaaaaatcaagtcccacgccttctccggtggtggtgcgacgaaggaagaccacgaaaagtatggcgggaaccctgatgtggatatcgcgtatcagtacttgagtttctttgaagaggatgatgccaaaatggagaagttggcgactgagtataggaagggtactttgagtactagagagatgaaggaggcttgtattgagaagctccaagaggttgttgccgagttccaaaaggtttgtctttcattactcttctctccttcctgaaaaattcttccgtacaatggttaacctttttttctttctagaaccgagccgccgtcaccgacgaagtcctccaatacttccaagaccccactag

SEQ ID NO: 1205 - DNA, 1662 bp, Cryptococcus neoformans
atggctgttgccagctcatccaccctcactgacagccaggtcagcaagatccagcaagattccgacttctccatcaagagcgagtccgtcacccccaagctcggtacgcatctcccctccttttcagagagtggggctaatgtttggcagacacttctcaatggcctcttttgcttaagaactacgataagttgcttgttcgatcttctcattttactccaatcccctccgtgagcatattttcgctttttattcaaggcctaactaaacatcattcaactagggtatctcacctctcaaacgcgacctccaaacttatgtcaagtctggtgtcattaacctcgacaagccttccaacccgtcttctcacgaagttgttgcttggttgaagcgaattctgcgagtcgagaagaccggccactcaggtacccttgatcccaaggtcactggttgtttgattgtctgtatcgacagagctactcgactggtcaagtcccagcaaggtgcaggaaaggaatacgtgtgtgtggttcgattccacgacaagttgcaggacgaaaaggctttgcctcgagctttggagaccctcactggcgcccttttccaacgaccgcccctcatctccgccgtcaagcgtcagcttcgtgttcgaacaatctacgagtccaagttgattgaatacgacaatgaaagaaaccttggtgtattttgggtgtcttgtgaggctggtacttatattaggactctgtgtgtccacttgggattgctcttgggtgtcggtgcccacatgcaagaactcagacgtgtaaggagtggtatcactggcgagaatgatgacatcgtgtctatgcacgatgtattggatgcccagtggttgtacgataacactcgtgacggtgagtcctttttttatccttattttgtatgtgctcatacgaggatttagaatcctaccttcgtcgagtgattcgccctcttgagtctcttctcgtcaattacaagcgtatcgtcgttaaagattccgccgtcaacgccatttgctatggtgccaagctcatgattccaggtcttttgcgatacgaagcagacattgaagtcaatgaagaggttgttctcatgaccacaaagggtgaggctatcgccattggtatcgcccaaatgtccactgtcgaccttgcctcttgcgatcatggtgtggtagccaaggtgaagagatgcatcatgaacagggatctttaccctaggaagtggggacttggtcccaaggctcaagaaaagaagaagatgatcaagaagggagagttggacaagtatggcaagcctatcgaaggtgttacccctcaacaatggtcctcgggttatattgactacaatgaccctgatgctgtgcctgcttctggatccaacgatctcttgcccacccaacctcccactgcagaagatgtgaagatggagccggtcgaggtcaaggttgaggcggacgagaaaaagcgcaagcgcgaggaagaggaagttggatcaccaaaggctgaggagaagaagaaaaagaagaaggtgaagactgaggatggtgcggagcgagaggaaactgctgaggagagggcggcaaggaaagctgccaagaaggagaagaaggagaaaaagaaggcgaaggaggagtag

SEQ ID NO: 1206 - DNA, 1804 bp, Cryptococcus neoformans
atgtcaacaatgagctacggccatcccaccccagtactactcacatccactcttatccccatctctctcctgctcatcctcaaccctctgctcccacttatcctgcccgctctcccaccaccaatcgagtcaatcatctccaatgtgccattaccgaaacaaccgaccttaccggctttacaagcaaatattggatttgcgttactagcttttgtgggagctgtttggatagtgcccagagtgagtggggcatttgtggagaagggtttgagaggcagggatttgttgaaacctggagggaggacgagtggaccttggatgtgagtcatcattccccatcccttctgctctgggatgtggcttcgagagaggcgtgaagttggcatgctgatgtggtatacatagtcccgagagtctggggttaccatgcgcaagctggtacattgctttgatgatgttattcatcccctttcccttttcgcacctcttccaaggtggtatgctcgaggtttttccgcagcgagaggttggtcaccaagcttcataaacaagatgaatacttctgactgctattatagttaacattatacctctcctccctcctctcccttcttacagccacattgctaggcttcattgatgacctgttcgatattcgatggcgacacaagttacccattccgatcgttgctgcggtccccacgttgttggtgtattactcggtcggaggggcgacgagtgtcgtcttaccacaaggagtggtaggttgggcgaggacgatggggatgggagaatgggttgataacggggttgttgaccttggacctctatactacatctatctcatcctactccctactttcaccaccaactcaatcaacatcctagccggcataaacggtgtggaagtcatccaagccctcctcatcgcgctttccgtcattcttaacgaccttttgttccttcctatctggcctgaacgtttcttgagactgctaggagtcgaccagccagaaaatggaagagtgctagaatgggcgataggggaagtggtagatcggcatctgatgagtttgtactttatggcgccccttgcaggtgtttgtgctgggttcttatggcataactggtgcgtctacctcactctatctctcgcaaccgcacttgtaagcacagagctgaatacgaagtctgataggtatccagcaagggcctttcctggagacaccttctgttactttacaggcatggccttctccgcggtcgctatccagggacatttctccaagactttgatcctattcttcatcccgcagatattcaacttcgtgctctcatgccctcaactctttggacttgtagattgtccaagacatcgattacctgcgtaagtcctcctatgccgcttatcatgtgtgagaagctttgtaacatgtggcttatgggttgatgatttctgtctgccatcatttatagattcgatgcggagaccgggctcttgcatccctcgcgagtaacttttgagaatccacccccaacaaagacaagaataactctccaaatactagaatttctccgcctagttcgcttggaacgtagtaaatcatcaagaggagaccaacagatccacatcaaatcgtccacaaatctcaccattctcaatttcctcctagtccatttcgggcctatgcgagaacaaacattgtgcgcgcttatagctggagtgcagattttggggagcgcagtggctttcggcattaggtatggcgttgggagctggttctatggtggggatcgacgatag

SEQ ID NO: 1207 - DNA, 1902 bp, Cryptococcus neoformans
atgtgtagctttcgcgttagaagtcgctaatcggtaaaaagaaccttgttttggagctccaagcacagtatcccgacgagttttccatgcccgacatcatcttttgctttcccatttgatttccttggtccccacccttccaaatgtcttgcaacctcttatgatacgtcatttccccaataaaagagagccagaagtctctcaaacaacctggatacgaaactgctgcgagctcgttggctattgtccggaattagggggtagaatgtggggggagatcgtcgataggatgctgagaattgatgtacgttcttttcatataaaactgtatttttctggcttaactccttctcaggttgaaataaccaatagcttggatcaagatgatgatgaaagttcggacgatgaatatgaaccccaaatggccaccccgcaatcgataatgacaacgctcgatccgttggaccttcttatatcgcaggaaattcctcggtcccggtctgtttcccattctcccgaaatcggtgtagatgacgaggattctgagggtgatccagatccggacgatctgtcctccgtagatggagctgagtctgatgcggaggacatagccgtaaatgaattgaaggaagcagaagaacgtgccaagaagaatgcaaacaccaaagcaatgcgcgaaaaactcgacggaatgctgtttcattttttccagcatcttgaagaatatttggcggggagaaaagagcatccttccgccctcgagatggcttcggagagaatggaaacagatgtcagatctggagcttctacaccaactgtggaaactccgtctatcgcctccacgtccctcagtcggaagcaacctccatctccggctcagtcattatcatactttcaaaccctgcttaacctcttctcgcgacagattcttccgacagcttcaacccagcacatacctttccttcttttcctcacatcatccttctccccagcgcatacagagctgtttttgggattgcttgtatcgcaagctctttacgccacaacttcgactgtgccatctatcaactctcaacccgtttccatgaaccaacgtattgcggccacagtctatataggttccgtggtctgtcgtgcgcgcttcgtcaccgatgaccaagcccggacggttctcacttacctccttgcctatatggatgggaaactccatcagtcccgggtgaacaagcgccattcaacagacgagcttccgctattctacgcggtttgtcaagcggccatgttaattttctgtttccggtggcgggcatttctggcaggtgcagataaggaaggtgacggcgtcttgggcgatatggaaatggatggcgaatctgttgatgatgaaggaaaggcggagggcaaatggatggcagacctggatgtgctgcagaacgccatcactagtgacctgaatcctttacttgtaagtaaacctcatgtgtgatccaaattaattgttaatgaaccacgaattatcaagggctgcaatccgacggtagtctcaacttttgctaaagttgcccatcacactaatttcgcgtattgcttctccatcatcgaagctaatcaacaatcctcccatccacgatcgtcttcttcgcacgctctgtccaaaaccgccgttcccgcaagccgttcctcgtctggtgctggttccaatcgtcaggatccgactttcggttcgcagacgcttcccaggcaagccaggcagctgaatgtcgatgccggtctggatagctatttcccatttgatccgtatgatcttcctaagtcgaaaagatttattgaaacgctatacagaacgtgggatgaagtagcgattgatgggggcttggattctgactcggacggcagttctga

SEQ ID NO: 1208 - DNA, 2041 bp, Cryptococcus neoformans
atgtgtttgctgactttcagctttgcagggtaaatcaaaattcacccctctgactatcgtcattaagctcggtaggtccataatacatgcatattgatgactgataagttccctcccaggtacctcatctattgtatccccgacatatccttttgtcccccaccttcgacttctttcatctattgttgagactgtagtgaaactccggacccaaggacatcgtgtcgtcttggtatcttcgggtgctatcggtgtggggttaaggaggatggatcttaaggaaagagggaaggggttgcatcagaagcaggtgagtaagagtgtacaatcagaaaaaaagggaggagtggatgctgacgcaagtcacacgaccaacaggcccttgctgctgttggtcaagggcggctgattgcgctgtgggataatctgttttctcaattggatcagcctattgcccagattcttctcacccgaatggacatttcagacgtgaggatttactgaaataatatgtgcatagctcataaggtgacacagagaacgcgttatctcaacgctcaaaacactttctctgaattattgcaaatgggcgttattcctatcgtcaatgagaatgatacagtctcagtatctgtgggttttaccttcattcgtagctatgaacctcctgatagagtctaggaaatcaaatttggcgacaatgacacattatcggcgatctcttctgctatctgccatgccgactatctcttccttttgactgacgttgactgtttgtaagttcaagctgtaccgcgagcatcctgatcctaaaggcttccagatacacagacaacccccgtaccaaccccgatgcgaagcctgtgagagtcgtacgcgatattgagaaggtgaaacagcaaggtatgcttgtttttcctacgtcatgttacttatactcatattggctgttagtatctacttctaccctcggaacatctcttggcacaggaggcatgtccacaaagctcattgcggccgagcttgctaccgctgctggcacaaccaccgttgttatgcattctatcaacgtaactgacattttcaaagtcattgaaaacggcccttcgccttgccgagaggttgcagagactccagaattgtttgagggcccactgtgtacgaggtttttaagacgagagtcagcccttaaagagtgagtggcgttttcgtacgtccagccccattgtacttacagtaatgaagccgaaaatggtggatcgcccacggtcttcacgctgccggtaccgttgtcatcgacgaaggtgcctgccgtgccattcgacgcaaagaatccggtggtcgtcttcttcctgccggtgtcgtccgcgtggttggccctttcgcaagtcaccaagccgtccgtctcgttgttcgccgtcgacgccacgacgacatcgctgcccttagctcagtcgacgaatcaacccccggtagccctacccccgacctttcccaagtaccccagccggcgacattcgcttctcctgctcttcgacaccttacgattgggactaccaatcctatcaccgtcatgtccgacgccaacaacactgaacctgatactcctcaactccaaccttccatgtctctttcatcgtcgatcgcttccctcgaccctttgagcaggagtgtgccccctagtcctgcgataacggctttggcggagaggttgggcacgacatcgttaacgagtattgggcggggagtggccgaaggagagagtgatgagtgggaagaggtcgaggtggcgaagggtctagctcaatacaacagtgtagaaattgacaggatgaagggacgaaagaggtgagcaattattgatgtcttcttgtgcatatgttgatgagcttttagttcggaaattgaaaaacttattggatacgtcgagagcgagcatgtggtggactgtttctactgtgatttctatatagcgtttcaagctcggctaatatggactcaatattttgctcactcagcctgtgaaacaaaagtaagctga

SEQ ID NO: 1209 - DNA, 1913 bp, Cryptococcus neoformans
atggttgagtacaagcaaatcaccaccaccacctacggccttactgaagagggagaaggtatcactcaaaatggttctcacgagtatagagtgtgggaggtgcttcctgtgaagggtcaaggagagcccatcggtattcctgaactcaaggtgagcaatttaattatccgctaaacgttgtttgatcgacgacatggaatacaggtactgatcatttgcccagaaacgtctcggtgacgaaactaccaaggttggtcagatgcgagcgttcaagaacaagtggatagcgaaggatggtgccggtttcgtccgtgcggtgagtgcatatgttgctaatcgtgaagagcgtattgttgattcaaagttaaggctgaggcgcctgtggatgaggctgccgtacaaatgaaggaaatcaaggaaagcgggctggttgcaggaggtgaagccgttgtcaaggagctgcaaaaaagaaaattgattcaacccaagtacgttatccattcagtactgagaaaggggcatacaagtctcacattttacagaaagtatatccactattctatctccaaaggacctcagttctctactgaagtcaagcaactggaaaccgaccttactgttgaaatgctgcaatcgtaagtattatccagcgtccataaatatttacataaactaatgggggataacgcagaggtgcttggaaagacgcttcgttcaagcagtacaacttcgccgctgctggccaacctactgatggtggcgctctccatccattgttgaaggttcgagaagagttcaggaccattttctttgacatggggtatgtacttcgactgaaaaaaaggatactcaatccctgatggaacgttgcagtttcaccgagatgcctacgaacaggtttgtcgagtctgctttctggaacttcgatgccatgttcgttcctcagcaacatcctgctcgagagatgcaggacaccttctatgttaagggtgcgcatatatcgaactcatggatagtacctttaggggctaacagtctgttgcagacccggccaaagccctcaagcctgatgccgactattacgagcgaattcgaaagattcacgaggaaggaggttacggatccattggttaccgagcacctttctctcaggaggagagtgagaagctcttgttacgaacacacaccactgctatcactaccgacatgctttacaggctcgccaatcagcccggagggttcaagccggcgaagatgttctctatcgaccgagttttcaggtaatatctaccatcaattggatgttcaattgcttataatttttgtagaaatgaaactgccgatgctacccatttggcagagttccaccaagtggaaggccttgttgcggactacgatatcactctcggccacctgcttggtacgttctccctaaaaaatgcgccgtccgctccattaatatggtatatctagcgttcatgcaagagttcttctccaagactggtaaccacaagctgaggttcaagcccgcatacaatccttacactgaggtacgcctattttgataaccttgtaaaacgaccctcacacgattatagcccagtatggaagttttctcataccatgaaggcttgggcaagtggattgaaattgccaacgtatgtctatcgttgtttataatatacataacagcagctgatgtgaagctccagtctggtatcttccgccccgagatgctcgagcccatgggtcttcccaagggtgtccgagttcttggttggggtatgtctctggaacgccctactatgatcaaatacaagatccaagatatcaggacgcttgtcggacacaaaacggatttggatcaggtaaagaagagggcggcggtcaggttggagaagggcgatgactag

SEQ ID NO: 1210 - DNA, 2074 bp, Cryptococcus neoformans
atgcttcagcaactggaatggaacatcagcaaaagacgcagacatttcacacggtatatggccaagaccgagaacgtacattccttgtccttcatctccttgatgtcggcaccggcagcaaacaccttgtcaccaccggtgatgacgatagccctcacactctcatctgtctcggccttctcaagctcggcgttgagagcattgaacaagggcgtgctcaacgcgttgagggccttgggcctgttaagggtcaagatggctacgttgttcgaaggagaacgagaggggatgacgagctgttctgcagaggtggacatggcgcggatagtgagtcggtatgtagattgggaaggcttgaggagagtgcgagctaacatgatacaatgactgaaaacaaaaggagataccccagcgaagattactcgttgagaactcgtaccacgggcttatatatgtaagcgttcgttgttcatacgagggatgtggtcattcggctaagtggcggccgggaccgccggctatggacttaggcgaaatgccacgcagatgaaactccgagactcccgcggtcaacaggtggtgttacgtaactatcaagactttcgctttcaatccgccttggaaggggtcgttctttgtcttcgagggcgactcgcttcaacactccattttcactctccgtcttctatcgttcagcccaaaatcatctgtggccgacgacctctctcagaacagctggaacgaaattcactcgacttcagcgcctcaaacaattgtatcaggaggatattggaatccgactcgttgccacacatttggcctatttcaaacgtccagaactagagatccgccacccatcaacgcttgtgcaagatgccccgattctatgagaacaaatatcccgaggtgtgtttgcttatggagcaggaaaaagagacgtggagactgatgatcatttatgcgtgataggtcgaccaattggtcatggtccaggtccagtctattgaggacatgggtgcctacgtcaagctcgtgagtgaagcagtatcagttattctaaggaatatttctgatcgctgctcatagcttgaatacgacaacattgaaggaatgatccttctttctgagctttctcgaagacgtatccgatcagtccagaaaactcattcgagtgggacgaaacgaagtcgttgttgtgatgcgtgtggaccccgacaagggttagttcagctgccgagtcgaaggatagaatcatattgacaaaaatcttttcaggctacattgatctttccaagcgacgagtttctgcggaggaggttgtcaagtgtgaggaacaatacgagaagggcaaagcggtcgactctatcattacccaggtcgctaagaagcgaggtgttactccggaatcattgtacgaaaagattgcttggcctttgcaccgacaatacggacacgcatacgaggctttcaaactctccatcaggtaggttcaaccttctttcagaccatcattctgtaaggggcgcgatgctaacgaactacatagcgaacctgaggctgtctttggctccctcgaacttgatgaagaaacccttgccgatctccgatccggtattgcacgacgacttactcccaaacccgtcaaggttcgcgccgatatcgaagtcaaatgcttctcctatgccggtattgacgctatcaaacgtgctcttactgccggtgaagccgtctctacccctgacgtacctatcaaagtcagattggtcgctcctccgctttacgttatgagcacgacaagtacggacaagaatgcggcgatagagttgatggagaaggcggttgaggttattggtgagactgttaggaaagacaagggtgatatcactatcaagatgaaggtgagttttttccagtcgtcttgtatgacaggttggaagatgttaacggaacccgtctacagcccaaggttgtttccgagaccgaagatgcagagctcaaagctcttatggaacagttcgaagcagccaacatggaccaggcgggtgatgacgaatcaagcgaggaggacgagtaa

SEQ ID NO: 1211 - DNA, 1767 bp, Cryptococcus neoformans
  misc_feature (347)..(347): n=g, a, t or c
  misc_feature (421)..(421): n=g, a, t or c
atgcgctcaaaatcgcttgtcttccgtgtcgctatatacatcatcccacttataatatctgcctatctctttcttccttatccaaacaaacactcttattccatagtcgcaatgtctctctcttccaagctcaacattaccgacgtcgacctcaagggcgagagggtcctcatccgtgtcgactttaacgtcccgtgagctttccacctcctctctcatttcttgttgcagattctaattagtatcaacagcatggacaaggagggcaagatcaccaaccctgctgtaggacacttttacgcaaatgcatatggacatgtgctgatgagccttattagcgtatcgtngcggctctccccaccatcaagtacgccattgacaacggtaagtttgcggttgcttaacatcgccaatcacctancaatgaactaggcgccaagtctgtcatcctcatgtcccatcttggccgacctgacggttcccccaaccccaagtactctctcaagcccgttgcttccaagctctctgagcttctctccaaggacgtcaagtttcttcccgagtgtgtcggtgacgaggtcaagagcgaggttctcaagggtgagaacggccaggtcttccttttggagaacttgcgattccacatcgaggaggagggtaagggcaagaagggcgacgaaaaggtcaaggccgaccctgcggccgtcaagaagttccgagagcagctcactgaactcggtactgtctacattaacgatgcgtatgtttttatcccctttccatgattaaaacattgtcctgaacaattatcagctttggtactgcccaccgagcccactcctccatggtcggtgtccagctccccaagcgagctgctggcttcctcatgaagaaggagctcgagtactttgccaaggtccttgaaaagcccgagaggcctttccttgccatcctcggtggtgccaaggtcgccgacaagatccaattgattgagaacatgctcgaccaggttaacactttgatcatctgcggtggcatgtctttcactttcaagaagacccttgacaatgtcgaggttggttgattctttttttgttggcggtgcattatactcatcattaacactaaatatcagattggtacctccttgttcgacgaagctggctccaagcaggtcaaggaccttgttgagaaggccaagaagaacaacgttaagcttgtcttccccgttgactatgtcaccgccgacaaatttgacaaggacgccaaggtatacctgttttgatattccttacatggaatcttgctgacattgcaatagaccggctctgctactgacgagtctggtatcccctctgactggatgggtctcgactgtggacccaagtcccgagaactctttgctcagaccgttgctgaggccaagaccatcctctggaacggccccgccggtgtctttgagttccctgcgtttgccagcggctccaacgccctcctcgaagcctgtatcaaggccgccaagaacggctccactgtcatcgttggtggtggtgacactgctacccttgttgctcaggccggtaaggaggatgaattgagccacgtctccactggcggcggtgcttctttggagttgttggaaggcaagactttacccggtgttgccgagttgtctgagaagaagtaacttgcgcgattgtagagcggtggagtcgcccgccgcgggaccaaaagtacagagcaagtaccgtactgcgtcgaaagtga

SEQ ID NO: 1212 - DNA, 1856 bp, Cryptococcus neoformans
atgcatccggacgatgactattataccgcaggcccaaaacggttccagcaaaaaagacaaacacggatcaaagaatatttccttgttcggctgtttacttttcaggcacgggagaggcacggacctccagcggaaagatccgaacacctcaaaaccttgttcctgactagctacgaaaagggagccgaatgtatatattttcttcgaaaacacctctttttttcatttctttgcttctcctctatccacgcccaagccatggcctcctacaccccctactcttcccgcccacacacccctctgggtctctctcctagaggctcgtataccaacctcgcctctgccgcgtacgacgcgtcttcccccggaggacatggtgcgaaggatgagaaggagaggctgagggcagagcgtgaagtacaggaggcgttgttgaaagcacaggacggtgtggaaaaggccaagaaggaggaggtatgcatgcccgcgagcactactggtgagtgataaattccgggcgggagtgccgagtgatgtcgctcgacacttgacctggagctcatcattcgtcgatggtgctgacagatgagggtagtactgccgatcctgagctactgtgttgcatcgattatgatgaccgttgtgaacaagtttggtggtatcttggtcgacagtttacaatgacgtttttgcgtgagtctatcccggaatcattgttttctctgatactgaccgctggatagtccttgctatacaatcgttcgtctgtgttgcgtgtgtatggctcgccaagcgcataggcgtcatcaactgtacggcattccctcatcttccttccattacgtcaagctgacccttcaacagtccgtgactgggacatgaacgatgccaaagcgtggttcccagtgtcgtcccttctcgtcgccgtgatttacactggttctaaatcgctccagttcctctcaatccctgtctacacgtaagtatcctcctgccccgtatctcaccaatacgaagcaatcaactaaaccaaatcacgacagaatcttcaagaaccttaccatcatcctcatcgcctatggcgaagtcatttggtttggcgggcacgtcactcctctcactctttgttcattctttctcatggtcggttcatccgtcatcgctgcatgggccgacatctccaccaccctgtcaaaattatcagccggtgtcgccgttgtggaccccatctctggcgccgatgttcctctttcaagtattagcgtgatggatacgatgaacgtgggttacttgtggatgtttatcaactgcttggcttcggccggctatgttctttttatgaggaaacgtatcaaggtgactggattcaaagactgggattcaatgttttacaacaacttgctttccatccctgttttgtttgtcttttctctcatcatcgaagactggggtgctgcctctttctcccgcaacttgtacgtccctttttcttttttttcttttttctttccagcttcctcagactaacaatcacctaccactacagccctgaagaaggccgagccttccttctctccgctatcgccttttccggcgccgccgccgtctttatctcttactctaccgcctggtgcgtccgtatctgcggcgcgacgacatactcccttgtcggcgctctgaacaagctccccgtcgcggctagcgggatcttgttctttggggacccggttaactttgggaatgtgagcgctattctggttggaggcgtaagtgggattgtttatgcggtggccaagacgaatcaggcaaaggtggaaaagtcaaagcaggcgagagggggagaaagcaaggcgtaa

SEQ ID NO: 1213 - DNA, 1795 bp, Cryptococcus neoformans
atgtcctctgataaaaccaaccttttccctactttaggtgaggtggcggaccgcacagggaaggctgagagtactggtttggagcaggaaggagatgacagacagatgcaggagattgagagtctttgtatgagatgtcatgaaaatgtatgtcattgccgcaatttcgtacatgttgcagacattcggagctgatgcaaagggcagggcacgaccagactgctcttgaccagcatcccctatttcaaggaaatagtggtctcttctttcagatgcgatcattgtggtcaccgtgatacggagattcaaagtgccggtgaaatccagcgtaagtgactgtcgctggcggcagaaacagcgtgaactaaattctgttacttgctagccaaaggcgtcagctacaccgtacaccttctcacacgtgccgatctcgaccgacagattgtcaagtctaattgggctacaattaccattcccgatatccagttgactatccctcctggtcgagggcaaatcaatactgttgagggcattattcgtgacactgtacgagatcttaacatcagccaacctgtccgacgagtcatggaccccgagacgggtaaaaagattgacgagctcctcgagaagcttagggcggcaattgacatggaggaggatgatgaagacgatggaggtgttggaatggatgacgatgtgaaacccgtacaccacgaaccatccaattcttcgtctaaagaagaaaaacctttcgtccccttctctatgatcgtcgatgatccgtctggcaattcttacttccagtttaaagggtctcaatcagatcctcaatggaacatgagagcttacagtcggacatttgatcagaatgtgatattgggtttggtcgctcgaccggaggatatgtctgaggagcagccggaaggcgtcccgattgtcgctgctgaccacaaactgagcagtgcggaggagtttgagtcgaaaaggaacaagaacgtgatcaatcgggatgacgggacagttgttccggacgagatttacagcttccctgctacgtgttcttcatgtggacaccagcttgagactctcatgcagcaggtcaacattccttactttcaagtaagtttttttttctttgcctatgtagctcgtcgctaattcttgtcgttaggatatcatcattatgtcaagcaattgctacgcatgtggataccgagataatgaagtcaagtctggtggctcgatcgctcccaagggtaaaaggattactctgaaggttgaggacgaggaggatcttagtcgagacatgctcaaggtgagcgtatctttgtactgtattacagctagtaacttactgcttctgtagtctgatactgctggtctatcaattcccgaaattgacttggtgcttcaacctggtacccttggaggccgtttcaccactcttgaaggtcttctcaatgagatttacaccgaactcagtaccaaagttttccgagctggtgactctactaccgctggtatcggacaagcggattcgagcgccggtgaagatgaagcaaactttggggatttcctcaaaggcttgaaggagtgtatgtcggcccagaggcagttcactctcatccttgacgatccggtgtccaactcctatcttcaaaacctttatgcgcctgatcctgacccaaacatgcaaatcgaggtgtacgagcgaacgtttgagcagaatgaggaacttggtcttaacgatatggtcgtggaagggtataataaggaagctgagggaacggcgtaa

SEQ ID NO: 1214 - DNA, 1658 bp, Cryptococcus neoformans
  misc_feature (1576)..(1576): n=g, a, t or c
atgctgttaataattttcccccctcatgggcactctactctttccacaagttgccatacagtactttttctcaaaaacatccacaaaatgtcaatggcagcatcgtcatccacggcaacagtccagccatcgggtatcatcacccagcccccacctccatccaccctgcgcgaacagcgaattgcaactcactcccacatcaaaggcctcggtcttgctgatgatggtacagccatgtcctcgtcccagggttttatcggacagattctcgcccgtgaagccctcggattgcacttgagcttgctgaaaggtggcaagtactcgggtaggccactgctgcttgttggccctcctggaacgggaaagacggcgctcgctttggcgttgagtcaagagttgggcagcaaggtgccgttctgtgcgatggttggaagtgaagtgtactctggagaggttaagaagactgaagtcctgggaagctgcttccgaagggctatcggtaggtcgatagatcacattcgtaacaggaataaacgctcatgattcggtagggttgaggattaaggagacaaaggaagtgtacgaaggtgaagtcaccgaactcactccttccgaagccgagaaccccctctctgggtatggcaagaccatttctcacgttatcgttggtctcaagaccgtcaagggtaccaaacaactccgtctcgacccctccgtgtacgaatccatccaaaaagagcgagttgttgttggagacgttatttacattgaagccaacactggcgccgtcaagcgtgttggtcggtccgacgcttatgcctcagaatatgaccttgaagccgaagagtatgtgcccttgcctaaaggagatgtgcacaagaggaaggagttggtacaggacgtgacgctgcacgatctggatatggccaatgccagacctcaaggcggacaggatatcatgagtgtgatgggtcaactggtaaaaggcggcaggacagaggtaacagacaagttgagaagggagattaacaaggttgtggaccggtatattgagcaaggtgtggcggaacttgtccctggtgtgttgttcattgacgaggtaagccatttcaacgtatctttctctgacgaccgcgttcttatgattgtatttaggtgcatatgcttgacatggaatgcttcacctacctcaaccgtgccctcgaatcccccatgtccccctacgtcgtcctcgcctctaaccgagggatctccaccatccgcggcacagaatacgacggtgtcgccggttccgcttccgaaggtatccgtgctccccacggtctgcccgtcgatttgctcgataggtgcatgattgtcaagacccagttgtacacccgagacgagattcgtcgtatcgtggagatgcgatgcaaggtggaagggattgcgatctcctcggaagcggtggacaagcttgcggatgaaggggagagaagtagtttgagatacgctttacagctcttgacgcccgcagggattgttagcaagaacaagggtaagggagaggttggtgtggcggatgtggaagagttgngagaactgttcttggatgctaaacggtcggcgggcgtgttgagaagcactgaagatttcgagaagaggtattagaaagataa

SEQ ID NO: 1215 - DNA, 1907 bp, Cryptococcus neoformans
atggctacggttctcccagaaccagagggaatcccctgtatccgcccggctgcgtcctacgatcccctcacagagctctcgaaaccattcacaatcgacccggcttctcgatcatacaagcaccagtatgccaacatctactttgtgaggttggtcgagcagcgccctgctgttgagaagaaggctacggaaaagtggaaggatgttaagggttagtgactgtcaatttctttgcctgcccgtactaacttggtaaaaggcaatccaccgcttttaccgcgtatcctcaacttgacccggtcacagctttgctatatcgtcggtacagtttatatggaaatgcctctgaaacccaatattctggaagatatggctcgagacgtaggccgtttagccattttgagtacgttttaagctgacttgcaacagcactggctcgctgcacctattccaagaacgaaattcttttccgctcaagattccatccaccttgaagatgagtcaggccgagtgcgactgataggcgatgccatccagagggaaagagatagggaaggaggtggtcttgtgacgggagtgatcatggccgcattggggatggaaactccttccggggatttcgaggtgatcgacatatgctttgcaggaatgcccgataagcttgttcttaaccctgcgccatccagtgccaaaagaaaaggaaaagaaaaagttgaaaatgacgaggacattgatatgcaagaaggtatgggcgttgtccgagcttcaggccgttgctgacatgtccaaaaagatgctaaaattgaactcccagagaatgcaaaaacttggatagctatggtgtctggtttgtcgatcggtacccaagaagcgtcgacggatctcaaggctgaaatgttggtcgaatggttgatgggagagattggaggacattcagttagtaacactgtttgacgaaccagattgccttaacaccggtacaggatcagctgggtggtggacggatagcgcggttaatcatagcgggtaactctttaacacttcctgtaaaaggtgaagatgataaaaagattgtaagggtagtcattttccgggttactgacgtatgctgacttgaaacgtcagaaacgcttcaactccacctccaaacccctcttccccaaccacccgacaaaaacccttgcaacgcttttcgccgaccttctttcctcatctctacctattcaccttatacccggaccgtccgaccctgcgggtgccactcttcctcaacaacctttgccgaaaatcttatttggaggtaaagcgaaaacagaaggactggagtgtgagacaaaccctacatggatggaagttggcggaagaaggtatgtctctttttcctcattgtcatccagcagaaaaagaaagaaaaaactgaatcgatacagcttccttactaccggtggtcaggcaatagatgacatttttaaatacgtgcccggcaactctagactaggtatgacacaacgtacattagaatggcggcatatggcacctacagcacccgacaccctgtggatataccccttccctgacactgacccttttatcatgaattatcgaccggacgtgtatattgttggtaaccaaccagagtttgaaacgaccattattggaggtatgaccctttcgtatccccccttccttcagccgatttgaaactaacctaactctgttattctgtagatgaggacgctcccacacgtcttgtactcctcccatcatttgccaagacgggcgtaattgcttttgtctgtctcgaaacgctggaatgcaggacgcttgaatttgaggcgcccatgtgggttggagaaaccatggctggtgaagcagagggcgttgataatgaagaaatggaatcatag

SEQ ID NO: 1216 - DNA, 1787 bp, Cryptococcus neoformans
atgaagccgatggtatcaaagccaaattcaccgacagaggggcctcagtcatcagtaggttcatggcatatgatcttgcctactatcgctaatggctttgcagagggtcctgacggcaagctctctgtcaaaaagacggagaagaactttgagttctttaccaagtctaaggttggccgtgttgggtgagtccatgtcatcgtgtacccatgtccgacgtctgacaatctacaggcttatgctcgtcggtctaggcggtaacaacggtacaaccgtcttggcgactaatcttgccaacaagcacaacatctcttggcacaccaagaatggcatccagcagcccaactacattggttctgttgttcgagcttctaccgtccgccttggtaccgatcctgcaaccggaaaggatgtctttgtgcccatctctgacatgcttcccatggttcaccccaacgactttgtcattggtggctgggacatctcttcgctctccatggacaaggctatgctccgtgccaaggttctcgaatgggatttgcaaaggcagttgattcctttgatggaggatgtcaagccccttcccagtatttactgtgagcagctatcatcgtcattctacgattactgagctaatgtatgactagaccccgacttcattgcggccaatcaggctgacagggccgacaatcttatcccaggcggcgacaagaaggctcatctcgagcacattcgtgctgatatccgtcgcttcaaggccgataaccatcttgacagtgtcgtcgttctctggactgccaatactgagcgttatgccgacatcattccaggggtcaatgacactgccaacaaccttctcaaggccgttgagacctctcacgaggaagtctccccctctaccatttttgccatcgcttccattctcgaaggcgtgcctttcatcaacggctctccccagaacacgtttgttcccggttgtattgagcttgctgagaagcacaaggctttcattggcggtgatgatttcaagtcaggccagaccaaggtcaaatcagttcttgccgaattcctcgtcaatgccggtattaagcccttgtcgatctcttcttacaaccacttgggtaacaatgatggtaagaacttgagctctcagaggcagttcagatccaaggagatctccaagtcaagcgtcgtaggtctaattattggtatattgcggaacaatggctgacacatttcaggtcgatgatatggtcgctgccaaccacatcctctacaagactgccgaagacctcagcaaagccactggagaggtcgtcaaaaagggcgagcatcctgaccacatcgtcgttatcaagcacgtcccggctgttggtgactccagtgagttcattcttctttctttcccatgtcatttctgaccattgttgccagagcgcgctatcgacgagtactactccgagcttctcatgggtggccgcaacgtcatgaacattttcaacgagtgtgaagactctcttcttgccacacctcttatctttgaccttgcgatcctcgccgagcttctcactcgtgtgacttaccgtgagaacgctaccggcgagtggcagccgttgtacagtgttctctcgctcttgtcttacatgctcaaggcaccactcgtcaaacccggcgaggacgtcgtcaactctctcaacaggcagagaaacgctttggagcagttcctcaaggcttgtctcggtttggagcactcgaacgacttgttattgaatactagggtctggtag

SEQ ID NO: 1217 - DNA, 1845 bp, Cryptococcus neoformans
atgcgaaacgagctcaacagaatggtcgcaaacgagcaagaccctgctaagaagaaagtgagttgttgggtcctttgttgagcacgttttcgtgcgcttttcttaggataataaacagtctcttgttaaaagaaattcgtgtaaagttgctgactatgggcttgtaaagatgtttgaagctgagatgcagtccttcttcatcctcttcaatcgtttcctcactgagcgcgctaagggcgaaaagctgtaggtgcactgcacattatttgaatcaatgaattgaccacattacatagcgactgggacaagatcaaccctcccaagcctgagcaggtccgcccttacgaagtccttcccaatgttgacccttcaatcctcaacaagcttgctgttctcaagctcaacggtggtctcggcactactatgggctgtgtcggccccaagtcaattattgaagtcagggataacatgactttcctcgacctttctgttcgacaaattgaggtaagcaaagcctcttgtgtttcaaggatgctgctaatagggagcaattgtcgcacagcacttgaacgaaaagtacaatgtgaatgtgcccttcatcctcatgaactctttcaacaccgatgaggacacagctaggatcatccaaaagtaccagaaccacaacatcaatatcctcactttcaaccaatctcgatacccccgtgttgacaaggaatctttgctcccttgtcctcgagaatcttcaagtgataagagcaactggtaccctcccggacacggtgacatctttgatgctttgacgtaagttctccactgctgacttgtatcgagtataattgacacctcacgcctccctcagcaactcaggccttcttgacaagctcatcgctgcaggcaaggagtacatcttcatctccaacgtcgacaatcttggtgctgtcgtcgatctcaacatcttccagaccatgattgacgctcaggccgagtatgtcatggaagtcactgacaagaccaaggccgacgtcaaaggtggtaccatcattgactacgatggcaagcctaggttgctcgaggttgctcaagttcccaaggatcaccttgatgaattctgcagcactcgaaaattcaagatttgtaggtgtacattctatgaaacgaagtgaaagctgattcagaacagtcaacaccaacaacatttggtgtaacttgcgagccatcaagaggatcatggacgaggatgcgctcaacctggaaatcattgtcaacaacaaggttaccgacgatggtctagccgttatccaactcgaaactgccatcggtgctgctatcaaggtgattggctacattgatgagaaaatcccaacattttgctgacctcatacagcacttcgactctgccatcggcatcaacgttcctcgatcacgatttttgcctgtaaagtcttgctcgtaagtgctcatcattgggcatagagtttggagctaattgagatacagtgatcttcttctcatcaagtccaagctctacaatcttgagcacggtgttttgaccatggacaggtcccgagaatttggaggcacccctgttgtcaagcttggtggcgagttcaagaaggttgccaactttgagaagcgattcaagtctatccccaacatcaccgagctcgaccatcttactgtttctggcgatgtctggttcggtaagagcgtgaggcttgctggtacttgtatcattgtcgccactgagggcaacaagatcatgatccccgacggtaccaacctcgagaacaagttgattactggtaacctttcaatcattgaccattaagcatgaggatgtag

SEQ ID NO: 1218 - DNA, 1816 bp, Cryptococcus neoformans
  misc_feature (1483)..(1483): n=g, a, t or c
  misc_feature (1503)..(1503): n=g, a, t or c
  misc_feature (1509)..(1509): n=g, a, t or c
  misc_feature (1511)..(1511): n=g, a, t or c
atgacgacaggaacgacgacagtggtatcctcccctggcaaggtactcatcgcaggaggataccttgtcctcgacacacactactctggtctagtcatcggcacttctagcagattctactcttgtgtctcgagccgcgcaacgtcaagccgcgcaacgtccagcacgccaagcatcgatgccgataccaacaacgacattgacacagacacttgtcaaaataaagcgaccatctcggtacgcgccggccaattcccttccgacgcttcgacatgggtctactgcatctcaaaaccttctgcttctgcttctgcttccgccggtgaggacggtgaagacggtgaagaaggtggagatgggactttatatcttaaactagagcagaccaatgaagagcaggcgggtaaaaacaaattcatctttatcacgctttgcaaagtgctcgagtatgtttacgaatccatcttggcccacgttggggatgaggaaacagcattggacgagttgatgaagcggataaaaggtggtggggatggtggggacggtttggacgtggtcgtctttgcggacaatgacttttactctcaacgcgagcaggtgcgtatgatatattttcttgttaatgggataatacggcttcggacctgacagacctgtatcccatcagctcacatcgctatccctcccaacccggatatcatcccttccccatctcccgccattcacccctcttccccgcccaatccccgcaaccaacaaaaccggcctcggctcctctgccgcgctagtcacttccctcgtcggatctttgctctcccacctccatatcacccattcctctccagagggcagtatcgcagatgacgacaaggctgtcattcactctgtcgctcagctggcgcactgccaagcgcagggtaaagttggatcaggtttcgacgtttcctctgccgtctacggttcccacctctacacccgtttctccccatccatcctcacgccgctcatgtcccttgccccattctcccgacctcgaccctctcccggctcaacatcgcccctcctcctcgatgcactccacccgagcaaatgggataacaaatctatccctttccgactccccaaacatttgcgtctcttactcgccgacgtttcgtgcggtactgacacgccatcctttgtctcctccgtcctcaagtggagaaataacgatagggaaaaggccgatgaagtgtgggcgaggctggataatgcgaacagggccttgggtgaggtgctgaacgatatggttggcgcagaaaatgagattgattatgaaaaaaccatgatggccgcctcagagctcacatcggacgaggtacgtccgcaaatctcctctccctctctccctcacattcttccattccccgtcactgacttggaaccgtcctgttgtagcttttgaacctccctacaaccccgagcccttcacgcacactccatntcctccaccgcctcgccctntccctntngtccatccgcgctctgttgcgtgaaatgtccgacctctcgggcgtacccatcgaaccaaaagaacaaacgagattgctggatgcatgcggacaagtcaagggtgttgtaggcggtggcgttccaggtggtacgtcctaaatcccctctcgtcccaacccgactcccaaaactttattcccagggccctcagccccatcgtataacagcacacatgctcatgcttcgatttgtttctagcgggcggctacgatgccctttacctccttgccatcgaccacccaacccctatagcaggtgtcgataa

SEQ ID NO: 1219 - DNA, 1995 bp, Cryptococcus neoformans
atgtcaccactttctcaccacgtggcgggcatagcggcgttaatgccatcaccgcagagtaggtctgggagtgtggcacccggggagtcggcgacacccgcctccgcaacgacgatgacaagtcgcgaaccaacgtcgagcaccgagttcaagaacggttattgagcaatcctcgtcttctgtctgcatctacctttaatcttactgtaatacgatcaatatggcccctaaagcgtgagtcggggtgactctgaaacggcataatactgacattactggcagtgactggggagaaatgtaagctcgacagggagtaacattagagcgtcactaaccttggatagacgacaagaaggtcacagacgagaaggaggagaagattgtcggtgcgtatgggctctgtaggacgtggagattcaagtgctaataactgatcagctctcgatgagtccgatatccagatcctcaagacatatgtccgtctttccgcctctccatgaccagcgcttgcaactgacacatatcgtagggccaaggaccttattcccttcacctcaagaagattgagaaccaaatcaaggatatccagaagcgtgtgaacgagaagattggtgttcgcgagtccgatactgggttagcacctgccaacctttgggatatacccgcggataagcagaggagtggaaggccgttgcaggtcgctaggtgtcagactattatcaaggccggtatgtcttttgcagctttgtatctgcgaattctcaactgatttctttgctgtagccaaccctccatcaggcgaccagcctttgaatcctcaagatggtgcgggtgccggtaatccggaaggagatcgatatgtcatctctatcaagcaggtggcaaagtttgtggtcggtttgggcgacgaggtgtcacctaccgatgtggaggagggtatgcgagtcgggcaagtctagggtgttcatcgtccaatcacagccgctgacaatccaaaacagagtggaccaagtaacctacaagattatgctccccttaccgcccaagatcgatccttcagtaaccatgatgcaggtcgaggaacgaccatcaattacttatgccgatgttggtggatgcaaggaacagattgaaaagttgcgagaggtcgtcgagttacccttattagaggtaagcgggaaattatttgtctcgggacgttgaaatttgcgctcatcggcactctttagcctgagcgatttgtcagcctcggtattgaaccccccaagggtgtccttctctatggtcctcccggtaccggtaaaacgctttgcgctcgagccgtcgccaaccgaaccgactctacctttatacgtgtcatcggttccgaacttgtgcaaaagtacattggtgaaggtgcccggatggtgcgagaactgtttgagatggcccgatcgaagaaggcgtktmtcatcttctttgatgaagtcgacgcaattggtggtgcgagatttgatgatggtgctggtggagacaatgaggtgcagcgaaccatgttggagctgattaaccaactggatggtttcgatccgagaggtaacatcaaggtcatcatggccactaacaggtacgtcttggtccatgtccccatcatacacgccccccagctgacatccttccagacccgacacccttgaccctgctcttctccgtccgggccgtctggaccgaaaagtcgaattctccctccctgacaatgaaggtcgaacacacattctcaaaatccacggtaaatcaatgtctgtcgagcgcgatatccgatacgacctcattgcccgtctatgccccaatgcgaccggtgctgaactcaaggctgtggccacagaagccggcatgttcgctatcagggcgagaagaaaggtggcgacagagagagactttttggatgctgttgagaaggttatcaggcagggcagcaagttctccagtacagcgttgtatgcgcagtataactag

SEQ ID NO: 1220 - DNA, 1792 bp, Cryptococcus neoformans
atgagtacaaaggagagtactgatatgggccgagtagttcaaggcagatgtctttttctctggcctgaagtctcctgacaacaaattcctccattttaccttcaagtgagcatcgactttcgtgcaaggtataaaatctgatgtcggtcatagcaaagaatcatttgcctaccatctccttcgtcaaatcaacctcactgcggccgcgtctgtcgctgacccctctaatcacactctcgcctacggtaccaccactgaaggcgccggcaagcatctcgttgtcgacttctcctctcccaacattgccaaaccattccacgctggtcacttgcgaagtactattattggtgccgttatttgcaacctccacgaggctaacggctggaaggttacaaggttgaattacctcggtgactggggaactcagtacggtctcttatccgttggttttgacaaatacggaaacgaggaggagttagtaaaggaccctatccaccacttgttccaggtctacgtcaagatcaacaacgcgagggatgaacagaagaagaagtttgaggcaggcgagactattccagatgaggagaacatccacttgttggctaagaaggtcttcaaggacatggaggacggtaggtgtctatcgatgtctatctgcgaaaattatgtacattatcttacatgtcttcaggcgagcccaaggcaattgcccagtgggcccgattccgagatctctctatcgagaagctcaagggcacctacaagaagctcaacgttcattttgatgtctactggggtgaatcccaagtttctgaggaatccatggagcgggctgtcaggatcgttcaggagaagaacttgacttgtgaggaccgaggagctttgttggtcgatttgaccaagttcaagatggacaaagccatcgtcaggaagggtgatggtacttctatctaccttacccgagatcttggtggtgcctacgacaagtaccagaagtacaaattcgacaagcacatctacgtcgtccaggccgctcagaccttacacttcaaccagcttttcaagactcttgaactcatgggcgaaccttacgctgacaaacttgagcacgttactttcggtcttgtcaagggtatgtctaccaggaagggcaccgttgtcttcttggaagacatcatcgccgaggctaccgatgtcatgcacgagcagatgaagagcaacgaggccaagtacgctcaagtcgaggaccccgagggcactagtgccatcattggtaccactgccgtcaagatccaagacatggctggtaggaggtaagctttccaaccgaagcgcgtattgaattgtcagctaacctgcttgtaggattaacgattatgactttgacatcaagcgatgtacctcttttgaaggcgatttcggacccttcatccaatactctcacgttcgtctttgttccgttcagcgaaagaaccccaatgttctcgttccgcaatctatcaatgaaattgatctttccatcctcaatgagcccaaggtcaacgacatcatcatgcatctcgccctttatcccacccacgtccgaaacgctttcctccaaagtgaacctagccaacttgttacgtggtgtttcaagttgggtcacttggtcggtgctgcttgggagactgtcaaagtcactggtcaggaggaagaaattgccaaggcgaggttattcttctacgtcactaccagggaggttttggcgagcgcgatgaggatgttgagtttgactccaatcgagaggatgtaa

SEQ ID NO: 1221 - DNA, 1830 bp, Cryptococcus neoformans
atggcaactcaactccccccgccaaaacggcagaagtcggcctattcgcagtcccaaatgcccaaggtcgaagaaccggcgaaagacgtcccctcaattgtggtccagttcaaatcggcagaagatggatccagtcttggtcctgcgattaacttgcctgctgataccgccagggatgctttacagatgcttgtaaacaaacttaggggagaggtcagtgtccgattcattcgttgcacagccgctgactctaacacaggatgaggatcctctgccgtacgcttttcatctcgttcctaaagaaccttcaacttcaacgactccggcatctgctcgagtgcaaatcaataactctattcaatccgatgctcttgaagctaaaaaaagtactttctctccggaagacgtgtttgaactatggtgtgagccgcaagcggtttttagggttagaagtgttgggaggtgcagtgctacattgactggtgcgcgagctctctgcatctatatagtactgaaactgacagccactgcaggccattcatcgccaatcctttgctgtgctcagtctcctactggtcggtatgctgccacaggttcgggggacgccaactgtcgagtgtgggacatggagactgagacccccaagtggactctctcgggccacaagggttgggttctgtgtgtggaatgggattctcgggagaagatccttgctacaggtggacatgacggacaagtcaggctctggaatccagccaccggccaaccttatggtgcgccccttttgggccataccaaatgggttactgcgctggctttcgagcctctccatctcgtccctaagagctcatctgggccacgtattgcatctgcttcaaaagatggcactgttcgagtttggaatacgtctaccagaaagttggagtttgtacttaccggccatgccgctagtgtcaactgcttaagatggggaggtgaaaatgtcatatacacaggaagcagtgacagaactgtcaaggtttggagcggcgttgatgtgagccatcacttattgtagacataaagaaacaaggaactgacagaattacagggcaagcttattaggacactctcagaacatgcccattgggttaatactatggcactcagcacagattttgtcctgaggactggtccattcgatcacactggcaagacccctaccaatgacgaagaaggtaggcacaacctgatagtttcacttgcttcgtctgctgacatcttcgatagtcaagaaacgggcggaggagcggtacaaatccgttatcaccaaccagcccgagactctcattactggttctgacgaccacaccctttacctttggcctgaccaggcttcctcgtccttctcatccacttccacacccaagaaacctctcgctcggctgacaggtcatcaaaaacaagttaatcatgttgcattctctcctgacggccgaatgattgccagtgcaggttttgataatgccgtcaaactttgggaaggaaggacagggaagtttattgcaagtcttagaggacatgtggcagcggtatacagggttgcttggtcggcggactcgaggatgttggttagtgcaagcaaggacacaacgctcaaagtaagaaagtttaattcgtacgtagtaagaatctactaatccaccgtggtagttgtggaacctcaaaacttacaagatccgcgtcgaccttcccggccatactgacgaagtgtactgtgtggactttgttgcagacaaggtcgtcagtggtggcagagataagaccgtgaagatgttagttcgccagtag

SEQ ID NO: 1222 - DNA, 1785 bp, Cryptococcus neoformans
atgattcctcggtcagcgcgtctaaggcttccatcgtcttccctctccgcccatgccagacggcggctctacacccccgtccgtccccctctcaaactcgcaattattggcgctggcccctcaggtttctataccgcctctcgtatcctctctttgattccccctacatccccagaaggtcaaaaacttgaggttcatatgtatgaaaggcttccgacgccttatgggctggtaagatatggtgtcgctccagatcatccagaggtcaaggtatgtctcttcaggctttgaacgaaatcgaagtgaagtgtcgtactaatgaaagagatagaattgccaacacaaattcgatgagctggcccatgattctagattcaaatattttggaaacaccctcgttacatctcatccttcttcgactttttcaccttcgccaaccgaaaaagcaccatcatacacttaccctcatgccctccgcttgtcatttagcgacatcatgccgtattattctaccctcattctgacctacggtgcctcactttcaaatcctctcaatgctgtcccggggagtagctccaacagcgacccattgacaggtgtttacccagccttggccctcgtaagctggtacaactcccatccagcttacgctgacttaccggtcaacttggaaaaagtcaagcaagtcagtgttgtcgggcaggggaacgttgcattggacgtagcgagaatgttgctcaagcctgtatcttctttggcagagactgatttgtctgaagaggtactcgacgttctttcggaatctagtgtcgagaaagtgcgggtggtggggaggcgaggtccaggccaagtagctttcacaacgaaagagtttagggaaatgctctctatccccgatgttggatacgcaggtatcgaccctgctttaatggaatacgcaaaggagaatattgaaaagggtaacggagagagaatgaagaagaggttattacagttgatggacaagacgaagcaacaagatggtagaaagatatttgagctcgatttcctcaagggtcctaaatctttcctcccctctacagagaacgcaagtcaagtaggcgaggtggaatggaatcttaaccaattagaaatgagacccgcaaccgagtcccagccagcgagtatagtcgcaaaatcaacaggcgagactatcaggaccccagcagacatggtggtcgagtctgtagggtacagatccgagcctcttactggacctggccatgagtgggatctaccgtttgacattgctcggggtagagtgagcaatcttaatgggcgtgtgatcgcagaagaaggtggtttcgtaagcctcatttctcgccttccccgaacccctactaccgaaaaaaaaaagaaaaacaaaaaaaaaagagagactggatgctgatgagaacgaccgaaatctaggtacctggagtatacgctgctggctgggccgcccgcggtcctgtcggtgtcatcgccaccactatgaacgatgcctacgctctcgcttccactatccttgacgatatatacgcacccaccacatcttcccccgctgcttgcatgctcaactctcggccttatgctggtatccccgaaaaagtccagaacgcggccatggaaggaaagattgtggttgatttggaaggatgggcgaagattgataaggctgaggttgagagggccaagcggatggggagtgggaaggaaagagaaaagtttaggagggttgaagatatgttggcggttttgcagtag

SEQ ID NO: 1223 - DNA, 1862 bp, Cryptococcus neoformans
atgaacgcggcgaagggtatcctcggattatttgacggccgtgaagtcatgctaactgggatctatagccgttgcggacgccgtgcgaactagtttgggacccaagggaatggacaagatggtaaggagtttgaaaatgcggctcgaaacatcatcgcttatactctatgctttggtcagatccaaaccagtaatggagaagtcgtcatcaccaacgacggcgctaccatcctcaagcacatggcggtactccaccctgctgcacgaatggtatgtgccgaatcagattcagtcttcctgtactaacagtcaattatttcagcttgttgagctctcacaagctcaggatatcgaggccggagatggtaccaccagtgttgtcgttcttgccggaagtctgctatccgccgccgaacagttacttgctcaaggtatccatcccacaacggtagcccagtctttccagaacgccgcttccaaggctgtcgagttcctcgagggtataagcatgcctgttgatctgaacgaccgagagagcttgttgcgtgctgcccgaacaagtctgaattccaaggttggttattatgtcttttgaaggtggatgttgtatacttaataaaaatttagatcgtttcccaatactcctcaacccttgcacccatcgccgtatccgccgtcacccgactcgtcacctccgcctcttccaatgtcgacttgagagatatcagaatagtgaagaaagtcggcgggacgattgaagacactgagctggttgagggtttggcgctgaaccaaatcgcgatgactaacgccggaggacctacaaggatggagaaggctaagattggtttgattcaattccagcttagtagtcctaagcccgacgtatgtggattcgctccgtagttcattgaatcagaaactacgctaacttttctgcagatggacaatcagatcgtagttaacgactaccgtcagatggacaagatcttgaaggaagagcgacaatatctcctcaacctctgcaagcgtatcaagaagactggctgtaacgttctcctcattcaaaaatctatcctccgtgacgccgtcaccgatctttctcttcacttccttgccaagctcaagatcctcgtcatcaaggatatcgagagagacgaaatcgactttattgccaagtccaccggtgccaagcccgtggccgacattgaggcctttaccgaggacaagctcggttctgcagagttggtggaggaaactaaccagtccggcgccaaggtcgttaaggtcactggtgttaagaacgcgggtaagaccgtgagtgttgtttgcacgggtgcgaatgagcttgtgcttgaggagagtgaaaggagtttgcacgatgctttgtgtgttgtaagatgtcttgtgaagaagcggtaagtcgttcgttgtttcagctgttcaagcgttcgctgatctgtcctagtgcgttgattgccggcggtggtgctcctgaaatccatgtctctcgtcttctgacagattattcccacactctcaagggtaaagaggcttattgcttccaagcattcgccgaagctctcgaagtcatccctaccacccttgctgaaaacgccggtcttaaccccattgccatcgtcacggagctgagaaacaagcacgctcttggtgaccggaatgcaggtattaatgtgaagaagggaattatcagtaacattttggaggagaacgtggttcaacctttgctggtgtctacgagtgctttggagttggcgactgagacggtggcgttgattttgaggattgacgatattcaggtgcgtattttactccttggcagcccgccattgctgacatag

SEQ ID NO: 1224 - DNA, 1871 bp, Cryptococcus neoformans
atgcacaggccagcccgcggcgccctccgcatctccacacgcctggccactcggcctcctcttcccgcccttatacactcccgcccgtactcactctccgccacagagcccccgccaaacctacagccacatcagtatccagccttcgaacgcctgtcaaccgcactctctctgaagcagccatgtttcggtgccagaggagacgaagtagagcttctgaccgggccagaagtcttctacagccggctcttggacatgatcaaaggggcgaagaggagaatattgatcagcagtctgtatatcggagccgaggagggggagctcgtgagtgctggatacaagccgtctttcgttggttgctgacattgcaatcaggttgaggccatacaagccgctctgacgaacaatccacagctgcgtgtagtctttattctcgattaccatcgcgcgactcgtctagctacttcgaccaacttacccccttctaccgcccatcttttattacctcttgtggaacgtttttctgaccgatgcgaagtgtggttgtttagaagtccaaagttgaaaggattaatggagaagatcgtacctgccagatatgacgagggatggggcacatggcatggcaagtggtatggtgcagacgatgaagtgattataagtgggtacgtatctcttcttgacatcagtagattcgcattgacatatgtttagagccaacctcggtcgctcgtattttacgaatagacaagatagatatatccatttccgatccaatcccagcctgttatcttatctctcatcattaactcgacttttcacacaatactcttatcttctgcatcattcaccaccacctcacatccccccctacaataccgtcccgctcccttcaccagagaatccggacaattcgaaactccctagctcttcagtttcaatccgcccgcgtgcctctctcatatggccctcttcttccatcaatccccgcaagttctcccttcacgctctagccacgttgtcagcctttcaaaactcttggcgtgcctccaattctgccaggtcgcgtcgagtagatgttgatacttggttttggcctgtccttcaagctggagtgttgggtatcaaagaagaggagagggccatggcagaagtttggaaggctgtaagggaaagtcacgagggagagcagaacgaatccagaaaggtagaagtagatttgacaagtggatattttggtctgtacaagaagtacaagcaattggtggtggaatcaccggcatccgttaagatcattgcagcgtcaccaaaggtagagcgatattatctgtcacaagtatgtctaagtgtgctgatgatatatacaaggcgaacggattttacggatccaaaggattctccaggctcatcccagaaggctacactttgctggaaaccaggtttcatcgagatactgtcagggctggtagaacttggaacgttgagaagggcaccggcgtgagattaaaagagtgggagagagaaggatggacatatcattcaaaaggtctgtagcagcattgtcgtaactttttttggtcacttcattgaccttgtattcagggctttgggtttcaccgcccgactcaaaaccattcctcacatttgtcggctcgtcgaatctttccacacgatcactcacactcgacactgagctgtccatggtgatgatgacttcttcccctactttgcggcgggctcttgataccgagctgaagcacttggacgagtatgcgacgcaggtaggggaagagacttggaagctggaggagcggcaggtcagttggttggcttggcttttggtggcacttggagtcgaggggatgttataa

SEQ ID NO: 1225 - DNA, 2020 bp, Cryptococcus neoformans
atgtctcggttcaagatttcaggtgcactgtgggacagtatccaccactactcgtctttcccacagactggaggtgcgtcctcatcccatttggccgtttgaagcggtatcatattgacaaatctccacagtttccctccaacaaatgattcatttcggccataaccccacacctggtacactcctcaaagcttctcagtttctttctgaagaactgcctatcagattatcacatagggtggtagaactcaacgctttaccagatggactcgccaagatgcctagtatcaacaaggtgaaggagtggtatgctcagagctttgaggtatgtccgagttaatccgaaggcatggcggaaggaactgtttagcgtggaaaacggtatgcttctaaatcaagatccccgaaattgtcgggcggtagatgaagtgactcgtagatggtcttgacgaaatctgggagacatgaggacacggggacagttgtcggcgtcagcgaatgatgtgcagatcggtggctgatgattctcatgtggagtaggagcttgtgacatttccaaaacctagattcaaaccagaacttgaaggtatacttaatgtcccaaattcagagtgagcccagcaatttccgcttcccacttatctccctgacagttctacctgaaacagccgaacaaaactagctttccccagctccactcctaacccttctctggacccacttatggacgaaggcccagtcggttccggtcttctggtcgagagacataaccagggaaacgggaacgggaatgggaatgggaatataagcgggaatggaaatggcaacggaaacggcaacgggcagaggttacggatacccatggaacgtcggtactattcaccgccacctgcaactctcgtctacccaccggaagtacatgagtacaacgaaaggtttactcatttacttgagaatatcaagaaaagacacgacccaactgtcactaccgttgctcaaggtgtattggagtggaagaggaagcgaaagaccgggaggataggagtaccgattcaggagtggttggataggttctacatgagccgaattggtattcgatttttgatagggcagcgtgagtctatgacaatgcctcgagaaaaacgtgatcgagttgaaaacattaaaggatgaagctgatcttggaacctatagacgttgcgctcaacactttacaacctcatcctgattatgtagggataatttgcactcgagccaacgtgcatgatatatgtcatgaagcaattggtaagtctaacccagtacattcgttattcatttaactcatcttgacatccactcagaaaacgcccgatatgtctgtgaagagcattacggcctcttcaaaggcccgcctatccagcttctttgccctaaagacctcacatttccatatgtgcccgggcacctctcccacatctgctttgaactcttgaaaaactcccttcgtgcggttgtagagcgttttggagtggagaacgaggaagctttccccccgatcaaggtagttgtagttgagggtagggaggatatcaccatcaagatttcggatgaaggtggggggattcccaggagtgcgattcccatgatctggacgtgagtcggaatctatttactgtccatgtggaggcaaagagtcaggtcgactgatctggagcaggtacctctatactacaatgagtgacgaaggtttagaagcgaccattgaacagtcagatttcaaagcccccatggctggtttcgggtacgttgccctttttgtgctcttgcccatcaacacaataactgacaatgactcctcggtagctacgggcttcccctcgcaaggctggtacatactttttccaagattactctcaaggctgatatgctaactaccgcacagtacgctagattctttggtggcgatctcagattgatctctatggacgggtacgggacggacgtgtatatttctctcaacaagttgtcctctaggtaa

SEQ ID NO: 1226 - DNA, 1950 bp, Cryptococcus neoformans
atgactctggatgaagaacgaatagtcggtgaattggctcgagtaaacggagaagcgggggtggaggcagggggtgatgaaataggcatgggagaagtgaggtcccgcgccttaccgcctaaaagcatttacgcgtgcctagaggagtttacagagtcgcgtaggacgacgcgaggggcgtgcgcggtgctgttgaccgttggacactacactgtccttcgcagtgctctctttatctttctcctttgcttcctgctctcccctcctccaccttccaccctttgcatttgtgcaaacgactctaatcaccttcatcatgtcagatggtatcggtatcgcaaagtacgtcaatctctgctcaatctacgcccatcaacgcttcgcttcattactgacaacttcgcagtttgccaaatcaagtgagacgattcggccagagaaacttcaacccaaccagctaacaattaccacagaggcataagatcacaagccagagaggcgcgcatttcactatcatggttgttggtgagtgcacttccattcaacagttgcgaacaggaccgtgcacactcttccagtacagtggggcaaaagctgacttttctctagggcaatctggcttgggaaaaacgacgcttataaacaccctctttgcgactgaaatttgctcgccgaggaattatcgccaacggtgggtttcatttgaagtaaagttgaagtgatgttgaaaacactactgctaggttcgcaaaacagctggataaaaccacagaggttgaaattttaaaggctgaccttgaggaacgcggtttcaatattaaattaacagtcattgacactcccggatttggcgactatgtcaataatcgcgactcatggggccctattgttgactttattgacgaccagcacgaatcttatatgcgccaggagcaacagcctttcagaaaagagaagcaggacttgcggatccatgcgtgtctgtatttcatcaaaccgactggtaccacgtaagtggtttatcatcaaatatcagattcttttgagtctcataagatggcaggttgaaaccacttgatgtggagatcatgaagaagcttggtacacgagtaaacctgatcccagtcatcgccaaggcagatactatgtctccagaagatctccacaacttcaaaaccattgtaactcaagttttcccatctctgcatatattttcgctcatcttttcaggtccgtgaaacgatcattgcacaaaatatctctgtctacactccacctgtagacctcgacgacgaagctgcggctgagcatgcgcgagcaatgcaagctgttatgcctttctcaatcattggtagtactcaggatgtcactacgcctgacggaagggtggtcaagggtagagagtatttgtggggtgtagccgaaggtagatctgatctgcattgtcatcagacgtttggctgaccaatctacagttgagaatgaagaccactgcgactttaaaaagctccgatcccttcttatccgcacatatatgcttgacttgattacctccacggaagaaaagcactatgaagcctaccgcctcgcacaaatggaaactcgcaaatttggcgaaccaaaggttaaaaagttggataacccaaagtaccgcgaggaagaggaaacattgaggaagaggtttactgaacaggtcaagttggaggaggccagattcagacaatgggagcaacatgtaagagtgatttacggactatggcaaccgtgctcacgcgaacgtagcttattgccgagagagatcgtttgaacaaggatctcgagcaagcccacagcgctatcaaagctcttgaggtaggtgtaatttcgccctctctctgcggaaaaatggctgacatgttcaggctgaactggaccaggtggctgcctaccatcgtcaaggggggactgtag

SEQ ID NO: 1227 - DNA, 2039 bp, Cryptococcus neoformans
atgtagtgactccgtcccggacgccgagcgcgcgtactcaccgcaatattatagtcgtcccattggccaagccaaatcatgttatcgatattactcatacatatagctgacccactgttatagagccctctaattcaatcgatacataagtaactgaataaaatatggaatcccataccgttctccgccccacggccatccctgatcttgccgcgatcaagacttggggtcttgaaggactcaccaaggccaagttcagctttgacacgtgtgtataacattttacaattcactcgaaactcaaactgacatattaaacagcaaaaccaccactgccaccatccttacccttatcctctctcttcttgtcctcgaacagctcgtctacagggccaagaaagcacacttgcccggtgccaaatggaccattcccgtcattggcaagtttgccgactctttgaaccccaccttggccaactacaaggcccagtggaactctggacctttgagcgctgtttccgtgttcaacatgtgcgtttttagtatcaaacaattgcagagagatgagtactgattcgccaaacagtttcatcgtcatcggttcctccaacgaaatggccaggaagatcctcaactcccccaaccacgctgaaccctgtctcgtcgcttctgccaagaaggtcttgttgcctgagaactgggtctttttgcacggcaaagtccatgccgactacaggaaggcattgaacgttctcttcaccaagcaggctctcaggtaggtacatcgtcaagtcatagttgaacggctactgacagcgtcgtagtatctacctccccattcaggagaagatctaccgaagctatttcaacaagtggatgtctgatcccgcccctgctcagcagtacatgatgaagatgcgagacctcaacatggacacttctctttccgtgttcatcggcccttatctcactgaggcccagaagcaagagatcaacgacaagtactggcttatcaccatctctctcgagctcgtcaacttccccctcgctatccctggtaccaaagtttacaacgctatccaggctagaaagattgtcatgaagtatctctccgctgccagtgctgccagtaagatcaggatggaggacgacgacgccgagcccgagtgtcttttggaccactgggtgcgagccatgatccttgcccgtcgtgccaaggatgacggtgagcagaccagactcctttctcgagagtacagcgaccacgaaattgccatggttctcttgtcgttccttttcgcctctcaggacgccatgtcttccgctctcgtctacacattccagcttactgccgaccaccccgaagttcttgagaaggttagggaggagcagtacagggttaggggtaacgacctcgagaggcccttgactttggacatgcttgacgacatggtttacacccgagctactatcaaggaagttttgaggtttaggcctccctgtcatcatggtacgtttttgcaccattcaccgctaccgagacatctgactgatgtggatgtgtaggttccctacatgaccaccaagcccttccccgtctcccccgaatacaccgcgcccaagaactctatgatcatccctgccttttggaactctttacacgacgagacctgttaccctgagcccgatcgattccttcccgaacgatggctcccccaggccgacggttcagcccctatcgccgactccaagccccaaaactacctcgtctggggtagcggtccgcacaagtgtatcggtggccagtacgcttctatgcatttggcggccactttgggtacggcgagtgttttgatggattggaagcacgagaggaccgagttgagtgatgaagtacaggtcattgcggcgtacgttttcttctcaccattgttcccggagggatttcaaagctgaccttgttttgttttgtttttcatagtatcttccccaaggaccactgtctccttaaattcacccctcgagctcccccttcataa

SEQ ID NO: 1228 - DNA, 2044 bp, Cryptococcus neoformans
atggagtccaggaacctcgaccacaggcgtaacaacttcaagggaaagacccagttctcagcacaagaggtgcggatgtctcggtggccaaaacacggccctaaattatggcagcgtgctaatatttcatacctttaaacagctccgtcgccgaagggaggaacagcaggttgaaatccgtcgtcaaaaggttagccttcaaatcatctcgccacagtctacattgcactttttccatgcccaatcaaagctgtcaagcagttgggtcctgcatcagagtggccagcacggaatattttgtatgctgaccagcgttttgtgctactgtagcgagaagaaaaccttgccaagcgacgaaaccttcaatctgtcattaccgacgaaggcatcgaatccgacgatgaggcttccatggattctacagcccttggtgatgtccttcctggaatgcttcaagctgtttacagcgaggatgccaatgcccagctggatgctaccatgaagttcagaaagtgagtcggtgtataaggggctttgccttctcaggtctgcttactacatatattagacttctttcaaaggaaaaaaatccaccgattgacaaagtcattcaatgcggcgtcgtgccccgattcgtcgagtttttatccagcactaactcaatgctccaatttgaggctgcttgggctttgaccagtgagattacattgctagaaatacactccgctcggagctgatagctttatcttgaaagacatcgcctctggaacttctgaacacactcaagtagttattggtgcaggcgctgtaccgcacttcatcgccctcctttcttccagtgttctcgatgtgagggagcaagcgtaagtgatcccacgggaattgtgaatacagtctaatctcttcacaagggtttgggctcttggtaacattgcgggtgactctcctaaatgtcgagattacgttcttggggagggtgctcttcagcctttgcttggcctcctcaacgagaaccacaagctgtcgatgattaggaacgccacttggactctgagtaatttctgtcgaggcaagaatccccagcccgaatgggagctcgtatgtcgtctgcctgatcctttttagaatacctgctaatgatctatgcagatttcgcctgccctcactgttcttaccaagctcatctactctctcgatgatgaggttctaattgatgcttgttgggccatttcgtatctttcagacggctccaacgataagatacaggctgttatcgaaagcggcgtttgcaggcgattagtggacctcctcatgtgagtatttatgttttgtaattggatattgcgactaactagttggatctaggcatccttctaccgcggtccaaactcctgctctccgatctgtcggcaacattgtcactggtgacgacctccaaactcaggtcgtcatctcttccggtgcgcttcccgctcttttgagcttgttatcttctcccaaagaaggcatcaggaaagaggcttgttggacaatctccaacatcaccgcgggttctcccatgcagatccaagccatcatcgatgcgtgagtggcagtaatacccatgtcatctcacaataatggttcctgaccacttgatgccagtaacattgtccctcccctcatcaacatcctcgccaacgctgatttcaaaaccaagaaggaagcatgttgggccatctccaatgccacttctggtggtctccaggaacctaaccaaatccgatacctcgtctctcagggttgcatcaagcccatgtgtgaccttcttacttctatggacaacaaaataattcaagttgcccttgacggtcttgagaacatcctcaaggttggagaggttgataaggatgcggcgggtcccggtggcgtgaacaagtatgcgcagtacattgaagaggctggcggtatggttgctattcacaacttgcaacatcatgagaacttggaaatctacaaaaaatgcttctacatcatggacagtacgtttaaacatcagtcttaa

SEQ ID NO: 1229 - DNA, 1867 bp, Cryptococcus neoformans
atggataaaggagggaacggactgttggtaccttccagtcctctgagcccatctggagtgtcgccctcgttagtgactatcccttgcctgtagagtttattctgacccgtgacgcttagttcatctccccagcccagccagtcattcacgaaacaagccaactccaacactgttgtcgagaccttgaacattcacctgccccagttacccccttcccatacccgattaacgtcgaaaccaagagtcgaattgtcctcgacaattacagctgcagactacaactaccgttacatgtttgagaaactttccgagcgtagtgaggccctagacgactcgatcgatgaatatgccgatgctattaaggatgcctacggtctttcggaacttggcgatccccatttcgtctctgatgagagcatctacaccgtcgggagggtattatccaacacaacgtcttccaaaagcgataagactgctttgaaaaactctttccaccttcagtcatctcgactaatcggtgcaggaaagcgaatagctctcgaacttcccgaggagaaactcaaggttagaggaggagcgcctggcgtcaagggcttttcgttgtatagcggttgtttggtttgtgtcaagggaaggaatggaggcgggtcaaaattcgttgtcgaagaggttctcttggtaagagctttcaggctccttgaactaaaccacctgacatgctctgttcagttaccacctagtcttcttccccagacacccgcctctgaacttatcgatttccagtatggagataaactcaaaggggagcctttgtctttaatggtagccgcaggaccttacactctcaatgaaaatctcctcttcgaaccgtttgaaactcttgtggataaagtgctggaagaccggccggatgttcttattcttgtgagtggcgtttcgtgacgcgatgctatggggcctgtcatctgttattgatgattgatccatagcttggaccattcgtcgactcgcaacacccgattatcaaatcctgcgctgtgaccgaaacgccgcaggaaatcttccgcaaacagatttccagccgtctccaaaaggttgtcactcagagcccgtccactgtcatcatcctcataccgagtgtgcgtgacgtcgtatcacatcacatggctttcccccaatcgatgttggagaaggaataccttgggttgcccaaggtgcgtcttacacctcatccctatgaaccaaactaatcatcctgggcgttatagaaagtcaaagctctccctaatccttgcacattctcagtcaacgaggtcaccatctctctatcctctgtcgacatcctcttccacctaggtcaagcccatgcacctataagagctcaagaggccgatgcagatccaggcatgagcggcagccccgcccctgaccctctagcgaaccatatccgacaggtgcttggccagcgtagcttctatcctctattccctccacaagaagatgtcgctggtgaagtaaatttagatgtcacgcactaccctttgctcaagatggaccaagcacctgatatcctcatattgccaagtaggctcaacaaatttgttaaagtaagtattgtccttcaattctatatcgcattaagctaacaaatcgacactcagattgttgattctactctcgtcatcaatccctcccatatcgcgcgcgctcgagctaccggacactatgctaaggttatcattcatcctacagcccgagaagttttggaagaatctatggaagttgacggagaggaatcattatgcgaacatcaggtttacgaaagagcacgatcagagatttggaagatatgataccatgcatttga

SEQ ID NO: 1230 - DNA, 1961 bp, Cryptococcus neoformans
atgtcaggctccctcacccacgtcctcttcgaggggccttctggctatggcctcttcactgtcaacttgcaggaggaagttgctgccaagtcaaaacaacttcaagactccatcgccgacctcggcatcttctctcgaatggtccagctcgcttccttcgccccttttacttcggccgcccaagctctcgagaacgcgaacgatgtctccgaaggcgtcctcaaccctcaccttcaggctcttctaaatttgatcgtccccgacgctgctggcaagggcaacaagaagcaatccggtgttcttctcggtgtggccgagagaggtttggctggtgccattcaaggcgagatgggtatcccctgtgacacttccgaacgagccttggaactcatccgaggtgttcgattacatcaggaaaagattttgatcaagggagggatgcaaaagggagatgtaaccgttgcccagcttggtttgggtcactcttactctcgaggcaaggtgaaggtatgtgcaaatgcgtatagtacttgagacattggacttatcggatatagttcaacgtcaaccgatccgacaacatgattatccaagccatttctctctccgaccaactcgacaaagatctcaacactttcttcatgcgagtgcgagaatggtacggctggcacttccctgagctttacaagctcgttcccgacgcccaccaatatgcccttcttgctgtccttatcggtgatcgcacagctctttccgaggactctcttgaggaaatgcaggaaattcttgacgacgacgagactcgtgcgaagaatgtcctcgatgccgcgagggccagtatgggtagtgacatcagcgaagttgacttgatcaacatcagcaacttcgcggagagggttgtcaagcttgctgagtataggaagagcttgaggagatacctcactgagaagatgaatgtcgttgcccccaacttgtcagctttgatcggtgagaccatcgctgccagactcatcagccatgcgtatgtccttttttcttcctttgaaacaaagatcaatgatttgttgacgatacattagcggttccctcaccaacttggccaagtaccccgcttctactgtccaaatcctcggcgccgaaaaggctcttttccgagctctcaagaccaagggtaacacccccaaatacggtctcatctaccactctacttttatcggccgtgccggtgctaagcacaagggtcggatttctcgattccttgccaacaaatgttctatcgcttgtcgtattgactgtttcaccgacgttcctaccaacaaattcggagaggctttacgtgcacaggtcgaggaacgtttgaacttcttcgaagtaagccgccatcatttctgaaagttagttgtgatacttattgctataatagactggtgctcccgtcggcaaaaactctgacgccatccagaaggccttggccgctgtcgcagctgacctcgatgacgaggacgacgatgatgacgatgaaggtcatcttaaggaagatgatgttgcggatgtatgttaccattctaatgatttgtttgccgtatccacgctaaccctttctaggctgtcaagcaggtagagaaggaccaagcagaagctgccgttaaccgaggccctattgaccccgaacttgccaaacttgcttctgaggctacatcttctacgtctaagaaggaaaagaagaacaaaaaggagaagaaggacaagaaggagaaggaggaaaagaagaagcgcaagtccgaagccatggacgtggatgtgaaggaggatgaggaggagaagaaggagaagaagagcaagaaggagaaggaggaaaagaaggagaagaaggaaaagaaggagaagaaagagaagaaggagaaagagggaagggaagagaaggagggaaagaaggagaagaagaagaagaggaagtctga

SEQ ID NO: 1231 - DNA, 2015 bp, Cryptococcus neoformans
atggcggcgatttcgatttcggcgcgttggatgttggtgggtcgggtgaagaggacgaggaggaggatgatggagattgggatgtggacgatgaggattgggagctggccaatggaggtatgtaagctgtctccaagtggagatgaagaaaggctcatataatgggataattattagattttaccaagcaatacaatcgagttcgacagcaacacgctgctacatccggctctgccccgttacctgcgcgaaacctctcccagcaaacaaaatcaaaattgtccaaatccaacccgacggccgggtctggcgtggtgacaaatccgaaagcagcgcaggataaacatgataaagataaaagcgatagggctactcaggagcaagtgcttgatagccgtactcgactggttttggcgggactagtcaatcggggggttatcggtatgattgaaaggtgtatcagtacaggtaaagaggtaagtttactatgtctatctattttcattggctgataaaataaaattcaaatctaaaaggcaaacgtctactattcatccccaggccgtgccgtcaaaatctaccgaacctccatcctcgtcttccgtgctcgacaaaactacattgtcggcgaacaacgtttccggggggaatacacttcctctcgaaatccgcgaaagatgattcgtgtctgggccgaaaaggagttgcgaaacctgagacggttggttcaaggaggtgtgcgtgcaccggtggtacatgaatgtaaggagaatgtgctcgtcatggatttcttgggcaagggcgaggtgtgagtttttcttcttcttctgtattatgtggatgagtaaacgaaacaagtaactgatcggacgggaaaatcagagcgtcgcctcgtttgaaagacgcagagattcccgaggacaggttacccgatctgtacgcagaaatggttatcgcgacccgaagaatgtaccagcactgccacctcgtccacgccgatttgagtgaatacaacattctgtaagcacaccttctcctcctcccagcttctggtatactcaccctttgatgtttcaaggctacacgacaaccacctatacatcatcgacgtctcccaatctgtcgaacacgaccacccccgcgcattcgatttcctccgttccgacatctccaacattgaagaattcttctcccgccgtggggtcgccacgctcggaatccggaaatcatgggaattcatcgtcaccgagaacattggtctttcccccactggctccgcctcgtcatcattggagatggagaagggcgacgacggcgaaaggcgcttggtgggtgttttggaagaatggttaaaggaaccgtcagacaagacggacgatgcggtctttatggagtcgtatatcccgagaacgttggcggaggtgtatgatcccgagagggatgtggatgtgctcaagagtgggggaggggacgagttgatttatgcgggtgtgacgggtttaaagttggctcatgagagtgcgaatgccaaggtgaaggaaaaggaaaaggagaaacagagtgcgagtgcgggtgcgggtgcgggtgcggatgatgcgaacaagcgtgaagaggtggatgcggatgagaatgtagaaaagggtgaaagagtaaaaggtaaatgtaaggatgagggcaaaaacgacaagacatcgaaaagcgtacggttcgaggatgaagtagacgaacatgacgaggaagatgatgcccaagaagcagaggagcaaggtgaggaagaaggaatggataaaaaatctagagggttccgacatgaagatcgtgaatctaaaaaggtacgcccttatccctctccgtctctccatcctgccgtttcccgagtcattttgctgatatttcgatattttggataggagcggaaaaaggcagtcaaggaagaacagagggagaaacgaaagaccaagatgccaaaagctgaaaagcaaaagttgataaaaaagtctgcttctcggcactag

SEQ ID NO: 1232 - DNA, 1935 bp, Cryptococcus neoformans
atggtgatgtttattccctggaaaaagttgcggcaaggtagtcttctttgcatgactccatctcacggtaacacacacagttccgcacaccgcgccatgtcatccacaaagcctcccaccaccacaaacaagcggaagcgcacctcaaacgcccacgacgaagccccccgcaaagcgtgtcccagaggcctcctcttcaaaagtcactctcgacgactcgcagcccgcccctgccacttcctcagatgctgtactcggcgcctggtccgctcctggtactgactacgagcgggtccccttctccaccctcaacctttctccacctaccactgctgccatcgagcgtatgggtttcgagactatgacagaagtccaggccaggactatccctcctctgttggccggtaaggatgtgttgggagcagcaaggactggcagcggaaaaaccatggcattcctgattcccagcgtggagcttttgagcactttaagattcaagcccgtcaatggtgagtcttaatggcctttggcaaatggcatgggctaatccgcccccttgaagggaactggtgtcattattatctctcctacgagagaactcgctcttcaaatcttcggtgttgccaaggagctcatgcagggccattcacaaacattcggtgttcttatgggtggtgcgaaccgtaaggcagaggccgacaagctggtcaagggcgtcaacctcatcgttgctactcccggtagactccttgatcatttgcaggtacgtgcatcctatgtctgttgacggactcgtgcttattgagatcagaacacaaaaggatttgttttcaagaatctcaaggctcttgtaattgacgaggctgatcgaatcttggaaatcggtttcgaagaagaaatgaaacagattatcaaactccttccttccggtaagttaccgtgctgataggcagcattcgcaagctaatctatccccccttagaaaaccgtcaatcaatgcttttctccgctactcagaccaccaaagtcactgatctcgcccgtatctcgcttcgcccaggtcctctctacatcaatgtagatgaaaccaaggaagcctctactgcagacatgcttgaacagggctacgtcgtatgcgaatccgatcagagattcatgctccttttcacattcctcaagaagaatttaaagaagaaggttattgtcttcttctccagctgtaactctgtcaagtaccatgccgaacttttaaattacattgatgttcctgtcttggaccttcatgtaagttcattcataaccacgctgaacattgctgaccagtccttgcagggtaaacaaaaacaacagaagcgtacaaacactttctttgaattcatcaatgcccctgctggaattctcctctgtaccgacgtcgctgcacgtggtctcgacattcccaaggttgactggatcatccagtttgatccgcctgatgatccccgagattacatccaccgtgtcggccgtactgcccgtgcaggcaaatccggaaagtctctccttttccttttgcctagcgagcttggcttccttcgtttcctcaaggttgccaaagttcctctcaacgaataccaattccctcagaaaaaggttgcagatgtgcagaagcagctggagagcctgatttctaagaaccattacctcaatacctcggcgagggatggatacaggtcttaccttcaagcctatgcgtcttactctctcaaaaagatctttgacgtcaacaagctcgacctcgccaaggttggcaaggcatttggtttcgctgtgcctccaaaggtcaacatctccgtcggatccgtcaaggcgaagaagagcagagatgaggatgaaagtagtgatgatgatggtcaacccaaaaaggcctactatagaaacaggggcagaaaataa

SEQ ID NO: 1233 - DNA, 1859 bp, Cryptococcus neoformans
atgaacgtattcgcggacgaggtgagtaaggtgaagtaggtcagaggaagtactgatcaatgatgttcaatccaggctactgaagaaaggggcgaaaacgctcgtctctcatccttcgttggtgccatggccttgggtgacttggtcaaatcaactttgggacctaaaggcatgaacaaaatcttacgtgggtgcgcaagttatagcaggtgtatataatctgactgtttgccagaatccgcttctaacagtaccatcaccgtcaccaacgatggtgccacaattctcaaatcgatccatcttgacaatcccgccgccaaaatccttgtcaacatttccaaagttcaagatgatgaagtcggcgacggcaccacctctgtctgtgtacttgcttctgaactcttgcgtgaagcggaaaagctggtcactgttcaaaaaattcaccctcaaacagttgccgaaggctaccgaattgccagtagggcggccctccaagcgctcgaggcgtctgctgtagacaacaagaacgacaacgccaagttcagggaggatctgttcaacattgctagaacaactttgagtagtaaggtactggcacaggacaaagattactttgcaaatctcgccgtggatgctgtgttgaggttgaagggatctacagatttggagcatatccaaattatcaagaaagtcggagggaagttgacagactcttatttggatgagggattcatcctagacaagactatcgctaccaattctcctaagcgaatagaaaatgccaagattttgatcgccaacacctgtatgttcttgtcatcaacttgttgagattttgctgatacagtatagctatggacactgataagatcaaaatttttggtgcgagagtgcgagtagacggtactgggaagcttgccgagctcgagcgtgccgaaaaggtaaaccattgtttcttgattctagatccaaggcactatgtactgacttttttgcaggagaagatgaaagccaaggtccaggccattgcatcccatggtatcacctgtttcgttaatcgacagcttatctacaactaccctgaatctcttcttgctgaggccggtatcatgtccattgagcacgcggactttgaaggtgtcgagagattggcccttgtcactggaggtgacattgcctccacttttgatgcccccgaaaaggtcaaaattggtcgatgtgacgttatcgaggagattatgattggtgaggacaaactcatcaaattctctggtgttgccgccggtgaggcctgtactgtcgtccttcgtggcgccacctcgcaaatggtcgaggaagccgagcgatctttgcatgatgccctttctgtcctttctcaaactgtcaaggagactcgtgtcacccttggtggtggttgtgctgagatgctcatgtcttgccaggttgaagaggctgctcggactgtcaagggtaagaaagcccttgcagtcgaagggttcgccagggctctcaggcagatgcctaccattattgccgacaacggtggttatgactcaagtgatttggtgaccaagttaagagccgcgcactatgagggacagtctgatgctggcttggatatggacaagggcgaaattgggtctatgagacaattgggaatcacagaatctttcaagttgaagaagcaggttgtagtcagtgcgagcgaggcagcggagatgattttgcggtacggaatactactatgacacctgttgtagaaagattgctgatcaccgttatagtgtggataacatcctgcgcagtgccccaagacggcgagaggctcactagagtggataggaaattgtgcacaatag

SEQ ID NO: 1234 - DNA, 1918 bp, Cryptococcus neoformans
atgtctggaacacttatttcttccctcgtatgggttcccagaggccgtgcggcggaaaaacccaaaaagtatcagctcgatgaagacgagatcgaacgtgtaggcaagctcggcgggcctggtgttctcgaacagctcaagagtgagatagcggctgtggaggatggtgaagagatggaaggcggtgatgaggaagaggactgggaggacgaggatgacgaagagggtaatgaggaggcagacaatgacgatgacgacgagaagatggatgaagacaaggagcccgagaagccatttgaccctaatgacctatcagctttcaagatggacgaatacgatgaagaggagtccaaaggcgttggtaagtatttatcgtatgtatcaattagtttaagctgaccgaatgcagcgatgggtgctttcgccaacatcaaaggtctgacatattatcgcgacaacgaggaagatccatatatcaccctcaaggaggttcgtgtcttgctgctgatgatactaccgacaattgcccatcggctaattcgttttaacaggatgaagaagaaaacgaggacgaggagcttgttctcctccccacagattctatgattatctctgcccgaacgacctccgacctctcatccctcgatttccatgtctacgccgatgtcgacgagaacctttatgcgcaccatgaccttatgcttcctgccttccccttgtgtgtggaatggctagacttctctcctggtcctgatgccaacggtgctgctcccgaaggcgctaagcccggtaactacgtcgctgttggctctttcgaccccagtattgaaatatgggatgccgacctcgttgatggtctttatccccgggctatcctcggcccatcaccttcgcttgaaaagccagaggccaaaccccttggtaccggtaagaagaagcgaaaacaaatggtacagcctgctgccaacgccgactaccatgtccagcccgtgctttctctttcctggacacccaatcaccgaaacctgctcctttccggttctgccgacggtactatcaaactttgggatttgactcgtgaatcacccatgggtgctatgcgcagctgggacaaggtccatggtggtgaaaaggttcaggctgtggagtggaacaggagcaccgtcggcggtttggacaaggtctgcctgagtgcaggttatgacaggacggtcaaggtttgggatgggcgagcggtggacgaagctatcggattgcaagtcgctagtgacattgagtgtgtcagatgggacccatgggagccttactctttctacgtacgttaagctcatcccgagctagagtatcagcgtgactaacttagtacattgtctaggtttctttggagaatggtctcattctctcttacgactctcgagtgctctcatcctccaaatcgtcatctcttgctacaggctcctccaagtcctctggcttccttactaccgctcaacctaaattcaccctctctgcgcacgatggtcctgcttctgctcttgacatcaatccccacatccgcgggtgtatccttactgcgggcatggacaaaactgtcaaaatttggaacgtccaagacgaggaatctgaaggtattccccgccgcaagagggaaatcaatcttgccacctcacgagaccttggccttggtagggtcttcgccgcccgatggtcacctgatcccgagacaccacttacagttgcggcagccggtagcaaagcgactttgcaagtgtgggacgtggcctccaaccccggagcaagaaaagcgttcggtgagaggctgagaagacatgggcgggagttaggtgagatcaagaagggtggcggtattgtggctgttgacggaggtgaagaggaagaatctgagggagaagagtag

SEQ ID NO: 1235 - DNA, 1962 bp, Cryptococcus neoformans
atggtggcaatggagtacaccccagatgcagcggggcaggagagctacattctatgtgccgactgtgggacagtcatctcaagtgccaacggcgctggactttgtaagaaattatctgcttgcgactggtacagtagctaatgagagttggtgaaaggtgttggttgtttgagaaatactgtggatattaccgagggcatccccaaagaagccacactcaacttttgtcgaggatgtgaaaagtttttgtcgccacccaatacctggattgccgttcagccggaatctcgagagttgcttggtaagtgaaatgattgttgttgcaatggcgcgagagctcatcgccatttcatagctatctgtcttaaaaaaatcgcccggcctttgatgaaggttcgactcatcgacgcatctttcatctggaccgaaccccactcccgacgtatcaaactcaagattacaattcaaaaagaagttctcgcccatactgtcttgcaacaaactttcgagcttactctcgttgttcacaccgggcaatgtccttcgtgtacaaggttagcagcaaaaaatacctggaaagccagtgtacaagttcgacagaaggtcacgcacaagagaacctttttgtggttggaacagttgatcttgaagcacaatgcccataagtgagtcttgctatgttctgctgaaaggctcatgctaataaaacgctgtagggacacaatcaatattgcggagaagagggacggcttggatttcttctattccgagaggaacaatgccatcaagatgtgtgaattccttgctggtgtcgtccctgttaggtacggcgtgttaccgacatcctgaaagcgatggctcatacatgatattgcagagtcaaatcgtctgagcagcttatttcatccgatactcattccaacacttccaactacaagtttacttattccgtcgagattgtccctgtctgtaaggatgatttggtctgcttacccaagtcacttgctcgtgcttggggcaacatttcgtaagttgcaactctatctcatctgagatttgatcctaacatgcctgccatctagtccgcttactatttgctcccgtgtgggcaacactatccacttgcttgacccaatgactcttcagcaaactgatgtagctgcccctgtctattggcgccagcctttcgactccctcaccaccgttgcggaccttgttgaattcattgtgcttgacgttgagccttcagggccagtccgaggcaaatatgtgcttgccgatgcacaggttacccggtccagttcgacaggtaataatgccgatgacgatggaatgggcgacgatggtatctaccacactaggactcatttgggcggtatcctgcaacccggagacactgtcctcggttatcaccttaccaacgccaatttcaactctgattcctttgaagcgcttgaaagcggtagaatccctgatgttatactcgtcaagaagacttaccccaacaggcgcaagaaatccaggcccagaaattggaagcttcgttccatcgcgaaggaagcggaggatgtgcaggatggtaccgtcggtcgaggtgccctgggaaggcgaggaggtgtggaccaaaagaacgtcgaaagagactacgaactattcttgcgagacctggaagaggacaaagagatgcgtgccgtcatcaatctttacaaggcagatgcgccagaggaaggagaagacgaggctatggccgtcgaaaagaagcccggctcgggtctgcatggtgggaagagaagaaatgggcttgcaaaacaagctcagcatggtatggatgtcgatgacgatgaggccgtgggagaagaggatgaagatgacgaggaagaggatttccctgaaatcgatatggacgagttgttggagaactttgaagagcttgacatggatgacggtgcagaggttctgtaa

SEQ ID NO: 1236 - DNA, 2051 bp, Cryptococcus neoformans
atggtagtggaaaaaaaaaaaaaaagttctagtgggtgcctggcggacgcactgatcgatcgtccgacttttgttcttttccccaaaacaactgagcgcgcaggaatttgtcaaaaacattccttgtttcttcttcttttccgcatcctgctctatagcactttacactccttacccgctcccataatccccattccaccgaaaatgtccaactttgacatccccgctaggcccagcaacgtcggtatcctcggcatggagatgtacttccccaagagggtgagtgtcgccactatcaacttactcctcttctgcagctaatttcggcgcatctagtgcatttctgaggaacagctcgaggagtttgacggcgttgccaagggaaagtacactattggtctgggtatgggccacatggctttcactgacgacaagtgagtttgtcaagtaatcgcgatggtcaaaatagctgacagtgcaatagggaggacatcaactctgtcgccttgaccggtaagcacaaagtataggcattgatgagacaatgctaactttttgcagtcgtttcttctcttcttaaaaaatacaatgtcgaccccaggtctatcggtcgcttggacgttggtaccgagacccttatcgacaagtccaagtctaccaagactcttctcatgaacctcttcgccgagtctggtaacactgacattgagggtattgattccaagaacgcgtgctacggctctaccgccgcccttttcaacgctgtcaactggattcagtctgaaagctgggacggaaggaatgctattgtcatgtgtggcgacattgccatttacaaggagggaagtgctaggcctgtgggtggcatgggtgcttgtgccatgttgatcggtcccgatgcgcctttggtggttgagcgtgagtgctagtcaagcccagagagatattgtttgccaactcatttgcagccgtccacggtacttacatggccaacacctgggacttttacaagcccgacctttccgcggaatacgtatgtgcaattctcatgtcgtacgataggtcactgacgctgctatagcccaccgttgacgggcccttaaccattgcggcatacctcggtgcccttgacaacgcctactctacttacgtccagaaggctgaggcttcccaggctcgtgccgccaagaagctctctcttgcttctgtgaccgctgccgtttccgaagttgctaacggtatcgtcggagccgtcaatggccacgccaatggccatgccgagaccaaggaagacggtatcgccaagtttgactatgtctgcttgcacagcccttacggcaagcttgtccagaagggtcacgcccgtatgttctacaacgtaagtcaatacattccgttcgaaccatatggaaactatgaagcttatccttttggcaggactacctccgaaacccctctcatcccgctttcgccaacgtccctgaggacgtcaagtcccttgacaagactaagacctataccgacaaggtcattgagaagacttttattggtatcgctggcgaccattataagtctgctgttatccctggcaaggactgtgtctctcgatgcggtaacatgtacactgcttctctttacggtgccctcgcctctgtcgtctcttccgctcctgaaggtatcgagattggcaagcgaatcggcatgtacgcctttggttctggttgtgccgcttctttctacgttctcaaggtcaacggttctaccaaggaaattgcggacaagttgaacttgaaggcgagattggctgctatggacgtcaggccttgtcaggaatatgttgatgctctcaaggtaactactcatgttcatttcttgttggggacaatgattggctgacgatgtcacagctccgagaggagaaccacaacgctgtcaagtacgctcctcaaggctctcttgacaacatctggcctggtgcctactacctcgagggtgttgacgatctctaccgacgaacttaccttcaaaagcctgaatctgcccaagtatag

SEQ ID NO: 1237 - DNA, 1847 bp, Cryptococcus neoformans
atggacgctcaagaggtcgatgaagatgatgaagagtacaagaagtttttgctggaatttggtggcggtgaagaggaagtaaggaagatccttggtatgggtgatcagcctgccatcctcaaggtcttggagagtgaaggaggagaagatgaggaggagaaggctgcggtaagcaagatcgagaaggaggaattggaaaggcagaagcaagaaaaggaggcgaagaaggccaaggacgatgatgatttcctgatgaagtaagtcagttcccttgtatcctgctctcatgctgacgtctactaagctacatcctcaaccgtggctggattgaccgatccgaaaaacatgtccctacgtacgacgaagtcgtcggaccgtccaccgaagttgctgaagaagctgctgcccagaccaagtctaccaaactcaaatctagccatccttggggagagcttgatgaagaatccgattttgaagatcgtgccgaggagtttgagactgaatacaatttccgattcgaagagcccggatcctcgactattgccactcaccctcgtgacattccttctcttgttcgtagggccgacgatactcgaaagtccaagcgagctagacgagcagagaggaaggccgctgagaaggctgccaaggaggaggagattaagagagaaaagggcaagaagagaagagagatggagaagagaatgaatattttgaaacatgacctggagaaggaaggcttcaaggatctggaatggggcaagctcgaaaaggtgttagatggagagtgggacgaaaatgtctgggaaaagattgttggtggtatgttgagcaagggtgatgagcaggaggtaagttttgtgtcggtgacactgcaaagagagcgctgattgtaaaagcaggacggggacgacaacgagaagcccacatgggatgacgaactcggggatgccgagtacgacgaagaggagggagagggagatttccagtacgagtttgctgaaggcgagggtgagggtgaagatatggatgtcgacgaggacgaaggacctatcaacatggatgccgattttatcgacgaagaaccctccaagaaatccaaaaagaaagacaagaagaagaagaacaagaacaaggaacgctctccctctcctttgtctgaagatgaagagaaccagctctctattcccgagaaagctcatgctctcaaagaagctgtcgaatcttacaatgcgctcgcccacgaagacatcatcgaggacatgccgactcgtttcaaatacactccatcagcacctgcttcctttggtctcacgcctgtggagattctattggccaccgatgacgagctcaacaagttggttactatgaagggtattgcgccttacagaaaaggtggtatcggaattcagggtaaaggcttgggcaagagggtgagggaattgaaggacaagctgcgagagaggagatggggggaggaaccgtctcagactaagagcagagaagagaagaaggaaaagaagagaaagagggacgatggcgaggaacgcggacaagacgaaaggcgcgggaagaagagtgagggtgaggccacggagaagagcgaaaaggtgagaaacgggaagcgactgggaaagaaggaacgtatgagacttcaaaaggccgccgaggctgctggtgccgctcctgctgctgctggcgagcctgagagtgcacctgcggagaagaagagaacagtcgaatcaggtgaaatgccagctgatgccccggctgcgaatggagaggagggagctgataaaaagaagcgccgaaagaagaagaagagtaaggcggacggtgaagcttga

SEQ ID NO: 1238 - DNA, 1915 bp, Cryptococcus neoformans
atggcaaagatgtcttgtccgtacgtacgtacgggcaactggcgcaacttttgggtggaggcacgaggtaattacgtaaacaaattgccgtttgcggagtcaggtgccacgcaacgccccccgcccgctctttgctctcttgactctccacccgcttccatccacttcatcttccacatcccttttccctcggtctctatcttctcttgcaccttccacgatgggctgtacgtatattcttttcccgctgtgtcgcgtcctcttttgcccgctgacagcacatccccttgacagtccgtttccttgagctcgtccgacctttcatgagcatcctcccagaggtcactgctccggaaaagaaggtacgcgtctttcaacctctccatcccatctctgttctctgctcacaaacttgacgcgtccctaggtcgttttcaaccacaagatcgcctggacagccgtcaccctcctcatcttcctcgtctgctcacaagttccgctctacggcatcatgtcctccgactcctccgatcctctttactggctccgtgctatcctcgcttccaacaggggtaccttgatggagctcggtatcactcctattgttacttctggcatgatcatgcagctcctcgcgggtgctcagttgattgatgtcgactttagcctcaaggacgaccgtgccttgttcggtgctgcccaaaagtgtaagcactttgtcgttttcctaaccagtccagcaactaacgcgacgtagtgttcgccatgattatctcccttggacaagctaccgtttacgtcttgactggtctttacggctccccctcctctctcggcgcgggtgtctgtcttctccttatccttcagctcgtttctgcctccctcatcgtcatcctcctcgatgagctcctcaccaagggctacggtcttggttccggtatctctcttttcatcgctaccaacatttgcgagtctatcgtttggaaggccttttctcccaacactgtcaacaccggtcgtggaccggaattcgaaggtgccatcatcgccctcatccatcttttgttcacttggaacgacaagactcgcgccctcaaggaagcctttctaccgcgatcgtcttccgaacattatgaatctcctcgcgaccgtcgctgtctttgctgccgtgatttaccttcaaggtttccgaatcgagatccccatcaagagctccaagatgaggggccagaggggcacttatcccgtcaagcttttctacacttccaacatgcctatcatgctccagagcgctttgaccagcaatgtcttcctcgttagtcagatgcttgccggtcgattccctgacaacttgcttgtccgtcttttgggcgtttgggaggtaggtttacttttttttgttcttcttgtggttcgcgtacgatttgtactaatcatcccaacaaattagcccatggagaacaaccctactcaactgggcgccgtctccggtatcgcctactacatgtccgctcctcactctctcacctctgcccttaaggaccccttccacaccgtcatctacatcgccttcatcgtcaccgcgtgcgccctcttctctaagacctggatcgaagtctccggctccggccctcgagatgtggccaagcagttgaaggaccagaatatgactcttgcaggacacagagatgcgtctatttacaaggagttgaagaggattatcccgactgctgcggcgtttggaggtgcgactcttggcttgttgagtgtggtggcggatatgatgggtgctttgggaagtggaactggtattttgatggccactactattatctacggatgtgagtctttgattttttcacatcgcttactttctttgtgttgctggcttgctgaccagacgttttctacgtag

SEQ ID NO: 1239 - DNA, 2118 bp, Cryptococcus neoformans
atgtccacctcacaccttcctcaccacgcacaggagcaaaagattcgccacgaagatgagtctgaattcgcccttccagcgcgccgctcctcttctatccgcgatcaattagcagcatggcacgccaacagaggggacaggtcctttttgagatgtatgattcccagtctacgacagcccgtcgctggagaagaacctgaaacaaagaacccttttaaaatcattcgagctgtttccccttttggatggttgatgtttttctcggtaagcgcaatatttcattgccaggagtgtcccagttgatctgtccgcaggggtggctcgcatggacaattgatggttacgactttttctgtgtttccctcacccttgactccttagcagagcaattcgatgtctctcccagctccattactactgccatcactcttacccttctatttcgttcattgggtgccgttatcattggtctttgtgccgaccgttatggacgaaagtggaccttggttttcaactgccttttgatcatggtattcgagcttggatctgggtttgtcaacacgtaccagcaattcttggccgtcaggtgagttgctcctttctccgctgtaagagctgtgctgatcgacaaacaggagtttgttcggtattgctatgggcggtatctgggggtgtgctgcagccacgtgagtattctattaccttcttgaagcgatgtactgactctgtatagtggtcttgagaatgtgcctcctattgccagaggcttgtgcagtggtattctccagcagggttactcctgtggctaccttctcgctgcaggtatgtgtcaactcttatttcgcacttattcattaagctgacttaccactttaacagtcatcaatctgactgtcgttcagcagagcaagtacggttggcgagcgatctatttcttcggtgccggtttctctctgctagccgctattgtcagggcttgtctcccggaatcccgacaattcattgtcgctcgagaagaagccaaggcgaagggtatttccagcaaacaggcctctaagaattttatccgagaattgggcaacatgttcagaactaactgtaagattttccaagaaaactggagggaaggatctgatagttcgcggcagggcttcgatggatatgggctgtctgccttatgactttcttcgtcagtctcttggtggtataccacagtcttaacaactaacatttagatcagaacttcttctcccacggtagtcaggacctttacccgacttaccttaagaccactaaaggtctttccagttctctcgcctccaaggctactatcatctctaagtgagttttgcagcccgttgtactttcctttctgctaacaagctgtatagctgtggcgctatcgtcggtggtactattgctggtcacgtctctcaatttgtaggcaggcggttcgcaatcttggtgtgttgtatttacacggtaagtgcacacttgcttcatttactgttcgctaatacgtgctcataaactcctaggcttgctggattcctctttggattcttcccgatagcttcgctggacttgctgctggtggtttgtaagtagagaccgtctggtctcgcagatcatggcggctgacagtatctccttccccagcttcattcaaagtggtgtccagggaggcatgttgacttgactgcgttgattgtgaaatcctatactgacgaatatcgtagcttggggtgttgtccctgtttacctcggcgaaattgctcctccagctttccgtgctctcttcggtggtctctgctaccaagtaagttgtctgattatttttgtggccttgagagagaagacttacaccaaccattagcttggtaacatggcctctgcaggttctgctcaaatcgaagccgatgctggtaaatccctcaagctggccggtaccgacatcccagactacgctgctatcaacggtatcctcatcggtgctgtcattgcctttggtatcattgtcgttttcctcggtcccgaggcggacggatcccatttcgaaaaggccaaggtcgctatcgagcgaggcgggggcgaagttgctcctaccgagttgtttga

SEQ ID NO: 1240 - DNA, 2089 bp, Cryptococcus neoformans
  misc_feature (1880)..(1880): n=g, a, t or c
atgattcccatgatattatacgcttcagaaactggcaatgctcaagatacagcggagcgcgtggcccgcgctttcagagcaaacggcagagctgtgacctgtctcccaatggaccagttccccatttcagcccttccacatacctatcttctgatactcctcacctcgacccacggaagaggagatccacccccggctatgctccctctttggacagctttgttgcggtcatcattaccggaggacattctggaggatgtacacttcgctctttttggacttggggatagcagttacgagcgcttctgttacgctgggaagatgttgctgcgaaggatggagcaattgggggctacaaagatgggtgaaccagcttggggggatgagagatcaccaaatgggtatgtgaaaagtgggcttattcatgaaacaaagctaactttctgtagtattgaggacgcctttttgccatggctccagcaaactttagacctctatttgccttatctgccgttaatatctccaactcccaaaattattgaatccactgttttacctccgccaatatacaagatttctcccgcttccacttcgaaatccgtggaacacgatctatcgttggaacgcctttcgatctcattcccgattccgaatggcaaacctgctcccgtccgagtcgaagatcaagccagagataaagcttcaacatctagaaccaagccagatgattgggtctgggctacgctcaaaaagaatattagattaacgagcaaagattggtggcaagatgtaagggagatagagctggagtttgacgaccctgatacgtaagtgcagtaacttgggaggaaagcgatccgttcgcccacgttaaccatatctgccaggaaaccttacactgccggatcaatatgctccctacaaccccagtccagggaggatgatgtcaacatgtttttggagatgatggagcttacctcacaagcggatgaagtcgtcactatcgagtctcttcttgatggtgcgttcccgacttctttgaccacctcctaatcaattgctgacctttattttaagagcaaccccttccttcccatcttccaccagctggcactccgacgactttacgttcgttgctgacaaatcatctcgacatacggtattctccccgtaaaagctttttcgagtggctacgacgtcttagcacgaacgaaatggagagggagcgtctcgatgaatttatatccgatccagtgagtcttcccagtgtatctaaagtccatgacaagctgaccggaagaatttttccaggatgagatacatacatacgcgactaggccgtcacgcacgatagttgagacactagcagactttaggttcactcgaatacccatgtcgcatatcttggaaatactccctcctcttcgaagacggcaattctcaattgcaagctcatgggaagtgagtacctaaaatctggagattggcatcatgctcacactctgattctcgtttcttaggatcatccgggaaaagtacagctgctcgtcgctttgatcgagtacaaaaccaatctaaaaatcccaaggaaaggtctttgctcatcatggctcaacggactccctgtgggtgcgttccttcatgcccatcttaaacccttaatccagtgaaagttaatgagttctttgaatacaggtacgcgcatcccaatacacatcgcttcaccaactttgttccttcctcaagaccctgaagtacctatcatccttgtcggtccggggacgggtgttgcgcctatgagggctttcgtagagatccgagtcagacaaggtgctgccaaaagtgagtgccctcgtcttttcccacttccatgatagaanaatccctctgacggaatcgaatccattccttctatttcttctcttcaaatagatacgtccctttactttggctgtcgatcgtccaccacagattattttttcgaatccgaatgggatgtgcaccgcgaaaagggtgtcaaaatccaagtcgcggcgagtagagaccaggaagaaagaatttacgtgcagcatttgataaaaagggataa

SEQ ID NO: 1241 - DNA, 2013 bp, Cryptococcus neoformans
atgtcggcaatcatcccccaggtccagcaactgctgggacaagtggcccaatttttcccaccgtggttcgctgccctccccacctccttgaaagtcgcgatcgccgtcgtcggtatccccgctctcatcattggcttgaacgtttttcagcaacttgtacgtattgcattgatgggattcagctctttccccatgctcattggattcccaagctgatcacaagctccctgacgcgttattcatccgtcgcagtgtcttccccgtagaaaagatcttcctcctgttgtctttcactacattccctggtttggctcagccgcttactatggtgaagatccctacaagttcttgttcgaatgccgtgacaaatatggagacttattcactttcatccttatgggtcgaaggattaccgtcgcgcttggtcctaagggtaacaacctttctttgggtggaaagatttctcaagtctctgccgaggaagcctacactgtaagcttatatgctttactggctcaatatggcttacttattatcgcttggtagcacttgactactcccgtctttggcaaaggtgttgtttacgactgccctaacgagatgctcatgcagcagaagaagtttgtgagtggataccattcgcagcttgattcgcaagctcactattctacagatcaagtccggtcttactaccgagtcccttcaatcgtatcctcctatgatcaccagcgaatgcgaagatttcttcaccaaagaagtcgggatttctccccagaagccttctgctaccctcgacctcctcaaagccatgtccgagctcatcattcttactgcgtctcgtactctccagggaaaggaagttcgtgaatctcttaatggtcagttcgccaagtactacgaggatctcgacggcggtttcactcctctcaactttatgttccccaacttgccccttcccagttacaaaaggcgagatgaggctcagaaggctatgagcgacttttacttgaagatcatggagaacaggaggaagggtgaaagtgacgtgagttgatttcaagttgttgaaggagaaaagtctgatttgagtagcatgagcacgacatgattgaaaacctccagagctgcaagtaccgaaacggtgtccctctctctgaccgtgacattgcccacatcatgattgctcttcttatggctggccagcacacttcctccgctacttcttcttggactcttctccatcttgctgaccgacccgacgttgtgtacgtttttttggagaaattttgaatggcgaagcataactgacgaggatgtagagaggctctttatcaggagcagaaacaaaagctcggtaaccctgacggtactttccgagactacagatacgaggacctcaaggagttgcccatcatggactctatcatccgagaaactctccgaatggtaagtcatcccgacttgtatttccgataccttactaaccaaatccacttctagcacgctcccatccagtaagccacggacgcctcctttataaactgtactaatatataatagctccatctatcgaaaagtcctttccgacatccccgtccctcccagtctttccgccccttctgagaacggccagtacatcatccccaagggccactacattatggccgcccctggcgtctcccaaatggaccctcgtatctggcaagacgccaaggtctggaaccctgcccgatggcacgatgaaaagggatttgccgccgccgccatggtccaatacactaaggcggaacaagtcgactatggtttcggttctgtcagcaagggtaccgaatctccttaccagccttttggcgccggtaggcacagatgtgtcggtgaacaatttgcgtacactcagctttcaaccatcttcacctatgttgtgaggaatttcactttgaagcttgctgttcccaagttccccgaaaccaattaccgtgtaagtctttgtgttccaatctatcattgggatga

SEQ ID NO: 1242 - DNA, 1992 bp, Cryptococcus neoformans
atgacagaaaagcaacagaacagtcagcagccatcccagttggactcaactgcaagtatctcagcactcccgccacaattacagcaacctgccgccgggatcactggagctccaggaaatgcagaagctacaacatctgaaccaccttcaaccaagcgacctcgcaaagccatagagtcctcagagcccttaacagaggtgattcttcgtcggttgacgacgatcaaagagggtgatacagtccttttgcgattgccaagtgaccttgttaaatccgtcgttgtccaaggggacaagtaggtctctttagtcgatcacagaagttccgatgctgattgggaatagtcttgttcagctcggtaaatatggagcgtttcccgcctcccaactcattggtttgcattacgacatcacgtatgaaattgtttctagcagtggctctggagccagcactcctcaacctcaatctcttgacttttccacagaagaaactcaaagcaaaaagggcaacaagaagaataaaaacaagggcaaggacactgcagcagtatctaaaaataacccagggtggaataatatcttgaggcctctaaaaaggcagcttgtcgtggatgccgtcattggttagtcctgcagtcgtcctattgtgaggcatgacactgacattcattaaaagacgacatcgttgaaaccaacgaatttattgaggatctttcagaaactgaaaagacgacattgtctcatgacgagattgcggaacttcgagcccagggatgcacgccagaagaaattatccaggcgcagatcgcacgacatgagaaatttgggctcaaaacagatttcagcaaagaaaaatggagaagacggaaagaaaaaaagtatctcctttttctgtctcattgcctcgttgctttccataataacctatggctgtagattttaccagacagtccaacctctcgctccttctattcctaatgtcctttaccattacaatcttcggtctcctcagtctatccttcatctccgagatgacaccctttcccagttgctcactatggccaatgtccgacctgggggccgttatcttgtcgttgacgacactggcggtttgattactgccgccgtgctggaaagaatgggatccgaaggaagtattctgttattcaatgagagcgacagcccgcctgcctggggcatattgcaaactatgaatttctctgacagggagctggaaccgattaaatggttaaactggttggaagcagaggaagaatatcagaagcgtgggtaatgtagctctatgttggagtcgatgcgctaaccactgcgtaaagctgcccctcctgtccaagccgagcctcccacaaaccctattaaagccgctgccaagcagcgaaaatatgctgctcaggtagccgaactcaataatactcgaaatgagctgcatctaggtggctgggacgggtaattccagtgtatcatgataatgtaatagtacaggctaaccatttacagcttgatccttgcaacgactcttaatcccatttcggttgtcgcccgactcacaccgtatcttctcggttccgctccaattgtagtctactcaccttactaccaagtcctggctgagctgctcagttggtctaaaaaagatccgaattatcttaatgacaccctcactgagagctgggagaggacatatcaggtattacctggcagaacgcatcctatgatgacaacgagtgccactggcggttacctttggaatgccaccagagtgtaagtatcgtcataagatatgctgatgacatgctgacaaagactagtcacccttcacagttccaaccagaatcccatcagaggttcaaaagaagaaaaacaggcaaggctccagggaaagagcagctaagcagtgtggctaaagacgaggaagctgtcaatgaaagcttggaaatagatcccgaggagcttgcaaatgaaggagaatag

SEQ ID NO: 1243 - DNA, 2023 bp, Cryptococcus neoformans
atggtgtgtatatcctctacgatcatgcagctataactaataccacgcagccgtcaagaatgcaagcgatcatgtcccgtagtcaagatgggcaagctctgtatcgaagtcaatccaaatgacaagaaggcgttcatctctgaagagctctgcataggttgtggtatctgtgtcaagaagtgagtgtatcgcaattcagcaatcaactgacaccgtcacaggtgtcccttcgacgccattcagattcttaaccttcccaccaaccttgaatcccacgtaacccaccgatacgccgccaacgcttttaaactccaccgactccccactcctcgtcccggccaagttctcggtctcgtcggtaccaacggtatcggtaaatctaccgctctcaaaatcatgtctggcaagctcaagcctaacctcggacgatatgacgaccctcccgagtggcaagagatcctaaaacacttccgtggttccgagctccaaaacttcttcactaaggttctcgaggacgatatcaaggctgttaccaagcctcaatatgtcgaccaaatccctagaagtatcaaggtgcccaacatgaccgttggcaagatgtttgaccgacagtccgagttgcctaaccgtgatgggctcgagaaggaccttgaattgaagcacttacagtctcgagaagtctctcaattgtctggtggagagttgcagaggttcgccattggtattgcgagtgtcaggaaggccgatgtctacatgtttgacgagccttcatcctatcttgatatccgacagcgtttggccgccgcccgagtgattcgtggtttggtcaacgctaccaactatgtcattgtcgttgagcacgatttggccactttggactacctttccgacttcatttgcgtgctctacggtgtccccggtacctatggtgtcgttaccatgccttactctgttcgagaaggtattaacatcttccttgacggtatgatccccaccgaaaaccttcgattccgagacgaatctcttactttcaaaatttccgagactgtcgatgagttacaagcacccaagacccgacgataccagtaccccagcatgaccaagactcttggcaacttcaagcttcacgtcgacgagggagagtactctgactctgagatcttggtcatgcttggtgagaatggtatgggtaagacaacgttggtgcagttgttgggtggcaagatggagcctgatgagagtaaggacaaggtctcattgagagtttccatgaaacctcaaactagtgagtttgggttattcatgtatagaaaaaatgtgctgatgagcatttagtctcccccaagttccctggttctgtgcgaatgttgttattgaagaggatcaagggagctttcatgcgtgggtccagcttcacgtgtcacatagcaagaaactgatcttttcttcagaccctcaatttaactctgacgttatgaagcctatgaaccttgagcccatcatggaccaggacgtccagacattgtctggtggtgagcttcaacgagttgccatctgtctcgtgctcggtgtccctgccgatgtcctccttatcgacgaaccttcggcttacctcgactctgaacaacgtattgtcgcgagcaaggtcatcaagaagtttgtcatgtcttccaagcgaacggctttcattgtcgaacacgatttcatcatggctacttatcttgcggaccgagtcattgtctttgatggtcaacctggtaaagagtcctgggctagaaagtgagtttgttcattatatatattgcgaaaggcagtcgctgatgggtcattcagacctgagggtctcttgaccggtatgaacaagttcctcaaatctcttgacatcacattccgaagagatcctaccaacttgtaggtttgccctttctgttgttgaattcgtaacttacaactccatagccgaccacgtattaacaagatggactctttgaaggacaaggagcaaaagggtaagtcttgttga

SEQ ID NO: 1244 - DNA, 2170 bp, Cryptococcus neoformans
atggtgttagcagacctcggaacacggctgcacggcgcttggaaccagctttcaaaggcctcagtaattgatgacaaggtgagctgctccttcaccgttcctttcggcgtactcttcatgctcaggttttattcctatgtaggtcatcgatggtgtccttaaggagctatgtgcagccttgttggaatcagatgtcaatgtcaaactcgtagcctcactgcgaaccaaggttaagaccaaggtgcgtcttaccacgtctatcgaacatcttctctaatatcatttggtgcaggtcaagaaaagcctggaagaaagtgaaaaggcaggaggaagggaagccaacaagaagaatgttgtacaaaaagccgtatttgacgagctcgtcgctttggtggatccgggaactgagccttacaaaccggtgaagggaaagaccaatgtcttgatggctgtcggtatccaagtgcgtttctggaatttctgtcacaatcgaaaagagctcacgtgggcttctatgtagggtgctggtaaaactacaacctgtacgaaacttgccgttcactaccaacgaagaggattccgcacttgtcttgtttgtgccgatactttccgtgctggtgcttttgaccagttaaaacagtgggtagcatgttttcgtcggcaggaagtcacagtggaattgacatgacaccccagaaatgcaaccaaagccaagatccccttctatggtagctataccgaaacagaccctgtggccattgcctctttgggtgtggagaagtttaggaaagaaaggttcgatgtgatcatcgtcgatacttctggtcgtcacaagcaagagtccgagctgttcgaggagatggtggccattggtgctgccgtcaagccagtaagttcattttgagatgttttacaatttgtcactcacctgcttcgtaggacatgacattaatggtccttgatgcgtccataggtcaagctgccgaaggccaatctcgtgctttcaaggattctgccgactttggagctatcattgtgactaaactggatggacatgccaagggtggtggtgccatctctgctgtggcggccaccaagacacccattattttccttggtactggtgaacatctcaatgaccttgaacgattcgcgcctcagccatttatttccaagcttttgggcatgggtgatatgcaaggacttgtagagcatatgtgggtattgcttcgatatcttggtttcagttgcgctaacagttcatacaggcaagacatggcccgagcaaaccccgatagacaaaaggatctcgccaaaaagcttgagcaaggcaagttcaccattcgtgactggcgagaacaattgtcaaatatcatgaacatgtacgtgtttcatctccctcttccgttgactatgcttactcgggatgcgcaggggttctatctccaagatcgcttccatgattcctggtttgccggcgggtataatggacggtaacgaggaagaggcttctgccaagctcaagcgtctgattttcatcaccgatgccatgcgtgccgacgaattggattctgatggtagcatctttgtgtcctatgataaacaagggaaccccgtcggcctcaacaaacgggcaaagagggtggctaagggaagtggtacaagtctgagggagttggaggacttgctggtgcaggcgagaatgatggctggaatggccaagcaagccggtggtcagaatggatggtacgtgactctagtgtaactgaagcgattacgctcattttaggtataggatgtcagcgatgcagaagatgcaagctgcggccggtggcaaaccccttggacccaacggtcagccctcccctgcccaaatcgaggctatgcgaaaggccatgcctccagagcttgtccgcaagttacgtgccgctggtcctcagggtgctcagaagatgatgcaagatatgatgggtggcatgggcggaatgcctggtatgggaggtgccggcggacctggcggtatggatttgggcaatatgatgaggatgttgggaggaggaggaggaggtggtggtggtggtggcgggatgcccgacatgagccagatgcaggagatgatgaagaacatgggcatgggaggtggcggcggtatgggtggtatgcctggtga

SEQ ID NO: 1245 - DNA, 2090 bp, Cryptococcus neoformans
atgcagggaagacttcctcaaatggtgagtccattggaatgttccatttccttgtcatgctaatttctcgcagcaacccacggtcgtcctcctgcgcggtatgtccagctttttctgcatcaccgcgcgtcttcgcctgctctccgattatgatcttgtgaacggcagctgacagtcttcgctcttcttcaatagagggcactgatacctcccagggtaccccacaacttctctctaacatttctgcttgcttggctgtcgcccagactattgctacaacgctaggaccgcgaggaatggacaagctcatcgtagacgacagaggtctggctactatctctagtaagtgtgctatagcatttctactagtctcgtttactaaggctgactgaactttccagatgacggtgcaactattttgaagcttttggatgttgtccatcccgcggcgaggacattggtagacatagcaagagctcaggatgccgaggtgggagacggtaccacaagtgttaccctactgtgaggctttcgctacgtacattgcataactttactgattatgagccagtgctgcggagatcttgaaagaagtacgacctttcatcgaggaaggagtctctcctcatgtgatcattaaaggacttcgagaggctaaaactttggtatgtccgagtcagatgcaatattctttttgcgtactgacatctaacataggctatacaaaagatcaacgagattgctgtgacaatagacaaatctgacccggcgtacgtcccgatcggctcgttcaacttttccgactaacgaaacttttagtgaattccgcgaccttctcatgcaatgtgcggctacttctatgtcttccaaactcatccactcccaaactccctttttctccaacatggttgtcgacgccgttctttctcttgatcaaaatgatctcgacgagtctcttatcggtatcaaaaaggttcctggtggcggtatgcaagattccaaactcatcaagggtgtcgctttcaaaaagacgttttcttacgctggtttcgaacaacagcccaagagtttcaaggaccccaaagttctttgtctgaatgtagagcttgagctcaaagccgagaaggacaacgctgaagtacgagtgaatgaagtctctgagtatcaggctattgtcgatgccgagtggagcatcattttccgcaaactcgaagctatcgtcgctacgggggccaaggtcgtactctccaagcttcctatcggagacttggccactcagtactttgccgaccgtgacattttctgtgccggtcgagttgcggatggtgatctcaagcgtgtcgtccaggccgtcggtggatccatccagtctacatgctctgatattgaacctcatcacttgggtcaatgtggcagttttgaggagaaacagattggtggtgaaaggttcaacttgttcgaaggttgcccccaggccaagacatgtactttgattttaaggggcggtgcggagcaattcattgctgaagtggaaagaagtctgcatgactctattatgattgttaagagagcaatcaagaacaattccgtcgtggccggtggtggtgcttgcgaggtaagcaatattttcacacatgtcagtttaagctctaatttggtgcgttcagatggagacatcaaaatatcttcgagctcattctcgaaccatcatgggtaaagcccagctaatcgtgggtgctgtcgccaaggccctggaaatcatccctcgccaaatctgcgacaatgccggtcttgatgctacggatatcctcaataagcttcgtatgcgccatgctcaaggagaaacttgggccggtatcgacgtcgatggtgagggtgtgcaggataacatgaagagttttgtatgggaacctgctttggtcaaaacaaatgccttgagtagtgcaatcgatgcggcttgcttgatactgagtgtcgatgagacggttagaaacccccagagcgaacagcctcaggcggggcctcctatgccgagaggagctgcccagcaggcaatgaggggcaggggtaggggtatgcctcgaagataa

SEQ ID NO: 1246 - DNA, 2191 bp, Cryptococcus neoformans
atgagcttttcaagaattctcgaccatcaccgtattcccaccgtcaaccacttaccatgatgtgctcgactgatttaaagacaaagagctgaccctatcttctagagctccgttttaaccccgttggatttgggtggaaggcgtaccagagcgaggacaacaaccccacaacttataatggttcggatatcaggcatgccacctggttccggtgagtgaatgtcgtcaacacgccttactgattgccatctttagagtcgcccgtcattttcagcttcgactgggtatgcgaaactctgaaaagcctcggatctcgtttgacggtttcaagagagatgtgagtggcaaattctgacgtagttattttgtcatagcttatacgtgcttctattgcaggacttggataagatcaagcggactctccaggaatatttcaacatcacgcttgagactagagatacgagtttgaagggatggaactggggtgaggcgcaagtgaaaggtatgtgcagtctcatccatcgaatctcgagcatgctaacaaattgatagggagtgatctagtcttccaagttcaaggcaaaaccgcattcgacgttcctctctctcaagtcgccaactccaacattgccggcaagtacgaagtcgcgctcgaattcaaccctccttccaattacaaatttgatcccaaagacctcaataagcgtcctcctgacgaaatggttgagatgcgtttctacattcccggaaagagtatgaaaaaggctggtagcgatgctggtagtggtggcgaggagacggaattggatgaggagggtaatgaagtcagtgccgcggatgcgttccacagtttgatcaaggaaaaggcggacattggagctgtcgtcggggatagcattgtggtgtttgaagactgtctaatcttgacacccaggcaagttctttcacttgctatctcgtcgaaacgatcgctgatgtatttgcagaggccgattctctatcgaagtttacgccgactccatccgactagttggtaaatccaccgaccaccgagtcccatttacttctattcaccggatctttcttcttcccaagcttgacgatttgcacgttcagctcgttcttggtctcgaccctcctattcgacaaggcgctactcgataccccttccttgtcgcacagtggcccaaggatgaggtcgtcaatgcggaactcaatctcacagagtaagctacattattattcccatggatatgtgctgatcagttttagtgaggagctcgcacaataccctgacttggagaagacttatgaagcgaccaccttccaggtcgtctctcgtgtgctcaaagcattgactggaaagaaggtgaccccccccggaagcttgagaaagtgagtttcttgccatctttttaccacgtaaacacaaactgattccctcctcagcgctcaaggcctcaacggtatcagagctaacgtgaaggccgtccaaggagaactctacttcctcgaaaaaggcctgattttcatctccaaacaacccattcttatcgatttctccaaaaccgatagtatttcattttcccgtgtcggcggcggtgtcgcttccgcccgaacattcgacatgcgcgtcgtatccaagaccggaggcgctgaccatgtgttcagcgctatcaacaagcaagaagtcggaccgatcagctcgtttttgcagtcgaagaatatccgactcaagaatgagatggaggaggcgattgttgatatcgatgagccgtttagcgacgacgatgaggagatggaaagtccttctgaagacgagagaccatcgaaggcaaagaatgacaaatcgaagactaagcctgtgaagaaagcagccgatgacgatgaagatgagtctggtaagcgctcccttcctctttccattttttctcatacaatgcatcgtttgctgacgaaaaccatgacagatgatgaagactttgaagatgaatcttctgacggcggctcaccaagtgaatctgactctgacgacgattctggcatggcttcagatgcaagcgaccctatgatggaagaactgcggaagaagactcaagcgaagcgaacaaaggcaaaggagacaagtgggagtggaagtgaggatgagaagccgaagaagaagaaggcgaagaaggatgacgatgaatag

SEQ ID NO: 1247 - DNA, 2161 bp, Cryptococcus neoformans
atgaggcatgtaaatatgcaatcacacacatatctcttgtccgtgtacgatcgagtatcactgcccagaaaccaaatgccttaccggggtttcgggactatcttcgcgtggcggattgttatgacgctgtcgcgtcttcggtcaagatggaacgcaggcgtccatattcctggctctcatctccagtcttacttcctcttgcagcacgaacttgcgttcaacatgtctctcaacactagaaagcaggaaagagatttcacggccgaggtggaagcgctccaggctgaggcggagcagctagcaaaggttcgcacatttcacctgacgatggcgcctagctgatctgtcgacccagaatggcaagcttgaagaagccattgagaagattacagttttagaaaagcagacccgtaatgcgtccgacatgtcctccacctctactctcctcgttcttatcgcccgtttatgctgggaagccaacaatctggaccagctgaataatcaactggccctcatgtctaagaaacacggacaactgaaagaacctgtcgtgagaatggtagatgaagcaatggcgtggttgcctgcgttaaaggagcagaaagaacagggcaattttcggagtggaaaggatagatggttggagctggttaagacattgagagatatcacggagggcaaggtgtgtcaagtcgaaagatttagagctcccagaaactaacgacagatttagatcttcttggaacttcaaagggcaaggttgactgtcatgctctcagcgtatcacgaagcacttgctgagactgcgcccaaagaagctccacgtaagcacctctcactctttgcttcataccaatgtaactaacagatactcaacttcagcaacccctgaaacttcgccgtccactaagcctgaggacaaggacaaatccaaggccgagcctgttactgctaaagaacatcttgacgtcgcggcggacctcctgtctgacttacaagttgagacctattcaactatggataagcgtgaaaaaaccgagttgtgcgttcagactaaaccaaataggtcgaaaatctgctgacaatatactagcatcctggaacaaatgagattagagagtatgagaggcaattgggtgcgagtcagagttggatcgaggaagatcaaccgggtctatttaaaggacaaggacacccaggtgagacccagtattctcatcacagtttagagaatatccatttaacaattgctcaggatattaagttgcgatattatgatttgatggtgcaattggctttgcaagacgacgaatatcttgaagcttgtcaagcttatcaagaagtatgggatacagaagaagttaagaatgactcagcgaaagaactcagtgtgagtttataatatataacttattcggtcaaagctcatataagctcaggtcatcgagaatatcatgatttacgttgttcttgcatcctataacaacgagcaatccgacatgctccataagttgtatgccaacactgctctacaaaaagctcctcttcatttgtacgtttttctgtctttgtttatcacacactctaaccaatggctttagcgatctcctaaaatgctttgttacgaaggaactgatgcgctggtccggaattgaaggcatctatggccctgctcttcgtcagtctcctatttttgcacccgggtcaacactaggcaagaagattggcgtcaccgagaaatcccagaaggacgccgagaagtttgacaaccctggtgatgctcgatgggatcagttgcacaagcggattatcgaacatgtaagtgatacggtatgaaatcactgcggttactgaaaatttgtctttagaacattcgggttatagcttcatattacacccgcataaccatacagcggctcacagaacttctcgacctccccttactcaccaccgaacggacactctgcaagctcgtgactgacaagagtgtttatgcccgaattgatcgcccggcgggtattgtcgatttcagaaagaagagaaatgtgaacgatgtactgaatgcatggagcggagatgtcagcaaggtgcttgacttggtggagaagactagtcatctggtctccaaggagtacgcaatgcatgaggcagtcaagggtaa

SEQ ID NO: 1248 - DNA, 2057 bp, Cryptococcus neoformans
atggcctccacaatgtaccagcgcgaccccagggcggtgagtcattctccatgggactctttcatgaaagctgacaatcgtgctagggcctttttttgggaggtaccagaacaagtggtgccgaagttagggatgccaacggttagtcgattgtcagacagtacaaggaaggatcagggtgtaatagagagctggaactgatgaggtggatagtgatggcctgtcaaactgtttccaacatcctcaagtcatctttgggacctgtcgggtacgttgtgaaatctcctgattgatcatcgcgagtcctttctgattttgcttcagtcttgacaagatgcttgttgacaatgtcggagatgtcactatcaccaacgatggtgctaccattctctcgctcttggaagttgcccaccctgctgttagtatcactgtttcaatatccttgatgctcgactgataacgtttttaggcccgggtacttgtttctcttgcaactcagcaagataaagaagtcggtgacggtaccacctctgtcgttctcctcgcttctgagcttttgagaagggccaatgagcttgtgcggaataagatccatcccaccactgtgatcaccggttacaggtatgttgaatttcggcttgtgaatgctaatcacgctgaaactctgcaacagacttgcgtgcaaggaggcgtgcagatacatggccgaacagctttcaaccaaggttgacaagctcggcaaggactctttgatcaacgttgccaagacttctatgagctctaagatcctcggtgccgacgatgactttttcgcacctcttgctgtcgacgctatgcttgccgtcaagaccatcaacgccaagggtgaaaagaagtaccctgtcaaggctgtcaacgttctcaaggcccacggaaagtctgccagggaaagtttcatggttaagggttacgctttgaactgtactgtcgcttctcacggtacgtcaatgttcatactctcactagggcccagctaacaaaggacacagctatgaagacccgtatcactggcgcaaaaattgcctgtctcgacatgaacctcgccaagcaacgtatgcaccttggtgttcacattacaattgacgaccccgatcagcttgaagccattcgagcgcgtgaatccgagatcaccctcgaacgagtccgcaagattctcgctgctggcgcgaacgttgttctcactaccaaaggtatcgacgacctcgtgttaaaggagtttgttgaggctggtgcgatggctgttaggcgatgcaggaaggaggacttgagaaggattgccaaggccactggcgccactctcatctcatctcttgccaatcttgaaggcgatgagacctttgaagcttcaagcttgggttacgccgaagaggttgttcaggagaggattagcgacgatgagttgattcttgtcaagggtacaaagatcgtcaattctagttccgttatcttgcgaggtgccaacgactttatgcttgacgagatggagaggtctctgcacgatgcgttgtccattgtcaagagaacgttggagagtggaagtgtggttccgggtggtggtgctgttgagactgccttgtccatctatctcgaaaatttcgccactactttggtgagttgttagcaagtattttgttactgatgagctgacatttgcgcagggctctcgagaacaacttgccatcgccgaattcgccgctgccctcctcaccatccctaagactctttccatcaatgccgccaaggactctaccgacctcgtcgccaagctccgtgcataccataacgctgcccagaacgcccctctgaacgatcccaagagagggctcatgtattatggtctcgaccttatcaacggtgaagtgattgacaacaggcaagccggcgttttggagcccacgatgagtaagattaagagtttgaagtccgcgttggaggcggcgacgagtttgttgaggatagacgatagtatacaggttgcgccggagcagaaggaggaggttgaccctcacgggcattag

SEQ ID NO: 1249 - DNA, 2072 bp, Cryptococcus neoformans
atgtccagcatagaactcataaacccaaaagctgagagtttgaggaggacgcaggctctccaggtcaacactgtgagccattaaaacagcgagtatttttacgagtaagaactgacagaaatttctaggcgggcgccgttggtcttgcgaatgtcgtcaagtccaatctcggtgcgttctataaggttgtcagaaaatgaaagtgcttaacttttcgaataggtcctagaggaacgatcaaaatgttggtggacggctctggacaaattaagatgaccaaggtaaatcgcgcccgaacttttggcacggcatggcaggatagctgattcagccttcaggacggtaaagtccttctgtccgagatgcagatccaggtaggtatagtatgctattaccaataatgagtctcagctgaatctatcttttctagaaccccactgccgctatgattgctcgaaccgctgtggcgcaggatgagcaatgcggcgatggcacaacgtcggttgttcttctcgtcggagaacttttgaagcaggcggacagatacatccaggaaggtgttcacccacgagtgattggagatggtttcgacattgctaagaaggaagcgttgaacgtgagtgcggtctgtagtcagtgtgactgtcagctaatgcgcgggagtctagttccttgacactttcaagcaaacccctaaactcgaccgtgccaacctcatttctgttgcccacacctcccttgctacgaagctccacgccaaactcgctcaaaaactctccgcggatgttgtcgatgctgtccttgccatccagcctcctgaagtcaccgaacctggagcttatcgagaacccattgacctgcatatgattgaagtgatgaagatgcaacacaagaccgacacagacacccagttgattaggggattggttatggaccatggtgctagacatcccgacatgcccaagcgggtggagaacgcctacatcttgacgctcaatgtttcccttgagtacgagaagaccgaggtcaactcaggcttcttctattcctcagcggagcaaagggaaaagctcgttgagtctgaaagacgattcgttgactctaagcttaagaaaattgttgagctcaagaacgctgtgtgtgacgtggctgttggatcaaatgagaaacccaagaatttcgttgtgatcaaccaaaagggtatcgatccgatgagcttggatgtcctcgctaagaacggtattctcgctttaaggcgtgcgaagagaaggaacatggagcggtaagtacaagcatcaagctcgaatgcctgtcagcctgtcatgctaacaacgcttaagattacaatttgcatgtggcggtgtcgctcaaaattccgtcgaggatttgaccccagatgtccttggttgggccggtcttgtctacgagcacactctaggtgaagaaaagtatacttttgtggaggatgtgaaggaaccaaagtccgtcaccatgctcattaaaggtcccaacgcgcataccatgactcagattcaagatgctcttcgagacggtttccgttccatcaagaatgccatcgaagacaactctgttattccaggtgcgggtgcgttcgagctcgcctgctcagcgcatctcaattcttccttaaagactctcgccaagggccgagccaagctgggtgtccaggctttcgctgaggctatgcttgtaatccctaagactcttgccgcgaacggaggatacgacgtgcaggatgccatcgtgggtttgcaacaagagttggaggaggccggtgaggatggtgtcgtgggtttggatttgaagagtggagagccaatggaccctgttgtcgaaggtgtatgggataactacagagtgaagaggcaaatgttgcacggagcgtgagtagtctgcatatagttaaagttgagagtcagtctaatcttcggtcttagggcgactattgctgtgaacttgttgaatgtcgacgaagtgcttagggcaggaagatcatcgtgggttgcattgttcttcgttacattccactctcactgaccattcgtatgtag

SEQ ID NO: 1250 - DNA, 2021 bp, Cryptococcus neoformans
atggctgctaccgatgtcaatggactcgcgtcccaaatgagtaagctggtcccgcttcttcgtatcagagtggatactgacttgcccagactccgttaaccttaacggtgcctctcagaaacctcagaaacctgcctacgttcctcctcacttgaggaaccgtgccgctccccccgccgctgtccctcctgcggcccccgctgcctacaggccatctcccaccggtctccccactcccgccaccacccctcctaccaggcatattgtgcctgccgccgttgccgaggacgatgtcggtggatggggtgcacaacctcgtgttaggaaaacttttgagcatggtgcccctcccggatttggtagctggaagaatggccagcacgtcgtcggtgctaggaacacgaggatggagaaggaaatgtatggtgaagtgggagacggattgcaccaggtgagtcggaactccagtttttttgatgcaggaagctagtcttacgcgcggaatttaggccaccggtatcaactttgataagtacgccgatatccccgtcgaagtcagcggtaagggcgtccccgaacctgtgactgaatttaccaacccccctatcaaccccgtccttctcgagaacgtcaagtacgctcgatacgcaacccctacccctgttcaaaagtactccatccctatcgttgccgatggccgtgatcttatggcttgtgcccaaaccggttccggtaaaactggtggtttccttttccccatcctttcagctctcttcacctacggtccttccactcctcccgttgagcaggacactggctacggctacaggaggacaaaaaaggtctaccccaccgcccttgttcttgcccctacccgagaacttgtctctcagattcacgaagaagctcgtaaattcgcctaccgatcttgggttcgacctgctgtcgtttacggtggtgccgacattggctcccaaatgcgtgccctcgaccgaggatgtgaccttctttccgctacccctggtcgtcttgtcgacttgattgagcgaggcaagatcagtcttgctaacgtcaagtacctcgttcttgacgaagccgaccgaatgctcgacatgggtttcgagcctcagattagaagaatcgttgatgaggaagacatgcccggcgtccttgagcgtcagacgctcatgttctccgccaccttccctcgagagatccagaaccttgctcgatctttcctcaaggagtacatcttcttgaccgtcggtcgagtcggttctacttccgaaaacattacccagcgtgttgagtatgtcgatgaccaggacaagcgctctctgcttctcgacttgctccttgccgaacaatctggcggtttgatacttgtctttgtcgagacgaagcgcatggccgacactctctgtgacttcctctgttctcgtcgacacaatgccacctctatccacggtgaccgtacccagcgcgaacgtgaagctgctctctacgcattcaaatccggtcgagcccccattctcgttgctaccgccgtcgcggctcgaggtctcgatattcccaatgtcactcacgtcatcctttacgatcttcccaacgatgttgccgagtacactcaccgtatcggccgaactggtcgtgcaggaaacgtcggaacttcgactgccttcttcaaccgtggaaacaccaacattggtaaagatttgattgagctcctcaaagaggcgaaccaggaagtacctcagtggcttgttgaaatctcctctgagaggagttatggtggtggtggtggtggtgggtacaaaggaagtcgaggacgaagcactggtggcggcggcggtgcgaggttgggcggacgagatatgcgtcaaggtggcggtgggtacggcggtggtggaaggacttctgggtatggtgggggttacggtggtggtggcggtggtgccggatggggtagtggcggtgggttcccacccgcgggtggcgactctggcgcgagctggtggtaa

SEQ ID NO: 1251 - DNA, 2271 bp, Cryptococcus neoformans
atgcctcgcccatcgttcggctcacgtcaattcattgcaacagcaacacgtatatcctcacgcaaaatgaccactcagccacgatacaccgtccctctcaaggaaccccatccagacaaccacagcctgcacacggaatcaacaacgaccatctttctcccaaatgaaggcgctttcctcaacccagtccagcattacaaccgagatatgagtgtggcggtaatcagagcatggaatgaaatgaggaaagaagaacttgaagaaaagtggagaatcagactggagagaagaggcggaaaacctaggcctaagaagaagaagaacaagaaggcaacagagggggaagccaaagccgttactattgatgctgaagaagagaaggcagagaaggaggggactatggaagttgagggtaatgctttggcagaggtgaaggaaggtgaggaacccgttgcagggccttcaaacggtgctggagttgtgagttacattaaaacgcccctagaattccggctgacctgtaattccagagcaaattccgggcgccttccatcaacattcttgaagctcttgctgccaccggtcttcggtccatccgatacgccaaagaaattcccaatgttaagtatgtccttgccaacgacctttcaccttctgcttgtgaagctatgaggagaaacgtagaatttaacggtgtaggcatggactacgaggcgcctgtgaaggaagagcaagaacccaaggccgaagttgttgaaatgcccagagacgaggcaaacgaggagattaaggagggtggagccgtcgagcacgtcgagaagaagcaagaagttcagcctgaagtgaaggatgaagttggtcgaaggccaggttgtagaggacgagtcaagattaacgagggcgatgcttgtgctttcatgtataaccaccgttccgccgttggaccctctgcccgtgttgacgttgtcgacctcgacccctatggtactgctgctcccttcctcgatgccgccattggctgtatttccgatggtggtctcctcgccatcacatgtaccgacctcgccgtgcttgctggtcaacagtaccccgaaaagtgttactccaactatggaggcacaaacgttcacgccgagtacactcatgaagctgcgttgaggcttgtgatgcactctctggcgagcgttgcggcacgatacgggagatacatcacacctcttttgtcattttcaatcgatttctatgtgagattgtttgtaaggatcgacaccaggccggaacaggtcaaacaccttgctaggtaggttttacgctgctgctcgcctctcgccccttctaaccattgttttgtccagccaaactggtgtagttttcacttgccaatactgtcaaacagctgtcaaccaaccgttcggcaaggtcatctctaaagaaaccgccaagggcaaggagatgaccgcatttaagactgttgcagggcccacggccggtaacgggtctgcttgtgaggaatgcggagggactatgcacgtaagtgtaatctctcttcaatctcgatcaaaaactaaagctgttatttagcttggtggacctctttggcttggtcccttgcaagataacgagttcgccaagcgtgtcatcaaggaaattgagagcacagaaaaggaatacaagacgtacaacaggatgttgggaatgttgacgttggcttctcaagaattgccccatccttggttcttcactgccaaccgaatcgccaaatctgtacacgccccttccttacctatgaacaagattctgtacgtcatattattgacacccgttgtaattgctgacctctcatgcagctccgccttgcttaacgcaggttataaaatctcccgttcccactgttcccctggtgccgtcaagactgatgcgcctcgttcattcatctacgacatcatgcgagaagaagcaaaggaaaatcctgtgaggatggataaaattgcagagggatcgcccgctaggaagatcttggcaaagcctatcactcacacgatcgacttcactccccaccctgacgcttctctggaacgacaaggtaaagaaacattttaccaagtcaaccccttaccgaattggggtcccgcgccgagggcaaagagccttggtgagaagaggaaggcggaagtggatgctgagaatggtgaaggggatgccgtagtaggaggggagggtgtgaagagaataaaagttgtggtggaagaggaggaaatgatgaatgcttag

SEQ ID NO: 1252 - DNA, 1982 bp, Cryptococcus neoformans
atgcccccggatacgataaccatctcatctctcacacttcacctgccacacggcctaggtccgtccgcctttcacctcaccccgtcccctccctgtccagcccttctctccctcacaattcacctcgtccccaactctgtctctgccaccgccgcaggggactccatggcaggccttggagtaaattactcttcagtatccaaagcggtatatgcccttgcgaatgatgccgaaaaggtatggagcggaccatgggagctgatgcgcgctgtcagtgccatcccgctagggtttgacgatgtccagagcgtagatatccgtctaggccttccaaaggcactgctacatgctctagaagctgtgtacaaggcgtcctatgccaaaaatggcgaagaaaccggcaggagttgtacaatccgggacttgaaggtagtgtgtattgtgggactacatgagcatgagagaaaagagaaacagaggctggagttggatgtcaaggtcagaggaggcgactggaatgtttggggacacaagggatttgcagatgaaatatacgacgtaagttgtgctagcagcacttgtgctcaattatcttccatcactaacaaaacgtggtgacagtttgtgagcaactcggcttacggaactatcgaatcgctgaaccacgaactgggacaacatcttctgaagagtcgctatctgggggatcccactcaatctcatctagaaattacaatcaggaaaccatcggcaatacctttcgctactccaagcatcacgattcatcgctcacaggccgactatgcgccaagtctaccatctggcaccgcttgcaatgcaccacgcgaagcccttgagagggtattcgtggctgtcggttccaatatcggtgacagagtagccaacatcacaagagccgtaagccttttagaggaggctggatgtaaattgctaggtactagtagactgtacgagagtgaaccgatgtatgtggaagatcaggaccggttcatcaatggtgtcattgaggtaagttactgcggacgtatctgtgaagatatctgtttaacttccccgcagctagctacaccacttgagcccttggaagttcttcgattgctcaaacacatagagaaagctgtcgggcgtacaaagacattcacgaatggtcctcgagtcatcgatctagatttggtcttttatggtcaccgagtggttaaaattggcaacgaaactgatgaggaagatgaacatgggatcaaatggttagaatgccctcacaaaagactacgtgagcgagagtttgttttgaggccgctggccgagtacgtttaaaactgcttttttgaagatgaagttccagggactgaccatctccaaagcattgatccagagttcacgcaccctgcgcttcgccgatccgtcggccagcttctcgccagtcttccaaccacgtttccgccatctctttcacctataatccccttacactctcacgcttctccccttaggctttccatccctgcctccccatacatcatggccatcttcaatacaacaccagattcattttctgatggcgatcccgccaggacgaatgtcgaatatgcgctcgccgcttgcgaaaagctgttaaaaggacctgagcctccggctattctcgacattgggggaatgtccacgcgcccaggttctgaaccctgttcagaggaagacgagctcagtcgcgttatcccacttgtcaaagccatccgatcatcaagtgatcccatcgttgcatcgattccgatatcaattgatacttatcgaccgtcagttgccaaggctgctgttgaagctggtgcgtccatcattaacgacgtccgtggtggacaagagccaggaatgttgcgggtcatggcagaagcagacgttcctgttgttctgatgcattctaggggtgattcaaaaaccatgattgcagcggatgtccaggattatga

SEQ ID NO: 1253 - DNA, 1980 bp, Cryptococcus neoformans
atgctaaccacagctgcaggggcccggctcttttcgaccaccatccccaagcgagcagatgtcaccctcactatcgacggcaaggaggtttctgtccccgccggcaccgcattgatccaggcgtgtgagaaagcgtacgtgaaataggctgtttgagcagggccaggcgctgatcttgtttccgtagcggtgctaccgttcccagattgtgagcgacgccgataagttggagctgcagcgttgttactgacccgactgtagctgttaccacgaccgattagcaattgctggtaactgccgaatgtgcttggtcgaggtgagcgacttcatttgaagaccgggtgtcacatactaaacaattcataggttgagagatcaccaaaacccgtcgcttcgtgtgctatgcccgtcatgcccggctccaaagttttcaccaacactccccttgtccacaaagcccgtgaaggtgtcatggaattcctccttgccaaccacccgctcgactgccctatctgtgaccaaggtggcgagtgtgatcttcaggatcagtctatgcgatatggctccgaccgtgggcgtttccacgaaattaccggaaagagggcggtggagaacaaggacctcggaccaattgtcaagacctcgatgaacaggtgtattcagtgtacccgatgtgttaggttcgccaacgacgttgctggtgttgaggactttggtactaccggccgaggaaacgatctccaaattggcatgtacattgagaagactatggattctgaaatgtccggtaacattatcgacctttgtcccgtcggcgcccttacttccaagccttatgccttccaggctcgaccttgggaattgaagaagacggagagtgttgacgttttggacgctgtcggtgccaacattcgaattgactctcgtggtatcgaggtcatgcgaattcaacccaagatcaacgacgagatcaacgaggagtggatcagtgacaagactcgatacgcctacgatggtttgaagtaccagcgattgaccactccccttgtcagggagggtaaccgatttgttcccgcgggctgggagcaggctttggagactatccgacatggtcttatcaactctggtgcgaagggtgacgagatcaaggctgtggccggtcacctggccgataccgaagcccttgtcgctctcaaggacttgatgaacagattaggctccgagaaccttgccctcgaccagaagcttggtgatcttccttctgtcgccaacgttgacattcgatccaactacctcttcaacactggaattgagaacgttgaggatgccgacgctgtccttttcatcggtaccaaccctcgacatgaggctgccaccatcaactctaggttccgaaagtcattcctttaccgaggtgctgactttgccgtcattggtgagaagtttgactcaattttcgagtacgaccatcttggtacctctgccaaggacgtcgctgccttctttggcggcaaggatgctgggtctttcagcaagatgtggaaggacgccaagaagcctttgattgtcgttggtagcgctgttttggagaccaaggatggtgccgctgtcttggctgaagtcagcaagcacgtcttggccaactctgacaagtttttgactcctgaatggaccggttactccgttctccagcgagtgagtctgctttttaaatccacgtcaaatgcaaaagcaagggaaaagaaactaacgaacctcaggctgtttcccgagccgctgcctatgacattggtttcaccccttccgcctctgcttcctctacaaagcctaaattcgtctacctccttaatgccgacgagatcgaccctgcttctatccctgaagacgcgttcgttgtctaccaaggccaccacggtgactttggtgctcaattcgccgatgtctgcttgccagctgccgcttacacagagaagagtatga

SEQ ID NO: 1254 - DNA, 2146 bp, Cryptococcus neoformans
atggctcgtggtgtcggcggcaggagccgccagccgcgtttgttcgcgcggtctgcacggcggtggtggtcgagcgacattttgggcaagaaacaccataaccttccaacgtcttcctacccttttatatctcgtacactgaagaacaggatgtctctaaaagtacccaaggcctcaggccccgacctttttaagtctggctacaaggtacgcctctgctcaatttactgtgtcagccacgcctgcttggataaattgctgactatgcttctctaccatctacacagcacttgtctggactggaggaggccgtcttgaggaacatagcggctgttggagagctcagcgagatagtgaggacctcattcggacccaatggtcagtgatctcgtttgttgggcccgttgctgtcgaggatagggcctcttgttgccatcgtctcctcgtcttcgtcttaggaagcatgctgacacttgtgaatctaggtcggaacaaacttattatcaaccacctgggacgactttttgtcacttctgatgctgccaccattatccgagaaattgaggttgcccatcctgctgcgaagcttctggtcatggctagtactgctcaggaggccgagatgggggacgcgaccaatctagtgctcatctttgccggagagctgctcaaacgatcggaacatcttttgactatgggtttgcacccgtcagacgtcattcaggggtacgagatggccttggcaaagggacgagaagagctcgaaagtgagtagcgtgcatcccatacgctgttgaatactgacttgctcctgtcttccagctctggtggccgcacagatcacatcttctcccttgccaactgtcgacaaccttgcagctgcagtttcttcttcccttgcctccaagcaacctggatgtgaagtactgctctcaaaacttgtcgccgaggctgccttggcagtcatgcctaaaaaccctaaggatttcaacgtcgattcagtgcgagtagtcaaggttctgggcggcggtcttgaggcgagcagagtcgttcggggcatggtgttcggtagagaacctgaaggtccgttgtctcgagcgccagaatttgaaactgtttgcttacgtttatctcaggtattgtgaagaatgctaccagggctaaggtagcagtatatacttgtggtctggatatctcccagactgagactaagggtactgttctgctcaaaaaggcggaagatctgttgaacttctcacgcggtgaagagaaacaactcgagggcgtaagttacccccctcattatctctatcaaaatcagtgtttcttactgttttcatagtacttcaaagaaattgccgactccggtgtcaagctcatcattgctggttccggtattggtgaccttgccttacattatctcaatcgaatgggcattgcggtcatcaaggttctttccaaattcgaccttcgacgattatgtcgggttgttggtgccactcctcttgcccggctcggtgctcccacccccgaggaagctggtatggttgatgtatttgagaccatcgagatcggtggggaccgtgtcactgtccttcgacaggaagaaggggagaagactcgaactgccactatcgttcttcgtggtgccactgccaactaccttgatgacctcgaacgatctcttgacgacggtattaataccatccgcatccttttccgcgacggccggcttgtgcctggggccggtgccagcgaaattgaactcgctcgacgtatttccgcctacggtggcaaaactgccggcctcgctcaacattctatcaagcgatgggccgaagcatgtgaagttgttcctcgtacattggctgagaacgcgggcctcaactcggaagatgtcgtcagttctctctacaaagcgcatgccgacggacaggtcgatgcgggtgtggacattgagagcgagaaggagggtgtcagatctactaaggacatgggggttttcgacccatatgctgctaaagactgggcattgaagctggcgaccgaggcagctatcagtgttctcagagtggacagtatcattgtggccaagcaagcaggaatagctccccctaagcagcagggacactgggatgatgattag

SEQ ID NO: 1255 - DNA, 2082 bp, Cryptococcus neoformans
atgtccgactgctacaaggaccctcgagttgaggttcacattggtgacggtttcaagttccttcccgagcacaagaacgaatacgacgttattatcaccgactcctctgaccctgtcggtcccgccgaggcgcttttccagcctccttacttccaactcctcaaggaagctcttaaggagggtggttccgtctctacccaggctgagtgcttgtggattcaccttcccctcatcaagaccctcaaggaaacttgctccaagctcttccctgtcgtcaagtacggcttcaccaccatccccacctaccccgctggtcagattggtatcatggtctgcaccaaggactctacccgagacctgaccgtcccccttcgtgccgttcccgacaccaggtactacaactctgaggtccaccgagctgcttttaccatccccgagttcggtcgtgccatgctcgaggacggcgtcaacgtcttgcccaagttcagcggtgctcgacccactacgaccaagaagaaggtgctcctccttggttccggtctcgttgctggccctgctgccaactacattgcgcgacacaaccacgagctcaccatcgcttgccgaactctcgctagtgcagaggagctcgcttccggcctccccaacgccacccccatgtctgttgatgtctcttctgctgacgctctccgacaggctatcaagggtcacgacgttgttgtcagcttgatcccttacacccaccacgcccaggtcatggaggctgctcttgaggagaaggtccacgtcgtcactacctcctacgtcaacccccagatgcgtgccctcgagcagaagttcaaggatgctggtctgatttgtttcaacgagatcggtgtcgaccccggagttgaccacttgtgggctgtcaaggtctttgacgaagtcaagaaggctggtggtaagatcaaaagcttctacagcttctgtggtggtcttgttgaacctgctgtacgtatcttttttgcaatgattactgcatctactaataatgatataggccgccgacaatgccctcgggtacaagttctcttggtcccctgtcggtgtcctcatggccctcaacaacgacggcaagtacctcaaggacggcaaggtcgttgaggttgccggcaaggacctcatgagcacagccaagccttattatttcactcccgcgtacaacctcgtcgcctatcccaaccgagactctaccgtcttcagggagttctacggtctggaaggtgttcaaaacctttgccgaggtactatgaggtacgctggcttctgcgaagtcatcaccgcctggaaggaaattggtttgatgtccgatgctcaagtcgactacctcgcccagggtgctgctcccatcacttggatcaaggtcatctctcagttgctcggcgttgaggccaaggaggcgtaagtttaccatattgcatctggaaatatgctgaccagtaaatagtgccattattgagaagctcaagactctcaagtctttcgagaccgagtctagagtcctcatctccaaattccgagacctcggtctcttctccgaggagcaggtcgctcagcgaggttccgttatgcgagctctgtccgctcttctcgaggagaagtgtgccttcaaggagggtgaggtcgaccttgtcttgttgcaacacactttcgagatcatcaacgccgacggttccgaggtgcgttctctccggattagatcgtgaaaggaaaaaaaatgctgatgggaatatgctagcaaaccatcacttcctcccttgaggcttacggtgacaggaacggtgggccctctgccatggccaaactcgtcggtgtacgtgtcacttcttaatgacttgatttacctcgtgtgtatgttttcgcggcggtatgctgaccaaagatgtttgttaggttccttgcggtatggctgtgcagttcatccttgagggtgtcctcaacaagcccggtgtcttcgctccctacgacgaggagacctgcaagttattccgagaacgacttgagaaggaggagggcatcaccatggttgagaaacttgtttaa

SEQ ID NO: 1256 - DNA, 2333 bp, Cryptococcus neoformans
atgtccgccgacaacgccccagtcaacgctgcaaaccccgaggtcgctcccgtccagtcttctgccgacgccccgacccaagaaggcgcccctgcgcccgccggcccctccaagtctgagctcaagaagcgcgcaaaggaggctgaaaaggccaagaaggctgcagaacgcgcagcgagggaggaggaggatagaaagaagcgcgaggccaaggagtctgaggaccatgcgaaacagaactatggcaagctgcccttgcaccagagccaggagaggaacggtgagtcctgtccttattggccagcgagtcgtcccgaagacacgccgtagtctcgtccactaacatactctataggccagaaacgactcaagttccacgaactcaacaaggaccttgtaggccagagggtcatcttccgagccaggctgcacaacatgcgtcctcaaggcaggtcatcgtctaatcacatcatcttgctatactaaactgacaaattgacggtcaaaacgattcgacatgaaattgaatacaataggagccaagattgtctttctcactttccgtcaacaaacacacaccctccaaggtgtccttgtcgtttccaaagagagtgacgagcaccaggtgtccaagcagatgctcaagtacgctacccttatccctgtatgtttccgtcatgaccattttttcatacagatggtggctgacgatgggaaatagtctgaggctatcgttcttgttgagggtgtagtgaaagaggccgaggtcaagagctgtactatccagaactatgaagttggaatccaaaaggtgtgtccgtccttgcatatcatctttactggatcgcgctcaatgctgacattgccgattagatcttcaccgccgtcgaggttaatgagcttccattctctatcgatgacgctgcccgtcctgaatctgacttccagcgagtaagtccaggtccccttttcttcatctctttcaataccaaatagaactgcatttgctgacatcgtttgatggcattttttttatataaattgatttgtgaatagatggagactgaggacgttcagtttgcgagggttgctttgcctacgaggcttgataaccgagtgatggatttgcgagtaagtcaacattaccctttccctcccccagccgcggccaaacaagctaaccgctccttttcacgtacaaacagacccctaccaaccaagccatcttccgcatccaatccgccatctgccaactcttccgtgaatacctcaactctgaagggttcatcgagatccactcgcccaaactccaaggtgccgcgaccgaatcgggcgcttcagtcttcaaggtcaagtactttgacagggaggcgtttttggcgcagtcgccccagttggcgaagcagatggctattgcgggtgatatggagagggtttatgagattgctcctggtgcgtcttgtcgtctcattccgctgcttgtgaacaaacgggacaaaacaggcagccagtaaaattgatactgatgtggaacgtcgaatagtattccgagccgaagactccaacacccaccgtcacatgactgaattcatgggtctcgatctcgaaatggccatcgaagagcactaccacgaagctgtcgatgttctcgacaatatgctcctccacatcttccgtggcttgcaaaccaaattcaagcatgagattgagacggtgaagaagcagttcccatgtgaggatttcttgtttttggagaagacgttgaggttgccgttcaaggaagggatgcggatgttgagggaggcgggggcgacggatggggaggggaagccgattggcgagttggacgatatgaggtatgtcgcgtgattcatgatcccgttattggattattaagctgatgtgccccccccgcccctcattttattattagcaccgaaaacgaaaagctcctcggtcgacttgttcgtgaaaaatataataccgattacttcatcctcgacaaattccctatcgccatccgtcccttttacaccatgcccgacccctctgaccccacgctctccaactcgtacgatttcttcatgcgcggtgaagaaatcctttctggcgcgcaacgtatccacgacccgacctttttggtggagaggatgaaggatgtggggattgacccggcctcgatggcgggttacctcgatgctttcaaattgggtgccccgccccatgcgggaggagggattgggttggagagggtggtgatgttgttcttgaagttggggaacattaggagggcgagtttgttccccagggacccgaagaggttggctccttaa

SEQ ID NO: 1257 - DNA, 2119 bp, Cryptococcus neoformans
atgattccaagacgacaccacttcaagccggctccccaaccaacagtacaagttctccaacctccggacgaagatgccccctcgctcacaatcactatgctcggcgcaggccaggaagtgggcaggtcctgttgtgtcatagagcacagaggaaagaagattgtatgcgatgccggcctgcatccagcacagcctggtataggagctctaccattcatcgatgaacttgattggtcgactgtggatgcgatgttgatcactcagtaaatcctgtccaaaatttcgagcctgtcacatatatgagctgaccgcctatttgttagttttcatgtcgatcatgcagccgctttgccgtatatcatggagaaggtatactttggtcttttgagatcatggtggaaacttgctgacagtatatcacagaccaatttcaaagacggtaacggcaaagtgtacatgacgcacgctacaaaagctatctatggattgaccatgatggacactgtgcgattgaagtaagttcaatctctcttttcgactcccatccactcctgacccatattatcccttgcagcgatcaaaatccagacacttccggtcgcctatacgacgaagccgacgtccaatcatcctggcaatccaccatagcagtcgactatcatcaagatattgttatcgctggtggtctacgtttcaccccctaccatgccggccatgtccttggagcgtccatgttcctcatcgagattgctgggttgaagatcctgtatacaggagactattcaagggaggaggaccgacatctggtgatggcggagattccacccgtgaaacctgatgtgatgatttgcgagagcacgtttggcgtgcatacattaccagacaggaaggagaaggaggaacaattcacaagtaagcaccatcaagaaaattaccctttcttcgtttgcctgactaacgcgaatgatcaataacagcgttggtcgccaacattgtccgaagaggtggccgatgcctcatgcccatcccctccttcggaaacggccaagaactcgcccttctcctcgacgaatactggaacgaccaccccgaacttcaaaacatccctgtctactttgcatcctctcttttccaacgcggcatgcgtgtctacaaaacctacgtccacactatgaatgccaatatccgatcacggttcgccaggagagataacccctttgactttaggtttgtcaagtggttgaaagatccgcagaagcttagagagaataagggtccttgtgtgatcatgtcttcacctcagtttatgagttttggactcagtcgtgatctgttggaagagtgggcgccggattctaagaacggggtgattgtcactgggtactccatcgaaggtactatggccagggtacgtatcatcatttttcccctttcttcctggtttcaatctgctcttctctgacaaaaaaaatcatttttagactctcttgagcgaaccggaccacatcgaatccctcaaaggaggcaacgtcccccgccgcttaacagttaaagaaatctctttcggcgctcacgtcgattatgctcaaaattcaaaattcatccaagaaatcggtgctcagcacgttgtcctcgtgcatggagaggcttcgcagatgggaagattgagagcggcgttgagagatacatatgcggccaaggggcaggagattaatatccatacgccaaaaaattgtgaacctctgactcttacttttagacaagagcggatggtcaaagtgagtattctctttccccttccttttgaaacacttcccccctcatcagataattcgttaatcactcaaattctccgccaggctattggctccttagcagctactcgccctgaacacggtacctccgtcaaaggtcttctcgtttccaaagatttctcttacactctcctttccccggccgatttacatgatttcactggcctctcaacgagcacgatcatccaaaaacagggagtggcgataagtgtagattgggcggtggtgaggtggtatctggaggggatgtatggggaagtggaggaaaggtgttgaggaagaggggaaagctgcttttattgtga

SEQ ID NO: 1258 - DNA, 2149 bp, Cryptococcus neoformans
atgttccagaaaaaaccccgcaaagtcgagaaggtgctggaaatattaattaattattcccgcggtatttacgaaatagttaagcatcggcgagtactttttagggaatttcctctcgccaatccatttcccacttgctcatccatccgaaacaagaaaaaatgaaccccctccgctcccgcgctgctctcccccgccccggcaaggctcatccagaacgctgctgtccagaagaggggcttcgcctccaaggacgtcgtcttcggcaacgacgccaggcagggcatgctcaagggtgttgacgtcctcgcaaaggccgtcgctgccaccctcggccccaagggcaggaccgtcatcatcggtgcgtacttcttgcctggaagacatgcagtcgctgatatggaccacaggccagagcttcggtgggcccaagatcaccaaggacggtgtctctgtcgccaaggctatcactctcaaggaccccgttgagaacctcggtgctcggtgagtccttcgtggtatctcctccaaaactccctgttgacattatctacagtctcgtccaggatgttgcttccaagaccaacgacactgccggtgacggtaccaccaccgccactgtcctcgcccgagccatctactctgagggtgtgaagaacgtcgctgccggctgcaaccccatggacctccgtcgaggtgcccagaaggctgtcgacaaggtcctcgaggttcttgctgccaacaaaaaggttatcaccacctctgaggagattgcccaggtatgtcgagataactatcgcgggaagaggccgggttgagctgacgattcaaaatcaattctaggtcgccaccatctccgccaacggcgatacccacgtcggtgccatcattgcccaagccatggagcaggtcggcaaggagggtgtcatcactgtgaaggagggccgaaccattgacgacgagattgagattaccgagggtatgcgattcgaccgaggcttcatctccccttacctcatcaccgacaccaagaaccagcgtgtcgagctcgagaagcccttcatcctcctctccgagaagaagatctctgctcttcaggacatccttccttctctcgagattgccgcccagacccgtcgacctttgttgatcatcgccgaagacattgacggtgaggctctcgccgccgtcatcctcaacaagctccgaggtcagctctccgtcgccgccgtcaaggcccccggttttggtgacaaccgaaagtctatcctcggtgacattgccatcctcaccggcggtactgtcttcactgacgagctggatgtcaagcttgagaaggctacccccgacatgtttggtaccactggctccgttaccattactaaggaggacaccatcatcctcaacggcgagggtgacaagagcctcattcagtctcgatgcgagcagatccgagctttgatcaacgactctagcacttccgactacgacaggactaagctccaggagcgattggccaagctcggtggcggtgtcgccgtcatcaaggttggtggctctagcgaggttgaggtcggagagaagaaggacaggtatgacgatgctctcaacgctacccgtgccgccgtcgaggagggtatcgtccccggtggaggtaccgctcttctcgtgagtcgctttcttcgtgtaaaaaaagcatattttttggcaaaatgtgctgacaatccctacagaaagcttctaccgctcttgaggacattgccgtcgacaacttcgaccagaagctcggtatctctatgatccgacaggctatccgacgacctgtccgaaccatcgtcgagaacgccggtgaggagggttccgtcgtcgtcggtcgactcctttccgaggagtttgccgctcctgaaaagttcaactggggttacgacgcccagacttctcagtaccgagacatgatcgctgccggtatcctcgaccccttgaaggtcgtcaggaccgccctcgtcgacgcttccggtgttgctagcttgttgacaactagcgaggcctgtgttgttgacgccgaggagaagactcctccttctggtatgggcatgggtggtatgggcggtatgggcggtatgcccggtatgatgtaagaagggtgtga

SEQ ID NO: 1259 - DNA, 2163 bp, Cryptococcus neoformans
atggctttctcaggtgctcttgtaagtttttcggaagctgctggttattgactttcgctgaccccccaacagactatcaccgacttggatgactttttaacgccatctcaagcatgtatcattcctgttcgtaataacaagaagccagcggaggatgaaggtcccgtaagttacccggaaaaattcaacatgtactctatctgacgccatgatctacagaccgagattcatatcgactccaacaacaattactacgaggtatccacatatccatcggttggtcacgacgatgacattggaaattccaagaaggcgctcgagaaggcagaaattaatttgaacgactgtttggcttgcaggtatgattccttctcctccgaagtcttatgtcttgctgatgtcagtatgtagcgggtgtatcacctccactgaatcgctcttgatcactatgcagtctcagaacgagatcctcgagtttatcaaaacaaaccccacagtggtagatcctgaatccccctgccacaagccccgtttacctatcctttccatatcgcctcagaccctcgcttctttatcggctgcttatgcaacagcatcctctcgacctcccattcctctcttggtgcttttacggcgtatccgtgcattcctctcccagccggagaagggatcttggagagtatgggacaccacttttgcccggcatatgagcctgagagaatctgtggtggagttccatgagcgaaaggacaagaaggaaaagggtaaggctgcggagatgccaatgttggcgagtgcttgtcccggatgggtttgttacgcagagaaggcacagggtgatatgttgcccttgttgagcgcggcaaggagtagccaaggcattattggagctttagcaaagtcttggtatggtcacaaattgcagcacaagtgagttcatctcttgtcgtttagatggagccgcccgctgacgattcggacagacccgatgagatttatcatgttactgctatgccttgttatgacaagaagctcgaagcctcacgatccgacttttattcttccctctattctacgcgcgacgtcgactgcgttctcaccactggcgaacttgaccttctccttcaagaacttggattcgacccccacgttcccatcgccaacgagtctaccccgtcttactcggctactgaagactcgccattccctgaactcctaactcacgaaggttcaagctccggctcctatctccagaccatcattcacgatgttcaacgctctcatcccaatcctactcgaatcattactcgtgaaatccgaggttcaacagacaatattgaataccttattcaggatactatcactggccaagtcgttttcaagggtgccaaggtttatggattccgtaatcttcaaaacctggtccgaaaagtggcaaaggagacgggtatcggtcgttccggtcgaggtgcaggtgccggtaagttaagtgctgccgtcgcagcccgtcggcgaaaagccaagacggcagcaccagcagcaacttctgctacaacttctgccgaagggacagatgtagagagcattgcatctctcagtctagttagcggagaggataagaagctcgatttcgtagaggttatggcttgtcctggaggatgcgtgaacggaggtggtcagatgaagccaactgtgcctacaccctcggctccggaagcgatggaagtagatgaagaagggtaccagcgacctcttcctgacgatggtgtagccgtcgctgtcaacgggggaagtaataatgtaggtactgggacggttgcagggatggaggaagggatgcggtggtcaacgaaagaatgggttgccaaggtagaagatatctattggacaggtctacctacccctccggcgtcacccccacttactgcttcaaacgtcaatggctttgcgcctcaagtcaagacaaatggcacaaccaatggccaagtcaataacggcgtagatcgtaatcttcaatctgaccagcttgccgaggaaatcatccatgaagtctgtggggacgatgcgtctaagcgatgggattttatgaggacgaggtttagaaaggtggagagcgatgttttgtcatcaggaggggttacccacgaggcggtcaaatggtag

SEQ ID NO: 1260 - DNA, 2089 bp, Cryptococcus neoformans
atgctcagagccgtaatccgcactgcaacctctaccagacaggccaccacctacgcccctaaattcaaaccccaaataccgctcagaagaacgttcataatgtctgcccctgccgctgaggccaacttgcacaaggacgaagttaccggagaaatgatctccaagtcgtgagtcagcaaccgtgggagaaataggcgtattcagctgaaacaactatagtgagctgaagcgaaggcaaaaagaacgacagagggccgctcagaaggctgagaaggctgctgctgctcctgccgcagctcagcctaagaagcaatctaaagccgacgccgaggctgagatggacgccactgtgcgtataactcggtattgcaatgaaaattaggctgatcaagatactaggctttccacgagatgcgatacaaggagattgccaagcttcgagagaccaagcagcccaacccttaccctcacaagttcaacgtcactcacgctgtccccaagtttgtcgaggagtggggcaaggaaggcaagttggaaaagggtgaaactgcccagcttaatgagcctgtaagcgtattcttgacgcatgctgcagccccgctgacagcagatagatttccctcgctggtcgagtctacactatccgcgaatcctcttccaagttgaggttctacgacctcaaggccgacggtgttaaggttcagattatggctcaggcccaaaacgctgcttctctcgaagagtacctcgacactcacgaccggattcgacgcggtgacatcattggcgtcactggtattccctctcgaaccaagatgggagagctttccctttccatctcttctattcagctcctttccccctgtcttcacctcctgcccggtagggaaggtgttgtcgacctcgagacaagatacaggaagaggtatcttgacttgattatgaaccccagcacccgagacatctttgtcacacgttccaaggtcatcaactacatccgaaagtaccttgacgcccaaggtttcctcgaagttgagactcctatgatgtccatgattgctggcggtgccaccgccaagcccttcgtcacccatcacaacgacctcaagctcgacttgttcatgcgtatcgcccccgagctttacctcaaggagctcgtcgtcggtggtcttgaccgggtcttcgaaatcggccgtgtcttccgaaatgagcagatcgatatgacacataaccccgagttctccatctgtgaattctacatggcctacgctgacatgtacgacatcatggacatgaccgaggaattgattgagggcatggtcaagtccctcacaggtggtaccaaattgactttccaccctcaaggtaaaggtgaaggcaagaaggtttacgaggttgacttcgccaggccttggaagaggtttgacatgattggggagttggagaagcaattgaacgttaagttccccccgggagaaaccttgcacgatgacaataccaacaagttcctccgtgaactctgtgagaaggtgtgtgcttcatatttataacgttttgcaggaactcatgttatctagcacaacgttgattgcgccgagcccaagaccaactctcgtctccttgacaagctcgttggtgagtatatcgaaaatcaatgtgtcaacccttccttcattgtcggccacccccaggtcatgtcccccttggccaagtacgaccgatctcgccctggactttgtgagcgattcgaggcgttcttatgtactaaggagatttgcaatgcctacactgagttgaacgaccccttcgatcaaagagagagattcatggagcaggtcaggcagaaggagcagggtgacgaggaagcccagggtgttgacgagactttcctcgatgcgtaagttttccatctttttgtccaaatctgtattgttgctaatcttttgagtagtctcgagtacggtctcccacctacaggtggctggggtcttggtatcgaccgtcttgtcatgttcctcaccgactgctccaacatcaaggaagtccttcttttccccgctatgcgacctatcgttgccaactctgttga

SEQ ID NO: 1261 - DNA, 2159 bp, Cryptococcus neoformans
atgttattctgcacttacaagaactcgagtctccattgcatctgcacactctctccgctgtctacaatgggtaagtatttcccgaccattcccttgctccgctcaccccttgtagccgccccaaaccccttcgccggcttcggctcaaagcgtgagtaccacggccccacctttcctgcacgctctgtcgattatatctgacttaaagcttcctcaatgtacaacgaactccattttttcttcatctaacccagcccaaccctccgcttccggcacctcactgtttggaaacacttcgtctcaacctgcttctggtagcggcttattcggctcgtcatccactacaaacaactcctctgctacccctgccgcctcggggggcggcttatttggcggtggggcacagacttctggcggtttgttcggaaataacaccaccggtgccaataataacaataacaactcaaacgcggcagctgcaaacagctcgactcctgcagcgccctctggaggtagtctatttggaggatttggaactggaggatttggaacgaacaatacggcgactgggtccacgactccagcttctaaacctgcttttggtggctttggtcaatccactacaccggccgcacctcctccagctagtacagggacaagcttatttggaggcgctgctaccggcacaagcacaggtggtggcttgtttggtgctaaacctgcagaaggcactggagcacctggcgcagcgtcaacaacgggtggatttacagggtttggagcaaagcctgccggcaccacatctgcgcctgcaacaggtggactttttggttcaaagcctgcagaatctacccctgctgcttcttcttctcctgcgccctcatccggtggtggcctcttttcattcggtgctaaacccgcctccactactacacctgctgctccttcacttttcggctctgctcctgccaaggatgcttcttcatcaactcctacatctggcacaccacccaccacttctggaggcggaccctttgggggtggggggctttttggtgccaagcccgctgctcctgctacagaggctcctaaagctgacaccgccaccactgccccggctgccccaaccagtggtttgtttgggggagtaggtgcctcaaaacccgctgaagcacctaagcctgctgctggagggttctccttcggtaacttgggagccaaacctgctactccttctaccactgaagctcccaaaacgggaggcttcagctttggagcttctgccccaagcgctgataagaaggacgagatgccggctgaagcgcccaagacgggaggcttcagttttggcgcccccgctgctgccgcttccaacgaagaaaaaaagactgataagcctgcagaggctcccaaaccgggtggattcagctttggtaacattggtacatccgcaacaacggcctctggagacgataaaggcaaggcgcctgaagctcctaaggctggcgggttcagttttggcggtcttggtgcaaagacagatggtgacaaggataaggctccagctgcgcctacgcctgctgcgcctgctgctggtggcttgtttggagccaagcctgccgatgctggtcaaagcagtaccgccgccccttcagctagcggtggtctctttggtgccaatcccaacactaccgcggcggcttctaccactacacctgctgtaccaaccgcccccattgcttccgccccagccaatgtggagaagcccagcgaacccgttcccaaccttcttcgtggcaaagccttggatgatatagtggaaggatggaataaggatttagaggagcaagtgaaggagtttgagaggcaggctggtgaggtgagggagtgggataagattttggtcaggaatggtaaccaagtgggtggtaaccttgttcgtgtcttggatacaagctgacacttctaatcctgaagattacagctcttagaagacaagtgttggaggctcagcagacccaagctgctgttgatgaaccgttgaactactttgaggctcagcaaaatcagctggaaagtatgttggatgtgtatgagaaggagattgcaaaaatgtcaaacgacagcaccaggccgttggcggcgaaaatgccggctga

SEQ ID NO: 1262 - DNA, 2209 bp, Cryptococcus neoformans
atggcattcttatccacacctctaccatcgagcgactataaaatgcccaggtcaacatacactgaagcccttctcggcccagaggtgtataaaaaggttagagagacaaaggttctcgtcgttggtgctggtggtattggctgtgaactccgtgggtcagctttagcatcgcgtctttcgtttgacttggagcgcgacttgctgaacatcaaagattagtcaagaaccttgttttggttgggttcgccaatattgaaatagtatgtggcttactagcgtcctgcatttctgcctatcaactaacacgttttaagatcgaccttgataccattgacctctcaaacttgaaccgccagttcctcttccgaaaacccgacatatctaaatccaaagcccttgttgccgctgcgacagctcaccacttcaaccccaactctggcatcaacatcaacgctaggcacgggaatgtcaaggatagtgtgaatgacctcgagtggatcaaggggttcggcttggtcatgaacgcattggataatatgggtaggtttcgagtaaaggggtagtttatgttttgatgaaacaaaatgggagctgatggtcgtgagcaagatgcacgacggcatgtgaataggctttgtcaggctgctggtgtccctcttatcgagtctggtactgccggttacctcggtcaggttactcccatgatcaaggtttgtccaaaatcaccatcctcttgaaggatcaataatcacaaggctgataaccctatacaggacgtcactgaatgctttgactgtgtacccaagcctgcccccaaagcgttcccagtctgcactatccgttcaacacctagtgaacctattcactgtatcgtctgggcaaagacgtacctttttggaaagttgtttggtgaagatgatgaggacatggacactgaagagctggacaaggctaaatctagtggggagaatggtaagttgatcaaaatccctgtttttaacgacgccatatgtccatgctcagtatgacttgtcagcggaggaaattgaaaacctgaaaaaggaagccgctgccttccgacaagtaaggaaatcccttagcgaagaggacggccctcggcgagtattccacaaaattttcaacgaagatatccgccgtctcttggctatggaggatatgtggaaaaaggaaggccgtgtaaagcctgtacctcttgattgtgatgccattcttgacgagacgtttgtcaccccaccactccgtacggttcctgtgacgaaccagcaagcggacagtgacagggcggctgaaagggacaagggtaaatccgcggcgctgttgaaggaccagaaagagttgaatttgaaggagaatttggaattgttcctggacaggtaggttacttatatatttgaacattgctgattgaatagctgcaagaggctttccgctcgagcactcgcctttcccgacacacctctgtcctttgacaaggatgatgacgatactcttgactttgtacttgcgacagctaaccttcgagctaccgcttacggtatccccaataagactcgtttccaagtcaaaggcaagttgcttgtcgcataggggaaaaaaaatcaatactcatacccgctatagaaatggccggtaatatcattcccgctattgctaccaccaacgccatcatcgccggtcttatcgtgatgcaatccctcaacatcctctctcgaatccactccacctccaatggcggcccatccaccgactccagcagcatccctgtccgcaacgtgttcctccgaacagaccctaccaaacccctcggctcatttttaccccaacatccagacccaacatgcagcgtctgtcgagacgtatacatcccgttcaaagctgatgtcgggaaatgcacgttgggtgagtttgtcgaggatgcagtaaaagactggcttgggtcagcagagtttgaagggcaaggagaaggggaggatgtggaatggacagtgtttgaaggaggaaggcttttggctgatccagactttgacgataaccttggaaggactttggatgaccttggggttggacggggtaagattctgacggtgagggatgaagatacaaagtacagacctgtacacttttgtgtctgccaaccgtgggtctcaaatatatattatcgtgtttgccaaaaaggcttgatcattaa

SEQ ID NO: 1263 - DNA, 2094 bp, Cryptococcus neoformans
atgcagtacggcagccaatcgcccactctaggccgtgaacccctgctcgcgtccgcccagaatcctggcatgtcccagcgtctctctgaatcatcctttacttcatacgataaccagtctagcatgtctcaccgtgtcggcgcaaattctcccactggcgcgtcctatgcgagtttctcttctggcaacagatttggtcccacagcgcatctcaaccctggccccgttgctggtgtcagcgaggcaggtgcgttgcctgcgggctcatatgcccaggggccgatagatgacgatgatgatatggacgaccatctgcatacctttaccgccgctgagaaaaaggatcttagcacgccgtttaatatcagttcctggcgaggatgggccaacgcattgactttggctgttttggcaggcggcggtgtaatgcttttcgcgggttaccctatcatatcgttctactacggcgataatagctctagcgggtctaacacatccgggtacaacctcggtggtatcaatgccagtggacaatacccttctatcactggcttgcccagtctgatcgacccagatacacctgagtacctgtacacaagaactgggttcgatgggaatgagtggacattggtattttcggacgagtttgaaaaagatggaagaacattctttgagggtgatgatccattctggacaggtgttaatttcaattattggccaactgggtgagtttgtccatcatcattaagttcagatcaatttcagtattaacctaacactttccagtgacctggaatggtacgatccttctgccatcactacggccgatggaaacctactcattaccatcactcaagaacccatcaacgatctcaacttcaagtctggtatgctccagtcttggaacaagttttgtttcaacaaaaatgcctatattgaattctctgcttctttgcctggcacgagcggtattggtggtttctggcctggtgtctggactatgggtaacttgggacgacccgggtatggtgcttctactgaaggaatgtggccgtgagtatcctgcaggttcttcttctgattgtgactgacccttgcagatacacttacaactcttgtgacgtcggtattcttgcgaaccaaacttggctcaatggtacaggccctgaagccgcactcaccagtggttccaacggcggtcagctctctcaacttcccggtatgcgtaccccgtcatgtacgtgtgagggcgaagaccatcctggtccagccgttaccgtcggtcgatcggctcctgaaatcgatatcattgaagcgcagatcatcatttccgaaaaccgaggggaagtctcccagtcattcaaaccgcgccctttgacgactcctaccaatgggacaacacttcatcaagtcactacaagcagtacgacactgacttgacatactggaacacatacctcggtggtacataccaacaatctgtctcttctcttacccgtgtacccagagatatctattacagccagcccggaggtggtggcgaatttgccatgtttggtatggaatacgattctgctcccggtcataaggaggatggatacgtaacttggtacagcgacaacaaaaccagttggaccatgtatgcggacgcccttgctgcgaatgaaaaggccggtattggaagacgaaccattcccgaagaacctatgaccctgatcgtcaaccttggtctttctttcaacttccaacctgtcgacttcgatcatctcactttccccaactaccttcgcattgattacttccgtgtgtatcaacaatcggacagtatctctatcggatgtgaccccgatggtgagtatcctttacatttaaggaactttttatcaccagaaactgacggcatgctgtagactaccccactgcagattatatctccaaacacgccgaggtatactccaatgcgaatttgacgacttgggctcaggcaggtacgtatacgcaccccctcttctttatgctatggcttgtactaatatatctttaaaaaggtaacaccttcccaaagaatgagttgaccgggtgttaaacagatga

SEQ ID NO: 1264 - DNA, 2250 bp, Cryptococcus neoformans
atggtaaacgaaacgaggagacgatccgctgtaaaagtatgggaggaaaaagagctgcgttgtgactgggacgaagagatcagccacgcagagcagcacatctcattttcagggaacaccgtgttgattacgtacattttgggaagccccccgagactggctggggttggttggcttgcgcgtcgtgatgccatctctttcctccatgggtactccttgctccattttatctctacatctatacagtctgtcaccgccatggctaatcaaccagaaaagctcgcagacgcccagaacaaagacgctggcgagaaggtccaggagacagaagagaagactgtcgtggaagctgtcccaaccgtcgaagagggtatgtcttgttggccctactgtccaatgatgaatgtccatgatccgtcgctgacaatcgcttaccgcagaaatcctcaacaacatcgctttgatcggtcgggccgtcaccactatcgagcctcgattcactatccgtgttttgcgaaccttgacgtctttgaggaagaagttgacaaagaacgctttgaagactgtcttggacgatgctttccctaaaggatgtaaggaaatttgatcaaatggacacttctcaatcgtcaggcgtgctttggctgatactccttatttacagccaagactggtcaaactctcattgcctcgcccatcttttcctccctccccgaatctgcacccgccgctactgaacaacaatcagatgcgatggaaatcgactcttctatccccgctgctgaaggaactaccgcccccacccctaagaagaagtttgttccccccatatattctgccactggtgaccttttacctgaggggattgtgtatttgaggctgcttttgattctcgccaacctcgatgcagggcgcgttgtcgaggtatgttttttttttctattcattccaaaagagaagagaagacaagaagaagagtgttgatcagttcgttaggcaggagactttgcaatggagactgcagacctaattagctcttggaacagacggacaatggaccagcttgctggcaagatttggttctacgtcgcccgcgcttatgagcttcaaggccgtttggctgaactccaaccgtgagattcctttccatggctttgtttaccgatattgaccaattgctgttcagtcaattcatggctattcgacagaccgccgctctgaggaaagatgagacccttgaggttactgtcctcaaccttctcttgcgatcttacctcgccaactctcaatacgaacaagccgaaaagctcgtttccaagactcaatttcacggtgccgccaaccaggctcagactgtccgatggttattctacactgggcgacttcgagccattcagctcaactatgctgaagcccgaaattaccttcagacagcgatcaggagagcgccgaaagacgaagttgcccccggatttgtccagcttatccacaagtactttatcatcgttgtgttgttgactggtgtcattcccgaccgagccttgttccgcaagccagtcctcaaacaagctcttgccccttacttccaaattgttcaagccgtacgtatcggtgacgttgccggtttccaaaaagctttccaaacccatgaagccacctttttcgccgactctacccatttcctcatctctcgtttgcgacactttgtcatcaagaccgctttgcgtaccatcactcttgcttactcccgcatttcccttgccgatgtctgtatcaagctccacctcgactcggaggaggacacagaatacattgtcgccaaggcgattaaggatggagtgattgatgcgacgattgacccgcaaggtggatggatgcagagcaaggtcgcgaaagacctctatgagacggatgagccggcgaagcagttccagaagagggtgcaatactgcactcaggtgtataacgagagtgttagggtgagttttcgtctaattacattgatcattcgttccttgacgtgttgctgatgggattttctcaggcgatgcgatatcctccagacgctcaccgtaaagaactagactctgcggccgagtcgcgtgaacgagaccgagaaatcgcgcagcttattcaggagagtgacgagcctgatgacatggatgacatgggagatttgtagagaggaaagatggaaatagaacaattgcccagacagctcttttgtgtgaaggattcagcatgaattaa

SEQ ID NO: 1265 - DNA, 2118 bp, Cryptococcus neoformans
atggctggctatcttgtcagatctgcgccaagttgtcccgatctcagtccgttcccatatctcgcttatggtacacacagaattaatataattacacacacaacaattttcccacggccgcctttgtacatttcagaaaagttgaagacctttttgcatacgtacaaaaccaaaacagtcaatcatacatccacaaacaatccccattttcccaacatggacgccctcttagcagctgctggtcctcttccccagaagaaggggagaccaggcaaggtccatcagcgtactcctcatccgacctcccacaagactgtcgctcgtggagatggcaaggacaatattgattcctcgacgcaatccatcttgagcagcacacggttaccacactctttccaccgctccaacctcgctacaggatcgtcttcagcacctatccgacctgatggaactctcggaagaataggggacaagaaattgcgggcgaaaatcgcctcgcaagatgtgggcaacaagcgggccaaagttgagagggatgacgtgaacgagtggataaacaaggctatcggaggtgagagaggtgggattgaggtggatgaagatctaggggagaagacttggagagtcaaacaggaggaaattgtgaaagaagtggcaatgaacgtcagggggaaaaagtttgatttgaaaatggaggacatgggaagctacaaagtggattacactcggaacggcagacaccttgctatcgcttcatctcgcggtcatgttgctactttcgactggcaagccggtaaactccattccgaaattcacctgaaggagactgttcgggacatcaagtttctccattctgaggcgtactatgctgtggctcagaagaaatatgtctttatctacgaccaaaatggcgtggaattacagtaaagcttggaatctttgagacaggaaaggttaagaactgatggtcattgtagtaaactgaaacaacatatcgaccctacgcatatggaatttttgcctttccactacctcttgtctactgtcgtgcgtatctcgtctcaagtttttcttgagtcaagctgacatttatatcagggtaacgccggttatctcaaatatcacgacacctccaccggtgtcatgttaactcaaatccccacccgtcttggttctcctcatagcatgacccaaaaccctcattctgctatcatccacctcggtcacgccaacggtaccatgacgttatggtctcccaacatgactactcctcatgtcaaacttttggctcatcgcggacctgtcaacggtgttgctgttgatccaagtgagcacagtgctgggaggtacgttgcgacgagcgggatggacggtactgtcaagctttgggatgggcgtatgtggggtaaggaagtgcgagaatggaaaacgaggaaccaaatcacatcgcttgccttttccggcatgggtatgctcagtgttggtggaaagagcggtgtgacagtttaccaggacctttacaaaaacactcatcgcccgccatctccctacctcacccttcctcttcctagcttgacagcttctgccacccgtttctgcccctttgacgatctcctctgtgtcgggcatgaaagaggaatatcatccctcatagtacctggttccggtgaacccaactttgacagtgcagaagccgacttgttcgagactcgtacaagaaggagggaacgagaagtccgtggtgtcctcgaaaaggtccgaccggagcttatcacaatggatgccaactttttgggcaagattagtgaaggacggggtggggagactcatgaggagagggagggaaggagctttaggcagttgggaaggttggaaagattgcgccttaccggtaaggcggatgagcccgagcaagagggtgttgacgatgaggacgctgggctggaagatggtgaggctgaccctaacggcggagagaggtcaataagagaaaagaaggaaaggaggaagatgaagggcaagggcggtagtaccaagaggtacttgaggaagaaggcgaagaaaaacattgtagacaactccttggtaagtctccccaagtttttggtgcgatcataa

SEQ ID NO: 1266 - DNA, 2321 bp, Cryptococcus neoformans
atgtcttccgtcgcaggtcttcagcgcatcacgccggtgcccacatcggccgactttatcgatgtcgtcctcaacgcaaccatgaggaagacccccactgtcatccacaagaacgtaggtcgacttttgctcgaaaggcgcaaactgacaattgacgatgaaaattagttcaaaatctctcgtattaggaactgtacgtctcggtagccgtaatcacagttttagtgcaaggctgacatcgttacagtctacatgcgaaaggtcaagttcacccaggataccttcgatgagaaacttggcaagatcatctccgagttccccgtgctcgacaaccttcaccctttcctctcttctctcctcaacgttctgtacgacaagaaccattacaaactcgccttgggtcaaatcaacactgctcgacacctcatctctcaagttgccaaggattacgtccgtctcctcaagtttggtgactccctctaccgatgtaagcagttgaagaaggccgctttgggtagaatggcgactataatgaggaggcagaaggaccccttggcgtacttggagcaggttaggcagcacatttctaggttgcctgctatcgatcccaacaccaggactctcttgatctgcggttatcccaacgttggaaagtccagtttcgtcaacaaggtcaccagagccgatgtagatgttcaacctgtaagtttttctcatgattcgcggaatgacctcctgctgacagcctcggcgtagtacgctttcaccaccaaatccttgttcgtcggtcatatggactacaagtacctccgatggcaagtcattgatacccctggtgttcttgaccaccctctcgaggagatgaacaccattgaaatgcaatccatcactgctcttgcgcacctgcgaagtgctgtcctctatttcatggacctttccgaacagtgtggttacactattgaggctcaggtatgtttgggttttttccgtacgccatagcatacttattcttttgcagtgcaagctcttccagtctatcaaaccccttttccagaataagcccaccatcctcgtcattaacaagatcgacatcgtccgacttgccgacctctctgaggaaaaccgatcttatgtcgacactattcttgccgacaagagcgtcaccgttgttgaagcctctacttacaccgaagaaggtattatgaacgtccgaaacactgcctgtgatgctcttctcgcccatcgagtcgagcagaagctccagggttctaggattgaaatggtcgccaataagatccacgtcgctattcctcaaaagcgagatgatgttgagcgaaagccctttatccccgataccgttgcccacaaagtcaagtacgacaaggacgaccccagcaggcccaagactgagagggatatggagcaagagttggaccattctggcatgggtgtctactctgtcgacatgaagagtgagtgtgatgtctttacttcaatatgtttatatgtactgacccaattttgcagagagctacatgctcgcagacgactcctggaaatacgatgttatccccgaattcctcaatggcaagaacgtcgccgactttatcgaccccgatattctcgagaagctcgacgctcttgagcgcgaggaggaggcccttgaggcccaagggttctacgcttctgacgaggaggaaatggtgagtaatccatctggaatttagtcagctactatgactaactctctttctcagcttgactctgaggaggaagagttccgtgatgctgcccgacaaatccgagccaagaaggcagctatcaagaagatatctcaggagaaaaacactcttcaaaaccgtcccatcatccccaagaacaagaagaagctctatctcagcgacctcacttccaacatgcgtaaagctggtcacgatcctcgcgagctcgagaagcgagcggccaggttggccaaggagaatgacaaaattaacgctgagaggaagaaggctatggccgctcagcaggctgctgaggaggaggctggtggtatggacgttgacatggatgagggtgacgggtcttccaaaaacaagaagcgtggtgttgccgctgctgaccgtgcgcctcgtacaaagcgacagtacgccggtttggctaccaaccaacaatcagaaaaggccaacgagctccgtatgtttgctcagcgtctgcctaataggttggccaaggcctctgaaagtgacagacacgtgcccatcactaggccgaagtggatgttgtctggtaagagaaagggtggtacgactgacaggcgatag

SEQ ID NO: 1267 - DNA, 2257 bp, Cryptococcus neoformans
atggtcagtaattattatggtgaataattacggtgagcagttgtggttcaatctttgcgctggccacctgatatccacgtgcatcccacatggcggccacgtgggagatcgggacaccacacaacaccgattgccgtttatgaccgccacaccggagaacgggccggacagcgatgccacggctctgggcgttccgtcatccgttacttatttacgctgtcttttcttccgtcttctattccaactcttcttctctcccaacttctcgtactactacaacaatggacggcaagccagctactcgtgcgtacgcagctccgcgcccgcacacaatgctcacgtccagcagaataccaggcctggaagaagctccagtctctccacgcctccaaggccgacaagctcgtcttgaaggaccttttcaaagctgaccccaagcgtttctccaacctctcaaagaccttttcttcttcttctcccaacgtctctctccttctcgactactccaagaaccttgtcgatgacgaggtcctctccaccctctttgacctcgcccgtgaggccaaggtcgagactttccgtgacgagatgtttgctggcaagcacatcaacacctctgaggaccgttccgtcttgcacatcgctctccgaaacccccctgctgacaagggcggcttcaagatctctgaggccggtgttgacgaggtccacgccgtcctcgcccacatgaaggagttctccgactctgtccgctctggcgcctggaagggttacactggcaaggccattgacaccatcgtgaacattggtattggtggttccgaccttggtcctgttatggtctgcgaggccctcaagcactacagcaagagggacttgaagacccactttgtctccaacattgacggtactgacatggccgaggtcctcaaggcttgcaaccgtgagaccaccttgttcattgtcgcttccaagacctttaccacccaggagaccattaccaacgccgagagtgccaaggaatggttccttgagcaggccaaggaggtacgtactacttttacgattctgattacacaatcatacccacacaccaccaaaagtctcccgcactgacgtacacttttcccatacgtagaaagcccacgttgccaaacacttcgttgccctttccaccaacaccaagggtgtgacggagtttggtattgccgaatccaacatgttccagttctgggactgggttggtggccgatactctctttggtccgcgatcggtctctccatctgcttgtctatcggctttgacaacttccaggagttgctcaatggtgcccacgagatggacaagcacttcaagaccgccaagctcgaggataatttgcccgtcatccttgctttggttggtatctggtacaacgacttttacggttagccccttacgtcattctttatttcacgaatcacgctaaacagtcttaattaggtgcccaaactcaagccctcttgccttacgaccagtatctcaagaagtttgccgactacttccaacagggtgacatggagtccaacggtaagagcgttaccaaggacggctcccgagtcgactacgagactggacctattatctggggtcagagcggtaccaacggtcagcacgctttctaccagttgatccaccagggtaccaagctcatcccttggtaagtcgtctcgtccatagattattgcgtcgtgaactgatggtatttccagtgacttcctcgcccctgttgagactcttaatcccatctctggcggcaagcaccacgaaatcctcctctccaacttctttgctcagcccgagtaagtcattttattcccttatgttttgccaactagtctaataacccttttcttacaaagagctcttgcctttggcaagactgaggaggaagtcatcaaggagctcggccccgagcaatccaagaactctgccctcgtcaagtccaagatctttgaaggcaacaagcccaccaactctatcatgttccaaaagctcacccccggtactcttggtgccctcatcgccctctatgagcacaagatccacgttcagggtgctatctggggtatcaactcttacgaccagatgggtgtcgaactcggcaaggtcttggccaaggctatcttgaagcagttgggtagcgaaaacgatgtccagggtcacgactcttctactaccggtctcatccacttttaccagaagaacagaaaataa

SEQ ID NO: 1268 - DNA, 2105 bp, Cryptococcus neoformans
atggtcctccgctccacgctcatcgccctggtgacgcttttgtcactttcctcggcagctgcattctaccttccagggtctgccccacgcgattaccttgaaggggagaagatcgatgtttttgtgaacacgcttactcctatgctcaactctaagctcaagtcactcatatcatacgattactatgacagccgcttccacttctgttcacctgaaggaggtgctaagagacaacctgaaagccttggttcgattctctttggcgatcgaattctctcatctccttacgagattcgaatgttggagaactcaacttgtcagaagttgtgccaagctagtgtgccaaaagatgacgcggcatttatcaaccagaggatcaaggaagattacgggttgaacttgcttattgacgggctgccgagcagtgagatgaggagggatagcaagaccggagagacgttcttggatgcgcagggtttcagtttgggtaacgatgagatgaacccggacaagcctgctttgaacaaccattacgacatctacatccagtatcacatgcgtgatgagaaccactttagggtggttggcgttctcgtctatcccagcactgtcaattccatggttgccgggtcgaccgagcccgactgtttcaacaagcaaccattctacctttccgaagaaaacagcaacgagttcttctacacctattctgtatctttccttgaaagtgatatcccatggggccttcgatgggacgcttatcttcacgtctttgatcccaggatccactggttcagtttgatcaactcccttatcattgcgggcttcctcgttttcatggtcggcatgatccttttgcgatctatttcacgtgacattcaccgctacaatgccgttgacctgtctgacgaggttcaagaagactatggatggaagctcgttcacggcgaggtcttccgacttcctcagcgacccatgttgctttccgtcatggtcggcaacggtatccacctcatcatgatgtgcatcgtcactcttgtctttgcgctctttgggtttctctctccatccaaccgaggctcccttgctaccgtgctcctcatctgctggacactctttggttgtgtctctggttattcttctgcccgaacatacaccactctcggcggggaacaatggaaaactaacctcatcctcactgccgtgctctttcctaccgttgttttcaccatcatcggcatgctcaactttttcctcatcttcgcttccgcttcaggtgctgtgccattcggtaccatcctcgccgtcttgttcttatggttcctcatctctgcgcccttgtcgattgggggctacttctatggtatgaagcacggcgcctttatcaaccccgttcgagtcgcttccattccacgacaaatcccccccaagccatggtacctgtcaacttggcccgccgccattctcggaggtatccttcccttcggcgctgcatttgtggagctctacttcgttctttcctctctgttcggtaaccgagcctattacgcttttggctttctcttcctcacttttgtcatcgtcgctttaactactgccactgtcactgtcctctttgtctacttcttactctgcgcagaggagtacagatggcactggagggcgtttctgattggaggcggttcagcattttggctgttcgcttacggtgtgtggtactgggtttcgagactgtatttgaatgggttcacaagtgtggtgctctactttggctacctgtaagtttacgcccctcttataaattgcagtgtggtatactgatcaatggacaggttcttagtctcccttcttgacttccttgttggaggttcaataggttatgtggccacatacttcatgttgagaaggctctatacgtcaattagagtggattaaagaggtttaaggggagctatgtcttggcaagatcagaaagccgagcagtcaataattgtcggaatgaagggataggacgaaggaagatttgcgagcaaggagatttaccgcaaagtttacgactcaatgattactgtcccaaacttagagtaatagtcttgcaaaagtag

SEQ ID NO: 1269 - DNA, 2241 bp, Cryptococcus neoformans
atgggccgcaccaccagacgctcagcaaggccccaatcgggtacatctactccccccaacatctcctctccgccttcgcgccctttgtttcccagcatctcccttcgctcttcatcgcctactccacctacccacgaaaacctctcagcccggtcctctctcctcagcgtgctcacacgaccagcccattcagtcgcagcgacgccagattcgccagaggaagagctctcggatttgtcgacagtaagcagctatgcctcgagtgttatctctggtacacattcaaaggacatgaccgaagaggagattgcaaaggtatatgagaattatttggagaagccattcatccaaataaagactacaataaagcatagcgagtttggacattgtaacaatcccaattggcggtggaccagtcaggtaagtaccgccgagcgcgtagcacgacttgtaatgaaagattttgggttaacgatatcagtggaatcccaacgaagtgattcatgccgacgatgccagaccatcctacactgtgttactaagtacatacttgagttacatcctgcttatcattatcggtcacattcgagacttcttcggtaaaaagtttacaccagcctcatacgctcatttgatgccccagaacgtaagtccttgtctcgtttacgtggctaacatgtacagggctacgccgcgctcaactccgacttcgactctttctacacccgtcgattaaagaaacgtctcgacgactgtttcgcgcgacctaccaccggtgtccccggtcgaaccattgtctgctacgatcgttcctccaccgaccagaacaacacttttcaattgactggtactacaacgcgcgctttgaacgtttcctcttataactatctcggtttcgcctcttctacaggtggctgcgccgatgctgtcgaaatggccattaagcgatacggtgttgccagtgccggtgccagacatgaagcttctactaccgaccttcacttacaatgtgagaaactcgtcgccaagtttctcggtgttgaagcgtccatggtcgtttcgatgggttatgccaccaactcgactacgatccctgcgttggttggtaaaggctgtcttgtgatttccgacgaattcaaccacgcttctatccgtgccggtgtgagaatgagtggggcttcgatgagatggtacaagcacaacaatatggatgtgcttgagaacttgttgagggaagtcatttcacaaggccaacccaggactcacaggccgtggaagaagatattggttattgtcgaaggattattctcaatggagggtagtttggttgatcttcccagattgattgagctcaagaagcgttacaaggtgagtcattactgttcgtatgagatcattcacgctgacatatgtcagttctatttgtatgtcgatgaagctcactctatcggtgcgatgggccccaacggtcgaggtgtttgtgactatttcggtatcgacccccgtgaagtcgacgtcttgatgggtaccgtcacaaaatcgttcggtgctgccggtggttacatcgcgggtagcaaggaactcgtcgaccgtctccgtgtccgatcacacgctaccgcgtacgctgaatccgtatctcctgccgttctcacccagatcatcgcttctatgggttctatcatgggcattgcccctcccctggctgcccctcccacagaggacgacaagtccgagacatggtccatcgcatcccgtccagcagtgtacggccccgccccatcttccctcctccccccttggctcaccctccctcctcacttactcaacggaaccgagggccgcgaacgtctccgccgtatcgctttcaactcccggtacctcgcttctggtcttcgcaaactgggcttcatcgtctacggtaatcgggattcacccatcattcctcttcttatcttccagcccggtaagatgggttacttttctcgtatgatgctcgagcgtatcggccccgacaagacacccatcgtcgtcgtggtcgtggcctatcccgcgaccccactcatcacttccagagtcagattctgtctctcggcgagtcacacgaaaaatgatatggacatggtcctcagggcatgtgatgaagttggagatgtgttgaatttgaaatataataagcaggaaatgagtgtggaggaagtcattgccaatgctgaggagctggttgctgcttctcatgtttaa

SEQ ID NO: 1270 - DNA, 2661 bp, Cryptococcus neoformans
atgtctttttattcgaaacgacgtaatggtgtgaatatgtggtgttgaccagttttccagaacggacgaccgttcattattgtacggtaggtcaatacaggattttgaaggcttgagaatagtggaaagcctagaagaggatgtagagtggtcctgatgcttgagtgatacagggaacaaggaaggaaagttaggacgcacggcctggaagctatcagggttagtcatcccaattcattaaagcttttgctcactggccagtacgctgatccatctttgattatcacagagccacattcttgctgcccgatcaggtatgatctatatatgaataagtcttcccaccaaaccgttgacttttttcgtctatttctttagtaaccaacatcattaaaacctctcttggtcctcgtggtttggacaagatcctcatttccccagatggagagataactgtcaccaatgacggtgcgaccattttgggacagatggaagtggaacaccagattgcaaaactcctggtagaggtgtcgaagagtcaagatgatgagattggagacggtacaacaggtgttgttggtaagtcttccgggagcgctacaacagcgagaaaacagcaagacgctgacaataaaattatctagtacttgctggtgcacttctttcttctgcgctgtctctccttgacagaggtatacatcctatccgaattgccgatggttatgagaaggcttgtgaaatcgctgtcgccgagttggaccgcgttgcggacactgtgagtttcacatcgtgtgatttaatcgtacgatatcataagctgatgaacccaatttctagattgaatttagcaaggatgatgtttcaaatttgatgaagaccgccaagacctctttgggtagcaagatgtatgtctccataatccggacattcaaggctgtcaatgcggccagctaaccaaacttctgaatattccatagtgtttctatcgcgcacgacaaattcgcttccatcgctgttgaagcggtcctctctgttgctgacctcgagcgccgcgatgtcgattttgagctcatcaaggtcgacggcagggaacggaggttctctcgaagacacttccctcgtcaagggtgtcgtcatcgacaaggacatgtcccatccccaaatgccttctgttgttcgagacgccaagattgctattttgacttgtccctttgaacctcctaggccaaagacgaagcacaagttggacattgagagcgtggaggagtacaaaaagttgagagagtacgagaaggagaagtttttggacatgatcaagaagtgagacatctatctatatttttcatcatgctatagaaaattactaacgcgctgggaccagggtgaaggacactggcgccaatttggttatctgtcaatggggtttcgatgacgaggcgaaccacttgcttatgcaaaatgagctccctgccgttcgatgggttggtggtcccgaaaatgagggtaaagccaaaaaatcgcttgggatcccctcggcccctacccccccatgtggcaatattccgatttcaaaccttgattgacaatttatactagcttatcgccattgccaccaacggccgaattgtcccccgattcgaagaccttaccgccgacaagctcggtcacgccggtgtcgtccgagaacttacctttggtaccactagggataagatgcttgttatcgaggagtgtgccaactctagggcggtgactgtgtttgtcaggggtagtaacaagatggtccgtctttttcaatgacgtgtggaatcgcgacattgatgctgaattataatggacagatcattgacgaggctaagcgagcattgcacgatgccatctgtgttgctcgtaaccttgtgagagataaccgggtggtctacggtggtggtgctgccgagatttgtgcttctgttgccgtctccaagcgggccgacgaggtaagaacttttttcatttgcctctatgtaacgaattatattgatctaatcttcatagatccccacaattgagcaatacgctatgcgcgcattcgccaacgctctcgatgccattcctcttgcgctcgccgaaaactctggtttgtcccctatcgacactttggccgacgtgaagagtagacaggtgacagaaggtaacccaagactgggtattgactgtttgggcagggcagaaaatggtgagttctgtgtttctggcttgtgctgtggttttgtatgtgtatgccaccaagtttcgacgaggagaaacaacaaagatttgttttttggataaaatgttaccccgcatgggaaaagcatagatgttatgcggcatctgcgcgcgatgcgcaatcatttggcgatgtcatcccagtcagctagaggatcactagcacccatgggaccactggcgataaaagtgcttttaggaggataaaaaaaagaattaaagcatcaaactgacatcgtgaaaattttcagacatgaaaaagcaacacgtctacgatcctctaatctcaaagaggcagcagttcttgctcgcgacccaagtggtaaggatgatcttgcgagtggacgatgtgatagatgcctctgcatttggggacgagtaggaagtgatacagacacgatgtatgcatga

SEQ ID NO: 1271 - DNA, 2278 bp, Cryptococcus neoformans
atgtacctcgaaatcttcctcgcattgcagaagttacgggtgctgagaatgaagttgtgcgtgaattctgactctcggacgcttctgtaacttcattctgtaacttcactatcctcgtatctgcacataaaaagaaggtggaaagtggattacaacatgctttccaagagcaaccagccttccgacgcgctccttgagtgagttcgcttcacttctttcggaccatttgctaattcacggaaatgacagcgccgacttctccttttcccaaccccctttttcgacactcattgactctcgagtcctcgtggcccttgccgaccaaaaatttgcgcatccgactttagtacaggctaaggccatccctcttttgctcgaaggaaaagatgttcttgcccgagctaggacaggaagcggtaagactgctgcttatatagtcccagcagtacagaaaatcttggaggccaaggctgtaagttctgtgtgtcattagacttgaaatatgcttacttaatcataggatctttcccctgcctctgcggagtatcaagctactcgagcgatcattcttgtgcccaccaaggaattggccttgcaagtctcttctttcaccaagaacgttactaagtactgcgatggtcttgtgcaatgcgtagatgttgctgcaggtggggctagtatccaacggtgcgtgcgaagttgataatgaaggagccgctctgattcgttatttgcagagtgcttctcaatgacaagcccgacatcgtcatctccactcctaccaaacttctgtcccttttgcagtctaaatccctttctctctcgcaactttcgttccttgctatcgatgaggcggatcttttgctttcgtacggtttcaaagacgatcttactaggattatggaccctacctctggatggatccctaagcttggtgtgcaaggctgcctcatgagtgctactttgagtgacgacgtcgaaggcatcaagggtcttgtccttcgtaaccccgtaaataatactcctcaaagcttagtattatgctgatcagacatcaggccattctcaccctttctgaacccgcctccgcctcgtctctcctcagtcaacactacacccacacctccgaacgagacaagtttctccttatttacgtccttcttaagctcaaacttattcgcggtaaatcaattatcttcgtcaacgacgtcgaacgtggttatcgtgtcaaactcttcctcgaacaattcggtgtcaagtgttgtgttgtcaacagtgaattgcccttggcgagtagatatcacgtggtcgaggagttcaacaggggtgtgtatgatgtcgttgtggcaactgatgagggtgctggagccgacgctgaggaagaggaagatgtcaagcaggaagaaagcgaatcagagggggaggaagatgaagatgacgacaaggaagcggaggataaagagaaggaggccaaggaagaagcaaaacccgcccctggtccttccaaacgccgggcaacctctcctccttccaagcccaacaaacgagcccggcgcgcagaccctacctcttcgctcgctcgtggcatcgactttacctccgcatcttccgtcatcaactttgaccttcccctcacctctacctcctacatgcaccgagtcggtcgtactgcacgagctggtcaatcaggcctcgccctttcgttcgtcgtccctagagaaaattggggtaaagacaaggctgtatcaatcaagtcagcagagaaggatgagaaggtgtttgagaggatcaaggagagggtgaaaaaggaaagcgacagtgagatcaaggaatgggattggaaaggcaggaagggcgagattgaaggattcagatatcgaatggaggatgcgttgaaagctgtcactggcaagagggtcgccgaagcgagaagagaagaagtcaggcgagagttgttgaacagcgaaaaactcaaatctcactttgctgccaatcctctcgatttgtcttacctccgacatgatgctcctcttcatcccgcccgacaacaaacccatctcaaacatgtccccaactatcttatgccgaagattgcggccctcccaacaggtggggatgtaactgatcatgcaggcgttggattctctagacgaggaaggggaggtcatagagggcgaggaggcaggggatcaaagagtggtaggggcaagaaggttgatcccttgaaattcaagtagtggttctcgtgttcttcaaaactcgtcatgtatgcatatga

SEQ ID NO: 1272 - DNA, 2547 bp, Cryptococcus neoformans
atggggaaaattagtacgtttcaaatatcaatttccttattttttcgacttccgcctatcttatttttgcggggaccaccgccgccaaatttgtatgaaaaataaggaaataattgatatttgaaacgtactattataaaaattatgtagcatcatatttgttgttgttgatctgtgacacgtgtgaggcttttaaaaacattacgtaatatagtaaaagttcgtcagctttcagcaatgttctcgagagttctggtggattcggcttcgtcgcatcttgtggcgtgacgtagtactttctcacgacttccccgatcttcttccagtttctgttacttacttgcctcctcccatatactatatataagccactcccgctatcttactattcccacttatccagaattccattcaaacccactctatcatataaaactacccactcgcaactcaacagcacatatacacacatccactaattcaacatgacaaaagcaatcggtatcgacttgggcaccacctactcttgtgttgccgtctggcaaaacgaccgggtagaaattattggtaagtaaaatacgtacttttactggcttcgtcagttgttgacctttgcgccagccaacgatcagggcaatcgaacaacaccatcatatgttgctttcaatgactctgagcgacttatcggtgatgccgcgaagaatcaggttgcaatgaatccttacaacactgttttcgatgctaagcggttgatcggccgtaagtttaacgatgccgaagttcaggccgacatgaagcattggcctttcaaggtcgtcgaaaagggaggcaagcctgtcatcaaggtggagtacaagggagaagagaaaacttttgtaagttgtcacatttgtttattggtggaagtaaatgaagttgacctgcccttaatcagactcctgaggagatttcctccatggttctcactaaaatgaaggagactgctgaggcttatctcggtggcactgtctctaaagccgtggttaccgtccccgcctacttcaacgactctcagcgtcaggctactaaggacgccggtgccattgccggtcttgatgtcctccgtattatcaacgagcctactgccgctgctatcgcgtacggtcttgacaagaagtctgagggcgagaagaatgttttgatcttcgacctcggtggtggtactttcgatgtctctctcttgactattgaggagggtatcttcgaggtcaaggctaccgctggtgacactcaccttggtggtgaggactttgacaaccgacttgtcaaccactttgtccaggagttcaagaggaagaacaagaagggtaagttgcctctgatgttcaatttgttgacgaaccaacactaatctgttatatagacctttcttctaacgcccgagctctccgacgacttcgaaccgcctgtgagcgagctaagcgaactctttcttccgctgctcagaccacgattgagatcgactctctcttcgatggtatcgacttctacacttccatcactcgtgcccgattcgaagagctctgtcaggacctcttccgatccaccatggaccccgtcgagaaggttctccgagactccaagattgacaagtcctccgttaacgagattgtccttgtcggtggttccacccgtatccccaagatccagaagcttgtttccgacatgttctctggtcgagagcccaacaggtccatcaaccctgacgaggccgttgcctacggtgccgccgtccaggctgctatcctcactggtgacacttctgaggccactcaggacttgctcttgctcgatgttgcccctctttccatgggtatcgagactgccggtggtatcatgacccccttgatcaagaggaacaccactgtccccaccaagaagtctgaggtcttctctacctactctgacaaccagcctggtgtcttgatccaggtctttgagggtgagcgagccaagactaaggattgcaacttgctcggcaagtttgaattatccggtattcctccggccccccgaggtgtccctcaaatcgaagtgtcctttgacattgacgccaacggcatcctgaatgtaaacgccgccgacaaatctaccggtaagaccagcaagatcaccatcaccaatgacaagggtagactgtccaaagaggaaattgaacgggtaagtctccgaacatgtcagcattgtcgcttgcttcactttgctaactccgctgaacagatgcttgctgaagctgagagattcaaggccgaagatgaggccgctgcagctactgttcaagccaagaatggtcttgaatcttatgcctactctcttaagacaaccttgtctgacaacaaggacaagttcgactccgccgatcacgaaacgctctcgaagaaggtcgaggaggtgattaacgctctcgacactatgcagtctgcttctaaagaagagttcgagagtttgcagaaggagctggagggtattgccaacccaatcatgaccgtgagtgttccgaatttctga

SEQ ID NO: 1273 - DNA, 2267 bp, Cryptococcus neoformans
atgttcattagaagtatcttggcccgcgttcttcgactttctcattctttttttcacctgaaaaactcttttttacttataaaaatggccccctccgcatccaaacagaagcgactagcagaaaaggccgccaaggccgcgagcaagactggctcctccaagtcctccgtcactggtgccagcacccccctcacgagcgtttccgacgaccctactgatgccgcggagcagatgaagaagctcaacttggctaccgacaggagtgctgtatgtcgaatgctgttttctgggtgtaaaaatggtgctaataatttaatagagtggtgttttggtttccgatcccaagggacgagacatcaagatcgatcagtatatgctttctttccacggtcgactgttgattgagggtgcggagattgctcttaactacggccagcggtaagtcaatttcctttcgggtatttaatagcgctgaggcatcgtaggtacggtcttttaggtgagaacggttccggaaagtccactttcctccaatccattgccgaccgagacattgagattcccgaccacatcgacatctatctcgtctcaggcgccgtcgacccttccgatgttaatgccctcgattacattgtttcctccgctagagagaaggtcgagaggctcgagaagcttgcagaggacatgtctaccgccgacgacgttgacgagcttgctctcgacgccatctatgaggagctcgaggaaatggacccttcgacgttcgaggccaaggccggtgcaatcttgaacggtctcggtttctctcaacaaatgatggccaagcctaccaaggacatgtctggtggttggcgaatgcgggtcgctcttgcccgtgctttgttcattaagcctcacgtcttgttgttggacgaacctacgtcccacttggatttgggtgctgtcgtctggctcgaagcgtacctttccacttacaaccacatcttgattttgacctcccactctgccgactttatggacactgtctgtaccaacatcatggacttgaccaccaagaagaagcttgtctactacggtggtaactacaccacttacgttcgaaccaagagcgaaaacgaggttaaccagatgaaggcttacgccaagcaacaggaggaaatcgcacacattaagagtgagtcgaattttgtgtatatcggtattttactaataatgtggcagagtttattgctagtgctggtacttatgccaacttggtcaagcaggccaagtccaagcaaaagattatcgacaagatggaggctgctggtttgattgagaaggtcgagcagcctcgtcagcttagattcaactttgaggacgtcaagaagcttcctcctcctatcatcgccttctcagacgttgctttctcttactctggtaagaaggaggactacttgtatcaggatttgtctttcggtatcgacatggactctagaatcgccattgtcggtgacaatggtaccggtaaatccacccttcttaatcttatcaccggcgccctccaacctgtcgagggtaccatcaacaagcacactcaactcaagctcgccaagtactctcagcactctgccgatcaactcccttacgacaagtctcccgtcgagcacattgcttctctctacagcgaaaagttccccgacaaggacattcagttctggaggcagcagattggtcgattcggtatcactggtgctcaccagaccagccccatcaaccagttgtctgatggtttgaggaaccgagtagtgtttgctatccttgccatggagcacccccacatcatcttgctcgatgagcctactaaccatttggatatggtgagtttcccttggtcagctctttagattatttactaatcatttcaaaggcttctattgacgctctcgccgctgctatcaaggagttcgagggcggtgttgtgatcgtctcccacgacttccgtacgcttctgcccttttcgtataccagtttgatgctaacttcctatctgcaggacttatctctcaagttgccgaagatctttgggaagtcaaagacaagaaggtcatcaaccttaccaagcaggacatctccatcgttgactacaagaaggctcttgccaagcgaagtacgtcccattttctatgcagcctaatcagccatcgattaacaataccctcacaggtcaagcccagattgagaaggctagactcatttccaagagtgctaccaagggtgttgcgtaa

SEQ ID NO: 1274 - DNA, 2440 bp, Cryptococcus neoformans
atgggcctgcggactgtcaaaggagctcgaggtgcggagaacttacccttccaggtggagcgtctaagagcgagggctgtggggtgcattgtgggcgtgaagcgtgtgggaggacaggcgcaagtaaccaagtttttgagtcttttcactgcaagaggagaacgctacattgctgctgctgctgtgatgagcggcgctcggcgcgggatgatgttggcggaaagaatgacgtggaattactatcaccagacgcgctctcgtgtcttcttctgccacttctttccatcgattcttccacaactgcatctgttcccatacagcaccaaaattcacaacaagactatcaaaatggctatgccaggaggaatgcccatggttgtaatgagtaagtccataggcctgtacaaggccgctgcttactgttcacagacaccggcccagagcgccagtcggggagaaaagctcaaaccgccaacattgtcgctgccaaggtatgtcacttgtgttattcagctgcagcgatgctaacccattaaagaccgttgcagatgttatcagaacatgtctgggtcctaaagcgatgctcaagatgattctcgaccctatgggtggtatcctgtgagctccgcgacataccctcaaagctctgaccctgctgacattgccagtttgacaaatgacggtcatgcaatcttgagggagatcgatgttgctcatccagctgcaaagtccatgatcgaactgtcaagaacacaagatgaagaagttggtgatggaaccaccagtgttattattcttggtaagcttgcagtcatttgcatgtgattcggcgctaagactaaatagctggtgagatccttgcctattctttaccccttcttgagcgccatatccaccctgttgtcatcattcgagctttcaaagccgccctcaatgatgctctcgaaactattcagcgtgtttctatccctgtcgatatcacctctgagaccgagatgctcgctttgatcaagacgtctatcggtacaaaattctcttcccgatggtctgatttgatgtgcaagcttgctctggaggctgttaggaccgttgctgttaccgccgaggctgagaatggtttggtgggtagcggcgaaggtggggataaggtgaacatcaagaccgtcgacctgaagcgttatgcccgagttgagaaggtccccggtggtgaaatcgaggactccagagtactttctggtgtaatgatcaacaaggatgtcactcaccccaagatgcgacgacgaatcgataacccccgtgtgattttgctcgactgccctctggagtacaagaagggcgaaagtcaaaccaacattgagatctccaaggaagaggactggaacagagtcttgcaaatcgaggaagagcagatcaaggctatgtgtggcaagattatagagttcaaacctgatctcgtgttcacagaaaagggtgtttcaggcaagtcgtatctcttcatttcctctacctatacctatacactaactggctcattccatagatctcgcccaacattatcttctcaaagccaacatcactgcccttcgacgggttcgcaaatcggacaacaaccgtatcgctcgagcagtgggagctaccattgtcaaccgtgtggaagacctgcgcgagtctgacgtcggtacgcaatgtggtttgttccacatcgagaagatgggagacgagtaagccatctccttctccactgagtcgatgctaagatctcaaaaggtactttaccttcctcgatcaatgccaaaatcctaaagcttgtactattctcctccgtggtccttccaaggatatcctcaacgaaatcgaccgtaaccttgcagacgcgatgtccgttgcccgcaatgtcgtcttcaaccctaccctcacccctggaggtggtgccattgaaatggccatctcagtgtctctgggagaaaaggcaaagcttttgcctggagttgctggcgccccttacaaggccatcgctgacgcgttggaggtcattcctcggacattggtgcaaaactgtggtggtaatgcgatcagaacgctgacagagctgcgagtaagtgtttattttatttttgctcttattttcgttaggatgtgatcactgacagcacacttaggccaaacatgcagagggacaacacctgtatggtgtcgatggcgagactggaaaggtgacgaacatgaaggagtacgggcttcttgaatctgcgagcgtgaagatccaaacattgaagacggcaattgaggttagtaccgtctgattcatgtagttggtggcgccaatagctaaacttgatatgcagtctgccacgctccttctgcgagtcgatgatatcgtcagcgcgaggagacctggagaggaaggtggtgccggtgcaggagtgcagacaatgggtga

SEQ ID NO: 1275 - DNA, 2341 bp, Cryptococcus neoformans
  misc_feature (1722)..(1722): n=g, a, t or c
atgggcaagacagaagttgcacccggcgtccaccacgttcaccctctccccgactccgtccccgagtctgaggacctcttcgctccccctcctcgtatgcagggcaaggaaggccgcccgaagcctcaccttggtcccaattacgaggcctacgtcaatgaatgggccaagactgttggtcccaataatgatgagtggtgggccgcaaaggccagggagactcttgattggtatgaggacttcaagactgtcagggccggtggctttgagcacggagacattcagtggttgtgagtgaaatgtgggaacgctctgggtgtggatgatttgactgatgactttgcagccccgaaggtaccttgaacgctgcttacaactgtcttgaccgacacttctacaagaacccgaaaaagaccgccatcatctacgaggccgacgagccctctgagtcccgtgagatttcttacgaggagctcatgcaggagacttgccgagttgccaatgtcctcaagagctacggtgtcaagaagggtgacgctgtgtccatctagtgagttgcagccaggaaaatggattctttgaaaatcgagtctcagtagctgacaggctacattaagtcttcccatgacttggcaagccgctgctgcgttccttgcttgtgccaggatcggtgccattcactctgctgtctttgccggttttagcgccgagagtttgagggatagagtcaatgactgtgaatgcaaggttttgatcaccaccgagtaggtcgaatttttgaacaaatttgtagtatataaagctaatgatgttttagcgagggtcgacgaggtggtaagagtattgctactaagcaaagtaggtcgatctgttttattgtagaaattccaacttacacctctcagtcgtcgatgccgctctccagcagtgcccccttgttgagaacgttctcgtccttcgacgaaccggcaacaaggtccccatgactgaaggtcgtgacaaatggtgggacgaagagtgtgccaagatgcccgcttactgcccttgcgagaggatggcttccgaggaccctcttttcatcctctacgtgaattgtttcctagcttccaatgcagttttaggactaacgcttcgtagacctctggttccaccggtaagcccaagggtgtcgtccactgcaccggtggttacctcctcggcgccgcccttaccctcaagtacgtctttgacgctcacccggatgaccgattcgcctgtatggccgatatcggatggattaccggacatagttacattatctacggccctctcgccaacggcatcaccaccgccgtctttgaatccactcccgtctaccccacaccatccagatactgggactttgtcgacaaatggaaggctactcagctctacactgcgcctactgcgatccgattgttaagacgtatgggcgaggaccacgtcaagaaccacgatctcagctctctccgagtgttgggctctgttggtgagcccatcaaccccgaggcttggcattggtacaatgactttgcgggcaagaaccaatgtgccattgttgatacttactggatgaccgaaactggttccatctctattgctcctctccctggagccatctccaccaagcctggttccgccaccttccccttcttcggtatggatgttgacatcattgaccctcaaactggtcaggtcttgganggtaacgatgtggagggtgttctcgttgccaggaagccatggcctagtattgccaggaccgtctacagggaccacaagaggtaccttgagacttacatgaagccttaccccggctacttcttctttggtgacggtgctgcccgagactatgacggttacatgtggatcaagggacgagttgatgatgttatcaacgtgtctggccaccgactctccaccgccgaggttgagtctgcccttatcctccacaagggtgtcgccgagactgccgttgttggatgcgctgatgaccttaccggtcaggctgtgtacgctttcgttacgatgaagcccgagttcgatttaaagagtaccaaggaggcggatcttagcaaggagttggctatccaggttaggaaagttattggtcctttcgctgctcccaagaagattgtaagtgtcgccatccagtcgaaaaggttttttactgatgactattacagtaccttgtttccgatctccccaagacccgatcagggaaaatcatgcgtcgaattctccgaaagattgtcgctggcgagggtgaccaactgggagatctttcttccattgctgacccccaaattgtcgacgaaggtga

SEQ ID NO: 1276 - DNA, 2297 bp, Cryptococcus neoformans
atgggatcagatgttgacttaggctcggaagacgatcaaagtctggagtctgatgatgaggacgagttttcagggagcgaggacgacgtggatgtcactgctgcctttgatgacttcagctctgacgaggaaaaagacgagcccgagcgtagaaagcgcaagaagaaggaggaagaagccgagtatgagctggctggacgatcaagatgggctgctaagccggaggagcctgaggaagattctgttgaagtcggtcgtttgcctatcaaacttcctactggtgaaatccagatggtccaaggttcaacccgtatcgctgtccctcagcccaagaaaccagtaactaaggctgaaagtgaggacgaagaaacagatgaggttgatgaagaagaggaaaacagtgatgatggggcacaggcaatgaggatggcaagtcagaaagggaaatttggaaggatgggtattgcagagattgtaggcaggaagggttggaagaatgttcagagactggaagctgcaaaggagcaagtggcgcaactgggttctgaaatcctggcggggggagaacttgttgacatcgtatgtccatgatgtggagtatagggacgatatctaatgagaccttagggccccgtccttacaaggctgtcttccttcggcctccccactgtcccagcgcttgaagaagggcaaccacctctttccgtcccagcctctattcgaggtctagttttcctctctcaactggccgtttacaaagatcttattccaggctataggattcgtgagctgacagcacttgaagaagccgagaaggttagggatgaagtgaaaagattgagagaaggagaaaagatgttggtgaaaagctacaagggttatttgaagatgctcgaggcagagatcaagagtaagtcttcaatggttgcatgttggcaggtattaatggtcttttaaaaggcaaaacgaatctcgctactatcagtttaaggtgtatgtgcgagctcttgacatctgtcacccacttcaactttagcgagaacattatgggtgtccttgtcggtcgactcggcaggcgtagctgggacggtgactctgatctggtgcttcaaactttcattcgtgtgttccgcgatgacatctcggggcagcattctcaaacgcttgtccggttgattgcgcgaatgatcaaggaacgccatttccaagttcatcctaatgttcttttctgtcttcttcaccttcgtctcaaggatgaacttgaccagatgcggcgaggtaagaacgcaaagggcagcaacaaggaaaagggagggaaggacgagatcaagggaaagaagttcaaatcagagaaaaggaagaagtgggcgacgaagaatcagaaaaaacgggaaagggagatgaaggaagttcagaaggaaatggcagaagcagaggctgaggttgacaaggaagaaagggcccgagtacagactgaaactctcaaaaacctctttgtcttgtatttctccatcctcaagaacccaaaacgtacacctcttttgccggcagctttggagggtatctcaacttactcccatttcatcaacattgacttcttccgcgacctgcttgttgttcttcgcaagatcatcgcagatcagcagttatccgatgccactaacaagcaagaagaagagagcgaagatgaatcttcccagcaattggatgtcgttggcgccagccagcgtatccgaaacaggttactagctatcgctactgcctttgaccttctttcaggtcagggagaggcgctcaacattgacctttccgacttcatcaaccagcttttctctcttcttcgaccgttgtgccttgacactggtattgaggaccctcctttccttccagcttccacaaaatcctcttctggtgctgtccacaccctatccacgtccgcactcctcttccgatgcttaaatgcttcgttcttctctcgtcactctcgatcgccagctaatcgatctgcggcgtttgccaagagacttactgagtgtgctctgcatttccctccccgtaccggcaagcaagcgatagcatttgctcgatcccttctcagcaaggaacctaagatcgagggcttgttagatactgaggagaggatggcggatggagcgtacagaccagagttagatgatcctcaattggtcaatcctttcacaacaagttggtgggaggctggtgttttgggtagcaagcattgggaccgagaggttagacttgagatgagcaagttgagagatggcaaggttgtctag

SEQ ID NO: 1277 - DNA, 2350 bp, Cryptococcus neoformans
atggtcgcaatcccacgactcgcaaggctctcagtcccagcatgggctcttagtgcaagaggcaggttctacgcaacagtctccaccccccagacgctcgtcgaaaagatcgtccaaaagtacgcggtcggtctctcagagggtgtcaaagttcgtgccggggactatgtcatgatcaagccagagcatgtgtacgtatatcttttcaaaggttctgctagggaatgtgctgatggcgtacttgaaggatgacccatgacaacactggtcctgtcatttccaagtttctctctctctcctgttccaagctcgacaaccctagacaacccgtttttgcccttgatcacgacgtgcaaaaccagtctgaaaccaaccagaagaagtacaagaagattcaggcttttgccaaggagcatggtgttgacttttaccctgctggtcgaggtattggtcaccagatcatcgtcgaggagggttacgcctggccagggaagatggtggttgcaagtgatagtcattctaaccactacggtggtgtcggatgtttgggtactgcgattgtcagaactgatgccgcgtgagttcaaagcagtatcctccccatagttaccaagctaaaattatgtagtggcatctgggctacaggcaagttctggtggcaaatccctcgaattgtctccgtttctctcgacggccgattgtctcctggtgtgactggcaaggacgttatcgttgctctcgctggtcttttcaacaaggacgaagtcctcaatgccgctatcgaatttaccggttctggtgtcgagcacttgtccattgacgaacgtctcactattgccaacatgactaccgaatggggagctgttgctggtgtattccctgttgacgacaagctcaaagagtggtaccaaggcatcctccgaaaggcggaattacggaagttcatcagccccaccgtcccttccacagtcggcgctaaggtccaccctcgtctcaatgccgcccgtctcgacgacgctatgaccaacagggtcgttgctgaccctggagcccactatgcagctcgcctttccctcgacctttccactctcgttcctcatgtctcaggtcccaactctgttaaggttgccaccgctctccctaagcttctcgaccctcccatccctatcaacaaggcgtatcttgtctcatgtaccaactctcgagcgtctgacattgcctctgccgctcaagttctgcgaggaaagaaggttgctcctggcgttgaattttacatcgccgccgcctctagccgagtccaggaagatgccgaagctgccggtgattggcagactttgattgacgcaggtgccaaaactctccctgcaggttgcggcccttgtatcggtcttggtgtcggtctccttgagaagggtgaagtgggtatcagtgccaccaacagaaactataaaggtcgtatgggtagccccgatgctatcgcctaccttgcctcccctgctgtcgtcgctgcctctgctgccaagggtgtcatttgcggccccgagtctatggacctcagccaacttccccagtatgaacagccaaagttttctatcatcaaggaaggtgctgctggtgaggagaagcctgttgaggttgacgaggcttcccttgagcccttgctcgaaggtttccctgcctactttgagggtccacttctttttgcccctcaagataacttgacaaccgatggaatgtatcctggaaagtacacataccaggatgacatcacccctgagcgacaagccgaagttgtcatgggtgagcgagatgttactcgtgtttttcttttgaagagagctgactgtttcgtttagaaaactatgaccccacttttgctgctaccgcccgcgaactccgtaccgccctccccactgcttcttccccctccactcttcccggcgccatccttctttctggttacaactttggtaccggttcatcccgtgaacaagctgctactgccatcaagaacgccggtatccctctcgttatctgcggttctttcggtgacattttcaagagaaactccatcaacaacggtctaattcttatcgaatctcctagcttgatcaaggacatgacggagagattcgccaaggacggagtaaggaacaagggtggcaaggatggcaagttgactgtcgtccctgagggctggagaatcaaggtggactctcaaagagggctggtgaccgttaacatgggtgaggaagaggagaagacctatcctgcggccaaggttggtaggagtgtgcaagaattatgggtcaacggcggtttggagggtttcattagggcttcattatag

SEQ ID NO: 1278 - DNA, 2284 bp, Cryptococcus neoformans
atgaacaatgatgaacgtctcgagtatctctttcgactttgctacacatatccgccggtaacatgccacctaaaaagcaccaacaaaagaacgaaccaaaacaggttagtcattttcacagccatgaacaccactgacatcttgtttttacagaaggcggacaatgtggacgaagcccctctacaagccgtagtcctcgcagactcctacaaccgtcgctttgaggttctttgtacagaccaacctcgagttcttttgccgttatgttcaacaccacttttggcttggactttggagagcttgagtttgagtaaggtcaaacaagtgttcatcttctgtggtgtgcatgcggataagattaggacttttgtcgagtcttcgccttatagagcgatgctggacattcattgcttgtcttctcaaacagctcgatcagcaggtgatgctttgcgtgagctggatgacatgcacgtaagtcgtctgtgtattattgttattttccacttccaaagtgctaattggagtaggtcttgaatcctgataatccatttatcctcgtacattctcctcttatctccaactacgacctctccaaaattatagatgcccacaggaagcgccgtgacgtcgacaaaaactttatcatgaccatgggcgtcagtcgtggcggtcgtcctcaccccgagtcacccatcatgctcgtccacccaccttcttccagattattgcactatgctccccacccactttcacctactcaaccacgtatcagcttcccctcatctctcttcctcgatccattcccagctaccatcgacacttatgaaatatggtctggtacttcgccgtcatcgtccaaccaagggggataccgcgaccttggtgttgacatttgcgaggccgatgtacctgctctttgtactgaaaactttgactaccatgacctccgacgacattttgtcaatggtgtccttacatccgagcttctcggtaagaagattgctgttcatgttgtaggccaagaggaggaaagtctggatgctcgagctggtggcggcagatacgtggagagtgtacgagatacaagaacctttggtgaagtcactagggatgttttaaggagatgggcattcccgctcgctcctgatttgaacgaaccgggaggctcgcaatatgaattgagagctggaaatgtgtatattgccaaggaatcagtcgttctttcccgaacaacgacattgagtggtcctcttcttattggtcctagatcggccctcgcccacaacacacttgtccgtcaatcgactctgggagcagactgtaaaattggggcaggaagtataatcaggaagagctatgttttcgacgatgtcaagatcggggaaggatgtgtagtggaggagtgtatgattggcgaaggtgtcgtcatcggacacggttgcaagattggcaagggcgtattgctcggaaacggtgttaggcttggcaagggggtagttgttccggacttctcaagaattggaaggcagccttacagaggtgacgattgggattctgatgaggaaagggacgagttcgagaaagaggagattctttcattcctcggtgaagactctattggctacctctggcccaatgaggaggaggaacctccttcggattccgaggatgagggtgaagatccttacgagcatcctcgaaacaaaaagctcttgcaactcggccgccgcctgtccaacctttcttccccgagcacgtccatttccactctttctgccgcatcctcttctgccccctcgtctcctctctcagacgcatcttctacgtctctccctgacattccctccctttcactcgatgccgggccggacaaggcgttctatagtgaagccgccgcttcccttcaacgagcttacgaggaggatcacaagatcgaaaatgccttgctcgagttacgtacattggtcatgggttacaacgccggtcttgaacgtgctcgagaagaagtcgtcaagttttttgtgtcgaagatcgatgtacgcggccccgctacctccatcctctcttctgctgtcaagatcttctcacgatggggccctctaatggctaaccttacatcggaccctacgctcctcatccttgacgctcaacagtactgcgtctctaccgtcccttttgcttacattccttggtttggtatcattcttcgtgcaatgtatgagacagatttggttggtgaagacgagcttgtggaatggagggagatgagcagctcgcaaggtga

SEQ ID NO: 1279 - DNA, 2376 bp, Cryptococcus neoformans
atgggcgggctgaacgttcaaggcgctggaaggacaaagttcaagtatttgaggatgttgagagaggttgccaacagaagacgagaggatattgtcattgatctaaaggatctcaagagggtaggtaaacgtgatgacctactgtgaaaagatcgaatccatactgacgggtatcgtaacccaatagcacagtaatgacctctcactccttcacaacatccaaaacaacacgcgtcgctacattcagctcttctcggacgtgatcgacaaaatcatgcctccgccggacaacgaggtcgactataccgatgatgtgctcgacttgattatgcagcaacgaagggaaatgaacgctcaagttgaggcgggagaaaggaatgcagacgccggaatgttcccaccagagctgatgagaagatagtaagcacttgctctaagctgataaggaaacgtcctaacgggaacagcaatgtatacttccgcccgcttcgatctgacgacgtccttgctgttcgagcagttcgaggtgcccatctcggcaagctcatcaccgtgcgaggtatcgttacccgtgtttctgaagtcaagcccctcctcatcgtcaacgcctacacctgtgactcgtgtggtaacgaaatcttccaagagatcacccaaaaacatttcgcccctctcactgtttgcccctctgacgtctgtgtcaggaatcaaaccaacggtcaattgcacatgcaaactcgagctagtcgattcaggcccttccaagaggtcaaaatccaagaaatggccgaccaggttcctgtgggtcacatccctcggtcgatgactatccatctgtacggtgctcttactcgatctgtcaaccctggagacgtcgtgcacattggaggtatcttcatcccaactccttacaccggtatgcgagctctccgagcaggtcttttgcaagacactttcctcgaagcaatgcatgttcaccagctcaaaaagcaataccatgccatggagtctacccccgaaatccaggaggctatcgctgacctcaagtccgatcctgccctctacgcgcgacttgccaactctatcgcgcccgagatttacggtcacgaagacgttaaaaaagcattgttgcttttgcttgtcggtggtgttacaaactcgaggaaggacggcatgaagatcagaggtgatattaatgtttgtctgatgggtgaccctggtgttgccaaatctcaattactcaaatatatcacaaaggtggcccctagaggtgtttacactaccggtaggggttccagtggcgtcggtttgacagccgcggttatgagggatcctgttactgacgagatggtgttgggtaagttcacactaggaaaaaggaatctggctgacagtgatgcagagggaggtgctcttgttctcgccgacaacggtatctgctgtatcgatgaatttgacaagatggaggaatctgaccgtaccgccattcacgaagtcatggaacaacaaaccatctccatttccaaggctggtatcaccaccacccttaacgcgcgtacttccatccttgccgccgcgaaccccctttacggacgatacaatcccaaaatctctccggttgagaacattaatcttcctgcagctctcttgtctcgtttcgacgttctcttccttatccttgattctcctacaagggaagatgatgagcgattagcccaacacgtatgctttgtccacatgcacaacacccaccctgaactcgactttgagcccgtcgagcctacattgatgagacactacattgccgagtgccgaaagattgaacctcgtgttcctcaggccttgtcagaatacattgtttccagctacgtacagatgcgcaaacaacaacaagaagatgaagcagaggagaagtctcactcttatgtttctgcccgtacccttcttgccgtcttacgtctgtcacaggcgcttgctcgtctgcgacatgacgatattgtccagcaaggcgatgtggacgaagctctccgattgatggatgtctccaaggcgagcttgtacgaacactctcaacagaggaatggcgaagatcagacaagcacaagtaagatcttcaggattatcaaggacatggcacagagggctgcggatgaggacgatgacgaagaaatgggagaattggcgatgatggatgtgaggaacagggttattgccaagggtttcacggagatgcagttaatggagactatcctcgaagtaagtttctatcgatgctttttcagttctatcaagctgacgccggttgtacagtacgagaacatggacgtgttgatgcgtaccgccaacggctccagattgcaatttgttactgtctaa

SEQ ID NO: 1280 - DNA, 2536 bp, Cryptococcus neoformans
atgccacctcgacgacatacagatgcgcatggcagccctggcttctctcatctccaccccgcgatgacccgcccctcgctgctgaacgcacagacgcacgcgctcctcacgctgctcaacctcaacaacccgcccccggcaaacccggcggcggccggcccgttcccccgcccgtcctcccccggcgccccgttcgacgacgccgcccagccgcccctcgtgtggaaggtgctgatcctcgacgacgccagccaggacgtgctcgccaccacgctgcgcgtccaggacctccgggagcagggcgtcactctccacatgtgagtcctccgtcgccacgccggccgtgttgctcatgcacccacaggcagctgcactcggcgcggccgccactcgccgatgtgcctgccgtctactttgtctcgccgacgctctccaacatccgccgcatcgccgaagacctcaacccgcccttatacgcctcctactacctcgccttcaccttcgtccctgccccgctcgttgctcgaggagctcgcatctctcatcttgtccaacgacccttccggacagaccggccagctcatcgccagcgtcacggaccagtttttggactttgtcgtcccctcaccgaatatgttctccctcttgccaaggagagagctcaggcaggatgccgacggcgcggcagggaaaggaaagaaggggaaggatgtcagggaggaatgggtggaagggcggggaagctacgtggttctcaacgacccgagagcgacagaggttgatattgaagaagaggttggacgtattgccaacggactgttcagtgtgatcaccaccatgagtatgtcgactagatgccaacggatggataaaggctgattattttggcagacatgacgcctatcatcaggtgtccgcgaggtaatgcggcagagatggtcgctcgtcgtttagatgccaagctgcgtgaccatatcgcatcaacctcttcccgcaatacacgcgatgcatacactgtcgatgctctccagcgtccccgtaagtcgccaaggtaacataaacactgttgctgacgaacgttgaactaatagtcctcgcgattatggaccgaaacattgacctcatccccatgctctcccactcttggacataccaagctctcgtgtccgacgtgctcgacatgaaactcaacagagtcaccgtctcttcccccgaaaacggtcgtctcacaaaaaaatcttacgatatcgattccaaagatttcttctgggccaaaaacgcgggcaaccctttcccagccgtggcggaagatatcgacaccgatctgagcaagtacaagacggatgcggctgaaatcacgaggtcaacagggataagcgatgtcaatgacgtttcccaaatcgactttacatccaacactgcaaacttgaaaaccgccattaccgctttacccgaactcaccgcgcgcaaacagattctcgatacgcacatgaacattgccaccgcattgttacaatccatcaaagaacgtggactggacaacttgttccaagtcgaggaaacagcgagcaaacagacaaaagctaccatcctctccgtcctgaacggcgctaccgacgagccggggcaaactgcctccccttccccgctcgaccaactccgcttggtcatcatctactttctctccacccaagatggggcgctttcaaaggaggatatgaaggagctcgagggcgtgttaaaggagcacggggcggatacgcgcgcattggaatatgtgaagaaagtgagggatattcatcgcatgtccacgttggcggtccagccggccgtggcggcccagagtcagtcgggaggtggaggtgaatggacaagagggttcagtgcgcttggtaaccgtgtaagtctttcccttcactctgccctgcatccacactcatcagatcattattttttcaacatagatcacggatagattaagagaaggcggtatcccaaccgtagggctcgacaacctcatctctggcgtcaaatccttcctccccgcacggaaagacctcaccctaacccggctggtggaagcgctcatggatccggcatcggcgtctagtcaagcattgcaggatacggatgattacctgttcttcgatccgaaaacgtctcgcgcgagacccggtcatgcaggtggtggtggcggtggaggtggtggcggtgccggtgccggtgccgggggagcaggcggaccagggggaggaagaagtcagtttagtgaagggctggtgttcgtagtaggaggaggaggttatgtcgagtatggcaatctgatggattgggcgaataggtcgggaggcggtgggagagatggcggcggcggtggagcaggtgccggcggaggagcgggggcgcaaggggtaacgggacaaggaggaaggaaagtgacgtatggcagtacggagattttgaatcccgaaaagtttttaaagagtctggaagagctggggagtgtctagctgtaggatttttatggagttcttag

SEQ ID NO: 1281 - DNA, 2462 bp, Cryptococcus neoformans
atgggcaagtctacgaaagccttcaagaagtttgcctcttcgggcaaactcaaggataccattcaaaaacgtcgccaacatcagcaagccaagcgcaagtctgacgacatcaaaacccaacgcgctaagcagcgaggtgccgctcacgacccggaggacgagtctgaaggtgaaggttccgaaggggaggacgaagaggatgaaaaggaagccaagagaattggtaaacctaatgccggagggaaagctggtggtgtcgccaagactgttgaagatctgtttggcgccggtggacttgacgttgaggacgatgaagaatcggagctggaagagctgggatcagaggacgaggatgaggaagatgacggagacgacgaagaagacgagggagaaggagatcttctggatgaagaggccatgaagaaggccatgaaggatttggcgaagaacgatcctgaattcttcaagtatcttaaagaaaacgacgaagatttgcttgattttggccagtcaagcaaagcaaacaagggaaaaggaaagcaagatgaggatgatgaggatgacgaggatgaggaaatggaaagcgatgaggacctgcttgaagaagacgaggaggaagaggaagccgaaaggaagaggatcacggtgactttgaagatgcttcgacagtggcaagaaggcatgctcagagtgagttcatctgctatagagatttggtacaatctaatcagtacataccatagcaacactccattagatcacttcggaaaactttgatcgcctttagagcagcagcccacatgaacgaagacgacggtgatcaagggagtggtttggacactaaatacattattgacagtgctcaaggtgagtaatttgttcttgtcatgccaatgattggctcctaataaagtattagtcttcaacaaaatcgtggttactgcccttaaattcactcctgtcgtcatctctcaccacttcccatataaaactctgcctagcggtaaagtcaagctccagccccccaagaaaaccaaccaaaccctcaaccgacttatcctctctcacttctcgactctgctgcacctcatcaaatcactccccacgactccgtctagcgttgcttctaagaaggacgaaggtgccagtggattgctgttgacggctgttggcgagagtacaaagttgatcccctgggtccttagtgcgagaaaacatttgagggcatacctcaaggtactcttggatctctggagctcggctggtgatgatgttaggatcgcttcgttcctggcggtaaggaaattgttcgtcgctggagatgatgcggtcaaggatctttgtttacgagtgagttacattataatcatgctattctagactttgtgactgatgattttgcagaacatttaccgatcgctcccttcccctctccgtaataccactccgcataaccttccttctctcaacctcatgaaaaacactgcctctgagctttatcaactcgctccctctctttcttaccagcatgccttcggtttcatccgtatgcttgctgtgcatttgcgtaatgttgtgcggtcaagcaccaccggcaaggcaggtgacaaccagcaagccttcaagactgtttacaactggcaatatgtccactgtatcgatttctggagtcaggtattggctggtgcggctagcgtggagaaccagaaggcgaacgcgggattggaaagtcctttgaagccattggtctatccccttgttcagattgctttgggtgctgttcggtaagtctcaaaagcacggtagcgtatgagtcgatagttaacgaaaagtatagactccttccttcctcgcgatacttccctctccgattccacatccttcattctctcctccgtatcatcagtcgcaccggcacttacattcccctcgcccccttccttctcgagatcctcgattctaccgagttcagacgcgccaaccccaagaagggtactatcaagcctcttgactttgagtacatcatccgtgcccctgcggcttatcccaagactcgagtcttccaggaaggcttgggtgaagagctggtgttccttttgggagaataccatgccgctgtctcaacgcaaattgccttccccgaaatggttttgcctgttatcttgaccatcaagaagcacatcaagaaggggtctgctggttcccccaaggttgtctcttccctcaaggtcctcgttgagaaactcgaggctacccgaacgttcatcgagaacaagcgtcggaacgtctcttttgctcctagggatagggcggaggtcgacaggtttttggagggacaagggcctgaagtgactcccgttggaaactggatgagattgcagaggaagatcagggatcagaagaggtcagaagtagagaaggctttgcgtgaggagcaggacgaggatgaggacagcgagtag

SEQ ID NO: 1282 - DNA, 2569 bp, Cryptococcus neoformans
atgcccgacgttgtactacctctcgtgcagactcccccctttgttatcattgctctcgccgctttacagggtattcccgtcacctgggatgctcagtctggagaacagggtcagactacttacggtgatattgttggtgccgaaaacgttcgagctgagctcgaaaagggtgtcgacggcaaggaggtaagcaagaaaagagttcataacccattgaagtaataatgctgaaataattcaagatccctctccctcctctccctacccttttgacctcgaccagctctttccaagacgtctccgcggtcctggacgctttcgatgactacctcgcctatcgtacctactttgccggccccaagtttggtttcggcgatgctaccatttggggcaccattcgaggcaacaactctgccattggttccatcaagaagcccggacgaccccatttgcagcgatggttcaaccacgttgagactctcgatgtgcccaaggctgcgctcgagtctcacagacaggccaagagcgagatggagaagggcaagaagaccaagagattggaaagtattgatgttgttttgcctaacgctatcaagggcaaggttgtcgttaggttcggtacatatgctctcttggtcttatctgccgctcgatactgatgattattgtgtagcccctgagccttcaggatacttgcacattggtcacctcaaggctgctatccttaacagatacctggcagaccagtaccaggggcaagttcatccctccgtttcgatgacaccaaccccctctcagggaggaggtaccgtccacctctcacttgtgtatttgtttgaattgtgatgctgaccattaagtttcttttgattatatagggtgagttcgaagaggctatccaggaagacctcaaaatgattgaaatctccttcgacaagatagttcacacttccgaccacttcgacaaaatccaggcctacgctgagcaactcatcaagcaaggcgacgctttcatggacgacactgagggcgaaaccgtcaaggagcagcgtcgagcgatgatcccttctaaaaaccgagacctctctattgaagagaacttggttaagttcaaggagatgtgtgagggtacggaggaaggcaagaggtggagtttgagagctaagattgattatcaacacaagaacggtactttgcgtgaccctgtcatctaccgatatgttgagggctcgcaccatgttactgggtgcgttgaattccctctcccgcaccacgcacacgctaatcacacctatgttcagtaccaagtacaagtcttaccccatgtacgatctcgcctgtcctatcatcgaccacctcgatggcgtcactcacgctctccgcgccaatgagtactgggcccgtcatgagcaataccaatggttccttaagactcttggtttcgccaatattgagatctttgacttcagcagggtcgactttgtttacactgttttgagcaagaggaaattgaagtatcttgtcgagaagaatgttgtcaaaggctgggatgacccccgattccctaccgtccgaggtgggcatttctttccgtcttatgtgttgtcatctatttaagggtctgaggtgatgctaatctactcctttcgttgtttaggtatacgatcccgcggtatgacggttcaaggtctcaagaactatattctcggtcagggtgcttctcagcaagccgttcagcttgagtgggatggtatctggactgttaacaagaaggttatagaccccgttgcccctcgatactgggccattgcggaggacaggatgtacgtatctttcttcaaactgcaggccgggagagaagggtaaggcactaatccgtacatctagggtcagtgtcaatgttattggccgtgagactgaagagcctgaggttgtcagcaggcccttacacaagaagaaccctgaggttggagagaagaagttggtttttgctagcaagttgatcatggagcaggaggacgccaagacctttggtgagaatgaagaggtgtgtgctttctcacgcccctctgtgtccaagccatacagctcacgacgtaacttccttttcttaatagatcacggccatggactggggaaatgctttcgttacttccaagattaccaccccttccggcgacgtttcttctctcactatcacacttcacctcgccggagacttcaagaagacttctaagaaagtcacctggctcgctgcgccgactgatgccaaccctcttatccccgttgtcctcattgaatacgattacctcatcaccaagaagaagctcgaagaggacgactccctccctgaggtcctcaacccgaagaccgagtaccgcacctacgcgcttgcttctaaggaagttgaaggccttaaaaagtgggatatcatacagttcgagaggaagggattctacatctgccagggtactagagataaccagggcaggatggagtttggtttcatccctgatggacgggctgcgactgtggcgttgaaagccgagcccgcaaaggaaaaaactaa

SEQ ID NO: 1283 - DNA, 2635 bp, Cryptococcus neoformans
atgccaggcccgacaccgtcagcgcaccaggtgctcgtgtactcgggccccggggtgtcgccgctctccctctcgcacaccctcctcaccctccgcctcctcctgctcccccactacaccgtccagcccgcagccccagacctcctcgcactccagccatgggaaccgtcctgcgcactcctcgtcgtcccaggcggcagggaccttccctacgtcgacgagctcacgcacaagcggcccgtcacaaacaggatcagagagtatgtccagcaaggcggccgcttcttgggcatatgtgccggagcgtactttgccagcgccgaggtgaggtttgatgtcggaggcggtatggaagttgccgggaagagagatttggtgcgtttttttgcgatgtggaacaggtttcgaactgcgtgctgacggtgcgaatcaggcctttttccctgggcctagcagaggacccgtattccaaggttttcaatatgcgtctgaatccggatccagggctgtcgtcctcaacctcgaatcttccaagctcgagacactcaaccacatctattataacggcggcggccaattcattctcccttcgcctccccctccaaacgtccaaatcctcgctcgcttccaagaaacttgttccgacccatcaggacaacaacaacaacaactcgtcgccgccgtcttcacccaaaacggcaagggctgcaccgttctctcctctgtccatccagaataccctctctccgaccctccggcgagtaacgccattgctaaactggacgtgcggccgtcccaggtggaggttgagatgagcgacaaggctcgtttgtcgtgggtcgaggagttactcatcaagctcggtttgacccctcccgaacgtcttaccgccgcaaaccgggccaaatcctcagccgactcggagcacgaggatgaagacccggctctcctccttcaccccactcacccttcacccatctttttcttgtctcatcccaacctgccgcagttacccgaggcagctgtgaacaagccagaactcaagggcaagatggagcaaagagatgggtgggatgttttgagggatgcgaacgatgagattcgttttggtacgacggaagctacctcgcctgaacgagcagcctctgaagatggtatcacgcaatggcttgcgcaagcccgtcgtacccagcccgtgttcccaccttccgtcgaagatctttcgatacaatccgactctaccccacaacctccctctccacccgatttgcacgctctcaccaaaaccatcctccttccttcgccttcagtcgaatactcttccagatggactccattgttcaacttttctacttactgggatgagcttgatcaggcaaggaagaggagcggtagacgttcaggcgtgatgcggcagggatcggatggacagggcgagcggtgttcattgggtgactgtgtcttgtacggtgaaacagtgacgagtactcagacgatgcttgacggcaacccccttctcctcaccaatctccctacaccgctcgtcttcctcgcgtctttccaactttccggccgaggtcgaggctccaacatgtggttatccccacctggctgtctccaattctcactgcttctcgacctccccgcttccctttcatccaaaatggttttcatccaatacatcatggctcttgccgtctgtgaagctatcgatgaggatgggagattaggtgttagaatcaagtggccgaacgatatctatgccgaggttgaaggcgtgggtgggacggagatcggtagtggaaaaaagggcaaggccaagttgggtgggatcttggtgaacactagttttgtcggcgggaaatggagaattgttgttggtaagctttgcatttttttttgcaacccattttatcctacttcacccccttctaatgacctgtttctacaggatgtggtatcaacattctcaacgctcttcccacatcatccgtctcccaactacatgctttactcgccgccaaactttcttccacatcatctaataaacctcttccgcctgcacctaccatggagggtacctttgctcgcatcatgagttcctttgatgcgaaatgggagcaattcatcgaggagaagggtttcaaagggttcatggatgaataccacggaaggtggttgcattcgtcggtttttttctttttctttatccccattgattgttccgtttccatgatctcatactgacttttttgttaattattagagggcaagacgttctcctcactaccaccgaaccccacactcgcgtccgtatcctcagtatcaccccagaccacggtcttctccgctgtatccccatctccgacaaacctaaagcctccaccggtctcacacccctgtacaacagggacattgacgccggcgaggatgatcgtggttcgtggtcttcttctccctctgttcctaggtctggagctgctcgagcccaaacgcagaaccactcaccgtttgtcgacctccagccagatgggaacagttttgatttgatgagcgggttgatcaagcggaaagtataaggggttctgtgtattgtaggtataaaaagctcgacattgacatcctgtctttatga

SEQ ID NO: 1284 - DNA, 2609 bp, Cryptococcus neoformans
atggattattgcaacacatctcttcctttctcacttgtttttctccttattcttgcgcaaaagatgtccggacagcagccccccagcttcaacccaggcgcattcgagttccgtccaggacaggcacctttcgcccccaggcagcagcagcccttcgacccgtacggccagcagcagggcggatatccccagtacggacagtatggccagcaacagggataccctcaatacggacagtatggcggttaccctcagcagcaaggctaccctgttcccggtgctcccggtgccggacctagggcttaccagcctccacaagccaggaatgtccaaggtttccagcctcccagcttctcttcatcgcctgcgccccctccggacaccaaagctcctgctggaaaacctgtctctttatccattggaggtggtggtgcacccaaagccgctcctagcttgtctatcggtggtggtggtgcgcccaaggctgctcccagcttgagtatcggtggtgcgcccaaggcggcccctagcttgagcattggcggtgctcccaaggccgctcctagcttgagtattggtggtgccaaggcggcccccagtttgagtatcggtggaaagaaagaggagaaaaaggaagagaaggaggcttcctcaaagtcttctcccaaacctgccgctcctacaccaaaacccgccgatgcccctgctgccaagtctgaggccgcctctgcccctgtctctgctgccgagaagaaggctgaaaaggctgttccccttaccagtgacgctcaaggcaaggttgttgctgctgagacttctgctgccagccccgccaagtctggcgctagtactcccgtcgccactgtcagcaccagcaccaccaacttctccaaggtctctgccaagaacgatgctgaagctatctaccgcgagcaaaaccttgctggtgacgctgctttgcgagacctgtacggtgagaacgtcaaggacaccaacatcaagtctcacctaaacatcattttcactggtcacgtcgatgcgggcaagtctactatgggtggtcagttactctacttgactggtgctgttgacaagcgaaccatggaaaagtatgagcaggaggccaaagctgccggtagggagacctggtacctgtcgtgggctttggacagtggtaaggaggagcgagcgaagggtaagaccgttgaggtcggcagggcgtattttgagagtgaaaaacgaaggtataccatcttggacgctcccggtcacaaaacctatgtgcccagtatgatctccggtgccgcccaggccgacgttgctttgcttgtaagctgctcttttcatcttcaatggaccacaatgctaaattatccacaggtgttgtccgcgcgaaagggcgagtttgagaccggtttcgaacgtgagggtcagaccagagagcacgctatgcttatcaagaacaacggtatcaacaagcttatcgtcgtcgtcaataagatggatgacactactgtgcaatgggacaagggacggtacgatgagattaccactaaaatcactcctttcctcaaggcggttggtttcaaccccaagaccgacatcacttttattcccgtttccgcccagattggtgagaacatgaaggaccgagttgacaaaaagattgctccttggtgggagtaagttgtgatttatcctttcacgttttggttccactgacattttgtagcggcccttcgcttttggagcatcttgacaacatggaaattatggaccgaaacattaatgctcccttcatgcttcccatctctgaaaaatacaacgagttgggtaccatggttatgggcaagattgaatccggccacgtcaagaagggcgacactttgcttatgatgcccaacaaggtaaatctaaacgtatctgcaatcgcctatgtgcgtacactaactacggattcccttagcacactgttgaagtcactggtatcttctctgaacaatcagaggacatggacatggcattctgtggtgacaatatccgaatgcgaatctctggtgtttctgaccgagacattacccccggtttcgtccttacctctgttcaaaagcccgtcaaggctgtcactgccttcaaggcagacattagtttcattgacaccaagaacattatctgtcccggttacagctgtgtcttgcacgtccacacccttgctgaggaagtttccgttactgtaagtagatctcaataatgtacaaataacatttaacattgttgacaataattacagtcattcctccattactacgagaaaaagactaggagaaagtccaagaagccccctcagttcgctaaggctggtatgctggtctctgccctcattgagacttctgcccctatctgtattgaacgattcgaggactataagatgcttggtcgattcactttgcgtgacgaaggtgagtctcgccgttcagtcaggattatctcaattattgactgacatcgccctaggtaaaactgttgctattggcaaggtaaccaaacttattgaaaggagcgaggatatgcccgatgttgctgcgctttccttgaaggcggcgtcgtaa

SEQ ID NO: 1285 - DNA, 2632 bp, Cryptococcus neoformans
atggcaggaagagatccgagagaccgtgctccaagagtgcgcaacagagcacccgctgccgtacaggtctgtgcataatcccaagcgggctgcaaacattggctaattgttgcttgtagatcacagcggagcagcttttgagagaggcgcaagaacgacaagaacctgctatccaggcacccaaacagcgtgttcaggatttggaggagctttcagagtttcaggcgaggaaaagaacggagttcgagtcaaggatcagatactcaagggacagcattctcggttagtacatcgctattgcgtctgtggtcgaaagatgctgacatgtgttgaattagcatggaccaaatatgcacaatgggaagccagccagaatgagtatgagcgatcaagatcagtgtttgagcgagcgttggatgttgatcccagatcagtggacctctgggcaagtatccttgctcagtgccgacgtcggacgtatgctgacaataagtgcagattaagtataccgacatggagctgaaagctcgaaacatcaaccacgctaggaatctttttgacagagctatcaccctccttccccgtgttgacgcagtgagtgttattaattggctcttcccgccgtcaattgacaatgcgtagctttggtacaaatatgtctatcttgaagaattgcttctcaatgtttcaggtgctcgtcaaatctttgagaggtggatgcaatgggaacccaacgacaaagcttgggcagagttacatcaagctcgaagaacgttataatgagctggatcgggcttccgccatttacgagcgctggattgcttgccgcccgattcccaagaactgggtgacatgggccaagtttgaagaggacaggggtcagccggacaaggctcgggaggttttccagacagctttagagttcttcggtgatgaagaggagcaggtggaaaaagcccaatcggtatttgctgcgttcgcaaggatggagactagattgaaggaatttgaaagggcgagagtgatttacaaatttgccttagcaagattgcctagatcaaaatctgctagctgtaagtcctcaccgtgacgttttccgcaatgctgactagttcgtagtatatgcccagtataccaaattcgagaagcaacgtgagttggtgaacttgtagcaacaattatactaatcccgattaagatggtgaccgtgctggtgttgagctcactgttcttggcaaacggcgcattcagtacgaggaagaattggcctatgatcctacgaattatgatgcgtggttttctcttgccaggttagaggaagatgcctatcgcgcggacagagaagatggtgaagatgttgagccaatgcgagttcgggaagtgtacgagagagctgtggccaatgtccctcctgcgctggaaaaaagatattggagaagatacatttatcgtatgtgaagtctcgtttcatgctgctccgctaatgttcgtagtgtggttgcaatatgctgcatttgaggagattgacaccaaggactacgacagggcgcgggatgtctataaagcagctgttaaacttgtgccacataaaacgttcacttttgctaaggtaagctgcgtctgctctgggcaaacgaaagaatacttataacatcttcagctctggctggcttacgcttactttgaaattcgtcgacttgacgtctctgcggcccgtaaagttcttggtgctggtatcggcatgtgccccaaaccgaagctctttactggttatatcgaacctggagatgcggctgcgagagtttgatagggttcgaacattgtaccgagaagttcttgactgtgagttgtcttcactgtgtaagcatgtgactggaagctaacatctacgtagtatgacccctccctcagttctgcctggatccaatggactcaagttgaatctgccgtcgaagatttcgaacgtgttcgagcaattttcgaactcgccgtgcaacaatctctggatatgcccgagatcgtctggaaagcgtacattgacttcgaagccggcgagggcgarcgcgaacgtgcgcgtaatttgtacgaacgcttgctcgaacgtacttctcacgtcaaagtctggatttcatacgcactcatggagatcgcgacgcttggtgggggagaggatgaagatggcaatgagattgaaggcgaggctggggacgctgatttggcgaggcaagtgttcgaaagaggttataaggacttgcgagcgaagggtgaaaaggaagatagagccgtgttactcgaatcttggaagagtttcgagcaggagcatggcgacgaggagacgttggccaaggtagaggatatgttgcccacaactcgaaagaggtggaggaaggcagaggacgggagtggagagttggaagaatactgggacttggtattccccgacgatgaaagggaagcgaacccgactagtttcaaattcttccaggctgcccaagcttgggctcaacagcgtgctgggcagggagaagaaggcggtttatcctacgatttgccgtcagattcagaggacgaaaacgaggacggagacgaggacggggacggtagggaagaagagggaatggaccaggattag

SEQ ID NO: 1286 - DNA, 2745 bp, Cryptococcus neoformans
atgggcaagattcttgccggtgactctgaatcttaccagtaccttatcgagtccattgagcgatttccttctcagcccgagttcgccaagctgtaagtctcattggtagttgcaactctcaagcataggttaataaccatatcagtgtgcaagaagcaggattcaagactggccagatgagggaaggtcgaggtggtgcttggactgactacaccaacggtattgccaccgtttggacaggtgtcaaggtttaaattgcggagtgtatacctccatatagggctttgtttggtgttcaaacatcatacacaaagcaaaaaatcccatctcgtctctcctcatccacatccagcacaatggcagagcagctcaagcaagtatacgcagacaaaaaggcccaggtaagctccatctcctcatacaactttcgccgctgacaccctgcaggaccaggcgtacgtccacaccgcccgctcacccacctactgacatcccctcagcgcctttgtcacctttttgacagctggtttccctacccgcgatgccacagtgcctctcatgctcgccctagaggcaggcggtgctgacattatcgaactcggtgtcccattcagtgacccagtcgccgacggtccggtcatccaaaaggccaacaacgtacgtcttctttatagtgttataaaacggcctctgacgaacccacaggttgccattgaaaacaatgtccactactctgactgtatcgagtacgtccgacaggctcgtgcccaaggtctcaaggctcccgtcttgttcatgggttcgtaaaactgccttgatagtcgtcttttccaactaacagccattcaccccaggctactacaaccccatcatcgcttatggcgaggaaagagctgtcaaggacgctcgagaggccggtgccaacggctacatcgtcgtcgacttgccccccaccgaagccgtcgactttagaaacacttgtaccaaggccggcatgtcgtacattcccctcgtcgccccttctacgagcatcgatcgagtcaagttcttgacttctatcgccgattctttcatatatgtcgtctccaaggtacgctcgatcccgacaccgtgatagactgagctgacttttgttctttctcgtagatgggcgtcaccggttcctcttcttccgaaaacatctcagcctccctccccgaacttgtcaagcgtatccagacgttcaccacgatccccctcgctgtcggttttggtatcgacaaccgtacccactttgactatgtcacatcttccggtgcggatgctgttgtcgttggatccaaaatcatcaagctcatctttgagcacgccgacgacggtcttgcacccaaggtcgtcgaagactattgccgagaaatcacactcaagggccagaaccctccccctcttggccgaaagaatgctgctgccccgcctcctgccaatggaggtgacgtctctccccccctccccattccctctggctcacctctcggcgagtctcaagtcaaggtcaccgccgccggtaaactcccttctcgattcggtcttttcggtggcgcctatgtcgccgaatcccttgtcgactgtttgaacgagcttgaagctgcgtatgccgaggccaaggaggatcctgcgttctggaaagagtttgaggatatgtttgggtacatcaaccgacctagtgaactttaccttgccgagaggttgaccgaggagatgggcggtgcgaggatctggctcaagagggaagatctcaaccatactggttctcacaagattaacaatgccgttggccaaattctcctcgccaagcgattgggtaagcgaagaattatcgccgagacgggtgccggtcagcacggtgtcgctaccgccaccgtctgcgccaagtttggcatggagtgtgacattttcatgggtgctgaggatgtgaggaggcaagagctgaacgtcttcaggatcaagatgcttggtggtcgagttatccccgttaccgccggttcccagaccttgaaggacgctgtcaacgaggctatgagagattgggtcactcgattggactctactcattatcttatcggctccgctatcggtccccacccgttccccaccatcgtccgtgacttccagagggttatcggtcgagagatcaagtctcagatgcacgaaaagatgggcaagttgcctgatgctgtcgttgcctgtgtcggtggtggctctaatgcgatcggtactttttacgactttatcgaggatccgagtgtaagactggtcggtgtcgaagctggtggtcatggcaagttgttcttttatctttatatatgttactctgctaacaatctctctaggtattgacaccgaggcacactctgctacgctgaccaagggtgtcatgggtgtcgtccacggcgccgcttcttacattatccaatcaaaggaaggccagctcacccccacgcactccatctctgccggtctcgactacaactctgtcggtcccgaacactctcacctcaagtatagcggtcgagcggaatatgtcgtggcggacgatttgcagtgtctcaaggcgttcaagatgtgtaccgaattggagggtattattcccgctttggagagcagtcatggtttgtggggcggtatgcagttggccaagagtttgcccaaggataaggatatcgtcatgtgagtgcttttttgcaatttgcacttttgcacttgtaa

SEQ ID NO: 1287 - DNA, 2705 bp, Cryptococcus neoformans
atgtctgtccggaatatcagagaagccgaaggtctcctcatggaggtccatgacccctctaagggcccagtgtacgtcgttgaattgaaaggctacagatttcaagagctcgagctgacttacctcgagcctcccaaaggacggacaaagaaacgtccttatcacttctgcgttaccttgtaagtcacttttacacgtccttggtatactggagggtggagaaatgtgaatgacctggcgggtactagatgtgaacaacgtaccacaccttggcaacatcatcgggtgagcggccatccagttgcaaaccatgcaagtactggttgcttatcgttacagctctactctttccgcggacgtttttgcgagatacaatcggacactcaacgtaccgaccctttatgtgagcttgcgcctctgtcatgtcatccacagcatatctaatatgtattgtagatttgcggaaccgacgagtatggaaccgctacggagacgaaggtatagctttgaatctttaatatctctatctccctaacaacatcaggccttagaagaaggtgtcaccccatacgaactctgtaccaaattccacaaattgcatacagagatttacgagtacgagtctcctcgtgattattagtgcgtcactgatgatctatgctgtaggtggttccagatcagcttcgacaaatgggggcgtacttcgtctccggaacatactgagatcacccagggaatttacagacgtctccatgataacggccttttccgtctggaaaccaccgaccagacttattgtgtagatgacaagctctttttggctgatcgctttgtggaaggcatctgtcccaactgcggctatgatgtgagcaaacatatcaaatacatcacatttggatagaatgttaatcaagcgcaggatgcccgaggtgaccagtgtgacaagtgctcgctcaccttttcatcccytactcaactccttaaccctcgctgcaaacgcaacaaggcacacaccctctctgttcgaccctctactcatgcctgctatcgtttagacctgctccagcctcggctggttgagtggatgcaaaaagcccgtgtcaagggaaagtggggaacaaatgcggtcatcactgaaaagggtgagattgtggagccgaggatgctaggagaaggtttaaggcctagtgccgtgacgagagatctgaaatggggtgttgaagttccgaaagtcggagacgaagaggaggataaggccatggaaggcaaggtaatctgtaagatcattatcctcgtttgttgccatttgcttactcgcagtagacgtttggttcgatgctcctatcggctatccttcgatcacagcaacctataccgaagaatgggaaaaatggtggaagaatcctgacaatgtagagctctatcaattcatgggcaaagacagtcagttcattgatggatagtgactcaataacgctgacagcgtatagacgtctacttccataccgttctctttccggctatgctgcttggtaccgaagaacgctggaccatgcttcataacatctccagcactcagtatctgaattatgaggatacaaagttcagcaagagtaggaacgttggtgtgttcggcaacaatgctcgagagacaggacagcctcctgagatttggaggtattatctcatctctcaacgaccggagaacagcgactcctcctttttgtggtccaaattcattgccgctaacaacaatgagcttttggccaatctgggcaactttgtcaaccgagtgagtctgttatggcaaaaaagagagacttttactgaattaatgtcaataggtggtcaaattcatcaacgcgaaactcgattctaaggtacccggtccggaagatttcgccggtggcgaagttgctccccctgctgattctctagacgttgattttgtgactgatgtcaacacccgcctcaaagagtaccgcgagcaaatggatgacactaawcttcgcggtggtcttgcaacggcaatggctctttctgctsgtggtaaccaataccttcaagaaaattctttggacaatgcccttctcgcaagcaaccccaagcgatgtgccgaggttttgctcaatgctgtaaacctcatttatgtcctgagcgtggtgttccacccctttatgccaaacacatctgaaggtatcttgcggcaactcaacgctcctgcccgatccctgcccactaaattctctattgatattcttcccggacatgttttgggtaaagccgaatatttatttaagaagatcgataacgtcaatggagagcaggagaagaaatggcaaaggcaatacggaggagatgctgtggtagcagatcacgttgcgccaccaggtccaggcggtcaccccgaaggcgggaaagttccgaaagtcaaggataccgacgcagagtccaaaaaggctgcgcacgaagctcgcagagcccaacttgcgaaagaaaaaaaggctgctcaggctgctgctgatgcgaagaagactcctgaggagaaggagttggaggcaaaggtggaggctcaaggcaagaggctagcagcgatcaagaagggattagaagaaggtgacgctgagaaagagatgagcgtcgcgaagagcttgaaaactgagttggctgatttacgaaagaggctgaaaggaactaccatttaa

SEQ ID NO: 1288 - DNA, 2649 bp, Cryptococcus neoformans
atgggtcctgctcctgctctcttgacatttcgtttgtgtctgctgcaaatgtagaggaaggaagaatgtaaaagcaggcggccaacaagacatgcgcggtggcggcggttgactggactttgcgtgtgcagcccgtctcacgcgacgcgttgtttacgtaagcgacgatggcggtggaggggtggatgttgaaaagttgttcttgtggaaacgcaagcgacgagccggccagcgcagagacacgatgagcgggcttccctccctcaatgcgggcatcaccgccgcctggaacacgagcgccccgccccagaagaagcggacacggcgggcgatccccctcaacgacctgcccgccccggcgtcccccctcgacgactcccccgccccagcgacccccgccgcccccccgaggaggaagagaccgcgggccgccccgtctgtgatcgccgcaaagtacgcgccgcccgacctcgacctcggcgcactcggcgggctccagccgcagatcacccagctgctcgaaatcgccgccctcgccctcttccaccccgagatctacctccacaccggcgtcccccggccgaagggcgtcctgctccacggcgtgcccggcggcggcaagacgcagctcgtgagatgcctagcgggcgtgagtctccccatgccggcgccgcgcacagagacgctgaccgcacagtgcaggagctgaagctgcccttcatctccgtgtccgcaccctccatagtgtccggcatgtcgggcgagtcggaaaagactctgcgagacacctttgacgaagccaaggtatgcagaatgcgttccctgtccggcgctgctgacgcgcccacgcagaaagtcgcgccatgtatcctcttcctggacgaagtcgacgccatcacgcccaaacgtgaaaacgcccaacgggaaatggagcgccgtatcgtggctcagctcctgacatgtatggacgatctcgcggcgagcgaagagcccgtcatcatcatcggcgcgacgaaccggcctgattctctggatcccgcgctgcgacgagcgggcaggtttgaccacgagattgagatgggtgtgccctcgcaagagggtcgagaacagcaagtcttttctttttatatcgtctaattgattggtctgattcaacctacctaggatcctcaaagtactctgctccaagctgcgtctctcgggcgacgtcgatttccgccaactcgcaaaggccaccccaggctacattggcgcagatctgaccgcgctcaccaccgaagcaggtatcattgccgtcaagcgcatctttgatagcggtttcggtatcggtagtggtaccgatacccctcatgacagcgaacaagggaccgtccccgaacccgatggtgcaggtatggaagccatggcgattgacgaccgctatacaccttttgccaacctgcccgacgacgtcaaggagacgcccatcgccaaattcctcatgtcccatccaaccgccttgacttccgaccagctgtccaccatctccctcacccccgccgactttcttgccgcattaaagatcgtccagccttcggccaagcgtgaaggtttcgccaccatccccgacgtcacctggtctgatatcggcgcgctcagtcagacccgagatgaactgcacatggccattgtgcagcctatacggcacccggaactgtttagcgtcgtgggtatcgatgcgccaagtggtgtcctgctttggggaccccctggctgtggtaagacacttttagccaaggcagtcgcgaatgagagtcgagcaaactttatctccgtcaagggcccagagttgctcaacaaggtgggttttttagtttttttctagattataaagccaaggggctgacatctttcaattaaaacagtatgttggcgagagtgaaagggcggtgaggcaagtatttgctcgggcacgatcatcttccccctgtgtcatcttctttgacgagctggacgctctcgtgccccgtcgagacgattctatggcaagtttcatttcttttttcgattcatgccgactacggacttgtcgctaaaaagactttatgctgtatagtctgaatcctcggcaagagtagtcaacacgctccttaccgaactcgacggtcttgatgctcgtaaagccgtctatgtcatcggcgccactaaccgtccggacatgatcgaccccgccatggtccgacccggtcgtctcgacaaactcctctacgtcgacctgccttcaccttccgaacgtttcgaaatcctcaagacccacaccaagaagacgccgatcaacgaggattcatggcaagcgatcaaggaaatcgtcgcttccgacaagtgcgatggcttttccggtgcggacattgcggcgctcgtgagggaagctgccacgctcgcactccgagccgctttggagagtataggcgcattcgaaacaccggcagaggccgagccggaagggatcgagcgaaagacggattccgtcagggtcacagctgaacattttgcccatgcagcacaaaagacgttaccgagtgtctccagggagcagagattaaagtatgagaggatgagggacaagtatgcgggtgtgcctaccagagggagaaggcagcgagaggctga

SEQ ID NO: 1289 - DNA, 2733 bp, Cryptococcus neoformans
atgctctttggctcggtatctacccggtccatcacctctcacttcaagttcgcccctcgcctcctttcaaaaacctctttcactgtttctgcccagtcatcatcaaagaaaatgggtgtcaacgataagcctaccattcccactaccgcccctcacgcttggccttcccctgaggattggcctgctgccaaagtgaggcagacgtttatcgattattttgtcaaccaacctggattcgagcacactttctggccctccagtggtgtcgttccttttgacgatgacacgcttcttttcgccaatgctgtgagtgtaactttaaaatagatagcgccagttgccagatccctcttcatatccatgttctgatatacttttatctatagggtatgaaccagtacaagcctctcttcctggggaccgcagaccccaagtctgaactttccaaactcatccgtgccgctaacagtcagaaatgtatccgtgcgggtggaaaacacaacggttggtttatctcgactcgatttagagccgtcctttgggtttatcgccagagagatgctgataggacacgccacatagaccttgacgacgtaggaaaggacacttaccaccatactttctttgaaatgcttggaaactggtcattcggcgattatttcaaggtatgtattactgaatctgcccggcataggtctttatgattgagtggcgattcaggttggagctttgaccatggcctgggaccttcttactcgagtctacggattgcctaaggacaggctctatgtgacctacttcgagggcgatgccaagcaaggccttgaacccgactctgaggcccagttagttgctcttttttctctcttcatttcatgactcacaattcgtttttaggcaaatttggagagatcttggcgtgccagagagccacattcttcctggcaacgcaaaggacaacttctggggtaagtgtgacaattcatggatttcgtggcgtctttctgacgagacatagaaatgggcgctactggtccttgcggcccttgcaggtgcgtataattagcttccgttgaaatgagcgttagcttactaggatttacagtgaaatccattttgaccgaatcggtggccgagacgccgctcaccttgtcaacgccgatgaccccaatgtccttgagatctggaacaacgttttcatccagtacaaccgtgagccctcgggtgaattgcgaacacttcctgccaagcacgtagacactggaatgggtttcgaacgacttgtttccgtactccacaacgtctctttcaactacgatacagacgttttcactcccatattttccaagattcaggagcttactggcgcacgaccttatgaaggcaaacttggtgacgaagataaagacggtatcgacactgcctatagagtcatcgcggatcacatcagaactttgactattgccatctccgatggcggtattcctgataaggacggcagaggatatgtccttcgacgcgtgttgcgaagaggtgtgcgttatgccagcaacaaatttggtgtcaagattggtactttcttctcctctctcgtacccactgttgtcgaatctcttgtaagtgtcggatatcacttcattaagcgcattcactcatgcatactgtgtagggtcccatcttccctgaagttactaagaagattcccgagctcaccgagatcctcaatgaagaggaagcctctttcgctcgcacgctcaacagaggtgaagctcttttcaataagtacgccaccactgccattgacgagaagcgaactgttctttctggaaaggacatctggcgactgtacgacacctacggattccctgtcgatcttacgcagatcatggccgaagagaggggattgaagattgaccaggaagcctttgagaaagccaggctcgaatctctggaagcgagcaaggccggtggcaaggaaaaggctggtgccctagtcaagctcgatgtgcacgacttggccgctttggaggctaacgacgcggtgcccaagactgatgattctttcaaatatcgtacgtattatatggtcatcttactcatggcttttactgaccagcctgtttagatttggatgacatcaaggctaatgtcaagagcatttaccatggctccaagttcctcaactccacttctgagcttcctcccaatactacattcggtatcctgctcgaccgaaccaatttctatgctgagtcaggtggtcaagagtatgacactggtgtgattgctatcgatggcaaggccgagttcaaggtggaggatgttcaagtttacaatggttatgtgttgcacattggacggatggaggagggtgatatcgagatcggagacgaagtaatctgcacgtacgacgagcttcgtcgatggcctatccggaataaccacacaggcacccatatcctcaactttgcccttcgagaagtccttggcgaccacattgaccagaagggctccctcgttgctcctaccaaacttcgatttgacttttctcacggcaaatctattgcggtcccggaattgatcaaaattgagggcatctgcaatgactggatcaagagaggtgtcccagtatatgctaaggatatgcctctggccgaagcttacaaaatccctggtcttagagtagtaaaacctttttcctcactatttgaagtaacaacgcagcatatgtag

SEQ ID NO: 1290 - DNA, 2796 bp, Cryptococcus neoformans
atgccaacaataaccaacacattcatttctttcccacctttcaccgatacattcatggcccagtacacacccccagcaactgacctcacagcatggaggctcaaggtatccgaagactcgcatggccaacagaagtgggtgtacctctctgatcctgcgcagaggaaggaatggccccagatgaacattgaaaagtactggcttggcttggatgtggtgcgtcttattttcatatcctccatcccggaatcgcaagctgacaacaccatataggaggtgcccgagttagaagaaccaaagacaccccttgacgcggcacgtaacggctacaggttctacaaggagcttcaaagcgaggatggtcatttctctacagagtatggaggttagttcaaatgttattgaatatccactatgtactgacacccgacaaaggtccactattcctcatacctgggttgatcatcgccctctacgttactggccagtcattgcgccacgaacaagccattgagatgcgccgctatttatttaacaaaaggagaaaggaaggtggctggggattgtgagcttttgattgagtttcggattgaaaatgagactaatataatatgacaggcatactgctgcaccgcccaccgtatatggaaccgtgatgaactatgtcgcgctgcgaatgctgggtatgggccctgatgaaggaccgatgacggagatccgatcgttaatacataagatgggcgagttgctaccattcacactgcctggcctgcggctgattatctattaggaggggcaaccggcattcctacgtggggcaaggtctggttgagtattttgggagcgtacgagtgggacggcgtggggtcggtgcctcccgagttatggttgctgcctgattgggcaccattcgctccttggagatgggtaagtgtggcttgcaaagacatcacgggacactaacgagcaaacggtgcgcagtggattcatgttcgacaggtttgtgagtgcctgtgcacaacaagtatttgtggctgaatgtattttagtcacccctatgagcttcctgtatggtactcggtttgttggtccctttactcctcttgttttcagtcttcgtcaggtgcactcattttgcaacttttcatgagtggagctcagcttactacaatgctcaggaactctatgtcgagccgtatgagaccatcaactggccatctcaacgatccaacatatcatcttatgatatttactctcctcatcaccccatccttgacatggctcatcagctcctggcggtttatgaaaaactaccacatgtacccattctctcttctaggctccccctacgcaaagtcgctctggacaaggtttatcgaatgatcacttatgaagacgagaacacaacctaccagactgttggtccggtctcaaaagcctttcacatcgtttgtcgctttgcccgtgaaggtcccaacagtgaggcgtttaaatcccacctttccaggattgacgactttttgtggctaagcaagagtggtctgatgatgatgggcaccaatggttcacagatgtgggatacgggatttatggctcaggccgccgtggaaactgggttagcagaggagtccgagttcaaagaaagtgtaaaggggatgctggactggttggacaaggcgcagatgagagagaatccaaagtggtacaaagagggttatcgacaccgcaccaagggtgcttggccattctccactcccgagcaaagttatacagtcagcgactgtacagctgagggactcaaggctgtgctggcccttcagcacctggattatacgccaaagcctgtcgggctggataggatgcgtgacgcggttgacactctgttatcgatgcagaacaaaagcggtggttttgcaagctatgagttgaccagaggcagtaccaagttggagtggttaaatgcagctgaagtcttcggtgagtaggcaaatgtgataaacgaacgaacaactcccatgtacgggtgctaacaatgctataggagacatcatgatagattatacgtacccggagtaagttcatttgtccttggtgccttcctcccgtcagacatgtctaattgcttttaggtgcacgacctctgtattatcggccttgaaatacttttctaaagttgatacagagtatcgagcagcggatattgagtaaatgagtttgcttcgcatatgtatgatgcgctgactagctcctacagacttacgatacgcagagccattcaatacattcacgatatccaacgtcccgacggttcgtggtatggttcatggtaagatataaacactggtggtgggtatggtattaatgcatgactataaataggggtatttgtttcacctatgccactatgtttgcacttgaatcccttggcatagcgggtgagacctgcgccaactcggacaaggtgagacgagcttgtgactttttggttggacaccagatggaagatggtggatggggtgaaacttacatggtgagttgttccaatttgtctgtcggcatccggttgagtatcgcgcagtcgtgcgtaactggcaaatacgcccaacatgaccagtcccaggtggtccaaacggcatgggccattcttgctctcatctatggacaatatcgcgacaaaactgttattgaacgcgctgcgaaacttataatgagccgacaattgaaggatggtagatgggaacaggaggataccgagggtatattcaacaagaactgtgccatagattatcctggtga

SEQ ID NO: 1291 - DNA, 2780 bp, Cryptococcus neoformans
atgcccaagccgaagacagcgaggggtatcctcctcacttccaacttgccacagttgcagaaccttatcaaggtgtgtctccgtttattaagaagcttccttcaagatgccggcttacaagtttcgcagcgtgatcctgagggttataaggaagagtttcttacccaatacaatcactacctttccctccttcgtcttcattccgtcgcatcttctactccttcttcctcgaatgacaaatccaatgagctcttcgcagacttgatcacattcatttctcaagtggcgcagtgttatccggaggcgaccaaagatctgcccatgcaattgagcggcttgttgctgggtggggaaagtggtacctctaatgttgttacgggcgatctgcgaaagacagcggtcaaaaacttggtgatgttgaggaataaggaaatcatcgattctatccagtatgtgtagccctcaagtgaacctgtaaagatgtgctaaacatgttgcagacttcttcagactctcctcccccttcttcccacagtcccatcgactctccgttccatcatccgccacaccatcctcactgacattaaaacctccaacgctaagacgaagaaccaccgtctgaaccgcgttgttcagtccctcttgtttggcatggtcgaaagcggtatgggtgccgaagtagttggtgacaaaggaaggaacaagggcaagggacgagagaagggtggtgaggccatgtgggctgtcatgatggtcaaggagttatggaggaagggcgtctggacagatgccaagacagtatcgatcgtctcccttgctgcgttccaccccaacaccaaggttcagtccgccgctcttcatttcttcctcgggtcagagaatgaggacgaggatgattcagaagatgaggatgaagtgggagaggccagaagggatgtgagaaagatggagcacaggatggaggtttcgcgaggaaagagaaagaaggagaagcaggttaagcagttgaaaagagaggcttccaaggtaagctattggattatattcaccgtttttacaatggctaacgttactgtgcagaaacgtaagaagagggctgaaggtgcgggtgtcactcccaacttccccgctctggagcttttgcaggaccctcaaacctttggcgaaaagctctatgacaacctccacagacatggtacgtgcttttcctcatctcgaatagatgttggcttactctcctttagataaaatctattctctcgaccacaaagttctcatcatgcagctcctctcccgtgtcatgggtgtccacaagctctgtgttcttggcttttacagctacattatcaagtacctcacctatcatcagcttcaagtcactcttattctcgtctccctcgctcaatctgtacacgatcttaccccacccgacgtcctcacgcctgttatccgcaaactagcgcaagaatttgttcaccccggtgtcggcgctgaagtcatcgctgctggtttaaacgcgatcagagaagtctgtcgaaggcagccgtggtgtatggaggaagacttattgggtgatttaattgagtacaggaagagtaaagataagggagttgtgactgcctcaagaggtttgttgcagctcttcagggaagtgaatcccggtatgctcaagaggcgagaaagggtgtgtcttatccttaacataataagcaagatggctagctaacagtgtcaaatagggtaaagccgccagcatgggtctcattggttcccaagtccttgcctacggtcattctgccgatgccgccgagggtatcgaaggtctcgagttgctcgaagaacactacgccaaactccgtaaggaagccaatggcgatgtcggtgacggatccgatgttgagatggatgtcggcgaggatgatgatgaagggtgggaaggctgggaggccgagtctgattccgaagctgattcaaatggatgggaaagcgttagtagtggaggagaagatttggagatcagtgatagtgaagatgagtcagacaagaggagggataagaaagataagcgggagaagaagaggttggctaggggtaaagggaaggccaaggctgaggatggagaaactgatgaggatgaagagatggacgatgcggtctctgtggcggccaccgaagctaccgaggcgtctcaaaccaccaaaaagctgtccttactcgctcagcaaagggtgcgtttgtttgacgtctatgctaaaacttatactgatcctcctttacatagattcttacacctgcagactttgagcttcttaacgaactccgtctcaaggcggccaaagagctcgctgctgccggcggtggctccgctgccaagcgcaagcttgctgctttggaagcctccaagcgacatgttggcgaagacgaagcggaccgattccttaccgaggctgagattctgggaccgagaaagaaggccaaggcgacttgggaggagaggatggagagtattcaaaagggacgagaaggcagagagaagtttggtagtatgaagggcaagaagaagaaggcggcccctagcagttctacaaacaaggaaaaagccaagaacaagcctatcatgatggctttgcagtgagtataattgatgatctgggctttgattgttgaactgacagcatgatagctccaacagggttgtttccaagaagaaagcttccttgcgagacaagcaaatcaggcttcgtgcggctatcgaaaagcgcaagaaacaaaagcattag

SEQ ID NO: 1292 - DNA, 2636 bp, Cryptococcus neoformans
atggtcaaatcagccccaaaaaccgctggaaagtcaaagaagcgagcagtagagcaggtgtcagaagagagcgacgaagaatttggggaccaagggagtggaattgatatgagtgatgatgaggaagaggttgatggagacgatgaggaggatgaagatgaagcttttcctgaattcgacagcgaggcttgaggataatgatcaagaagaagccagtgatgaggagcaagatgaacaggatacgttctgacgaaagtgaaatcgtggaggaggacagtgactctgagtcaggttacaacacgtctgacatcgagcgaatgtacgcttctgatgatgatctctcgtccgaagagaacaaagacctccctgtcgacgagaagctctcgagacttatcgccaagaacactgtcaagcccgacgactctattggcacagatgacaaaatcagtcgtgcaaaggaaggggtagggagattggtgcccagcaaacacgtgaagggatcatttgtgcgagagtacgacgaatatgaggccggatatggcagtgaaagtagcaccgaggatgtgagttacatctcgctcgacaagacccagctgacaatagcagaaccccaatactgtcggtaacattccgatggagtggtacgatgaccttcctcatatcggttacgatgtcaacggtcgcaagatcttccggcctttgcaaggcgacgaacttgacaagttccttgccaatgtcgaggatccgtccgcttggacctctgccgaagacaaacttcttcaacaaaatgttcagttgtcagacaaggagctcgatatcattaggcgattggagagggccgaaaaccctgatgccgactttgacccctatcaacctactattgaatggtttaccggcgaaggcaaggagagagtcatgccgcttagtgcggcgcctgagcccaagaggagattcgtgccttccaaatgggagcataagaaggtgaattcactttgaaactgataatatgccaacgctgactcgtttgacagattatgaagatcgtcaaggctatcagagagggccgaatcatccccaacaaaccttccgccgaaaaacctcgcttctatcctatctggtctgacgccgaccagcacaaccctcacgtcatgtatatgcccgcccctcaacttccccctccgaagacggccgaatcctacaatcctcctgaagagtaccttcctaccgaggaagagaaggctgagtgggaggcgatggacaaggaagaccgaaagaccgatttcttgcccgagaagtatgatgcccttagaaaagttcctggctacaagaacttggtgcaagagaagttcgagagatgtcttgatttgtacctcgcccctcgaactcgacgagtcaagctcaacattgacccagactctcttattcctaaacttcccgctcccaaggagctcaaacccttccctatcgcttctactgtccagtaccgtcatcccggagacactcgtgtccgatccgtttccaccagccctgatggtcagtggattgcttctggctcagaagatggtgtggtgcgagtctgggacctgggtaacggtcgtgaagtctggagatgggatttacacgctggtcctattcagtacgttgagtggtcaccttctcgtgaggagtctttgcttgtggctcttgtcgccggtaagatcgctgtgctctctcctcttgctctcgtcgctcctcatattgccgcccaaaccctcacccactccaataccgcttttgctactagttctgcgacgacaaagcaaggtgccggtaacgaagttaaaggaattgagtctgtcaaatggacgagaccgagtgagagggaaagagaaaggggtgtcttggtgtatgtggaagttcctggtactcctaaacaagttacatggcacaggaagggggactactttgccacggttgcatccgacggttagttcaatgtcgtaaaatggtacactactaatacaaaatagccgctaacaaatccgtccttatccaccaactctcccgccacggcagtcaatcccccttccgtaagactcccggcacaatccagcgcgttgcattccatccttctaagcctcatttctttgctgccactcaacgttacatccgtctttacgaccttgctgctcaaaagctcattagaactttacagtctggtgtcaaatggatttcatccatggatgtgcactccggaggtgacaatttaattatcggtagttacgataagaaattagcttggttcgacatggatttgagcgcaaagccttataaaaccttaaggtgggtctattcagtttctttttgtggcaatgttgacagaagatcacagataccacaaccgtgctcttcgatccgttgcctatcaccctactctccctctcttcgcctctgcctcagacgatggcacagtccacattttccactgcaccgtttacactgatctcatgcaaaacccgctcattgttcctctgaagatcttgagggggcataaagtaatcgatggtatcggagttttggatttgagatgggtgcctggaaaaccgtggttggtcagctccggtgcggatggagaggttaggctttggtgttcgtag

SEQ ID NO: 1293 - DNA, 2982 bp, Cryptococcus neoformans
atgatgcaaaatgagctgacctgggttttagctggtatgtctgctgccatctccccaactaatctatcactcattgcgtaatttattagtcaactccgacaatggtccctggacttcgaggtatctatatgcgtattaaggccatcgatatggcgctgatgaaaagatagggcaattgcgaacgtatccttcgttccattgccatcgccaagtctcgtggagcaacacttcgagtgggaccagagctggaagttcccggatacggatgtttggatcatttccttgaaggcgagtataataaatccatcaggtccagttggatctattgctgagccaaactgtaggtgataccatgctccactcttgggaagtccttgcgaaaatcttgcagagtgaagaggcaaagggcattgtttgtgatatcggaatgtaagtttgaccgctgtatctctatggaaatcaatttgacatggatccaaggcctctcgaacacaagaacaacaattataactgccgagtcatcatctttaatggcaagattcttttgatcaggccgaagatgtggatggccaacgacgggaactatgtaagcggcattcatgtcgaaaagagagctgtgcgctcatcacattatagcgagagctaaggcacttcacaccttggcacaagcataggcaggtcgaaaagcattccttgcctcatatgatcaggattgtcaccggacaggtgagttgctcacatatatttagcggtgataagttgcgggctgatttgtttagacctatgtaccttttggagatgcggtaattgccacagaagatacagtaatcggtgtcgaactctgtgaggagctcttcacccctgcctcgtatgtatttgttytggacagtcgtgcgcattatgactgacttatcggcaggccccacattcttatgggccttgacggtgttgaaatctttaccaattcctccggtagtcatcacgagcttagaaagctcaaccgccgtgtggagcttatcaaggaagctaccatgaaggtgagtcgcttgtccttttgatattgtttaacccgttaatcgatcgtgtagctcggtggtatttacctctatgcaaaccagcaaggctgtgacggtgatcgtctctactatgacggagcttgtctcattgccatgaacggccagatccttgcccaaggccctcaattctctctttccgaagtcgaagttgtctccgccactgttgatcttcgcgctgttcgagctcacaggacaacaagtagcaggaggatgcagagtgcacaggccgaggcgtatgagagagtcgtggctgataccagactcgatggtggtgagcagatcaaggtgggattacgggagactaagggtagcatggatgtgaggtatcacacccccgaggaggagattgcgtgagtccggcggttttgtgtgatttaatccgtactgacggcatcttcagtcttggtcccgcatgctggctctgggactatcttcgtcgatcccgtactcaaggttacttcctccctctcagtgggggtatcgacagttgcgcaacagccattatcgtacactccatgtgccgtttggtcgtggaggctgctgcaaagggcggtaagttgtgctcttcgccgagtacgatataatatctgacgacacctttgtagatgagcaggttattactgatgctcgacgaattacaaatgagcctgaagacagcacctacattcccgaggatcctcgtgaattcgccggcagaatcttccacacttgttatatgggtacggagaactctagtagcgagactagggaaagagccaagaacctcgctgacgctatcggcgcgtaagtattggctaaccatttgaaagttgaggyggctaactcataacgatagataccacgttgatttgaacatggacaccgctgtgagtgccgtcaagggtatcttcagcttcgtcaccggcaagactcctcaattcaaggcgcacggtggcaccaatgccgagaacttggcgctgcagaacattcaggtaaatggctttctcctttgaccagatcacgaaactgacagcatgatacaggcacgactgcgaatggttgttagctacatgtttgctcaacttcttccgtgggttaggggtaagaatggcggtctcttggtcttgggcagtgccaacgtcgacgagagtctgcgaggctatttcaccaaatacgagtacgtaacgcttcatgtttgtcgtgaaaggctgtgatattgatatggtctttagttgctcaagtgccgatgttaaccccatcggtggtatcagtaaggtcgacctcaaaaggttcatcgcctgggcccaagtcaagtttgacctcccgatcctctacaagtatgtacttactctttacgtcccgtccaacatagatctaacttcccttagcttccttcacgctgtccccactgcggagcttatcccgatcggccctgacaacatcatccagtctgacgaaatcgaaatgggcatgacttatgacgagctttcggtatacggtcgtttgcgaaaagtggagaagtgtggaccgttcagcatgtttggcaagttagtgcaggagtggggcagtttcttgtccccgaaagagattgcagagaaggtcaagcacttcttcttcatgtatgccatcaacaggcataagatgtatgtatcactttcatgatggtatgaggtatatctgacgcaccatataggacgaccatcactccttcagtgcacatggtacgttttcctgctggaattaatgggttagacctgctgatgtagccatacaggagtcatacagtcccgacgacaaccgctttgaccttcgaccgttcttgtatccctcccaattcactcatcaattcaggaagattgatgaacttgctggaaagttgcctgacatggcacagaagcccaaggttgacacgaatgaagttgattaa

SEQ ID NO: 1294 - DNA, 2659 bp, Cryptococcus neoformans
atgatgagagacaggtgcgttgtcgtgtggcggcggacggtagaatgatgttgaaggaattgctgacgatgtgaacaggccgttgcaaataaattcttgaacgacgcagcctccagtgacgaggaaagcgaagaggaggacaagatcattgttttgagtgccaaggacaaaaggtatgtcttgttgcattcgtgactggtgtcataagaggagaacatactcatacacttgcaggttcgccgaaatggaagccgctatccacagcatccaaaacgcggtcaagaacactgactgggtccttgcctcttctgaacttgacaagctcttccggtttatcgctcgacacctcgtcaccattgtcgcctcccctatccctgctgaaggccacattcctccccgattcctcgagaccctcgtctctcttgaagctgatgtcgccaagactcttgccgcggaaaagtctgcacccaagaagatggctcccgctaaggccaaggctgtcaatggtatcagacagactctgagaaagaggagcaaggaatttgacggtgttttgaagacttacaatgaggtttgtattattggctcttggtgcgaaaggagtgtgtaaactaatgttgatgtaggaccccgaagcgtacaccgctgcttatgaaaaggctaacgccgcccctgctgcccctaagcctaagaaggccgctgttactacccctggtgagggtgaggacgacgagttcatgaccatcggcaagggaggaaagactcttaaccttaccgctgacggtgtcttcaagactttgagggaaatcttcgaggctcgaggccgaaaggttcgtcagttttttgtgatcaccattgcgttgactaaatccttgtagaacaccgatcgtgccgagactatcaagattctcaccaagctccttgaagtttctgaaactacctaccagaagattcgagtccttctcgcgcttgtccctgctcgactggactactctcagcacctcgtttcaatccctcaagaatcttgggttaccgctttgcaagagtttgaccagttgatttctatcttgatcgctgagcccgactacttggtccaggagaccgttggcgagtatgatgatctggtggagaggactcctgaggttgtggacggtaagaagcaaaaggtcttgattgccggcagcttaatcagtcttttggagagcttagacagcgaggtacgttttttttttatatatcgcaaagtgttagactgacatttactcctccagctcaccaagactcttcaacacactgatgcgcacgagaagggtgatgagtacattgatcgactcaagcacgaggctcctctttacaccactattgtcaaggctcagaccctttttgagcgcgaacagctttccgacaacattgcccgtaccgtcatccgacgtctcgaacacatctacgccaagcccgacatcatcatcgagcacttcgaaagcaaggctacccaggccgctgctggtttgaagtccgagatcactcctttcgatgtcaagcgtgacgccagcggtgtcatccacgacctcgccgtgttcatctaccagtccgatgcccccgttctccgtgcccgagctatcctttaccacatctttaaccaggctctccacggccgataccaccaggcgcgtgaccttctcctcatgtcacacctccaagacaccatttctcacgccgacgtcaccactcaaatcctctacaaccgtgcggttatgcaggtcggtctcgctgctttccgactcggctttatccccgagtgccagactattttgtccgagatgttctctaccctgcgacagaaggagttgcttgcccagagtgtgcagaggtataacattcaactttctcccgagcaggaacttctcgaaaaacgaagacttttacccttccacatgcacctcaacgttgagcttttggaagccgcttacctcacttcttgcatgcttgttgagattcctttgcttgctagcgttgatactgaggagcagagaaggcgagtgactagcaagaccttcaagaggttgttggatatggccgacaggcaagccttcatgggtcctcctgagaacactcgagaccacattatcaaggcgagccaggccttgcaggctggcgaatgggagaaagctagggacttgattgtttccatcaaggtctggagcttgttggacaacgctgccgaggttaaggacattcttgccaagaagatccaggaagaaggtcttcgaacatcccttttcacctacgctgcttactacgactccctttctctttctcatctcgcctccacattcaatctccccgtcggccgaatcacttctatcatctctcgaatgatctacaccgacgaactcgccgcctctttggaccagattgacggtgtcgtcatcttccaccgagtcgaacaatctgaggtgcagcgactcgcccagcaactcgccgagcgaactgcctctatgcttgagcaaaatgaaaagacgcttgacgtcaagttgggtaaccagggacaaggacaagatagggacacgagggcagtaggtggggagggaggtaggcaacaaggagagaggaggggcggcaggggaacataccggggacgaggtggaagaggaggtag

SEQ ID NO: 1295 - DNA, 2694 bp, Cryptococcus neoformans
  misc_feature (1581)..(1581): n=g, a, t or c
atgaataactcacttctccatcatccatctatctcctctttcatcccgcgtactctcaccatggcagaccagcaactttcccaggggaatctgcctgtctttatcgatgacctcatcgctgacaggactcgacagttcgtagaattcctcgacgatgaggtgagtgcctttttgccatttgcaaaatggcaacacgctaagacctcaactagacccaagcagcgtacaattatcgtgaatctatcaaacgcatgctggacgatgagcaggtccgattgattgtcgacatcaaccacattcgctcttacgagcgttcatatgccgacggattgttgctgcagcccatggagtacgtgccagcactggatgcggcgttgatgcagctcgtccagagtttacacaatcccacgaagcataagattgaggacaagcaatgtgagtatcatagactgtgtcatctcatatgtatacgcagctaaccttgaagcagtctacgtcgggttgattggttccttcggtcaacaacactgcaaccccagaacacttagaagtcaccagatcggcaaaatggtcagcttggagggtattgtcacccgatgttctcttgtgcgaccaaagatgctccggtccgtgcactggtcaccacgaacccaaaagttccacgctagaacgtacaacgactccaccatcatcgccccttcagccaaccttaccggcacaaccactgtcattcccaaggacgacggtgatggccaccccttgcttatggaatacggactttccacttttagagattaccagacaattggtatacaagaaatgcctgagcgcgcacctgctggtcagctgcctagaagcattgaggttgttcttgcggacgatttggtcgattgctgtaagcctggtgaccgaatccaacttgtcggcgtgtacaagagctctggtggtggagctggtgccagaggtttcataacctccattattgccaacaacatcatccttctctcttccaaacaaggcggcggtattgcccaaaccccgttgaccgatactgatattcgaaacattaatactcaagctcgacggaagaatgtcttccagctcctttcacaatccctcgcgccttcaatcttcggtcacgactacatcaagaaagctgtattgcttttacttctcggtggtgaagagaagaatctcgacaacggtggtcacattcgaggtgacatcaacattctcatggttggtgaccccttcaactgccaaatcccaaatgctccgattcgtcctcaatactgccccccttgctatcgccaccaccggtcgagggagttccggtgttggtctcaccgctgccgttaccactgacaaggacacgggtgaacgtcgactcgaagcgggtgcgatggtccttgctgatcgtggtgtagtctgtatcgatgagtttgacaagatgtccgagattgatcgagtcgccattcacgaagtaatggaacagcagacggttaccattgccaaggctggtatccacacttcgctgaatgcgcgatgcagtgttgtcgccgccgctaaccctatttatgnccaagtgagcttttgcagttcattgtgtataagcgcgtactgatggctatctagtatgatgtgcacaaggatccccacaggaacattgctcttccagactctttgctctcccgtttcgatttgctctttgttgtaaccgacgacaccgacgaacaacgagatcgtatgatttccgagcacgttttgaggatgcaccgatacattcagcctggtgcggaggaaggttggtctgacctgcattgcccttagatggtgaggatcgaacagctaatcgtttcttcgtcccgtaggtgcgcctcccattgagaacctcgagcaaaacctcgatgtcggcggcgacgctgttgaatcgcgtatttccgaaactcccgtatttgagaagttcaaccctcttctccactctggtgtgacgaccacttccggtcgaggtgccaacaagaagaaagaggttttgagtatcgcctttgtgaagaagtacatccagtatgcgaagagcaggattcatcccgttttgaccaagggtgcggccgactggatcgtcaacgtttacagctctttgcgtaatgacgatatggcagcgaaccaaaaacgtgtacgttatcgatctccctttcttttgaggtcataacactgaataaaatgtctatagacttcgcctcttaccgcgcgtacccttgaaaccctcattcgtctctctactgcccacgccaaatcccgtctctccacccgagttgacgagcgggacgccatggccgccgaagagatcctccgatttgctctcttcaaagaagttgtccgtcccgagcgccgaaaacgtcgaaagattaatcacgccggccagtctgtcgaggtagattccgatgaagatgaagagggagaagaggaattgcaggcgggtgtggagagaatgtcaatgaatggggatgttggtgtgacagagtctcagagagaaagagcgagagaaaagaacagacgggtggaaagacaagcagcaggccccgtgccagaggacgacgaagatttcgagatgcgagaagccgaggaatcacttgctttgcaagaagcccctcgttcaccacccacggcgcccgaagttgctgtcgaactttctaa

SEQ ID NO: 1296 - DNA, 3033 bp, Cryptococcus neoformans
atgatggaagtgtcgaaatatgaaccttctctcgaaacaaacaaggggcgaaaaggtagcttttcacgaatctgtagctttggcagggatgatagatatccagccgaccgggtctgtccacatactagtcttaaatatgtactagaaatgcaatcccataaaatggacgggtgctctcttgtgcaagcaaagtgggggattagatacaagcaaaacaaagttcgtcgcgaacgcgctcgacgcgtaaattgaattcaggttcttcatgagatatccttcaatttcatctctatcccctctttcatccttacttttcgcaccaacccaaacaagcaacaatggaagaaggccgtatctggtccgttggcgtcctcgaaggtgcagagcagcaaaacgccccctctgaaattgaacgactcttctacgactttcttcatgggttccgtattgaagaccaatggacgtaccgcgacgctctccgatccgccttgcttttgaaacaccacactttggaagttgatttgagagatcttgtggcatggaatgaagagttggcgcagaaagtgcaggagaaacccggagaaatgattcctctagtgagtttttttttcttattttgaatatcgcttgctctttacgtatttttatacgtatccaaagtactgatgaagttcaaaatagttggaagctgcactcttgaaatacgcccgtgatttagttcgtccgaccagtgaagcagacagggaacgagaacgcgagcgagctcagaatggtcagcccagtttggccgctgaggaggtgcctgatatgcaggtggccatcaagtctggcatgaacctcttacaattccgacaactcaatgtaagtgcttcttatctcttgataccatccgataaatatctatttaactaatttgatatttacaggcgaacaccctgaccaccctcgtcaggttaccagggattgtaatcaacgcttctcaactcacatcccgagcgaccgaactcgctctccaatgtaaaggctgtcgaagtgtcaagcacgtcaaagtctctggcgctatcggtggtgaacgtgccgctcttcctcgacgatgtgatgcgtaagattcatagcctttcctgctgtcactaccaaaactaacgaggaactgttactacacagcgaacccgtagaaggccaacgcaaagattgtccccttgacccctatgtcatcctccatgaccggtgccgctttgttgaccagcagaacatcaagctccaagaagcacccgatatggtccctgttggtgaattgccccgccacatgatgcttcatgccgagaggaacttgaccggtaaggttgttccaggatctagaatcattgcaaccggtatctactcaacttttgctcccaaccacaagagtgtaagcgattcatttgttatgcatttaataaatacaggttgctaatatgatactgtgttcagcaaaagacatcaggcgcacctgcacttcgtcaaccttaccttcgagtgcttggtatcgagcttgacagttctgctgccagctctggaacccgtgtcttcactcccgaagaagaggaggaattccagcaactcgctaggagcgatgacttgtatgaacggttcgcgaacagtgtcgcccctagtatctacggaaaccttggtaagcacataatcaaatgttggccgtggaaactgtactgatcttcctttctgctccttttagacatcaaaaaagccgtgacttgtcttttaatgggtggaagcaaaaagattttaccggacggtatgcgtcttcgaggtgacatcaacgtcctcctcctcggtgaccccggtactgccaaatcccaactcttgaaattcgtcgaaaaagtctcccctatcagcgtctatacatcaggcaaaggttcctccgctgccggtctgaccgcttccgtccaacgtgatcccgttactagggaattctttctcgaaggcggtgccatggttctcgccgacggaggagtggtatgtatcgacgagtttgacaagatgcgggatgaagatcgagtggctatccatgaagccatggagcaacaaaccatttctatcgccaaagctggtatcaccacgattctcaactctcgaacctcggttctggcggctgccaatcccgtgtttgggcggtatgatgatatgaaatcccccggtgagaatattgatttccaaacaaccatcctttctcgattcgatatgattttcatcattaaagatgagcacaacgaacagagagataggacgattgccaagcatgtgatgaatatccatatgaacaggcagacggagaatgaggcagtaggagagattgatatcgaaaagatgaagagatatattggatactgcaagtcgtgagttaattcttccctcctttcaatcaaaatcattgtgctgatgttgggattaaaattaggcgatgcgcaccgaatttgagcggagaagcagcggagatgctcagctctcactttgtcagtctgcgaaaggaagttgcccaagttgagcgagataacgacgagcgaagctctatccccatgactgtccggtaagtccttctttcttccaagtcgcttgtgggatacgcgtacaagtgctaagaccaaattccatccttctcatagtcaactcgaagccattatccgaatctccgaatcccttgccaaaatcacgctctcccctcgcgtgcttcctcaccacgttgaagaagctatccgcctattcaaattctccaccatgcacgccgtttctgtcggttcgggcgtcgagggtctctcccgtacagagctcaacgaggagattgacaggatcgaaaaggaattgaagaggagattaccgattgggtactctacgagttatcaaagtttagtgagagagtttgtttccggccaagggtactcgcaacatgcgttggagaggtgtctgtacatcctggagaagagggaagttgtcaagtatactggcatgaggagggttgtgcagaggataggtgtctag

SEQ ID NO: 1297 - DNA, 2887 bp, Cryptococcus neoformans
atggctgctcttgacgacgaagatacatctgaccgcaaacttcagaagctcgatctacctgattttgatcctgaagtccagtcaggagacgcggctcaggtgggctccattggtgcagacttggcagtggcggatggagatgaagatgatgatacggtggtgaaaaaggaggaggagaaggaggagaagatggatatagacaagaaagcggaagaagatgaggaagaggacccgttggatgcgttcatgagagacaacgtgcagcaggtcgtagaggtgaacaaggcggacgccaagcgaatggggttgcgggttgctgaggatggcagcgacgacgaaaatcagggacaagtcgtggagaaggataagcttgccgaagcggaggcgttgttgcagtgcgtttcatttttctccaaaccaaagagcatatgcttacaactcattgaagacaagctgcggctaaatcacgcaagaaagatcttcctcctcctgaccattccaagatcgactatgaacctttccgcaaggctttctacgtaccgcctgttgaagtattggagatggatgaggaagaggctgagttagtgcgtttggaaatggacggcatcaaaattcgaggacaggatgctccaaagccagttaggaactggggcgcctttggcctgcctcaggggtggtaagtctatcatcttattgtatgcgaaatacaatattctgacgtttaatagcctcgatgtaatcaagcaccaaggttgggaaacacccacgtccattcaagctcaggctatcccagctataatgtccggccgagacgtcatcggtattgctaaaaccggttccggtaagactgttgctttcctcttgccaatgctccgtcacgttcgcgaccaaaggcctgtgtccggtagtgaagggcctattgcggttgtcatgtcacctaccagggagttggcctctcagatttacaaagaatgccagccctttcttaaggtgctcaacattagggtaagttcaggtcttcctaattaaagactgtcgagctaagttttgcatgtaggcttcctgctgcgtcggcggttcgtcaattagtgaggatatcgctgccatgaagaaaggtgccgaagtggttatttgcactcctggccgaatgattgaccttctcaccgccaataacggccgagtcacaaacgtccgacgcaccacttacatcgttatggatgaggccgaccgaatgtttgatatgggctttgaacctcaagtcatgaaaattatcaataatgttagaccgagcgcccagaaggttctattctcagcaacattccccaagacaatggaatcacttgcgaggagaattttggtgaagcctttggagatcacagtcggaggcagaagtgttgttgcacccgaaattgaccagcgtgtcgaagtgcgtgatggtgatacgaagttcacacgtttgcttgaaattcttggtgagatgggcgaggagcacaaggacgaagatgatttccgcacccttatctttgtagaccgtcaagaaagtgcggatgatctatttagagaactgctacagagaggttatgtctgtgcttcactgcacggcggtaaagagcaggtcgatcgagatgaagcgatcaaaaacttcaagaatggtgatgtgcctataattgtggcgacttcagtagcggcaaggggtttggatgtaaaagagttgaagcttgtcattgtgagtttctcgtttgtccatcatgaggctgtatgctgattcttcaaaagaattatgacgcacctaaccatatggaagactatgttcatcgtgctggccgaacaggtcgtgcggggaacaaaggcacttgcataacatttatcacgccggagcaggaaaggttctccgtcgacatcgtacgagctttggaagcgagtaaggcattcatccccgatgacctgaaaaagatgtcggattgtaagtagactttttacccttatgatgaaaatcactgatggtaaattagcattcctcggtaagatcaagtctggcaaagcccgagcagctggtagtggatacagtggtaaaggtctcgagcgaatcgaacgccgtcgggaggagaaagaccgagctgaaaagaccacctacggcgatacgtctgaagccctgtcactctcctcgcgtgagggtgctgtcatcccctacaaagccaagacgaatgagttcaagcctccagagacctctcacaagggtgaagcagactatacattcacagaaatcaaggttgatatcgtcaatggccctgcgccggaccgcgtgtcctctcaacctgtatttaacccgaagaacgccgtggcctctttgccagcacaaacactggcggcactggagaaggcaaagaaggaggggccgaggcgtagatgcggcgaatctggcaaatgtggtggccaaacttacccaatctatcgaactcaccaaagccgagaaacttggtctggcggcagccacctctgcacctcgtcttgctcctggtgcgagaacaaaagatcccgacgctaccgactggcatgctattttccccatcaatgattaccctcaaaaggctcgttggaaggctaccaataaggagcaaatgactttgctgcaagaagtttcaggagcaagtatcacaatgcgaggcagattttacccgcctggggaggaacctgcgttgggtggtgaacccaagttgagtctgttgatagagagcaacgacgaaatgagagtgagggctgctgtagaagaaattcgaagggtgctggtcgaaggatcagtacaagcacttaatgcggtcgatagagcgggtgcgagtggcgggaggtacgctgtgtagaaaaagtgcttttatcgagctttccatga

SEQ ID NO: 1298 - DNA, 2784 bp, Cryptococcus neoformans
atggaaagtttcatcctgttcttggaaaagttagtgatgtctcattccatttatgaaaaagtacttacacaaatatctttgttagctatacagaaagcatcgctttcccagaaactcctgggtctgtcgtaccaccacctacaggggatgagtcaaaatactatgttgagcaggttcatctgatgaagatagatgagaggaccactctttacgtcgactttggccatcttctcgaacgtgaagaaattctcgctcgagctatccaatcccagtattaccggtgagtgacattcgcttaatagtgatccgcgcttacactacatagattccttccttatcttcggcgggcggttcagtttcttgtgcgtcgttatgagcccacttggctttatatgtcaacatctgtcaatgcaagcgagaccattcctagctcttcccttactattcgagaattcaacgttgctttctacaacctccctctcacatcgggtatccgtgacttgaggatggacaagatcggtcagttgatgagcatcagtggtactgtcaccaggacatcagaggtcagaccagaactggttagcggtacattcgtatgtgataactgcaagacagctatccatgatgtggaacagcagttcaagtacaccgaggtatgttttttctcatgtttttcatgcttgcagctaacaagaggcagcctatcatgtgtcaaaactcaacctgcagtaaccgtaaccaatggcaacttaacattgaacaatcaaaattttccgactggcaaaaagtccgtattcaagaaaacgccaacgaaattcccaccggtagtatgcctcgatcactcgacgttattctccgttcagaaattgtcgagcgagccaaggctggtgacaaatgtacctttactggtaccttcattgttgttcccgatgtttcgcagcttggtcttcctggggtgaatgcggagatgatgcgagaagcgaaaggtggccgaggcgatggtggaccggcgagccagggtgtaacaggtttgaaggcgttgggtgtaagggacttacagtataagactgcgttcttggcttgcatggttcaaaatgctgactccagagtaagactttagctctacggatttgaatcaagctaatttcatgtaggctggtgttacagacgtgcgaggtgaagttgaagacggccaagaagaccgagaatcgttccttcgttcacttacttcccaggaactcgacgagttgcgaggcatgctcaactctgataacatctaccaaagtcttgtccagagtattgcacctaccgtctatggtcatgagattgtcaagaagggtatccttctccaacttatgggcggtgtgcacaagcaaacacaagaaggcatccatctccgtggagatatcaacgtgtgcatcgtcggtgatccctctaccagtaaatctcagttcctcaaatacgtttgcggtttcctccctcgtgcggtctacacatccggtaaagcctcctcagctgctggtcttacggccgccgtcgtccgagatgaagagtctggcgagtttaccatcgaggctggtgcgctcatgttggccgacaatggtatctgcgctatcgatgaattcgacaagatggacattgccgaccaagtcgctattcacgaagccatggaacaacaaaccatctctatcgccaaggctggtattcaagccaccctcaacgcccgtacctccatcctcgccgctgccaaccctgttggcggacgatacaaccgtaaaatgagcctgcgtcagaacgttgccatgtcagcgcctatcatgtctaggttcgacttgttctttgtcgtattggacgagtgtaacgaaaatgtcgatttgcacatcgctcagcacatcgtgaatgtgcatagattcagggatgatgccattgctccagaattcagcaccgaagcgctccagaggtatattcgatacgccaggacttttagtccaaaggtaaattttgtccgattaccactatagacgtatatacttatctgccacagttgactcctgctgccagcgctgttctagtcgaaaagtaccgctccttacgtcaggatgaaggtggtcccggcaagtcgtctttccgaatcactgtccgtcagctagaaagcatgatccgtctatccgaagctatcgcccgagcaaactgtcaacacgaaatcaccccagccatcgtgcgcgaagcctattctcttttgagacaatctatcattcacgttgagcaggacgacatttctttcgatgatgaggatgagggcaatggacttaatggacctgatggacctggtggtgatgatggtatggatgaggaccctcaactgagttcggcggaccttgcggcgttggatgaggcagaatcaagttatcaaagaacatcctctgctcagcaacaagagcaacaagcgcgtgaaaccagcgttgctactactcaaccgtcgaagaggaagatgcgaatcacttgtgagcaccctttctttctcccatgcctgaatgaactgataacctatgcagataaccaatacatggaaataatgaacctctgtgttctttatctctccgaggttgaacgggatagcggtactggggttgatcgagaggagttgatacaatggtatctcgaacagaaggagaatgacttcgaatcagaggaggatatggagtatgagagggaagtgatagggaaggccttaactaagctcgccaaggtgcgtttgatggtttaatgagactgtgccagtag

SEQ ID NO: 1299 - DNA, 2922 bp, Cryptococcus neoformans
  misc_feature (2371)..(2371): n=g, a, t or c
  misc_feature (2373)..(2373): n=g, a, t or c
atgactcgtgcatgccacaaacgccacctcgcatcatttttatcgtgtacccattccctgtgtggcatttcttggatcggcttgcttgcttcatcccctcgtcaatccgtcaacgcgccacgtacacaaacaaaacaaactccttcgctgctgggtcatcaaccgccatctcatctcatcgcaaccgcaactggcctctttacccctcctttggttttgttccacgcctcgttcaacttgtctatttggccactccatctccattttaaccttaattgatttcattcttgtgtcttttaacttagttcttccttcattcactcaagatcacatgtgtggcaagtatcaagtccactatgacgttgttctctgctgacttgccgtacaggaatcttctcttattgctctttcctttgcgaaaggaaccgcaagtacgtctgcgatgttctgtgcaacggtctcgcgaggcttgaatatcgtggatacgacagtgccggtatgtcatcatcgcttctcagtgttcctcacaagctgatggcaacaaaaatgcaacccatcaggtatcggaattgatggcgacagcaaaggttcctctatgattctcttcaaggaagtcggtaaagttgctgcgctgaggaagcacatcgacgaaggcatcccctgtcccttgcccggtcaagcgccctcgaaggagaaggttgatatgtccaaggttttcctcagccagacctcgatggcacatacccgctgggctactcacggtgttcccagtcctggtaactgtcaccctcacgtcagcgacgtgcaaaccgagttcagcttggtccataatggtatcattaccaactataaggagctcaagcttgttcttctcaagcgcggctatactttccacagtgacaccgacaccgaagtcgttgctgtgctttgtaaatatgtctgggatagtcagcccaacaagcggctcaacttcacggagcttatcaagactgtcgtgaaggagcttgtgcgtagatattagacacttcattttgttatatagctaactctgttataggaagggtccttcgcattcgtgttcaaatctactcatttccccgatgagattgttgctgcacgacgcggctctcctcttttgatcggtgttaagacagacaggaagcttaaagttgattttgttgatgttgagttgcccactgctgaggaacgaggtaggtcaacgcttttctctcctttctaatgtttatgcttacgttgaagcagtgaatgacgtggatgccagtggtctccttgctgtaccggctgctgttgccgagggccctggtcccaaacttcgccgatcccagtctcgcgctttcctctctgaagatggcatgccccagcccattgagtttttcgtagcgtccgatgctagtgctgtcatcgagcacactaagcgtgtattgtatcttgaagatgacgacatcgcccacatcgccgaaggcgagcttcacatccaccgcctccgtcgcgacgataccgtttcttctgtacgtgccatcgagcatctagagatcgaacttgcggccattatgaagggtcagtatgaccacttcatgcagaaggagatttacgaacagcccgagtcggttgtgaacactatgcgcgggcgagtcaacttcgacactcggtccatcatgcttggcggtctcaaagcatacctgcctgtcatccgaagaggcaggaggttgatctttgtcgcctgtggtactagctaccactcttgtatcgctgttcgacctgtctttgaggagctgaccgatattcccgtcgctgtcgaacttgcctctgacttccttgatcgcagaactcctgtattccgagacgatgttgccatctttgtttctcaatcaggtgaaacagccgacaccattctcgctatgcgatactgtctcgaacgtggtgctctttgtcttggtgttgtaaatgccgtgggctccactctctcccgtgaaacacactctggtgttcacatcaacgctggccccgaaattggtgtggcttccaccaaagcatacacctcgcagtatgttgcacttgtcatgattgcggtgcaattgtcagatgactccatcaccaagacagcaaggaggcagcaaatcatcgatgggttacacgacattcctgcccagattcgaaaggttttggccatggacaaagtgctgcaacagatggctaaggatatgttgtccaaagagaagagtttgctgatcatgggtcgtggttatcaatgtgagttcagcgcaacttattgtgatctttgctgacattatctagacgctacctgcttggagggtgcacttaaaatcaaagaggtttcttatatgcattntnaaggcgtaagtcgctgtttattatgcagaaagactcaaatcgtctgacgcttcctactagattttagccggtgaactcaagcatggacctcttgcactggttgatgagcaccttcctgtcattttcatcatgactcgagactctttgtatcccaaggttcagtctgcgcttgcccaagttacagctcgaaagggtcgacccagtgagttttccttcagctgcttttattgccttgacgaagcttacgatggttagttatcatctgcaacgaggacgatgacactgtcaacgacaacgccaaggtcatccgggttcctcagactgtcgattgtcttcaaggcttaatcaatgtcattcctctccagcttttatcttaccgtgagttccatctctagttgaaataattcattctaacaacctttcagaccttgccgtgatgaacggcgtcgatgtcgatttcccccgaaatctcgcgaagtcggtgactaccgagtaacatggactgttcataggacttttttccttccgtttttattaatcccacattaa

SEQ ID NO: 1300 - DNA, 3044 bp, Cryptococcus neoformans
atggaagagccagagaagaaggaagaaaaaaagtttgagtgtgtcttctgtctttcttcccatgatgccatgcccgtaaactgattggatacagctggcgagcggcagcggcagcgcgtgctgctggtcctaaagccccaggatccaaggaaatccctgagggtgcgcctgactgtcttgcagggcctcacgtttgttttcacaggagagatggagagcctgggaagggaggatgcgcaggagctcgtcagacggtattctgggtgagtatctttttatcatattatactaactcgaatgctaaggctttgggtatagaaaagttaccacggccccttctggaaaaacttcttacgtcgtagtgggcgaaaacgctggtgtctcaaaactcaacaaggtcaaagagaagaaaattcctatgatcaacgaagatgaattccttgaacttattcgtcaaagatcttctggcaaaggacccgatggaacggtagataaggcggctgtggaaaaagcgactaaggcaagggagaaggaggagaagaaaatcttggagcaggctaaagagatggaagagagggaaaagaaagaggaaaaggagagaataaggaagcagaaagctctggaaggacaaggtatggctgtcaagtgagctttgtcatatttccttggtgcatctctggcactgactgctattcagaaaaatgggtcctgcatcagcccagctgtggacgaccaagtatgctcctactagtttgaaggagatttgcggtaacaaagctcctgttgaacgcctgggtcaatggctgcaagactggtaagagtacaattaatgcttgatgtatcatggctgatatagtcacaggcaaaagaattacaaggcaaatttcaagaaacccggcaaagatggtatgggcatttatcgcgctgttctcatttccggtcctcctggtataggcaaaacaacttcggctcatctaatggcaaaagaagccgggtacactccattagaactgaatgcgagtgacactcgaagcaagaagctaatcgagaatgaaacaaatgtcgacaacaagagtttggatgggttcttcaagggtcaaggcgttggtgtaagtcatctaatgaagttcagaaaaggaaaggccactgacgagcgtacaggatataaatgccgcggggttgaagattgactctagaacctgcttgattatggacgaagtagatggaatgtccgcgggtgacagaggtggtgtcggcgctctgaacacattgatcaagaagactaaggtaagtggagcgcggaatgttcttcagactattcattgattattgttttggtagatcccaatgattttgatctgtaacgatcgcacattacaaaaaatgaagcccctacagagcacgactttcaacatgacttttaggaggcaagtcgtctttttgtattatattatgctgtgagctgattgtcaaggcagaccccagccaaacgagattcgctcaaggattatgtctatcttgcacaagtacgttaagttgtaagctaatcagtaacgagttaatattgcttaatagggaaaagctcaagattccacccaacgtcgttgacgagcttgtgaagggagttaattctgatatccgtcaagttttgaacatgctctccacgtttaagcttggtaagagtgaaatgaattttgacgaaggaaagcaattgtaagtcattttgatgtttttggaccttgaattaagctcattcgcgtctgtagggtcaaggtcaatgagaagaacacaatcatgacgccttttactatcatcgatagattgacaggcccatatgctttctccaaaaatagcaaagaaacgttgggtgatagaatagagctatacttccacgatttcagttttgtgcctcttttcatgcaggtaagttgcgaggaacttcacgcagacaagtagagctcatcgctgtatatcaggagcactacctcaaaacgaaccctactgtcttaaacaacctcgacggtcccgagaagaacctcaagcaccttgaattagtatccaaggctgcggactctatatccgacggtgatttaattgatcgcatgattcacggctctgagcaacattggtctcttttaccgctgcatgctgtagcttccacggtaaagcctgccatgcacgtgtatggtgcaatgaggagtcagggtggtggttggggcagctggggtcctgctttccctcagtatgccattttttcttctgccgcctatcgaatacgagtatgatgctaacagtgatctagatggctggggcaaaattcgaagcagaacaaacttcaaagacaacttacggatattcagattcgtatgcgtttgcgggtgtcaggaagcagagaggagattagagagcagtacatgcctctcttggccagcaagattgtatctcctctcattgatcgtggtgctgtaagtacctcgttagtgcgctacttcactattgctaattatcatgcaggcggctgtggaagagacgattgagtacatggacgaatattatcttggaaaagacgattgggatgcatttgtcgaacttggtgtggatacgatgcgggatgaggacatcctgaaaaaaatcccaagcgccacgaaggcctctttcaccagacagtaagtcgtatgtcgttcgtgtcaacaacagaaagctgatctttgcgcaggtacaacaagactgatcaccccatcgcgttccacaagggtgacatgtttgcgggggcaaagaagaagattgatgctggaccagtgccggacaatgaggatgtttttgaagtgcgtttgtcctgtgatccgacgggctatcatctgacttttcgtttcgtataggaagacgagcctgtgccggatgagccggaggaggatacggacgaagaggaggatccgttacaggataaattggtcaaagctgtaaagccgaaaggtaaagccgcggccaaatctgcatcaaaaccgacggcagccaagggagtaaagtcaaaagctaagaagtaa

SEQ ID NO: 1301 - DNA, 2836 bp, Cryptococcus neoformans
atgtcaggccacagccatcgtcccactctcaaacaggttagtatctctctccacatccagtcaatggtcttctgacattgctatagtcaaacaagggcttcaagtcaaagcatgcttcaaagggctctttgaaagctgctgccaaaggttcttatcgtttacaccctacagtgccttatactgatacatattctttgcaggcaaagtttctagttcggcccattctcatggtaccaaaaatgccctcggcaactccaaaaaggcaaggctcaatgccaatgctcagaagaggaccgcgaagagacaggcagtcattcaggatcaaaagtttttctcaactagcagcggaggaggtttgttcatctattcatcaggcgactcctctttgtgctaacaataataggccacgttcctcgaatcgtgtctgttgtccctcttctgccttcgatttctcctcgaactttcattgcgaaccttttgccttccttgggtcttgacgaatctgaactgcaagagatttctgccgcactagctgactatggaagctaccttcttcgagcgccccgctacaagacttccctccaaatcaaccttttgccgcctctttcagtctaccctacactcgatgctgcttttgtcagtgactacattgtgcttctgatgagtagtgtggatgaggttcagctgcagggtgaaaccattttaaggtcattgcagggtcaggttggaggcgcagagattgttgcttgtgttcaggtgggtttgccatggcatgagttaaatcacgctgatgtgccatctgtaggcacctgaatcaaaccctctccgtcctgatactcgacaactcatccataaatcactcctgtcgttcactcgatactttttcccatctgttggcaaaatatattcatccgacacacctcaagaatctttgttacttgcacgagcgttgtgtgaggcagctcccaagggtatgaggggtgatgatgggcgcgcctacatcgttgcggagaaccccaattccatcagatggacaggcagtggaatactgacagaagatggtcaagaaaaggggcaattggaaatcattggcactgtcagaggaggaggcactctgaacgctgatagattagtacatataccaggaagtggtgattatcaagtggcggcggtatgtacatcgggtgtacgtggattgcaaccttatctgaccttcccgaacagattctttcagcgccgttaccttcaaaaagacaacagactcaaatcgctacaaacgacactctctctgtaccaactgaagatgctgatgacctcactgccaccaacattcctgatctccttgcgaacgaacaaacatggcctaccgaggaagaaatggggggcagtatggagcacacagttgaagaaccagttgtgaagaaaagggtaaagagagtgcccaagggaactagtgcttatcaggctgcttggatcgtggatgatgatgaagaggtcgatgcggaggatctgagcgacgatgagagcatggccgcatcaggcgacgaggctgcatccgctggagagagaagcgctgcggaagacgaggaagaatttgaggatgtcgaggttgattctagacaagaggttgcccacaaggatcttgatccggaacaagaggaagcagagtaggtttgtcccgacagagagtagttcttgactgatttacgtctgcccagctatgaagcttacttgaaggaacgttctaaggccgatagagaagacgccatgttcccggacgaagttgacactcctcgtcatattcctgccagaacaagatttcagcgttatcgagggctgaaaagcttccgaacaagcccctgggacccctacgaggatctaccgattgactatgctaagattttccagtttgaaaattttgcggctacaagcaagagaattcaactggagggagcacgagaaggtgtcaaagtacgttattccctccaaagcgaagaaccttgatcgattgactgatgacatgtgtagactggaaccagggtcatccttgttcttcgtgatgtgcctcgttcagtcattgaggaccgggaaactggtattcccttcatcgtgcatggtcttttgaggcacgagcacaagcaatcagtcctgcatttcgttgtccaaaggaacactgagtacgcggaacctgtgaaggctaaggtaagcgaccgtctgttcatccaccttccaatcgctgacaactcattttcaggaacccttggttttatgcgtcggtcccagaagatacattgtgcggcctttgtactcgcagcatgttagaggaggtggaaaaggtgccaacaatgtgcacaagtcagagaagttcttgaggccaggtactgccaccgtcatgtctgtctttggaccgatctgcttcggcaagagcccctgtttgttgatgaaggatcgaggtatcaaaactggcaagttcattctatctcatatagacgcctattctgacctgcacccgttgtcagttcctgatctggtagctatgggaagcttcctctcgtccgatccaacgcgcatcatcgccaagagaatcattctcactggtcaccctgtcaagatccacaagaagactgctaccattcgatacatgttcttcaaccgcgaagatattgaatacttcaagtctgttcaacttcacacaaaatacggaaagatcggtaacattaaagaacctctcggcacacacggatactttaaagcccactttgacggacctattcagcagatggatactatctgcatgagtttgtacaaaaggcagtatcccaaagtgagtgaatga

SEQ ID NO: 1302 - DNA, 2744 bp, Cryptococcus neoformans
atgaagtccaacttcgtctttcaaaatctctgcggtaccgtttacagacaagggaatgttgtctttacgcccgatgggaactctgtgttgagtccggtgggaaacagggtgtctgtgtttgacttggtgaagtaagtagtcacgggtgtgctagatgatctccggctgatctccgcttcagtaacaagtcaaggacattgccctttgagaacagaaaaaatatcgcttcaattgctctttctccagatggcaatgtactaatttccatcgacgaaggtgaatattcctatcgtcaattgatgtatcttatctgacaccctggatgctttagatggaagagcactgtttgtgcacttccgtaaagggacagttcttcaccacatctccttcaagcgcaaagtccaccacgtttcattttctcccgacggcaaatatattgcgataacgcacggtcacatggtgcaaatatggaacactcccagccatttggtccgagagtttgcaccttttaccctccatagggagtatactggtcatcacgacgaagttgttagtgtctgctggtccaaaacctccaggtgagcgaccacaaatgatgtcttgcaaaacggaagttgatcagaaacaggtattttatcactacctcgagagatatgactgcgaggctatataccattaacccacttgaaggtttccaacctaagcaatttgggggacatagagatgttgtgttgggagcgttcttttctcaagatgagaagactgtaagtcataatctctctcagtcgaggcgacaaattgatgttctatagatttacaccgtttctcgagacggtgcagtgtttgtatggaaagcaaaaaagggcgtctctgaggcggactccgatgttgagatggacattctcgatgctcccaccacttccacctctgccgccaaccttgcccttgagcacgccgtcgcctacactcgatggggggttcacgctcgccacttcttcaaccaacctggtacgaaagtgatttgcgctaccttccaccccaaaacatctctcctcatcgtcggcttttcctctggtgtcttcggcttgtgggagatgcccgaatttacccccgtacatacgttgtcgatctccaacgagaagatctctagtgtggcagtctccgcgtcgggagagtggttggcatttggggcggccaagctcggacagttattggtttgggaatggcagagtgagagttacgttcttaaacagcaaggtcactactacgacatgaacaccctggcgtttagtcccgatgggcagaacatcgctactggcggtgaagatggtaaggtcaagttatggaatgcttcaagtggcttctgctttgtgaccttccctgaacacactgccgctatctccactgtcgaatttgctaagcagggacaagttttattcacagcgtcccttgacggtactgtccgcgcatacgacctcatccgataccgtaacttccggacattcacctctcccacccctgtccagttctctgccctcgccgtcgatccttcaggcgatgtggtctgtgctggatctcaagattccttcgagatctacatgtggtcagtccaaaccggtaaactgcttgacatcctcactggccataccgctcctatatcaggcctcgccttctctcccaccggtaatcagttggcatcttcctcttgggatcgttctatccgtttatggtcagtcttcgggcgatcaagagccaccgaaccgattgagctttcgggcgaagcgactgcgttggcgttcaggcctgacggaaatgagatctgcgcttctactttgaacggggaattgatctttatcgatgtggaagaargacagattaagtctgttattgaaggccgaagagatatttctggagggagaaaggtggatgaccgacttacagctgccaataacgccgcaagcaagtatttcaacagtgtcatctacactgccgacggtgcttgtgtcttggctggtggaagcagcaagtatgttgtgttgtatgatcggacggaaggcgtgatggtgaagaagttccagatcagcgaaaatctcagcttggacggtacgcaagagatgttggactcgaggaagatgacggaggcagggaccatcgactcgtttgatagacaaggcgaggaggaggacttggaagataggttggactcgacgttgcccggtgccagcaagggtgatctttccaagagacggtatagacgggaggccaggaccaattgtgtacgtttttctgccactggtcgaagctgggcggcggcgagtacagaaggtcttttgatatattctctcgatgagagcaccacttttgacccctttgacctctccctcgatcttacccccgaatcagtgatgcagaccgtcgtcagtggtgaccaccttatcgctctcattatggctcttcgtctttcagaaaagcctcttatccagagggtatatgaatctatacctccttcatcaatccgactcatcgcccgccagttgcctagggtgtacattacccagtttatgaaattcatcagcgaccatatcgagaacactcctcacgtggagttcgatttggtgtggacagctgccatgttgactagtcatggaaagtttttgaaggagaggaagggagagatggcttcgacgttgagaggattggtaagagggttgatgggtttagagatgagtgttgccaagatgtga

SEQ ID NO: 1303 - DNA, 2795 bp, Cryptococcus neoformans
atggtgatgtggatctacaagcgcgatgggcgcaaggagcctggtgagtggcagtcattgatgcgttcttctcaaagccacgctgacagtacttacagtggcttttgacaaggtatgtctcatagtgtctttcaaaatcaaggcagaccgctgcaaaatgttctcatattctgacatttgattttgcgacgtttcaactaggttactgcacgagtgagtgattgctcatttttttgtcctggacgcgtcagtgctaatgtttggtaaatagatcaacaaactttcatatggtcttgatcccaacttcgtcgagccggccgaaatcacccagaaggtcgtccaaggtatccacgctggtattaccactgttgaactcgacgtaagttcacgtgtttgttcacttgacgcgtcatgcatcgctcatcgcctgccatagaatctcgcagctgaaactgccgcttaccttaccaccaaacacccagattatgctattcttgctgcccgaatcgccatttccaaccttcacaaggagaccaagaaggttttctctgccgtcgtgcatgacctacatgcatgggtcaaccccaagaccggcaagcattctcccatgattgatgatgacgtctataagattgtcatggacaacaaggatattctcgactctgccattatctatgacagagactttgcctacaactactttggtttcaagactcttgagagatcataccttctcaggatcaatggcaagattgtcgagcgccctcagcacatgatcatgcgagtcgccgtgggtatccacggttccaacattgacaaagtgatcgagacctataaccttatgtctgaaaggtatttcacccatgcttcccccactgtaagttattcaaccagttgtgaaaggtctgttgccgacaaatataacagcttttcaatgccggaactccccgaccccaaatgtcatcatgcttcctcgtggccatgaaagatgattccattgatggtatctacgatactctcaagacctgtgctcagatctccaagactgccggtggtattggtcttcacattcacaatatccgtgcgaagggctcctacattgccggaaccaatggttactccaacggtatcattcctatgctccgagcttacgatgccaccgcacgatacgttgaccaaggtggtaataagcgccctggtgccttcgccatctatcttgagccttggcacgctgatgtgtttgacttcattgacttaaggaagaatcatggtaaggaggaggtacgagctcgtgatcttttctacgccctctggatccccgaccttttcatgaagcgtgtcgaatccgatggagactggactcttatgtgtcccgccgagtgccctggacttgccgacgtatacggagaagaatttgagaagctctatgagagctacgagaggaaaggcaaggggagaaaaactatcaaggcccagaagctttggttcgccatcctcgaggctcagaccgagaccggtgtcccttacatctgctacaaggatgccgccaactccaaatccaaccaaaagcagcttggtaccatcaaatccagtaacctctgtactgaaatcatggaatattcttctcctgatgaggttgctgtctgtaatcttgcttcccttgctcttcctgccttcgtggaccttgaacgtcgcgtttacgatttcaaaaagctgcatgagattaccaaggttgttaccaagaacctcgacactgtcatcacccgtaactattatccagtgcctgaggcccgtaactccaacatgcgtcatcgacctgttggccttggtgtgcagggtctcgccgacgctttcatggcacttcgcatgccgttcgactctcctgaggctagagagctcaatatccagatcttcgagaccatttaccacgcagcgcttgaggcctcatgcgaactcgccgaggagtttggtacctatgagtcttacgaaggttctcccatttctaaaggtatccttcagtacgacatgtggggtcgtgttcccaccgacctttgggactggactgagttgaaggcaaagatcgcacaacacggtgtgaggaactctctgctcgtcgcccctatgcctactgcctcaacttctcaaatcttgggttggaacgaatggtgagcaattccatgctagccattttcttgctgtactgattatacttttagctttgaaccttacacttcgatgctttacgctcgacgggtactttctggcgatttccaagtggtctgcccttggttgttgcgagacctcatcaaccttgacctttgggacgacaacatgaagcagcttatcattgccgccggcggttccattcagtccatccccaacatccccgatgatctcaagaagatttatcgaacagtctgggagatttcgcagaaggctgtcatcgaccttgcggctgaccgaggagctttcattgaccagtcccagtcccttaacatccatctctccaatccctcgttccctcagctcacttccatgcacttctatggatggaagcgaggcctcaagacgggttgctattaccttcgaacccgtccttccgccaacgccatccagtttactgttgatgcttccactctcaagactgcgaagagcctcaactccagtgccaaaccctctccgaccccttctcctgctcccggtgcaagtcgtgccactgcagacagtctcgtgcaacccatgaggaaggtcaccattgccaccactgcttcccatcacccccctcagcccgatga

SEQ ID NO: 1304 - DNA, 3074 bp, Cryptococcus neoformans
atgtccgcatcggcttccggatcatcttggacagagcccacaaaggctcaggctcctcctaagtacgtcttgtgatggacttccggccctttatgccctagctgccgctacattcctatattttagagtggccagtgatgaaatgcgaaggccaagagctaacaccatccatctttagagatgcggacttgaaacaagcttgggctttcctttctgtcggtgttgaccacattatgaccaggtgagtcagctgctgctttaacatccgtctctcatctgaaatgccaagtgctaacccaaaataggcttagctttggaatgtcttactcttactacatcctcctatataccgccatctacaactactgtactcagccaggcaagactggtctcccttcattttcaccccaacggggcggagctagtcttcaaggcgccgacctccacagaagcttgcacaattggttatctgctcactgcaagtccatgcgagaggttcgtggattgtttatgtcataaaggtttggtatcaaaaggctgataacaatttatctgcccttacgcaggaggccgagaaacttcctgaccaagaacttctcaagtattatgctcgtcaatgggacaggtacacccgaggcgccttgtacgtcaacaagcttttcaactatttgaacaagcactgggtcaagcgagagaaggacgagggtcgaaaggacgtttatcaagtgtacactgtgtgtaatttttcctcgctcttccgccactttgctgacagggcaatctaattgttcagcttgcattggtatcttggaagaataacttcttcgatcatttcactgacaataaggggaccagccgattaactcaagctttgttacggcagatccagcagcaacgtaacggcgaggaagtcgattctggtcttctcaagaaggtcatcgacagttatggcaagtgtttcttgtcgctataagagatggtttggctgatgtgaaaatctagtctcccttggtcttgacgaggccgatgctcaacgacaaaatctggatacctataggaaacatttccagactcaattcctcgaagccaccgacacctactaccgtgctgaatcttctgcatttgttggttccaactctgttgcggactatatgaagaaggcagaggcgaggttacaggaggaggcggacagggtgaacttgtatttgcatgataatactaggaacgatgtgagtactcttgatggggcgcacttttcggtgctgacttctctgtagttgaagacaagatgtgaaaaggtactcattgaagagcaccaagccattatgtgggatgagttccaaactcttcttgatagcgaccgggttgacggtaagttatatatatatatatatatatcaaactggtactgatgcaaattttagacttggcaaggatgtacggacttctttctcgcgtgctcaacgggcttgaccctttacgagaaaagtttggtcaacacgtcaggcgtgctggtagagcagctgtggaaaaggtccttcctgccccaggagctgtcaatgaagctggaaaggctgagtctctcgtaagtccgcctcaattgtgaaatatagacatcattaactgtttgcctaggatcctaaggcgtacgttgaggcccttctcgaagtacacggcaagtatacctccatggttgaagggcccttccgaggcgaaatgggtttcaaccgtgctctcgatcaggcctgtggcgacttctgcaactccaatgctgcttgtactgtctctacaaagtctcccgagttgttggctagctactgtgatttattgttaagaaaaagcaataaggactctgatgctgaatctttggaagcttctttgagcaaagctgtgagtttgctttgattttgttgttcgcctttgctaatggacatcgtcgtagatgatcattttcaacttcattgatgacaaggatgtcttccacaagttctatcagaagaagctcgctcagcgacttgtcggttctctttccgcgtcagacgatgcagagagcagcatgatcaccaagctcaaggagttatctggtttcgaatacaccaacaagttgtctaaaatgtttaccggtgagtctgtctttgtgttgtatcgagactttgtactgatcaggaacagatgtcaatcttagtaaagacttgatggaacgattcaacgaaagggagagagagaagggcatagcctccgatagtgagttttggtacgaaagctaggtcaggcgcactaactccattcaacagtcgatttccaacccttggtccttggctctaacagttggcctttgcaccctcaacaaaccgactttgccattcctcgtgaaatccaggccctctatgatcggttcaacgccttccacggcgaagttcatcagtacgttagtctcaatttctctcgtcacacggcatcctgacatactatgtagaggccgaactctcaactggttatggcacatatccaagaacgaactccgcaccacctacctcaaccaaaagtacattttgatgacctccgcctaccaaatggctatcctcacacaattcaacgtttccgacaccctttcttacaaggatattgaggccggtaccaagctttcccccactgtgctcaagccccagctcggcttactcgtcaaactgaagattctcttgaacactaatgaagaatattctttgaatacgggcttcaagagcaagaagattagggtcaatttgaaccagactatcaagtctgaggctagggctgagcagaaggaggttatcgctgctgttgatgaggacagaaagtttgtttaccaggcgactattgtaaggttgatgaaggggcgaaaggtatgtttctagtcgaggtctacttttgtgaatactgacagtttccatttagactatgcaacatcaagctcttattcaagaagtcaccgctcagatctcctccaagttcactcctaaaattccagagatcaagaaagcgattgaatacttgatcgacaaggagtacctggagcgagctcccgattccaataa

SEQ ID NO: 1305 - DNA, 2882 bp, Cryptococcus neoformans
atggcacccaagccagccaagacatcttccaagactgcgaagttgccgactcctgcagccactcctacccgtcaaccttcggtcgataccctctcaaaaccgacggtggttgacacgcctccgacgccggcatctcctgcccaggtcagcgctccagttcctcccaagaagtttgcatatcccatcccatcacgcctctctccgtcgactatcaacaacacggaaagcttgttgcgcttcatcatcctggcgttaatatgcggtgctgcgattggaagtcgattgtttgcggtgatcagattcgaatctgtcatccacgaattgtgagtcaaatctatccgcaggattctctcaatgctaacgtctgtgtcttcatttcagtgacccctggttcaactagtaaggctattcttcgaggtcaaacttccctactgatttattcctagccgagcctcgaaagttcttgttaacaagggtttctacgagttctggaactggtttgacccctccgcttggtaccctctcggcagaactgtcggtaccacgctctatcctggcttgatggtcacgtctggactgatttggcatgctcttcgggcaatcaatatgcccgtggacattcgcaatgtctgtgtcctccttgcacctggattttctggattgactgcctgggcgacttatctgtcagtgtaacaaattatctgatcattgcatacactaacatgagagcgttgtagtttcaccactgaaatgtctacaccatcagctggtctattggcggccgctttcattggcattgtacccggatacatctctcgatctgtcgccggttcttatgacaacgaagccattgccatcttcctcttgatgagctccttctactcttggattaaggccgtcaaaaccggtagctcattttggggtatgatcactgccttgttctacgggtggatggttgctgcatggggtggttacgttttcatcaccaacagtatgtcgctcggccctcaattgaattgtctgtttactcttttgcagtgattccattgcacgcctttgttctcattgtcatgggcaggttcaacaaccggctttataccgcttactcttcctggtatgtcattggaactatcgcctccatgcaggtcccctttgtggagttcctccccatccgaacctctgagcacatggcggccttgggtgttttcggtcttgtacagctgatcggattcgtcgaagtcgtccgacgactcgtgcctggcaagcaattccagctccttctcaaagcttttgtcgtggccgtattctgcctcagttttgctgccctcgtcactttgactttctctggatggatcgcccccttcgctggaagattttattctctttgggatactggctatgcgaaggtccacagtgagtcaaatgccataccttccgggatctatatttattgtcaacatagtgcccattattgcctccgtctccgaacaccagcccaccgcttggccctcattctactttgacctcgaaatgcttatcttctttttccctgccggtgtcttctggtgtttcaaggagcttcgcgatgagcagatcttcatcatcatttatgccgttctcagtgcctattttgccggtgtcatggttcgacttatgcttgtcatcacgcctgttgtctgtgtttcctccgccattgcgttctccaaacttctcgaggcgtatattgaccccgtcatccccgaaagcgacgaggaagctggcgagtctcagacgcaggttgtctccaagtccaaggcgaagaagatggccgctgccaacgccaataagagcgggttctctttcacaggtattttgagcggcaagtctgtctccggcatctttggtctcgacactcgatttgctgtggtttccattctctctgtcttcctcttcatctttgtccttcactgcacatatgtgacttcaacagcgtattcttcgccttcagtggtacttgcatcgcgaaacccggatggtagccaaaatatcattgatgatttccgagaggcttactactggattcgccaaaacaccgccgaagacagcgtcatcatgtcctggtgggattacggctaccagatcgctggtatggctgatcgccccacccttgttgataacaatacctggaataacacccacattgccacagttggtaaggccatggcttccaacgaagatgtcgcatatcctatcttgaggaagcatgatgtcgattacgttcttgtgatctttgggggcttattgggctactctggtgacgatatcaacaagtttttgtggatggttaggatctcacaaggtgaatggcctgacgaggtgcaggaagtcaactactttactcaaagaggggagtatgctgtcgatgacagggcgtgcgtctatttttgtattattgcctggcgaaatttgctgacaatctgggcagcacccctactatgaagaactctctcatgtacaaaatgtcttactaccggtaggtcaaaatacattgtcgatagatgaacatcgtctgacatatctcagcttccccgagctttatggtggacacccggctcaagacagggttcgaggccaaattatccctcctaacagtgttactcttgatactcttggtaagtttagggtttgaagataagtgtataagacgctaatgtcgtcacattcctgcagacgaagcgttcacatccgaaaattggatcgtcaggatctacaaggtcaagaaggaagatcccattggacgagaccacaaggccgttactgcctggaacgggggtaagaagttgaagaagagtcctagtgccagtgagggcgtgaagcggggcagcgggagacctagcatgtga

SEQ ID NO: 1306 - DNA, 2863 bp, Cryptococcus neoformans
atgaagaatgaagatattatgatgatccaaatggccaagcaaatggctgatgagtaatgaatgggtggcggcgaaaattaattataaaaaaaaattaaggtggaggtcgggttttttgaagatttgttttgacgagttcaccattcatcttctctatccagattcaagcgggcgaaatggcagcgataactccctcatgggcactcgagacaacggcagatggagaggtaaaagagaagacatcaggtccaggcggtcaatggcgcgctctcagtacgtacacccatacatcctcctgctcctccatcaccacgagctcacactcgcacagatgttggacccgacctcatccgctccttgttgatacgcaaattcaagaccccaacgcctatccaaagagcagctatccctcccgctctctccactccaccgagggatatccttggtatggccaggaccggttctggtaaaactttggcgtaccttattcctcttcttcaaagaactggatcgacacaccatggacagggcccaagagctttaattctctgtccgagtcgagagttggcggtgcagatctatactgtcggaaaggatcttgctagagggatgaacaagggcaagggaaaaggaaagaacaagaatgaagacgaggaagatgaggaaggcaagggtaaagagggactgagatgggccctcatcattggtggtgaaggaatggacgctcagtttgaaaagatgtcctccaaccctgatatgtaagtaatttcctgtcgttctctataaaaagtgtgctaacgaaaacagtgtgattgcaactccgggtcgattcctccatcttatcgttgaaatgcacatggaccttcgacacctccaaacggtcatctatgatgaagccgacagactttttgaaatgggtttcgatgtccaacttcaagaaatccttcatcgtctcccttcgacccgtcaaaacctgttgttctctgctactctcccctcatccgtggccgaattcgcaaaggccggtctcgtgaaccctctccttgttcgtcttgatgccgagcaaaagatctcacctgatctcgccctcaaattcttctctgtcaaacccggagaaaaggaagcgtctttacttgttcttttgagagaagtcattggcaaacccaatcaacctgagcctgccgatccctcttctgcccctcaggctatcgtctttgtagctaccaagcaccacgtcgactatgtcgccgagcttttacgtacgaccgggtaccgcacctctctcatttacagttccctcgaccaagttgcccgtcagcagcaacttgccggtttccgtagtcatcaatccgatgtcctcgtcgtcacagacgtggctgcccgtggtctcgatatccccatcatggaccatgtcatcaactatgatttccctgctggtcctcgtatctttgttcatcgtgtcggtcgtacggcacgagccggtcgaaaaggtaccgcgtactccctcatcgtcaaggaagatttcccttacctctgcgacctccataccttcctcggcacggagcgtatgggcgaacccgcagacgttctgcgttcactccctattgagcagcttagtgagaatgtcgagtacgttttccataaccttgacgaaactgcaccccatattactgctttgcgtaacgtcatgcgcaaaggtcaaggcatgtttgaacgttctcgtactaaagccaatcccacgtcttatcgtcaagcgaaatctctcgcttccgctctcagtaataatcctccccgaattgatgacatgtttgaggatgcgatggaggttgaggtgaatgaagaaaaggctagattactcgccaaagtggcagcgttcgcaccgtctgaagctgtgttcgaagtcggaaaacgcgagagtgagagcgcgattatcatgaagaagaggagaaagacagtcgacgagaggcagaaacgagtctcaaaggctgaagcagagaagagtacagcgagcggtatggagaaggcccccgtgaaagagcttcccgcacctcaacttcctagcaagaattttaaagacccttccttctacctcgaccatacccaacgcggagcggaagctgaaaagggttactctctcaaatctggcgtcgaatctctttctggcgcgatcactgatatgactgccgatgaaggtacaggaccgaaagcccaaaaggccagtcaactcagttgggacaggaagaaacacaagtttatcaagaaaaatggtagtgctgatggagaaaagatgatcaaaagcgaaagtggtgcattgttgcctgctagttatagtagtggcaagtatcaggaatggaaatcgaagagaaggcatatgcctgatgggccggtggaggctctggctttgggaggtggcaggaggggaagacatggaccaccgggacagaagagaaaggcagaagatggagatgggggagaggatgctggtggaaagggtaggaaggatcaaggaaagagcaagggcacgggtaagggcaaggacgatttcaagcagaagtctcctggaaagcctggcaagaaggggatcaagcagtcctctgggctcaaatctgcaatggatatcaggaaacagagggaaatcgcgcaaaaggttcgttgtactgcgacttgcgatattttgaactttgctaacgggtcattgtaccacagagaaaagagaagaacgctcgaaaaccccaaaagttcagaaagtaatttctcatccatatatctatgtagaaccggtgttcgattgtggactcatgtatacattattcacttgggtgtcaggaatacaggactcgtaatgtctcctatcgtactataa

SEQ ID NO: 1307 - DNA, 2954 bp, Cryptococcus neoformans
atggctgtactccacagtaagcgccctcgtatgccagccaactctcaaggcatccatcaacaaacatgcatcaacgacgacgcagcagaaaaggcaaagcggcgcaaatcggcgcatttccatactgtcccagaccataccagtatcagcaacgagaacgagaacccaaagaaccaagccgggaagagggtaatatctgggcttgctatccagcaacaaggattgatccaaaagcgcgggaagaggttgtctgcggtggaacccaatatgccggaagttcgaatcgaggtcaaggagaacaagtacgaggaatggatgaagcttgcaactgataatgtgtattagatccatatcatgtatcctgcaagaactgactttaattttttactagaaaataactgccaacaatacgtggagttttgcccttatcgactactttgccgatctcacccttctccgaaatggccctgatgatcagagtattaactttcagaaagcgagttgcacattggatgggtgtgtgaagatatggacatccagagtggatagtgtggccacagaaacggggaagttgttgagcggtttggcgggaggcagtggtaagcttgactttcctatatcttctaaagcgagatgagtctgatgatgaccggcagctgagacaggggaggatgatggttcagaaggcgaggaggatgaggccggagagccaaaaacaactagaaaggtaaatttcttcaatcctgctgcagaaaacccaacaataacgcattccagaccgtccgttctgaagctactcttgcaaagtcgttcgcccagcttcaaattaaaaagttcgatctcgaattcaccgtcgatccgctcttcaaaaagacttccgcggattttgacgaaggtggtgcgatgggcttgctgatgaaccatttaagtgtggataacaaattgagggaagtgtttgatgccggtgatgcggtggcagatgaacaggatctggatgaggaagaagaagaggggggtggagggatgattgatgaggttgtgcagctggaaaaattacgaagtgagccgcctctcttttttctatatgctccttcagcttctatcaaacgagagctgacgagggttactgaagattacattcctatcaccaaattcctcgccgactactctatcaacccctctctcgcctcgttccactttagttctgactcttcaaccggaaacgacaatgaccccgccatcattcttgggctcaaagactctttccccgttgacgaatatgatcattatgatatcccaatggcgacagcggatgactacaatccgatggacccggcatccaaccgaaggagtggggaggggtatgatttctttggaagtgaggattatgatgctgtaccagcctatggggatggcggtttcgatgaagatggtgcgagtatgatgggtgatcctgaggacggcctctccgctccttttcacaaccctgcgaacagtaacggaggctcccttgcgctccttggtccagggtcttctcatttgggcccctttgatccccaccgccaaggtcaaggccacgaaattgtgctcactttgggagaagggggtgatatcgggtcaggagggatgtttgaatactttgataaaggattcgggaagagttgggctggcgcagaacattggagattaaggaaggtctctagaaagggtgagtattgtacttcattctaatcttcttcacttttccattatcttcacccaccacttcccgtcgagtttcgactttcgactttaagcgttgagggttgagctaatatccacgacagatatggctactgccgggacaattaccactacaaactcaaaaaccaaggttgacaagacccccttcgcaatcgatttccacactcctatggttacttcccttacctcctctacacaagcgctcttcacccccgcgtctaataaatcgtctatcaccctcccgtcgacttttgcccccactagaacaaagaacggcaaggcagtgtcgggccagcgtcagcttagggaagagcgccttttaccggacgacatgcattttagcagtcaccagcttttgaggctgtttttgaagccccaattctccttgaagatgcggccaggtggtagaaacgtgggaggaatgggggggatgataggtgcagatggggagattgatgagaatttctgggcggccgctgcaaaagagagagagggaggtgaatgtgctggggatggtacgtatattttgtctgcccatggaaggtataattgtcgctaacgctagcatctatcgtcgacttccattcgacagaatttggttctgctcctgcaccatttgaatcccagttcttccaagacgacgatgattacggtgacatggataatgacgtcgactttgggcctatccaacctaatgttcctgtcctctgcggccccggtgaagaggaagacgatctctgggcaggcacgcaaatggaattgaaaaaggctcgtccggagaacgtcaattttacgaagaaggcgaaaagagtggatgtgaagaggttgaaggatgacatctggacgggtttgaaagatcttgtaccttattccgataaagctggtgatacagataccgacgatgaggattccaccccttccacacctcctgaaccttccgattccgaaccggtcaagacattctcctccattatccaatctcttcgctcaacttacccacctcagaaaatgtctgaaatctcgacatcattttgtttcatttgtctgttacatctggcgaatgaggaagggttgcgaatcgagagtgcgagaggggacggaaaggaaggggaagatgtgggctgcgtgggaatagcgccagtgggagaagacggggaggttgttttgggcgagggattaaatgctttgctggggatgttgggcgctggtag

SEQ ID NO: 1308 - DNA, 2811 bp, Cryptococcus neoformans
atgcacatacttcgcaaattgcacacaaactcacacaaaaacagcgctcagaggagctcctggctctcggcacaccccaatctcagcagcaagcctttgacaacctcgtcgaggtcttccagtcgtaagcagccgccaagtaagggcagcgcgatcaactctgatttttatataggaaacgattcaagcagactcccatcaacgtccttgaacccatcgttaccaagttcattgatctctgtgtagttctcagccgcaaggctcatgccaaatccggtctcctcgttttcaagtctgctgcccagaccaccaatgtcggtgccatcgaaagggtattgaaccactttattgccaaggccgaggcccgtcttgctgcggccgtcgagcaggccaagaaagaggttgctgctttgcccgatgttcccgttgtggacgacgacctgccccttcaaccggcttcccttatgcttgactgctttgttgacagtgctggcgacagggaaaggattgagcgaagattgattgcccccgcccaaaagttctgctgggattcttacgacatttgtctcgatattgccaaaagcaacgacaggctcgaggttatctaccaatctatcgcccaccgtgctttccatttctgcaagattcaccagcgcaaggccgatttccgccgtttgtgtgagcagcgattgcgaaaggatcttgccaacgctgccaagtacagccaccagcaacacgccattaacctttccgaccccgagactctcggccgtttccttgacacccgtttccttcaacttgaaactgctgttgagctcgagctttggcaggaggctttccgttccattgaggatgtccatggtttgattgcgggcaggaagggtactaagccttccatgatggccaactactatgagaagttgactcagattttcaaggccgagggcggtaagcagactgctgtcttccacgctgctgcttgggctagatacttccagcacgccgagagggccggcattgtcaatgacaaagcttctggctgtgtcttgctctctgcccttgccgtgcctcttggtgaagtcgaagtcaagcagaggcttgttgcccttctcaaccttcccaagacgcctactcgcgaggctcttgttcaagatgctgctgccaagcaccttaagcgcgtgcccgccgatatccgacaaatctacaagattcttgaagttgattttgagcccaccaccgcttccaaggttcttgctcctctcatcaccagcctctctcccgagtaccaaccttacctccccgctcttcgcgatgttgttctctctcgtttgctccaagctctcgcccaagtgtacgactctgtgaccctttcccacattcttgatctcgtcaagcccctcgataacaccccctgggccaccgacatgtcatcccttgaaaagttccttgtcacagcttgccgacgaggtgacattcgtgcttccgttgaccacgttgcgcagaccatcaccttcgtctctacccctcctgacgccaacggccttcagacccttgccgtctgcctctacaacactatccagtacctcaacccctctcgtcttgctccggtttctcgatccgacgctttcgccgctgctattgctcaggccgaggaagagcgcaaggctgctagtcacaagcggcagatcgtcattcgacgacgtgagcttttggaggaggcgaagcttcgtcgagagaaggaggcttctactgcccttgctgagcgtctcaagatcaaggccgaagaggatgctcgtcgagctaaggaggaggccaaacaggctgaaattgaccgagttcgcaagcagatccatgagaccaaacaggccgaggctaagcagctcgcagcttccctcgctgcccaaggtgccctcaaggtcgatatctccagcattgaagacctcgactcttccaagcttgttgccatgcaggtcgagcagcttgccaaagagaaaaaggagctttctgagaggttgcgtatcgtcggcaagagggttgaccacctcgagcgtgcgatgaggaaggaggagagaccgttgttggctcaggactacgaacgtcagaaagccgaggaccgagcggctcacgatagggctaaccaaattgctcgagagcaggccattgagcagcagagggctgctagggagttgaagcagagattgggtagaatgttggaggactacgaggctgtcaaggaacgcattgagtctcagatgcaggaggaattgaaggcggctaaagaagaggctaggagaaagattgaggaagaaaaggctcagttgagggagaaggtcattaagaggaagagagaagagaaagaaaggaagctcaaggaggctagagaagctgaggagaggaagcgaaaggaggaaggtaagtctatgttgtcaggccattcgtctgtatcgtcactgacaggtttacagaggaggctgcccagaaggctgaagaagaagctcgcgctgctgctgctcttgaggctgaagctgctgccgctgaacaacgccgagccgagcgtgaagctcaacgtcaatcagacctcgaacgtatccgcgctcagcaagaacgagaagaagaagctcttcgtcgacgacaagccgaaaaggccgcggctactagcggtggcagcgcctacagaccgcctgcgcgtgctggtactactccccccacggcttctccagctccttcaagtggtggtccttcatggttagctcgacgaaaggccatggaggctcaaagcgccggtggtgcccctgtggccagttcacctaa

SEQ ID NO: 1309 - DNA, 2983 bp, Cryptococcus neoformans
atggcaccctcacagctcgcacagctcaaggcggctctcaataccgcaggcctgtcgaggaagacacattctaaaaaggacaagaaagcatacaagaaaggcggcgcccgcgagactgacagagcaaagaaggtcgaaaaactggaggagattagaaaaaatctcaacaaattcgatgagagggaaacacgagtaaagcatgatgttggagggaggaatctcaagggtgttgtaggtaggcctagtgcaagcaagcaggctgggttagaacaggtgtgtagttcctgtcaactcgcctccgatcacatctgatagcgttggtttgcagcgaaagaagacgcttttgcctgaacatcagcttcgcgaccaccgcggtacctttagagacaggcgattcggtgaaaatgacccttccatgtccatcgaagaccgtatgcttgagcgatacacccgggagcgtcaacgtggtcaaggcaaaaaaggaatgttcaacctggaagatgaagatgaagatgagcctttcggtgaattggatgacggatttgccttgggtggtttgacacacggtggaaggagtgtgatggatcttcctggtgacgactttgtcgcccaaggtctggccgacgaagacgaggatgaagaagagaacagagccgggagaatcgacaaacgtgtggtcagcaaggttcattttggtggatttgaagaggcaatggatgaagacctggtaagcgcttgctattatatttcgcacatggaggctaactgagacgatctcagcccgaaaagaagaaatccaagcaggaagttatggccgagattattgctaaatccaaggagcacaaatacgagcgccagcagcagcgagagatggacgccgagcttcgtgaagaactcgacggcgacattgcagacttgcagatgcttctcgctgaaaatgctccaactacccctgctgctaccctcttccctaccacatcgaaacttcaccctgaccccatgcccgtaccaggaggggaagtgattggagatggagagtatgatcaaatcgttcgttctcttgctttcgacgcacgagccaagcccaagaacagaaccaagacggaagaggagattgctcttgaagagaaggaaaatcttgaaaaggcagaggcgaagcgattgcgtcgaatgagaggtgagaatgtctccgatggtgaggaagaagaagggtcaagaaagaagcgaaaggcggatgacaaaaaacctgatgcggatgatttggaggacgattacgtggaagatgaggcgttgttgggtccaggtttgacaagggaagagatcgaaactatggtcctttctggaagcgaagctgggtctgacgacgagcaagatgacgaggatggtagggaagaggaagaaagctttgacgaagacgcggaagaagaaaatgagagtgatgccgagtctgctatggaagacttgactgaaaatgaagagctgtcggtgtctgaaagtgaagaagtcgaacctgttgtcaagagaaccaaagggaagaagactgcgaggacagaaaaggtcaaggaaataccctacacattcccctgtcctgcgaacattgaagaattcgaagaaatagttgatcctttggaggacagtgcgttacctactgtcgttcagcgtatcagagcactgcatcaccccagtctggcgcaaggcaacaaggaaaaacttcaggtcagtttcgacatgtgctgctgtctcatactctctcactgactactgtttaaacaggaattccttggcgtactgatcgattacgtcctcattctttcctctcgtccttctcctccattttctctcatccaaacacttgttccgcatctcacagctctcgtcaagttaaaccccatcactgctgctgcacattttgtcgaaaaaatcaagctcatgcaaaaaaatctttctcgtggactggctcgaggtgccgccagacccgattccaaaacgtttcctggtgcgcccgagctggctctactgaggctggtcggtttgttctggtctaccagtgactattcgcatccagtggtcgtacccgcggtcttgctgatggggcagtatttatctcaaagtcgcgtccgatcgctgcgtgatctggcatctggtttgttcctgtgttctcttttagcccaagtaagttgtgcgtccatctcgccctataaacaacatactgacagtgtacaagtacgaatcactttcgaagcggattttgccagaggccgtcaactttgtagcttcgtcaatcctcatcctccttcctcgccgcaagggtgcagaggtcaacaggacataccctgatttaaaagcaccatctacatccctttacttgaatcttccctcgtccgtcgttccttcacaaccactggaccttgggtctgctattactgccgtcggagatcaggacgaggaagaggcggagcaactcaagggcggactgctagttgttgcttgcaagctcgttgacaaatttgctggcttgtatctcgactcagaggctttcgtcgagctgatgagtcctgtaaaacaggttctggaacaatcaagggctaaaaagttatccagcgagctcaacatggtattaacatctactttgaccgccctgtccaagcgcctcagcaacactctcagtactcgtcgccctcttactctccaatctcacaaacccattcctatcgcttcctatgcccctcgattcgaggagaactttgcgcctggcaagcactacgatcctgataccgaacgcaatgcttcggccaagctcaaagctctttacaagaaggagagaaagggtgccatgcgcgagctcagaaaagacaaccgattcttggccggcgaaaaggcgagggaacaaggcgaaaaggacaaggaatacaacgcgaggatgcgcaaggcggagggcagtattacagtggagcgtgcagaagaaaaggccatggaaaggtaa

SEQ ID NO: 1310 - DNA, 2928 bp, Cryptococcus neoformans
atgggtaagcacgacaagaagacaggtaagggtcgtctcgacaagttctaccgtcttgccaaggagcaaggctacagagcccgttctgctttgtaagctttcgccctcagcttcccacatactataacttacagtcacacagcaaacttgtccacctcaatcgcaagtatgacctcctctccaaagctcgatgctgtatcgatctgtgtgctgctcctggtggttggcttcaggtagctgaaaagtacatgcctaaaggctcgctcatcatcggtgtcgaccttaacgccatcaagccccttcctcatgtcacaacctttgtcgccgacatcaccacccctcactgtcgacagactttgcgtcagcacatgcatgactggaaggccgatttagttcttcatgacggtgctcccaacgttggtagtgcatgggtccaagatgccttcactcaaaacgagttggttttgcagagtttgaaacttgccacagaatttttggccaagggcggaagttttgttaccaaggttttcagaagtcaggattataacagtttgctctgggtctttggtcagctttttaagtctgtagaagcaacgaaacctccttcttctcggtatgtgactcacgactgaaccccgtcgcggaatctgacctttttgcagtaacgtttctgccgaaatcttcgtcgtctgtcgtgactttattgccccgaagcacatcgatcccaaattcctcgacccgaagcacgtcttcaaggacattgcatctctccctacatcaatcacagagcccactgatacctctatcgcccccacctcttcttctaccgcctctgctgccgctgccgccgctcgactagctgccaactcgcacgctcactcaaacgtctatgcccctgaaaagaagcgtcgacatagggaaggttacgctgaaggtgactacacactgcatcacaccgccagtgccgaagagtttgtccgaggacaggatcctgtattgttgctgggtaacatgaacaagattgaattccgaaatgagaccgaaaaagggtaggtctggacttttgtcgaattaatctctatgctaatttttttcagctggctcaaatctcgccacactacccccgacatcattgccaactttgaagatctcaaggttctcggtaaaggtgacttcaaagctctcatgaaatggcgtcttgccatccgtctcgaaataggactcgatgtcaaagccgataagacccaagatgccaccgaggaagttgttgtcgagcctatggacgaggaagagcagattactgaggaacttcagaagcttcaacaagctaaacttgccaaaaccaaaagggagaggaagcgagcaaacgagaagaaggcaagggagttgttgaaacttcagttgaacatgaccgttcccgacgaccttgaccaaaatgatcttgccctccaaggtgaagaggagatattcgatcttgaagaaggcgagaatgaggcgaggcgtcgaggaaagaatggaggcttagctaccctagtggatgatggcgaaggaatggatctcgcttcggaatctgaggaggaagaggatgaagatgaggaagacgatgaagtccttgactctgacgaagagcgtgagcgcaagactgccgctctcgagggtgaactcgacggcctttacgactcttatgttgagcgcaagaaagaacgcgatgccaaatggaaggtcaagcaagatcgactgaaagacaaaaactttgatgcgtggcatggtattcaggagaagagcgatgaggaaggaagtgacgatgacgatggccaggatgacgacgaggagggcggatgggatgtaattgctcagaaaaaggcaaagtatggtgaaggtgattcctcggactcggattccgatgctgagcctgaaacggaggttcccaagaagatcaagaaggttagctttgaaaagcctgccagatcggaaaagagcagcggtcttatgactagtctgagggagcctgaactgcgagctcagagaagtaagcaagcacagttgtggtttgaccagcccgttttcaaggaagttggcgatcttgctgctttggacggtgacgacgaggaagaagaggaagaaggcgagtccgaggaggaagagtctgatgatgaagatgtggatatggaggacgcatctgagagctcaagtaccctcgaaggcgacgacgactttgagatcgtacctcaagcgccagaagatgacggtcccgaatgggatgttgatgatgaggatcaagacgaggttaagaagaaggttatccaaggtatgtttagattatctatccgtcgtgacactcaaagcttactcttgttgcagacaagggtcttcttactgccgaggctgtttctcttgctaccgcccttgttaatcgaaaaaccactgccgacaagctcattgaccaaggcttcaaccgtctctctcctcacaacaaggacggtcttcccacttggttccttgacgatgaatcccagttttacaagcccaacattcctatcaccaaggaggctgtcgatgctctccgcgctcgacagagggcattggatgccaggcccatcaagaaggtcgccgaggccaagggtagaaagaagatgaaggctgtggcgaggatggaaaaggccaagaagaaggctgacggtgtcatggagagcgaggagatgggtgacggtgaaaaggctagacaagttaggaggatgctcgcccgtggccgccaaaggcaaggaaaaggccaaagagaagaagatcgtcgtggccaagggtgtcaacaagggtgttaagggcagaccaacgggtgtcaagggcaagtacaagattgtggacgccaggatgaggaaggaagtcagggcgttgaagagaatcaagaaggcgggaagcaagaggaggtag

SEQ ID NO: 1311 - DNA, 3267 bp, Cryptococcus neoformans
  misc_feature (1040)..(1040): n=g, a, t or c
  misc_feature (2618)..(2618): n=g, a, t or c
  misc_feature (2661)..(2661): n=g, a, t or c
atgccaagaaggacacgatctgtgagtaatcctcgggctatgactgatcgaccttactaattgctgtaattgctgtaatagcttttcagcagatcgaaatcgaagagtcagctgatcccaagcatggaccaacgctacggctatttggagtcaacaaaagcggtaattcagttttggcgcatgtatatgggttcaagccatatttctacgttgcagcccctagcggtttcctcaacaaagaccttcaacctctggccgataagatcaatgtaagagttcccatatcagattatactgcgatctggcctaacgtacatctcagtcttctatatctgcgctgggtccttgtgtgactaactgtgctatcttcaaccggcggtctctatggggttatcgaggagacgacaccgtaccgttcattaagatcaccgtatctgatcccaagaacctatcgaaagttaaagatgagttttttacattgtccactgtatatgttgctgatgatgattctcggcgtctctacgtgcctttgagcgtggacagatagatttcaatggtcttttccctcctgaaattctcacctatgagagcaacattgcatacaccatgcgtttcatgatcgatacgaaagtgagtgcactttaccaatcaaaaattgagctaattctttgaagattgtggggatgaattgggtcagcattcccggtggacggtatgatctgctggaaggaggaagtaaaaaatcacagtgccaaattgaaatctcatgcaagtacgtgcaagatgaaggattttctcagaccactgaccagatggaccttcttcagctataaggacttgatttctcatcctcctgaaaatgaatggctggatattgcacctcttcgtgttctcagttttgacatcgaatgtgctggccgcaaaggcatattcccagaagcaaatgtggaccccgtcattcaaatcgccgcgatggtaacccgtcacggtaggttccaagttccctggtcatttacgcaagcgttttggttgatagtggnatctttaggggaatcaaagcctttcattcgaaacgtattcaccctcaacacgtgtgctcatatcgtcggatctcaagtgctcgaattcaaagacgaaagacagcttcttcttgaatggcgcaagtttgtagatacggttgatcctgatatgattatcggatataacatttctaatttcgatctgccctatcttcttgatcgtgccaaagctttgaagatcccggactttgcctttttgggtcgactgcgaagtaagtgacgctcaaaactgcatttattgttgcttccctaatatgtctccttagatgtcagaaccgaagtcaaggaaacccacttttcttcaaaagcttacggtcagcgagattccaaagctgttaatatggaaggtcgacttcagcttgatattttgcaagtgatgcaacgggactacaagcttcgaagctatactctcaacgccgtttgtgcacaattcctaggtgaacagaaggaagatgtccatcattccatcattacggagctccaaaatggtactgcggattctcggaggcgtctggctgtttactgtttaaaggtgagtaacagcaaattcaagtaccttcggcactaacatcattgcaggatgcctatcttccacaacgtctgatggacaagttgatgtgttttgtcaactacaccgaaatggcacgtgtcacaggcgttcctttcaactatctcctgtccagaggtcagcaaatcaaggttatctctcagctttaccgaaatgccgcggatgccggctatgttatccctgctctcaaaagcgaaggctccgatgagcagtatgaaggtgctactgtcattgaacccagtaaaggtttctacgacgtgcccattgccactctggatttcgcgtcactgtatccctcaatcatgatggcccataatttgtgttatacaacattattggataagggtactattgaaaggctgaagctcgtcgaaggagaagactatgtgcatacacccaacaatggtgagtggaactgttcgctgaaaatgaggcggacatactgattccgttatagacttttttgcaacatccaaacgtcgaaagggacttctacctcacattctcgaaaatcttctggctgcccgaaagcgagccaagcaagatctcaaagttgagaaagatcctttcaagcgagccgtgttggacggtcgacaacttgctttgaaggtgagcgccaactcggtctacggtttcaccggtgccaccgtcgggaaacttccctgccttgcaatttcctcaagtgttactgcctacggtcgacagatgatcgagctcaccaagaaggaagtcgaggcagagtactccatgaaaaacggttatgaccatgatgccaaaatcgtctatggtgatactgattctgtaatggtgcgatttgggtgcccagatctgccaacagcgatgagactaggtgagtgcggatgtacaagtcatgtcaagatcattgattaattggccaatgcaggtgccgaggctgccgatctcgtatccggcaaatttatcaaacccatcaagctcgaattcgaaaaggnctactttccttacctacttatcagcaaaaagcgttacgccggnctctattggactcggccagagaaatacgacaaaatggatacgaagggtattgaggtgagccgacgtgtctagttctttctagttataattgataatgatgagtcactagactgtccgacgagacaactgtcgtttggtgtccacggtcatcgaaacttgtctcttcaagatgcttattgatcgagatgttaagggtgctgaggagtaagctcctcggaatcatggaacagcacagaccactgatatgtcattctctagctatgtcaaggacactatcgccgatcttttacaaaacaagattgacatgtctcagctcgtgatcaccaaagcccttgccaaagctgactatgccgccaaacaagcacacgttgaattagtagagaggatgaggaagcgtgacgctggttcggctcctagtttgggtgatcgagtggcctatgtcattgtcaaaggcgttaaaggcgctgcagcgtacgaaaagtctgaagatcctctgtatgttttggaacacaatgttcccattgacacccgatattatctggaaaaccaactttcaaagccattgatgaggattttcgagcctatccttggtgagaaagccaatag

SEQ ID NO: 1312 - DNA, 3198 bp, Cryptococcus neoformans
atgaagtttatgcttggcgatcttcccgttctgktcccttatgatcggtatgtcgtctcttaccacaaccctcgcagcggtcaacgtcatacaagtagccacagtaactgacaacatttgcctcaggctgtatcccggtctgtatcttggccagttattgggggttcaagcttacatggcccatcgcagagcaatactcctacatggctgacctgaaaacaacattggacgcaggagtaagtcaggttgccacttctttcgagaagaccatttgacacagtggcacgaatagggacattgtgtacttgaaatgccctcgggaacaggaaaaaccgtatccctgctatctctgatcattgcctatatgcaagtaggtatatagcagctggttgaccgaatgacacctactcatatatctcactatgtagttttaccctaataaacggaaactgatttactgctcacggacagttccggaaatagagaaggctttagcggaactcaagcgattgatgatgtaccgcgcagagatgggggcaaatgatggtgatttcagaggactgggattgacgagtcggcggaatctttgtcttcacccggaagtcagtgttgaatgtctgtctgattagcaaaaggctcacagacttaacaggtcagcaaagagaaaaaaggcaaaatagttgattcgcggtgcagggatctcacctcagcgttcgcttgtgaaaaagggagggctgacccggggagcgtaccattatgtagtttccatgaggtatgttccctcagtgactgaccttagggctgacagatgtgctcaggagttgaacaattacgagcccgggaatcttatacccccaggcgtctatactctggatgatgttaagaagtatggccaagaaaagggtgtctgtccgtactttacgatcagaagaatggtgagtagagttcatagtgcaacgctcctaaggctaattatcagaaatgaagttgcctttcctcgacgttatgatatactccttccattatcttctggatccaaaggtcgcagagcaggtgtccgctgaaatgagcaaggagagcattgtgatatttgatgaagcacacaacattggttaggatctatgttgagatagccgatttgcggattaatacttacattgcgttcagataatgtctgtatcgagtccctatccatcgacttgacgaggccaatgttggattcggccgcaagaagcgtcaataaacttagtgacaagattgcggaaatcaaggagactgatgcgaagaagctggaggatgagtacgcaaaactagtcgaaggtctgcaagaagccaacgagcgagtggaagatgacgacatgctcgtcagtccggttctgtcaaaagacatggtggatgaagctatacctgggaacattcgaaaggcggagcattttatagctttcctcaaacgattcattgaatatctcaaggtaatgataccctagaacgaacaggcaggactgacttccacagactaggatgcgcgtgctgcatgttgtagcagagacacctcaatcattcctagcgcatctgaaagaaataacatatattgatcaacggcctctcaagtaagtggtgatttagttaacatcttatgcagtgtggcttatgttgcttatccagatttgcttccgagcgccttacttgtttggttcgcacattggaattgacaaacttggaagaacattctgcgctgcaaaaggttgctggttttgggacccttgttgccacttacgaaaaaggattcctactgatcctcgagccttacgaaaccgagcacgccacagtgcctaaccccatttttcatttcacgtaagttcatcatgaaggacaaccaaaacaaggcgctaaatttaccacagttgtcttgacccatcgctcgctatagcgcccgtctttgaccgttttgcctcagtggtcatcacttycggtaccatatctcccctcgacatgtaccccaaaatgttacaattccaacctgttatggaacagtcgtatcctatgaccctcacccgaaacgcttttttaccaatggttataactcgaggcagtgatcaagtcccaatttcctccagatttgaggttagaaatgatcctgcagtcgtacgaaattttggaagcatcttgattgaaatggcacggactgtccctgatggagtggtggcattctttcccagttatctatatatggaatctattgtttcagcttggtatgacatggtgaggatgtttcttatcattttaccttgaaaactgaaagcactgcatatagggcattctaagtgaggtgtggaagcataagctactgttcgtggaaactccagacgccatggaaacgagcatagccctcaggaattatcgcgaggcatgtaataatggaagaggggctgtccttctctctgtggcgcgaggaaaggtgtccgaaggaattgatttcgaccagtatgtagacatcgctgggcgctattatggtgactaacctattatcagcaattatgggcgagctgttattatgtttgggtatgttcaacacacaaaattctgttcctttggttgaccttgtgctcagcattccctatcaatacacggaatcacgtattctcaaagctcggctggagtttcttcgagataatcataggatccgagaaaacgattatcttactttcgacgctatgcgacatgctgcccaatgcgttggtcgtgtgttgcgagggaagaccgactggggtctgatggtctttgcggacaaggtgaggatggaattccgaacgttgaatacttccagcttaactcttataatagcgatttgcgagacaagacaagagggcaaaacttccgaaatggatcaacagttatattacggaggcccattccaacttgtccacggatgtggctgtttcgctggccaaaaagttcatacgtcaaatctcgcaaccatttgatcacacacagacagggatatctttatggactcttgaggacatagaggagaggcaaagacgggataaggatgaagctgaaagggtcgaaatgacacaatcagcagcaattagagagagtgccgccgaggagaatgaccatgctccgcttgctagcgattacatggagattgacgacgccgagttggcggggctgtctatacccatagatgaataa

SEQ ID NO: 1313 - DNA, 2880 bp, Cryptococcus neoformans
atgcccacgaacaacacaaaccttgacaggtcgttcttgaccgcaaatatcgatgatctccttaagcagctcaccacagaagagaagatctccctccttgcaggcaaggattggtggaagtgagtcttgcttgcttgcttgctttgatagacataggctgacgtacattgtataaaagcactgtaccgattcccaggctcaacatcccttcgtgaggtgcttatgctacttagaagtgcgggtatactgatgttggagtagcatcaagatgaccgatggccctggtggcgctcgaggagactcattttaccatatgagtgagtaccatggacttgctggttaaatgttcagggctgatcagaattagcaccggcttgtgcccttccaagcgctacttctctggcctccactttttctcccgatttaatccattcagccggtaatctcctagcacttgaaacccttgctcgcaatgctgtctgccttcttgctcccactatcaacatccaacgttccccgctcggtggtcgagcatttgaatccttctctgaagaccccactttgtcaggcttgattgcggccgcttatgttgctggtctgcaggaaggtggtgttagtgcggcgatcaagcatttcgtggggaatgatcaagagcatgaacggatgggcgaggactctgtcatcgcgcctagggcgttgagggagatttaccttcgaccattccagattgcactcaagaagtctaaaccacaagcattcatgacggcttataacaaactcaatgggacgcattgttcggagaacgaatggttacttgaggagctgctgagaaaagaatgggggttcgatgggctggtaatgagtgactggtatggtacctattccatttccgaaagtatcaacgccgggctcaacctcgagatgccgggggccacccgatggcgtcccaacggactagtgactcaccttatcaaagcgcacaagatcgaccccaggcagttggacaaggttgcaggtggtgtattaagatgggtacagaagcttgcgaagaaaaacgaggagttggtatattcaccgcctggcaaagagaagactagaactgaggatcaagcagaagacgccaagttgcttcgtcgtttggctggggaaagcattgtacttctcaaaaatgagttgaatgttctcccaatcagggaacccaaaaagatcgccgtcatcggtcccaacgccaaggccaaggtcctcaccggcggtggatctgcccaacttcgttcagcctggtcgtcaactccctggcaaggtctctccgacaatgctcccgaaggtgttgaactttcctattcccttggatgtcactccgacaagttcctgcctatacttgacgacagttttacctgtcctgatggctcacccggcttccaactttcacacttccccatcacctcctcaggcgataaagctgaggaacccgtacatgtcgagacatgggactcatccgacatgttccttgctgactttaccgctcctggtctgactaaggagtactttacccagcttgatgccgtctggacaccggtggaggatggagagtatgaatttggagtggtcgttactggcaaggggtggttctggatcaatggagaacttgttatcgatgcgtcaagagaagatgaaaggtccacgagtttttttaacttgggaacgaaggaaatcaaaggccgaaccagggctaaaaagaacaaggtgagttgttcaactgacgttacattgtcacggaagagaattgatattgcttgtcatagagatatgacattcgcttcctccacgacacccggccatactcagtcaacaacattaacactcccatcgcaagtgccggtatgcgtcttggctacatccaggttatccccgcttcgactctcctctctaacgccgtctctctcgctgcatcctcagacgtcgccttgctcgttatcgggcttaactcgggctgggaatcagaaggatacgaccgtcctgacctttctttaccgatggacacagacaagctcgtcaatgccgttgcggaagcgaaccccaacacgattgttgtcattcaagcgggttctgccgtttcaatgccgtggctcgacaaagtgaaaggtgtggtgtttgcttggtacctgggaaacgagactggtaatgccatcgccgacattatctacgggtataccaacccttctggtcgcctcccgatgacattccccaaacgagagcttgatattcccgccaacctgaactacaaatcggcacgcaccagggtttattacgacgaaggtatctgggtagggtacaagcattttaatgcaagaggtatcgaccctctctttcccttcggccatggtctttcctacaccacttttgcttattccggccttcacatctctcaagtaccagaatcaccaaagaacgtcggtgctgatggatggagagtggaagtcggggtgcaagtggaaaatattggcatggaagagggagcgcacacagtcatgttctggctgagtccgccacctgagagcccgaacggactgaagcacccgaagtggactctgcaagggtttcaaaaggtttatgggctcaaaccaggtgcaaaaagagagatcaaggtcacgtttgataagtgtaagttttctctaaaacctacagctaagaatacagcttatgagtattagatgcggtctcacactgggatgagctctggaacacttggagggcggagttgggagagtggactgttcgggttggcgtagacgcacaaaatatcagtggcgagaaggcgacattcaagattgaggatgatcttgagtggagaggcttgtaaagacagttcaatataaataa

SEQ ID NO: 1314 - DNA, 3217 bp, Cryptococcus neoformans
atggctgacgacccttctcgcgtaagtcaagttcatccgcgccgtccagcttgtctgactaacggtgttgcaggcggttcaggatgactctaccgccaccgccatcttaaggcaaaagcgatcgtaagcttactctctcatactgcctttgccattcagagaagctaacagtcgttaagtcccaaccgacttgtggtagatgagagcccctcagatgacaatagtgttgccatcttgcatcccaataccatggaggcccttggtctcttccggtgagtgtttcactgatctgcccttggtcgtgctaacagcagggtgctccagaggtgatacgatcattggcaagtttcgctatcgagtagtagccttcatctgactaaccggttatgtagtccgtggcaagcgaaggagggacactgtccttatttgcttgagtcaagacgacatagaggagggcaaggttgccatgaacaaaggtaagtggacgatgggacgtatattggatagtctgacagcttgcagtcgcccgaggaaactgtgccatcaagctcggtgatttggttcacgtctctgctgccaacgatatcaagtacggcaagcgtatccatgttcttccttttgccgactctatcgaaggtttgtaaatcgtgtagtcgaggtaggaccctatgctgacttttggcaggtctctctggaaaccttttcgacgtctatctccgcccgtacttcttggaggcttaccgacccgtcaggaagggtaagtatacgttacagattagatcagcggtcgttgctgatatttcttaggcgacgtgttccaggtcaggggtggtatgcgaacggttgatttcaaggttgtcgaggttgacccttcgccttattgtgtaagtgaacagattcatagcggccttagtgtcttggctgtggttttggatgtgctgactgacgtattgaacagattgttgcttctgaaactgtatgcttctgtcagcttcccgacgagaaagaaaatgttgacattattctaggtgattcacactgagggtgatcctctggaccgtgaggccgaggaggctacccttaatgacgttgggtacgacgatctcggtggatgtaggaagcagcttgctcaggtgaatggcttaacaagatcacatgaggcatatttactgactggggcttagatccgagaacttgttgagcttcctttgcgacaccctcaactttttaaggccatcggtatcaaacctcctcggggtatcctcatgtatggtcctcctggtaccggtaagaccctcatggcccgagctgtcgccaacgagaccggtgccttcttcttccttatcaacggtccggagatcatgtccaagatggcgggcgaatcggaatccaacctccgaaaagcttttgaagaggccgagaagaacagcccttctatcatcttcatcgacgaactcgattcaattgctcctaagagagaaaaggcgaacggtgaagtcgagcgaagagttgtctcccagctcctcactttgatggacggtttgaaggcgcgatctaacgtcgttgtgatggcagccactaatcggcccaactctattgatcctgcccttcgtcgattcggtaggttcgaccgagaggttgacatcggtatccctgaccccactggtcggcttgagatccttcgtatccacaccaagaacatgaagctttccgatgatgttgacctcgaacagatcgctgccgacacccatggttacgtcggcgccgacatggcttccctctgttctgaagccgccatgcagcagatccgagaaaagatggacctcatcgacctcgacgaggacactatcgacgctgaggtcctcgactctcttggtgttactatggagaatttccgtttcgctctcggtgttaacaacccctcagccttgcgtgaaactgttgttgagatccccactaccacctggaacgacattggtggtttggacaaggttaaaagggaactccaggagactgtccagttccctgtcgagcatcctgagaagttcctcaagtacggcatgtctccatcaaagggtgttctcttctacggtcctcctggtaccggtaaaacgttgttggctaaggcgtaagttgaccaaatcgctgagcattgctaatttttcagtatcgccaatgaatgtcaagcgaacttcatctctatcaaaggtcctgagcttttgaccatgtggttcggagagtcagaggccaacgtgcgagatgtcttcgacaaggctcgtgctgccgctccttgtgtcatgttcttcgatgaacttgactctatcgccaagtctcgtggtaattctgctggagacggcggtggttctagcgaccgagtccttaaccaaattcttgtgagggcatttcctttgttaaaatgacatgtgctgatcattatatagactgaaatggacggtatgaacgcgaagaagagtgagcatgacatcgttccgtttgacattcacctactaacgaacaatcagacgtcttcatcattggtgctaccaacaggccggatcagatcgattccgccctcttgcgtcctgggcgacttgatcaggtaagcaatctaagcaatcatctggcttcccgctctaattgtgcgctgacgttattctagctgatctacatccccttgcccgacgaggagtctcgtctttctattctcaaggctactttgcgaaaatcacctatcgacccccgagtcgacctcgatttccttgccaagaacactgctggcttctccggtgctgatcttactgagatctgtcaacgtgctgccaagcttgccatccgtgcaagtatcgacgccgacatccgcaaagaaagagagcgaaatgagaaggctgaggctgccggtcaggatgttgaactcatcgatgaagagaacgaggaggatgaagttcctgccatcactgtgtaagtcctaattgcccgatttgaaagggaacatcatactgactcactgctacagggaacacttcgaggaggtcagtcgtacttcgagatagacctatagttccgctactgacttcccataggctatgcgttacgctcgtcgatctgtttcagatgccgacatccgtcgttacgagatgttcagcaccaccctccaacaatctcggagctttggtagcaacttcaaggtgagtctattgatatgcgatttgattgttga

SEQ ID NO: 1315 - DNA, 2951 bp, Cryptococcus neoformans
  misc_feature (1138)..(1138): n=g, a, t or c
  misc_feature (2071)..(2071): n=g, a, t or c
atgctaccttctaccctcgcgagaatacccatacgcctcttacacccacaagccactcagcagctcagatcactctcgaacacaatggcaaccaacaagtcagctgtcacacagccgacttggtactctccagcaaaatcagcagacgaaccagtactcagagtctacaactccctcacaagatcaaaggatgtctttgttcccacaaacggaaggagagtcgactggtacaactgtggtcctaccgtctatgactcatcccatatgggtcatgccaggtgagctcgtctctttggaatactcgtgcaatggctgaaccacaacaggaattacctcactcaggacattgttcgaagaatattgcgagattatttcaattacgatgtcaactttgttatgaacgtcaccgacattgatgacaagatcatccttcgagctcgtgaatcgtacctcctggaccaagccatttccaccaaccttgctcttactcccgaactcatatccgacgtcgaagctgcgtttacaaagtatctcgccaaacctctcaaatcccttaccgcccctcttgaacactctcctaatgccacttcttttgaaatcctggacttgctgttgcaaaaggaccagtctgaagctcagtgggcaaaggaagctcgagaaagggaggaaaagtttggaatgtacttggcaagtctttcaaaagctagggatgcgtacaatgctgcccagcaaagggtcggaaagcccgaaggagagggacaagctgtcaaagacttggttgaaggagcgaccgacgtccttgggccgtatcttggtgagaaggtatggcatatctttattgtttcgatcagcactgattctggatatctgtagcttggccatacaattgccgatcccatcgctgtctgccgacgtctcgcctcttactgggaaaatgccttcttcaccgatatggcccgtctccgtgtactccctcccgacaccatcacccgtgtttccgaatacgtacccgaaatcgtctctttcgtccaacgcatcgtcgacaacggatttgcttatgaaggtggtggaagtgtttggtttgatgtcgacaagtttgagggtgccgagggtgatggattcaggcatgagtatgccnagctccaacctttcaagtaagggcaacaagaagctcttggatgaaggtgaaggtatgttccgcctgtttatattcagaaactaggtctaatctacagataggtgctttaactggttcccagggaaagcggcgcccagcggactttgctctttggaaagccaagtccaagcctggagaacctgcctggccatcaccatggggagagggccgacctggctggcacattgagtgctctgtcatggctagtgcgatcttgggtagcggaatggacattcactctggtggtgtggatttaatgttccctcatcacgacaatgaacttgctcaagccgaggtgagtagtataaatcactggaagacgcctcttatgccatcgataggcataccatggctgcaagcaatgggtcaactacttcttacataccggtcatctccacattgaaggtttaaagatgagcaagtctctcaaaaactttatcaccatcgatgtgagtaatagatctgccaaacgtgccagctaaagcttacaaattctataggaagctctccagacatattctgcccgacagttacgacttgctttcatgcttcaaatatggaatgccaagctagacttcaaaaaggacctgatcgttgataccaaggccaaggaagagacatttgacgtaagcttcaagtcggactactaggaacattattcctgacagccactgaacagaatttcttcacaaacgtcaaggctagaatgagcgatgccgctgctcgaggtcccaacgaggacggcaagcaccattacgaggaggcggagaagagcctcatggccgagtaagtcgtcaattgcaatctctgatctctatactgattcaatggacagctttcacaaagctcaaaatgatttccgagctgctctttgcgattccttcaacactccanccgccattcaaattcttcttgacctcgtatcctccgtcaacctctattttgcgtctcgtggccgagagtacaacattgctcctgtcgttaccgttgctcaatggattacccgtatgcttcgtatgtttggtctcggcgaaggcgacgtcacatctggtcaaataggatggggcaaggagggtgatgaggcgtctggcggcgactttgaaggcaagctcgacccttatctccgagcgatggcctcctttcgagatgatatccgtcgactcgccattgatggcgccacccctggggagattcttaagctctgtgacaaatttagagatcaggaccttgcgaacctcggtatccagctcgatgacggccagtcaacaactggcggtgccttgtacaaacttgttgacccggctatcctcatccgagccagagaagagaaggaacgagcagctgcggagaaggctgagaagaagaaggctgcagaggcgaagaggctcgctcagcttgaaaaaggtcgagtgcctcctcaagagatgttcaggcctcccaacgtcgccgagggaacatactctgcatgggatgaacaagggttgcctacaaaagatggtgaggggcaggacttgagcaagagcttgcagaagaaggtggcgaaggagtggaaggttcaggaaaaagcgcatggcgcatggttggcttggcaaaaggagcaagagggaaagtagacggtgtaggtctatggcatagggcaatgtgtaccaatatagatatattagtatttcaggcatgttggttatttgggtttccgaatttgttctttgaacaggatttcgcgtacactggcgccgtggactatcgcatggacgataactcgacagaacgctag

SEQ ID NO: 1316 - DNA, 3346 bp, Cryptococcus neoformans
atggcagaggaagacttcatccctctccaaggttcagctgggaagaaagaacgcaaggagcgtgtcaagtacgtacatcgcatacccatacaaccctagctaactcgaccatctaaaagcacaacccttttcgtctcctccctcccttatacagccaccaccaccgaccttctcacccacttctcatacatcggtcctgtacgacatggtttcgtcgctaccgacagagaatcaggcaagtcaaaaggtgtcggttacgtgactttttcgttgaaagaggatgccgatcgggcaattcaagagttggacggaggttcttcggtgggcagtaagaggaagatccaagtgaagtgggctgatgaaagggtgagtgccgtttttttttgatatgacatgtgcaaaaactaatggttgggggaacgttacaaggcgtctctgaaagaccgaaaagccgagatcaaggtttcaaaacccatccctggacagacagacaacaagtcgacggaccccaaggctatccaaactcttgttctcactgggttaccatctgatatcaccaagaatgtgctttggaagaagattagaaaggtcaatgacaaggccgagttggtgttccctgtcgaggctcaagaaaacgaggaggaggctcccaaggatactggtacgttcttctctgaaacttttcaaacgtctaggagctaatcatattatataaagcccacatcgttttcccctcccacggtgatgctctcaaagctcttcccaagcttcacggccatacgtacaagggtaacatcttgtcttgtgtcctcaagaagcgtcttgaaaaactttccgccaaaggagaaggcaaagctcccagccacgctggtagactgatcattagaaatttgtcttgggacgtaagtcgcagtactctttttattttcgggaaattactaaagaagaatactacagaccactatccaagatctccgaaaagctttcctcccttacggtcctatccattctatcgatctccctacccttccctccaaactccctccttcatccgaccctgccaaaccgccgccccctccgcgtgcgcgtggcttcgcatttgtctggttcttggcccgacacgacgctgaaaaggctattgaaggcaccaacggtaaaccaatcaagaagggtcctgatggtgagggtcgagtggtagctgttgactgggcgttgagtaaggaaaagtggcaagaggcgactaaaggagaggagaagaaggaaggggagaaggaaagttctgattctgggtccgattctggatccgagtctgagtctaattcggaatctggcgagggatctgatgaagaatcatcaggtgatgaaggtacttccgtagttagcggctcagaagaaagcagcaacacggatgaaaatgaagaggaggaggaggaggaggaagaagaacctgtcaagcctaccctccccactgtcgatgtcggcagtaccctcttcatccgtaacctccccttcgaaactaccgaacttgagcttaacaccctcttccgttcttttgggcccttgcgatatgccaaaattaccattgacaaggcaactggacgatccaggggaactggcttcgtttgtttctggaagaatgagcatgccgatgaagttattgaagaggcgcagagagtcgcgatggaaactggtgccaattctatccctgtatgcttattttttctcgcattatccaacagaactactgctcacacacgcactacagcttggtggcgcagcccccaagaatcccttcgccctcccttccctccttaccgctgacccttcctcttctctcgcttcccgtcttgtccttcacgggcgaaccctcgacatcacccgtgccgtcacccgagaaaccgcctcccaaatgaaggaagacactgaacgtctccgtaacgccgcagacaagcgaaacacctacctcatgcgcgaaggtgtcatcttccctaactctccagccgccgagggtctgccagagagcgagattgaaaaacgtcaggcgagcttcaactctcgtaaagccttgttgcgaggtaacccttcgctgtacatctccaaaacacgtctatctatccgacagttgcctctcttcgcgactgataggacgctcaagcgattggctatccatgcagtcaaagctttcgacaaggaagttgctgatggtgagcgagaaggtttggctagggcagaagagatggacggtaccatgagttctgctattgccgctcgtggcgacaagtcaggcggtaagggtaagggtaaaggaggcaagaaggagcgtgagacagctgtcatccaatccaagattgtccgccaaactgaaaagctcgatcccgtcacaggccaaggcaggtcgaagggttatggtttccttgaaatgcgttcccacaaggatgcacttaaggtgcttcgatgggcgaacaataaccctgaagtgggtccattgatgtgggagtggtggaaggttgagctcggagatatgaaggagcgagtggaaaaggctttgacggatgctaggaagagggaggaagagccacagaaggaaaccgccaaggagagtaagaagggattggaaagcgttgaggagttagagtcgaggttgaagaagcttgatagcagattggaagaaggcgattcaagaagcggtggtggaatgagaggtggaaagactcttatcatcgagttcagtattgagaacgtccaggtaagtcacttttgaatatccttttgcaagtcaagccagtgactgattcaccgtgatgtgtaggttgtgaagcgccgagtagaaaagatcaccacggcgagagagaacgggaagcgcaaggcggatataattgcagctgaagacaccgatgacgacgaatctgcctcttccaagcccgctggccgatttgacaagcgcgccaagcgcgacggacgtgatggtcgtgatcgtcgcgacaggcatgatggtcccggtggtcgtgaggggttaaaaggcaactttagaggcaagcaaggtcaagatcgagagcaaggcggcaagtttgataaagacaggcctaggggaggtcagaatggcccaagacgggattataacgatcgtggaggtcgaaatgaacgaggtggtcgcaacgaccgtggtgacagacctggtcaagtccagccccgacaacctgggaggagggaccaaaaaagtgtgaaccaggtgaagaaggatgtcaagaccaaggaagctggggagaagagaggtattgagaagttcggaagtcaactgggtagcatgattgggaggaagaggaagatgcgcaagggtgcaaagtag

SEQ ID NO: 1317 - DNA, 2853 bp, Cryptococcus neoformans
atgtcccaaccgatcatgctcccccagggctgggaagccagatggtacgccgccccccgcccgcccgcgctgacgtaacgcagggatccccaggcgaacgcctacatctatgtcgaccagagcacaggcaggtcccagtgggaggtccccctcaaccccaccttccccacctcccccaccccgcacgcccccccccagcgccacggccgccgggcctacccctccgccatgtacgcccacgcctacgacacgcccgccccgcacgtcggccccccccagccggtcgcgggctacgccgagcagggcacaccgcagttcatcacccccggcttcgagggccagcagcccgtgcagcagccgccgtacgccgctgtggaccacgtcgccggccagttccagcagatgaacattgctcccggcgccgcgcccgtcgctggcgcggctgccggtgcgtaccagggcgcgggctatgccgagaagcagctgcactcgacaaagaccaagacggtcaacctgataggtctccagccggacgtcgccgcgctcgacaacccgcctccgcctgccctcctccccgccaacgcgagcgtcacgtcgtccgcccactcccagccggatccgtcgtaccagcgctgcaccctcaacgccatgcccaccacgcagtctttgctgaacaagtccaagctgccgcttgcgctcgtcatggcgccttaccgatccattcgcgagacggacaatgatcccgatgtgccggtggtcgaggacggcgtgattgcgcgatgcaggcggtgcagggcgtacatcaacccgtttgtcacgtttatcgaaggcgggaacaggtggaagtgctgcatgtgtggtctgagcaacgaagtgccgcagctgtttgactgggaccagcgtgcagagaagccggcggacaggtgggcgcgcaaggaactgaatcacgccgtcgtcgaattcgtcgcgccgacagagtacatggtccggccgcctcagccgcccgtatatgcctttgtcattgacgtttcatccgctgcgatccaaagcggcatggtcgccgtcgccgcgcgcaccattctcgaatcactcgactcgttgccgaatgccgataaccgcacaaaggtcgccatcatcgccgtctccaccagcctccatttcttctccttgcccgccgacgcgaccgaagccggcatgctcgtcgtccccgacctgacagacgtcttcctcccgaaacccgtcgacttgctcgtcaacctgaccgaatctcgccccgctatcgaatccctgcttgccaagctgtcagacatgttccaagactcgcacaccgtcggttccgcgctcggctcgggtttgcaggccgcccaccagcttattgggaagattggcggtaagattatcgcgctgggcgcttccctcccgaccattggcgagggtgtgctcaaggcgcgagatgatcccaagctgctcggtacatcgaaagaatctcagctcctcaatgccggcaacaactggtacaagacgtttgcgatcgagtgttccaagaaccaagtctcggtcgacatgttcctgttcagcgggacgtacaccgatgtcgccacactgggttgtctgccccgatacactgccggccagacctatctctacccaggcttcaacgcctcgaggagcgaggatgcgatcaagtttgcgaccgagtttggtaaagtgctggcgatgcccatcggtctcgaggcggtgatcagggtccgtgcgtcgagggggatccgcatgtctgccttccacggcaatttcttcatccgatcgaccgacctgctcgcgctgcccgtcgtaccgcaagaccaaaactatgtgatcgagctccagatcgaggatgatatcaagggctcattcgtcgtcatccaaaccgctgttttgcataccacatgctatggcgaacgacggatcagggtgatcacccaggcgatgccgacgacggacagtatcgccgagctgtacacctcggcggaccagatcgcgctcgcgacctacctcgccaacaaggctgtggagagaagcatgtcacacagcctggacgatgcgcggaaccacgtcacaaacaggctgggagaaatgttgacggtgtacaagaaccaggtgacctctgccgccggcggcgcctccgcccagctcgccgtgcctgaaaacctgttgctcctccccctgctgtgttgcgcgctgacaaagcacgtcggactgcgtgaaggcgcctcgatccctccagacttgcgggcctatgcccaatgtctgctcaccacgcttccctgccagacgctgattccgtatatccacccgaggttttactctctccataatatgccgcccgaggccggtacgattggcggcgatgacggggcgatgatattgcccccggcgctgaacctcacgtcggagaaactcgagcgccacggtttattcttaatcgaggatggacaaaacatcttcctctgggtcgggcacgacgccgtcccgcgcctgatccaagacgtctttgacctcgcgtcataccacgaactccagggcgggaaatataccctcccgagactggataaccccttctcggagagggtgtgtaatgtggtggataagacgagggagatgaggaggggagtgtataggccgcaggtgtatgtggtgaagagtgatgccgagccggcgttgaggagctgggcgttgagtttgttggtggaagatcggatggataggatgtcgagttatgcgcagtatttgacgactgtgaaaagcaaggtgggtggttttttgttttttttttttttttgggaaaaagctgatgcgtgtgtgtggtttaggtga

SEQ ID NO: 1318 - DNA, 3088 bp, Cryptococcus neoformans
atgatgaagcaggtggaatatgtacgtactctcttaacggcgcagctcacacccgcagctttctaccacgataaatccactgtcatacaagaagcccgcgtcttcaacgaatcgcccatatctcccaggaaatgtagggccctcttgacccggatcgtataccttctatacacaggggagactttctccactcaggaggccacaacccttttctttggtgttacgaaactgttccagcacaaggatgtgggtgcactccgattatctctttccatcgagcaaccaactgatcccgttgggtagagtgcactaaggcaaatggtctatctggtcgtcaaagagctgtctactgttgcagaggatgtaatcatggtaacatcttccatcatgaaggacatgcagcccaatttggaagttgtgtacaggcctaacgccatccgagctcttgctaggatcattgatgtgagtcatcgagccatgtgctagaacttcaactaacatccaagaaggcgcaatcggttcagtctgtcgaacgtttcttcaaatcggcccttgtggatcgctcgccttcaatctcttcagcctctctcatctcctcttaccacctcttcccactctcccccaccattatcaaacgctggtctaatgaagctcaagaagctgtcaacgcaaagtctgtctcttcatactctggcgcatctgcatacttttccggtggctcagcaggaggttatcaggctgttgcgagttccagctacatcatgcagtaccacgcattgggcctattatatcttattagagaaaaggatcgtatggcgatcaccaagatggtgcaacaactcggtgcaagcgggaaggggagctctatcgtgagaaatcccatggcaatctgcatgttgattagatttgcgaggaagattatggatgaggaccccaagtacgtgcatccttggtgtagaagtgttgtgcctgacagtgtgcagtctcagaaagcaaatgcacgaatatcttgagactttgcttcgacacaaatcggaaatggtcaacattgaggccgcgcgagccatttgtgaaacgaaagatgttcaaccaggcgacctttacaagactatcgcgggtaagtcagtaatatcatttcactatcgaatcctttgacgaacgccattgatagtattacaattattcttgagctcccctaagcctgtgatcaagttcgccgccgtgaagactttaagcaagcttgcgcaaactctacctcaatccgttgctgcgctcaacgtcgaaatggagaacttgatcaccgactccaacaggagcatcgccacgtacgctatcaccacattgttgaaggtaggtctttgtttggcgatttgatattgtcgggcgtcagttgaccatggcacagactggcaacgaagcttctgttgacaggctaatgaagcaaatttcgtcgttcatgaccgatattacagacgaatttaagatcatcgttgttgatgcgattcgatcactttgcctcaagtttccagctaagcaagcggtgatgctctcttttctttctggcgtgctaagggacgagggcggttatgaattcaagcacgcggtcgttgaggcgattttcgacatgattaaatatatccaagactctcgcgatgctggtgagtctacttcttgacgaatagtaactgatgaaacagcactcgctcacctttgcgagttcattgaggattgcgagttcacaaagctttctgttcgtatactccacttgctcggtattgaggggcccaagacccggaacccgactaagttcatccgatacatctataatcgcgtcgttcttgaaaatgcggttgttcgcgcagctgctgtcagtagcttggcgaagtttggtgtctgcgtcgatgacccttcagtgatgaagagtgtcaacgtgcttatgaggagatgccttgatgatgtcgatgatgaggtcagagacagggctgctatgtacatcaaggtattggaggaaaaatctttggcagatctgcttgtgaaggatggtgagttgcaatagctctcaagtgactcaacctgatatatgacatagaagctcaattctcccttgccaatctcgaggaacaactgatgtcgtacgtccgagataattcgaagcacgcttcggcattcgacatctctgcagtgcctaaagtcagtcgcgaacaggcccatgcagagatggctcagactcgctcatctgctctcgatgtcgccggcccctctactgctgctgtcatcaccccagcctcccccattccatctgctaaggaagcccaatcgtcgtatgccgctcaactctcgaccatccccgaatttgagccatacggtcctgtccttaaatcttctgccaagcccatcgagctcacagagtctgagacagaatatgtcgtcacggctgtcaagcacgtcttcaggaagcatgtcgtgttccaattcaatgttgccaacaccattcccgacactgtgttagaacaagtcgctgttatcatgcagccatcgcctgactgtggattgatagaagatttcattattcctatcaatagcctgacaacgcaagtaggccaggcaccggtatatgtaagctttacgagagagaatccacaagaatatgcggccggatcattcggttgtactctcaaattcgtcagcaaagaagtcgacccatccaatggacagccggaagaagaaggatatgatgatgagtaccaggttgaggagctcgacctgggcgcggccgatgtaagtgtttttgttgctttatcatgttcagatactgatatcaatgatagtatataactcctaccttcgttactttcgtgaacgaatgggacaagttagcctcttccccgtcacttaccgaaaccttcgctctatcttcttccgaatcccttagagaggcttgtcgatcccttattgaagtcctcggtatgcttcccttaggtggcaccgacacgcctacctccaattctgtccacacccttaatcttgctggtcttgccatccctatagcagatggcgaaaagtcaagcaaggtattagccagatgtag

SEQ ID NO: 1319 - DNA, 3140 bp, Cryptococcus neoformans
atgttgctggtcttggtcgagggtaagtggcatctgcgcccaattcctgtgtgactttaaactgacagacgtatagtgcttcaggtttcacaactcggtccgatattggtcccgcccgagctggtcccagtgcagaggttgttgcggaagctcaagctcgccgtggtgaagaagaaatccctgatccagatgctttccaagatccggacgacgaaaggaatctgtttgctggtacagtctacgaagcggacgatgaagaggccgacagggtgtgggacagtgttgatgccagaatggatgcgagaagaaaggccagacggtgggtcttctctatggatatcttgtctcatgttcgatactgattagatatgcagagacgcggcagaagcgaaagcggcggctgaagaacgtgctcgcaatcccaaacttcaaacgcaatttgcagacttgaaacgatctctatcgagcctcaacgatgctgattgggacgccatccctgaagcaggaaacttgactggaaaaaggagaaaggccaatttgcgattggaggaaaatcagaatggaagaagctacaatgtcagcgacactgtcattgcagatgccgtgaagagaaatgccatggtaggagagttggatcctgcagaggtgggtaacctagtagtaactcgtcatcgaaactaatcacttccacaggctggtattggtatcgatggtaccgaaacggatcttgtatctatcggtaatgccagggaccgagtattgtcgctgcagcttgaccaagtgagtttagatttaatcgtgggttatggtattagtcattgacagctttggttaggccacaagagacgcctcaaacggctcttctaccagcatcgaccctaaaggctatatgaccgctcttaacagtcagattgttcaaacagacgctcaaattggtgatattaagcaagctcgccagctcttgcaaaacctcattcagtctaatcccaaacacgccccaggatggatcgccgccgcttccttggaagtacacgcgaagaagatggtcgctgccaggaagattatcgctgaaggatgtgagaagtgtccgaaaaacgaggatgtttggttccatgccgctgaactcaacacaccggagaacgcgaaagttatcttgggtcgagctatacagcacgttcctcaatctgttaaaatttggctcaaggctgcttctctagaaacagacataaacgccaagaagcgcgttctccgaaaagcccttgaattcgttcccaactctgtggggttgtggaaggagactgtcaacctggaagatgatcctgaagacgcccgcgttctccttacccgtgctgttgaagtcatccccaactctgtggagctctggcttactctggcccgtcttgaaactcctgaaaacgccaagcaggttctcaattctgcgcgcaagcgtatccctacctctcacgaaatctggatcgctgccggtaggcttgctgagcagtcaccttccgccgtggctgtcaagccagaggtcaagatggaggacgaagcggaatacgaggctgagcaaagaaagaagcttgctcagcaggtcaacaaactcatggctggtgcagtcaattcattgcgcaagaatcaggtcattctttcgcgagaacaatggttgcaagaggccgagaaatgtgaacaggacggctcacctcttacagcgcaagctatcgtgaaggctaccatcgctcaggacgtcgaggaagaagataggagatctgtctggattgaagatgcggagagggcgacaaagggtggattttacgaggtcgcgagagcttgttacgccgtcactctcgaggcttttcctaatactccatcagtctggagaaaagccgccgagttcgaaaaggcccatggcacaccgtgagttactttatgtaattgcaaggccagatgactgacaaaagattgtagcgatgctgtccaagaaattctcgcccaaggatcccaacactgtcctcatgcggaggttctctggcttatggctgcgaaagagaagtgggtcggcggcgatatccccggtgctcaagccattcttgccgaagctttcaaacaaaacgaagattccgaatctatcttccttgctgccgccaagctagcagctgagaccggcgagatggaggctgctatccagatccttgagaaggccaaggcacaggcagacacagagagagtctggatgaagtcagcggtactgttgaggcaattgggcaagttggacgaggctctttcaaccttggaagttgcaatcaagaaattcgcttcctttgacaaattgcacatgatccgagggcagatctacgagtcccgtaatgaggttgcgcttgcgcgaaatgcatatgctcaaggatgccgatcatgtccgaagagtatcccattatggatcttgtcggctcgtctggaggagaaggcgggtgtgacgatcaaggcaagggcattgctcgaaaaggcgaggttgcataatcccaagaatgatgaattatgggcggaaagtatcaagattgaagaacgaacgggcagcccacagcaagcgaaatctgtccttgctcgaggtaagtatcactttatttctagcccatcctgcgatttactaacagcttcattctatagcaatgcaagaatgccccgcctctcctcttctttggtccatggccatcttcatggagactcctcaacaaagaaaaggtcgttccgttgacgcaatcaaaaaggccggcgaacatccggccgtcatcttggcggtcgcgagaaacttctggagtgaaaggaagattgaaaagacgagacagtggatggccaatgctattaccgccgatgaagattggggagatgcctggggttattggctgaagttcgagaggcaacatggagagaaagtgagctgattcttgttttcagtttctaaaaggatatctggactgatacatgaatatataggaacgtcaagaagcggtcgttgaaaaatgcatcgcggcatcaccacgccatggtccggtatggcagtcggtatcaaaggatttggccaatgttggcaagtctacaaaagagatactggagttggtcgcggacaaactggaataatgttttag

SEQ ID NO: 1320 - DNA, 3321 bp, Cryptococcus neoformans
atgtttatgtttacggagagcaaaggaaaagtggaggcgacttgtgctgatggtgtggtggcaactggcgggttaccggactttggcatgcatccttttgccaccggtacagtcttctttcttcctacccccgtacggctggcacggcgcactcttctgtcctcccgcctttcctacactactctatacatacacctccatagtagtgtgggccggttgcaagacgctccacgtcatacaaatgaatatcgcggggatttgtttttctgttttctccgggggctgcagacgcgctcgccctgttgctttctcccaggccatccactcacctcgagccacagtcaaataatcccatcccccataatgaacgctgcccagcttctccaggactccctttcctccaaccaggccgcccgagaatccgccacccagcagctcgaggccgccgcgagggacaattttgtgagtagccgcccccacggcacaccacagcccttccgctcacaaacaacaaacagcacggctatctccacacccttgccacagagctcgccaacgaaagccagggcctcgatgtaagatatgccgcaggtctcgccttcaagaacggtatcgccgcccgggtatgcatgttttccttccttacccgtaacaaactgctcacaggacatctcgcaggacgctataaaccagcccgtgctttccgaacgatggcttgccctccccgaatcagcaaccaaccctctcaaacacctttcactttccacccttgggtctccccagcttcgtgccggtgcggtcgctgcgcagtgtgtttcagccatcgctgcaatcgaattgccggtgggcaagtggccagagttgatccctcagttactcgaatttgtgcagaaccaggacaacactggattgagagtcaacactttgcaggctgttggctacatctgtgaagtcatcgtgagttaccatgatccatctgacatactgtccagcactgacatccatatagcgacctgatatccttgctgccaagtcaaatgagatcctcaccgcggttgttcagggagcccgaaaagaagagcctagtcacgaggttcaacatgccgctattcaggccttgtacaattctctcgagttcattagggataacttcgagcgagaggtttgtccgatcaatatgactagtcacgcgacttttggactaacaaaggttttagggcgaacgaaactacatcatgcaggttgtatgcgaggctactcaaagcccctctgttcctgtccaagtcggagctttcgaatgtctcgtgcagattatgcacttgtactacgaaaagatggacttctatatggagcgcgccctctttggcgtacgtcttgcatcggtgtcttaattattcgaggctgacgtatcttagcttaccatcatgggtatgaaacatgccgaggaacccgttgctctccaagccatcgagttctggagtactgtctgtgaagaggaaatcgagttgactgctcaggcccaagacgttagtcatttttaataccatttttctcttgtactgatttctcacaggctttgcaatacggcgatcaccctgaaattgagtccaagggttttgccaaggctgctctcaatgatatccttcccgttctcctcgaactcctttctcaacaaaatgaggatgatgacgaagatgactggacaaagtctatggccgctgctgcctgtctgcagcttttggctcagaatattggtgatgagattgttgggcccgtcgtgcccttcgttgaggccggtatcacccgacaagactggcagcaccgagaggctgctgtcatggcctttggttccattcttgacggtcctgaccccatgactctcgctcccctcgttacccaggccctcggtgctcttatcagcatgatgcaatccgacccaagcttgcaggtccgagacactgttgcttggacactgagcaagatcaccgagaccatgctcgaggtcattgaccctagtattcacctccgcaactttatcacagcccttgtcatgggcctcaacgcctctcctcgaacttgcaacagttgctgtgctgccctcaacaaccttgttatgcaaatctctcaaccccctgagctcctcaccgaagaggttcaaactactgtcatgtctgaatactactctggtattctcaaggagttgatgcccattgcagagcgacccagcaaccagtccaacagccgaagcgctgctgttcagactatcgctaccttcctctccttttctgccaacgacactctccccgtcgttcaggaggtcgctgttgccttcatcgctcgtcaggaagcccttatgggtatgcacaaccagcttgttggtatggatgaccgaaacaactggaatgacatgcaaatcaacaactgtgttgccattgccgccttcatccggcgatcacctgctttggccgctcctttcgcggacaggatcatgaccaacctcatacagctcatttccgcctctggcaagcagtctggtgtgctcgaagaagcgttctccaccattggtggtcttgcctctgcccttgaggccggattcaacaagtacatggaggcctttgccccttacatcatcactgcgcttggatctcacgaagactattctgtcgcccaggctggtgtctttatcacttctgacattgcccgatccgtcaacgaaggcctccagccttacgccgagtctctcatgtcctcactcatcgagctccttcgatcgcccattgttgccagacaggttaagcctcacgctatctccgccatcggtgaagtggctcttgctatcggatcgggcttcaagcccttcctcgaagccaccatggctatcctttctcaagctggatccacttctgctccccctggtgatgaggctatgatggactttgtgcagactatgagggagtctattgttgatgccttcattggtatcatgaacggtttcaaggactccgagggtgagtcgatttaattttctgtagaactaaaactaacttttgtgtagccggtgtcatgctcccctacgcccctggtattctttctttccttcaaacttgttgggccgacgaggaccgttccgaaggcttctgcagtgcctcccttggtctcattggtgactttgccagcgcattcaagaacaacatcaaggaccaaattacacaaaactggattcaagaggctatcaccagcggcagaagcagaagcgcttccaagcaatccaagaccaacgccgcctatgctcagcacgccatcaaggaactgctcaagtaa

SEQ ID NO: 1321 - DNA, 3289 bp, Cryptococcus neoformans
  misc_feature (1221)..(1221): n=g, a, t or c
  misc_feature (1657)..(1657): n=g, a, t or c
atgcccttacagcgcgcagtatctgattcccatgcccttgtttcgtttcgagctaacgatgacccgtctgttcactttcgcccgcgcccaaagatcaagccattcccaacgagccctagaacttaccacttatctccttcactccaacttcgttctcccaagcagctcctactagactggagtgacgacctttcacctatcaacgaatttcatataccaatagccaacatgtcttcccagcccctcgagaaggccaaggtaatttttttttttctgcaagatgcacattccaacaacacagactgattcttttacttgaccagctgccggtcccaaagaatcttcttttcatcgaaaatgatgttccaccttcgaccaccccttcagcggcgactactcccacagatcatgaactcgacccgcttgcccatgctggcgataaggcagaacttctcacccaagctcttcatgagagtcaagtccctacaaagccaaagagcccacctaataatgtgtcgaggttgggcaaacttggacagcttgagacaagattgccggatatcaatgcggaacctaatgagtattatggcggagcacaggtaaccagtagggcacgaacattcagcaatgtaagtctcgtgtcctgttcctggacgaaccaactgatccacaataggtcggtgtcgagggtgaattcaagcgtcggcctatgcaaatgggcggtgagaaaatctctagaaatcgccgactttcgcatggtgagtactacgttaatggcgtatgctgataatgaagacgagagtaccccgtctgctcccaggcgctatttaattgatgtcgaggaaacaatgagactcgtgttggagcaagaagacacggataacaagtgagtcacatcatgttcgaatccaatctgactcgtacagcttccaaatttctatctatgattcgggtcccaaacttctttcattgggtacggcgagttctaatgcccataaaacctttgatatccgggtatgtcacaaatatctttgccgtttgataataataattgctgaaatgagctggggttagggcacatatatgttatcgaatcttcttcaggaactcgcacttgcccgagactatggacgcaagcgcattgtcttggatgaagctcgtcttgccgagaatcctgtggaccgtctctctagaatgatcaagaactcattctggaacagnctcactcgacgcatcgacgcagagggtcttgaaatcgcttgcgcggatcccaagaatagaagccagcacatgcgagccaggatttatatcccacatggagaggatgaaatggccgagcattatcgtcaaatgtgcttcttctctcaaatccctagcggtatgatacgctgacacatcaacgcagagcgaaagagaaacccaacctcaaactcgaggtcgatatccttcccaaagaatgtgacaatccagcttttgtcaagactctcaacgataaaccaggcattctcgctcttgcaatggataaaaaggttgacgcagacggcaagtctcacctagaggctctgccatttatcgttcccggtgcaagattcaatgagaagtatggttgggacagcgtaagtaatacatcggacttgtaaaattagcatctaatcangtgcagtactttatggccctgggcctcttggtagacggtcgggtcgacttggccaagagtatcgtcgagcactgtattttcgaaattaaatattacaacaaagttctcaatggtaaccgatcatactatctctgtcgatctcagcctcctttccttacagacttcgcccttcagatctacaaccagcttgatcgcagcaagccagccgaaaacaaagcatggctcaaacgtaccatccaggccgctatcaaagagtaccaccggtactggatgcaagagccctcgctcgaccttgtcactggcttatctcgctaccgcccttctggcctaggtattccccctgagactgaagccagtcatttcactcacatccttcagccgtatgctcagaagattgggatctctgtgaatgagtacattgatggttacaacgacgggacaatcaaagaacctgagcttgacgagtatttcttgcatgaccgaggagtacgagagtcgggacatgatacctcatacagactcgacagaaagtgtgcagacttggcgactgtcgacttgaactcgctcttatacaaggtgagctattactatgattgacacacagacgctaaccggacaatgcagtatgaattcgatattgcttcggctatccaagtagcctttgacgacgaactctacctggacgaagagtttgaattgtctccctggcctatcaccgccgaggccttcaaggctggcgccacctaccagctctcgaccaaaactcctcagacaagcaggcactggtttgaacgggcagctaaacgcaaggcaaccatggatgagctttgttggaatgatggacagggaatgtactttgactatgacaccaagctcaggaagcagacgcgatatgagtccgtcactacgctctggcctttgtgggcaggctctgcctcggaggaacaggctttgaagcttgtgtaagtagcaaatattgttcgttgtgaatgaagcgtcgcgactcacaagttttacagccgcaatgccttacccaagttcgaagttgctggtggtcttgtatctggaactgaagaatcgcgtggcgtaatctcgttggacagacctaatcgtcaatggggtgggtacctctggggtttgtctggcacgtgctgactatcagtgatcagactatccttacggttggcctcctcatcaaatcatggcatgggtcgggcttgaacgttacggatttgtagacgatgcatccaggctggcgtacaggtggatctatatgtgagttgttgagtttggatgtgttaaacatactaacacttgacctattaggatgactctatcgttcatggatttcaatggtatcgttccggaaaagtttgacgttgttgaacttagccacatggtagatgcggaatagtgagtgaatagactcgcatccgattcacttggaagctgaccccgcctttcaagtggtaatcaaggtactgatttccgatacgtgccgagagaaggtttcgggtggatgaacgctgcctatcaaatcggtctccaatgcctgtcaaccggtatgagacgagctgttgctgcttgtgtaccagttagtgttctagcaaccaactgcaatggctaagctga

SEQ ID NO: 1322 - DNA, 3239 bp, Cryptococcus neoformans
atggtcaagtcatatatgcgccacggccctactcaggtaaagttgaactgtaaccattagtatcaatcttctaacccctcttaggccttcggcatcatctgttcacccacagcaaactcctcttacaatggcagattagcctatgttccaggatgggaagatgttctcgtctgggatacaaagcggggagaaatggttgccatgtggcattctacggggcttacttcaccagtgacttaccttatccctgcccctacgccttacacctctacgtcgactactcctgtcacttttgcagtctcatatcaggacggttcgatccgtttatggtcgtacgatccctctacacccgatgttgaagcttccgaaaccgtcacattcaacggtcacaagaagagcgttaccacaatgacttgggactatgatgcttctcgactggcatccggtggtactgaaggtgagattgtcgtttgggatcgcattggagaagtcggtcttttccgtctcaagggtcaccgtgcaccaatcaccggtcttgcatttattcctcacccccgcggagggcaccccggatggctcgttagtaccagcagagacacctacttgaaggtgtgggatttgggaactcagcactgtgttcaaacagttgttgtcgggcgaggggaggtgactagcttggctgtccgagaagaggctgaggagtcaattattggtcaaggcgaaggtgaagccgaggatgaagaggagatcaagggtcgatggactgtcgtcacgggaagtggtgacggtgaagccaaggtctacacgattgaaaaatcccagctcgcaagaggtatggccgaggacgagaaaggggaacttcccgctctcataacctccgtctgcactctccccctcccttcatcgactcaccctatctcccaaattacctggcaccccgcacttcctctgctgtctttacaaacttccgaccgcggtgtcgctatacttcgtttgaggactgaagaagaagttagcgcaaagagggctaggaggaagaagagagatagggagaagaagaagaagggaaagggcgacaagcaaaaggaagaagacaagcagaaggaagaagacaaggaggaagatgagaaggatgaacctgtcaaatgggaggaaagagtggctgtctggtgtatggtcagggctaatgccaaggtcaagagctttgcctttgccgatgaaaatgtagtttctgtcaagggtggcgtatctgtaagtgacaatcgattagtattcgagacatgctcatcaattgcagttgcttttggccttgtccaacaactccatcgaatcatacactatccctactccaggaagcaaatctaagcttgccgatggaactaccccggaacccactaaaactcattccattgaacttcccggtcaccgacaagacatccgaactatttccatctcttctgacgaccaagttattgcctccgcctcgtctggtaccctcaagctctggaatgccaggacaacagcgtgcatcaggactatggaatgtggttacgctctctgttccaccttcttgcccggtgacagacatgtggtgattggtaccaaggggggagaactgatgctctacgacgttgctgcgtccagtctattaaagacctacaaagctcacactggacctgtttggagtgtgagcgttcgacctgacggtagagggttggtcagtggtagtgcggacaaggacgtcaagttttgggactttgagatgagggaggaaggcgaaggcgaaaaagttgtcagccgcttaggtgttgagactgtcgtgagtaaatttttgcgcaatgattcaacatttgaatgacactggtgcagtacaagaccaagcaactcgctctcgtccacgttcgtactctcaagatgaccgacgacattctttgtctcaagtactctcccaatggccgtttccttgccattgctcttcttgactccaccgtaaagatcttcttctccgacactctcaaattcttcctctctctttacggccacaagcttccagttctgtcgctcgacatttctttagatagcaagctccttgtaacctgttccgccgacaagaacgtcaaaatctggggtttggactttgggagactgtcacaagagtatttttgcgcacgatgaagctgtcatgggcgtcatgttcgagaaggaggcaggaagtcacaacttctggacagttggaaaggataggatggtcaaatactgggacggtgacaaggtgtgtacttttgacattttcgtgaaatgtgtgacatagctgacctgtctgatacagtttgaactcatccaaaagctctctggtcatcacggcgagatctgggcgctttctacttcgcaaagcggtcaatttgtcgtcactggttcccatgacaaatccattcgtatctgggaaaagactgatgagcctctgttccttgaggaagaaagggaaaaagagattgaggctatgtacgattccaacctcgccgatactctgaatcgtgaacctggagagggcgagggtgaaggcgacgaagccgaagccgtccaaaaacagactgccgaaaccctcattgcgggcgagaagataatggaagctatcgaacttgccgatgctgaccgtgcagccactcgtcaatggcaggtagataatgccaagtccaacatcgaaattcctcgtccacctagaaatgccgagttgatcgctcgaggagatttggagccggatgaatatgtgttgaaggttgttcagaagttacctgcggcgcagatggaggatgctttgctcgtcttgcctttcaggatggtggtcagtttgatgggctatcttgacgaatgggccatgcaggtgagaactacttatttgtcatcgaaaaccgtgttaactgatgggttaacagggcaaggaaattatcttggtgtctcggatcctgttcttccttcttcgaacacactcttcccagattgtatccaaccgcattatgcgaacgccccttcttacactccgacatcacttgcgtgatgcgttggcgcaacaacgcgacgtgatgggttacaatttggcagcactcaaattcctcaaggggagatgggagggcgaaagagtggctggtttgtatgagcaggaaggtcttgatgaagaggccgttaggaaaaggttggaagaaggcagagggaagaggaagagaattgaggtcagggcataa

SEQ ID NO: 1323 - DNA, 3286 bp, Cryptococcus neoformans
atgcagccttggtcgatgtcgatgtgctcttatcgggcgaagctttccttgtgggctctgtatcactcggacgcctactacctccctcgacgactcccagactcctcttgtaatccattctattttgctcaaagttgggatcgttaaggtactcttccaacgccttgacgagccctgttggggcatgcttgagattcggcacagggacatttaagacatggtgaagttttcgggcaaaggagaggtagtcaacgactttttcggtttgcttgatgaaagatttatagatttcaaacgagtcggtagcgtcgaccttggacatttcgaaatgagtgattgatgacccctaattttacgaaggaaaggatttattggctaattgtgcgaagtaatttagttatctgttggcgaggaccatcgaaacggtcgaaggtggtggtatcgttgtgttattgttaaagacaatgtcaagtttgaagcaattgtacgctatggccatggtaagctttaatgtcgggatggcgtggaataatctgatttctcatgacttctcatataggacgttcactcccgataccgaacagacgcccaccagtttgttcaaccccgtttcaatgaacgattcatcctttctctcggctcaaatccagattgtctcgttctcgacgatgaactcaacgttttacctctttccaagggcaaggatattcaaataggcaaggccggcgaagaagacgatcgagggaggaagagaaaggcagaggagctcaaagagatgaaggaaaacttggaaggtgtagacattgttggttctcttgccaagttggcaaagactgtcgaccaggccaaggctatcctgacttttgtcgaggccatctccgagaaaaacctttcatctactgtcgccttgactgctggtcgaggtcgaggtaaatctgccgctctcggtctcgccatcggtgcagctcttgctcatgactactctaacatctttgttacttctcctgaccccgaaaacctcaaaactttgtttgaatttgtcttcaaagcccttgatgccttgggttacgaggagcacattgattatgatgtcgtgcaaagcacaaaccccgacttcaaaaaggctattgtgagggtcaacatcttccgaggtcaccgacaaaccatccaatacatctcccccgaagattctcacgttctcggccaagctgagcttgtcatcattgatgaagctgccgccatccctcttccccttgttcgtaaactcatcggcccctatctcgtgtttatggcctccaccatcaacggttacgagggtactggccgttcattgtccatcaagctcattcagcaactccgtgaacagacacgaccatcgattaccaaggatagcgagaatgcggctgccagctctgctggttcatcttccaaggctgcggctgctggtagatcgggcgctggtctcgtgcgatctcttcgtgagatcaagcttgatgagcctatccgttactcccccggagacaatgttgaaaagtggttgaacaacctcctctgcctcgatgccaccatcgtctccaaatctatccaaggttgccctcacccttccaaatgcgagctttactatgtcaaccgcgacactctcttctcttatcaccccgcttcagaagtgttcttgcaaaggatgatggcgctctacgtcgcttcccactacaagaactctcctaacgacttgcagatgctttccgatgctcccgctcatcatcttttcgttctccttccccctatcgacgagaatgataataccctccctgaccctcttgtcgtccttcaagtcgcgcttgaaggtaatattagccgagaagctatcttgaaagagatggctcagtcgggtatgcgatcatccggagatatgatcccctggatcatctccactcagttccaggacaatgactttgccacgctttcaggagcgagggtggtgaggattgccacgcatcctgattatgccaggatgggctatggatcaagggcgatggaagcgttggagagtttctataacgggacttcgtacaactttgacgatgtccctgttgatatgggcgagtcttttgctgacgctgccaaggtcggacctgtaagtgacgtcttttatccccttcccgcaaaaccgaacgtcgactgaatgcgtttcccagaatgccaacctccaaaatgacaccatcgccatccgtgacccttcacgtatgcctcctcttctccaacgtttgtcggagcgtaaacccgagaccttggactacctcggtgtctccttcggccttacccgtgacttgctcaggttctggaagaagggcggtttcacccctttgtacgcgagccaaaaggagaatgcgttgactggcgagtacacatttgtgatgctcaaggttttggcgagtgctggtggtggtggagagtggttgggtgcttttgctcaaggtatgtcgtgtcttttacttcaggatgaagtacatatgggcaatgactaacggttatgaacagactttagacaacgattcatgaaccttctctcatatgaggcattcaaaaagtttgacgcttctatcgctctctctatcctcgaatctaccgtccctcgcaactctccctcccccgcacccaaacttctcaccaacaccgagctctcttcgctcctcactccgtttgacatcaaacgtcttgaatcgtacgccgacagcatgctcgactatcacgtcgtcctcgaccttgttcctaccatcgcttccttattcttcggcaagaggcttgaaaccagcttaccgcctgcccagcaggccatcttgctcgctctggggttgcaaaggaagaatgtcgaggcactcgagaacgaactgggtatcacttccactcaaacccttgcactgttcggaaaggttttgaggaagatgacgaaatctctggaagacatccgaaaggcctccatcgcgtctgaacttcctgctgagccgaccctcgccggccgatcagccaacgggtctaacaagtttgtcgcgctgcagcaaaccatcgaacaagatctcgccgattctgcggtacagctgaacggtgaagatgacgatgcgtcaaagaaggagcagagagagctgttgaatactctcaacatggaggaatttgcgattgatcaggggggtgattggacggaggctgagaagcaagttgagagacttgcatctggtaagggcggcacgagactgtccagcacagtcagcgtaaaagtggacaagcttga

SEQ ID NO: 1324 - DNA, 3115 bp, Cryptococcus neoformans
atgtccgaggtgtccccacagtcccaatatggtggagaaccggacaagccaacaacaaaatcgagctcctggctacgaaatctttcgcggtccaaccttgctgctctcatcttgttttacgtcgcctcccttcacgtcattgggttgtacgtcttcacgcaagggtttctcctttcccgcttggctatcccccatgtctctcccgcctataacgtatctaacccctcccccatatccgctacccactctaaagcggtcatcattgtcattgacgctcttcgtaccgactttatctccccgtaccaccctcaaccgccttcaccccatcatcatggtgtcctctccctgcctgccgagctcacacagagtcgaccggaacactccctcattttcaactccttttctgacccccctacctctactatgcagcgcatcaaaggtattaccaccgggtcgttacctacattcatcgatatcggctcaaactttgcgtcagctgccattgaagaggattcgctcgtctctcagctcgtagcggcgaacaagagggttgggtttatgggtgatgacacttggatgaacctctttccttcttctttccatccgaacatgtcccatccgtacgattccttcaatgttgaggatttacacactgttgataacagcgtcatcacccatcttttcccttacctccatccttccaaccaatctcagtgggacgtccttatcggtcatttcctgggcgtagatcatgttggtcatcgtgtggggcctcatagggatactatgaccgagaaacttactcagatgaacgaagtgctggaaaaggttgtggatctgattgatgaagagactcttcttgtcgttctcggtgaccacgggatggacgataagggtaaccacggcggtgactcggagatggagacctcatctgctctttggctctattccaaaggccctatgctaaccaatcccgcggtcgtccaagacaaagaccacttctgccatttttaaatctttgcctacttacattttcccgaaatccaccatgcctctcaggcagattaaccaaatcgatattgttcctactctcgcacttttgctcggcgtccctatcccttataacaaccttgggtcagtcatccccgagtgtttcacaaataatctggaaactttggaggtggcgcaaagggtgactgcagacggtatatggagatacgtcgaagcgtacggagacaaggaagtcaaggaaaacttgaacagcgcttggcgtcacgcccaatcccaatatcaaaaggacaacctgtccgcctccatcatcgctcatcgtgctttctccctcgacgctctcgtccacctccgatcactctgggctcaattctccatgcctctcatcgtcattggttctctcatcctcggcctttgcgcgcttaccctcatcgcactttacgtcggtgtgcgtaacaatggtgtgaattgggacgtttatgcgcgattggctttggaaacggctacgatgggatccactgtcctcgcgagtattgcaggaaccgtagccggggtgtacaccgcccggcctatcgtggctatcaaagttttcatcgttgccgcagccttgatctccgaggtaatcctcatccttcccctattcgtcaaatcctctctctctctcgctctccctctcccgacttcattctccatcaacagacatatcggccccttcattcttattgtccatgcgttgtcattcgcttccaattcattcatcatgtgggaagaccgggtggttctctatctcatatctactatccctatcatctatatcatccgagcactttccgctcctacagccgatatgcgtctcaaaatcatcttcctctctctcgctttcaccatcctctctcgtctggctggaacgatcaccatatgcagggaagaacaacagccatactgcagcgtcactttcttctcaggcgtgaccgctaccgcccctacatgggcactcatcgctatagtcccgcttgccctccaaatccctcgtgccatcggtatcaccctctcccgctccaaatccctcgctgggcctgcaccttttatactcggtatcctttggcgtgccgtgctcgtcgccaactctgtctactgggtcctcgagtttttcgaatcgttcgacgggctcaatcctgcccgaataccgctggtcaatttcctcaaactctggctcgctcgatgttctgcaggcgcgagtttaggtgctatcccatatgtatggctcacttcccccctgtgtatctctgtagaacgcacgacggatcaagcgacgggtgaagaagaagtgacagtgtttgggttcgccaatgcctttgggtcgacgtacatcctgtatacactcgctccttttgcgctcatacatctagtgtcgcagccaatggcccagttcacactgaccgcctttcttattgggcttcttgtatacctcgaattggtcgatacgagacgggacgccatcatccttacaacatcytttgcttccttgggcaacaacaagaacaacaacaacgcttcttcaccagcgggacttgcctcatttgacccggctgatacagcgcaaaccatcgtacgcccctcattcacagatgtagtccccatcgctctatctgggttcctcacattctttgcgacaggacatcaagccgtcatctcatcaattcaatggaaatctgcttttgtaggcttctccactgccagctacctgttctcccctgtactcgtcgtcctcaacacatggggaggcttcttcttgtcagcgatcgctgtgcctcttttggcgatttggaatatcgcccccagaccacgagagagtatcccaaccctcgcgcatgctttgcaagtgacgttggcgttcttggtgtaccacaccgtggtcgcgttcgccagtgcaatcacagctgcctggttgagaaggcatttgatggtgtggaaggtgtttgcaccaagatttatgatggcaggcgtcacgttgttggttgtggatgtagggttggcgctgggattgtttggagtgagagtgaccgggtggaaggtcaaaaagacgtttggatgcgagagtatataa

SEQ ID NO: 1325 - DNA, 3434 bp, Cryptococcus neoformans
atggccacaaacgcaccgtgctataccatagtacacgacgaccttctagactcaccctctaccaatgacctcaggaatgctctccagaagggctcagacgaggtcaagctcgagaccatgaggaccatcattgtcggcacccttaacggccagagctatgtatgtgtatcgtgcccctgtaggctgcgtctaacactcccataggcgtcccttctaatgcccatcattcaatacgtaatgccctctcgaagcaagcagctcaagaagatgctccatttctactgggagtaagtcgggtccgtcggtcagagtgtggaagtgtgctaacggtgtttagggtctgtcccaagctggatgagaatggcaaactcaagcaggagatgatattggtagtgtgagtatcattgcatttagctttgactcggctaacgatccttcagcaatgctattcgtaacgatctggtaagcatcaagtcatgacatctaactttaactaacccgttgcagcaacatcccaacgagtacatccgcggtgctacccttagataccttcagaaagtccgcgaatcagagctcttggaaccgctcgtccccaccgtcagacagtgcttggagcacagacactcgttcgttaggaagaatgccgtgtttgcagtctacactatctaccaagatcacgagcacttgattcccgacgcgccggagctgttagataccttccttgctgccgtgagtaatttctttacttaccagagtaaagctgatttggtcgtaggaatccgactctacatgcaagcgcaacgcgtttgtcactctctgtaacatctcccagcccacagccgtccaatatctcctcaacaactttgatcagattgagtccatggacgagttgatgcagatggctgtgattgagcttgtaaggaaggaggctaggtctgaaggtggtcatcgcgtgagtatcttccatctgtaaactgtacccgactaaccccatgtaggccaagtggatccgatgcatctttgaactcctcaattccaaatctcacgctgtcaagtacgaagcggctacaagccttaccaccctcactcaaaatcccgcagctgtcaaggccgccgctgctgctcttgccgaactcattgtcaaggaggccgacaacaatgtcaagctcattgttcttgacagattcaacaacctcagggcgaagcacgagaatgttctggatgggatggttatggatatcttaaaggtcctgagcaggtgtgtatgaccatgtgcatcgtaggtctctcgactgacatggagtagccccgacatggaagtgaagcgaaaggctatcggggttgctctcgaaatggtttccagccggaatgtggaggaagtcgtcttgttcttgaagaagcagcttcaaggcactctcgatcaggattttgataaggcaagttgtcatgatcttaccatttctttatctaacaccttggcagaacctcgaataccgacaacttcttattcaaagcatccactcttgcgccattcgtttctctgaagtcgccgccaacgtcgtttacgtcctcatggacttccttggcgactccaacaacccttcagccgtcgacgttatcgcctttgtccgagaagtcgtcgaaaaattccccaaactccgaacagctattaccgaaaagctcatctccacattcggggagatcaagtctggcaaggtcttcagaggtgccatgtggattgtcggagaatactgtgagcagccagaggatattaaacaagcgatcgccgcgattcaaaaagtgttgggtgagatccccatccttgcatcagaacaggtgagtacacagttgcttcaattaaggtcgattgcttatcccagtagcgattattggacgaggccgaagcagccgatgagactcccgccgagcaacaggagcaacccaaggcaatcaccacaacccgcgtgctcgccgacggtacctacgcgaccgaaactgtttacacctcttccgcatccgccgctcgcctcgaagccgtccgatccgcttcaaaacctccacttcgatcactcatccttggcggcgactttttcactggtagcgttctcgcttctacattgaccaagctcgtcttgcgatattccgaagttacgtcttctgatcagcagagcatcaacatccttcgtgctcaggccatcttgattatgacctccgtcatccgtgtcggtcagagcaagtttgctgctgtccctatcgacgaggatgccgaggagcgaattatgaactgtatcgagactcttgccgaacttcaaggcagtaaagccctccaccaggtgttcttgaaggataccaaggcggcatacgccaaaatggtcgcaactgaggagaagaaggctctggagaagaaggagcgggaaagcaaggtgtcggtggttcaggcggatgatttaatttctttcaggcaattgtccaagaaatccgtcgttggggacgtcgacgaggtgagtgcggtctaaatgatttatgcaccaaaatcaatgctgatgaacgactagtctgacgatgtcgtcaaggctaccggctctatccatcctcaagacgactttgtctccaaactctcccgaatcacacaactcaccgggttttccgaccccgtctacgctgaaaccgtcgttacactctcacaatacgacatcatcctcgacgtgttgcttgtcaacactacaaatgagacattgcagaacttaatggtggatttcgcgacattgggagatttgaagctcgtcgagaggccagcaccatttacccttgccccgcacgggttccacagtttgtccgcgaccgttaaggtttcttcaaccgagactgggtaggttcattattgcgtctggattatgactgctgacgagatattagtgtcatctttggcgctatcacttactccaaacaaggagcttccgatgccgatgtgactatcgtcatgtccgacattcacgttgacatcatgagctttatcaaacctaactatgtcaacgaggcgcaattcagatccatgtggacggagttcgaatgggaggtgaattttttctatcccgtttgtttccaggacagaagctgacatgtttgaacagaacaaggtggccgttcaaacatctattagcgatctccgagcctatctcgatcaccttctcaaatcgacccacatggcccttctcactcccgaagcagctctttctggcgactgcgacttcctcagcgccaatcttgctgccaaatccctctttggcgaagatgcgcttgccaacgcttcaattgaaaggacagaagatggtcacatcactggtcacgttaggataagaagtaagacacagggtattgcgttgagcctgggtgacaagatcacgttgagtcaaaaggctttggcgacagcgtaa

SEQ ID NO: 1326 - DNA, 3366 bp, Cryptococcus neoformans
atggctggagatcgggaaaggcccttgccccctccaccacctggagctgagcaagacagcgccaagaagcctgaaacgaaaaattattctcaattaggtgagaaaattcccatctatccccagcgtagtagctcatcattctgaacgaagatttgttacgatatgacgcaccattgaccggagctaaaattactcgaatgttaaatcaacttcagttcaaattgcaagttgaagaacaatacaagacgggtatcgagaagatggcacaagcataccgggctgagggtgataagagattgaagagcgagacggacgctaaaaagtctgaaagcgaggggaagatacaactgttgagaaaggcgaagaagaggtatgaatcgctggccaaattcggtggagctgtggaagacgacgaaggtaagtgtaccatttgatttttccatcgttgtctttgaatctcaccaggtctgcagacttaatgtctgatggaaaacgcaaggaggctcttcgtaaacccatctccggcaaattggtaatctctcttcgctctgctcgtgatcttaaccatcgcgcccttccccgtcgttcttcgaaaacctactcggaaaccacagtcgtcatcaaggtcgaaggtaacgaacgtgctgtctctcatccttcacgaaacgacaagtggcacgaggacttccatattccggtggaaaaagccaatgaggtagaaattactatttatgatacggttgcccccggtgattcagcccccattgggatgctctggttgcgagtgagcgatcttgtagaggcattgcgaagacaaaaagtcgggattgaaggtcagggtgctggctgggtgactgctgcgactgctgcgacgatgggcccgaggagcagcggcaatgcgccagactcggttacgttgcacagtgctggaactttgagaggcaagccggacgcagaaggcaaagggcctgacgggatcgacggttggtggtctgttgaacccgccggtgcgatatcattgagaatggattttggtgagttgtccaatggttgaaagagttcatgtctaacgcacaacagtaaaggatacggtggctggtgcgcgtcgtccttacgaagctcttggtcgacaaggtgctgttcgtatgcgaaagggcgatgtctacgagatgaacggtcacaaattcgtacaacgccagttctaccagcccatcatgtgtgccctgtgccaggagttcttgctcactggtgaaggatatcaatgcgaggattgtaggtatgcctgccacaagaagtgttatccgaaggttgtgacgaagtgtatcagcaagtcgaacgcagatggcgtgagtgacgaagtttacctctttgggtacctgctaatctaatcaggagggagacgaggaaaaaatcaaccatagaatccctcacagattcactccgtacaccaatatgtctgccaactggtgctgtcactgtggatacatgcttcccttcggtcgtaagaatgctgtcaagtgttctggtaagtttgatcgcgagacgcgccaaacataatgcttattaagatatcacagagtgtgcccttacttgtcaccaaacgtgttcacatcttgttccagatttctgtggtatgactatggagatggccaatttactgctcaagaatcttcgtgacatcaagaccactcagcaccgcaagcctgttccttcaacatccacctcatccagtgtgtctactcttccctcttatcattctcaagagtctcgttctcatccagtgcaatctgctgcgctacaacaaccggccccgtcatctcgtccacctgctggtgctttgccctcaacagaccaaaggccaattcagccacaagttcaaaaccagcaaactggtgcttatgataatctccgtcctgctggtggcagagcaatgccccagttgccacctgtcgcagtgccaagcaacaaaattagctttgaaggcgacagactgcaagagcctcatggtcaaattcctccggttatgcctgcggctcagccccaaccacaaactctcccacctagtgctcaatctgttcaatcccctgtcaaacctcaatatgttcctcaacccgctgtccagcaacaagtggcccagagattgcctcctcagcagccgctcatggctagaaagaggaaggttggactggatgatttcaactttttagcagtgttgggcaagggcaattttggaaaggtcatgcttgctgaggaaaagacttcgagcaatttgtacgccatcaaggtcttgaagaaagaatttattattgagaacgacgaggttgagaggtgagttgaattgcacttgtgcaagacgggctggctgaccagatgctagtactcaatctgagaaacgagtgtttttggctgctgcgcaggaacgtcatcccttccttctcggtctccactcttgtttccaaacggagactcgtgtttatttcgtcatggagtacatctctggcggtgatctcatgcttcatatccagaaaaaacagttcactctccgtcaagccaagttttacgcgtgtgaagttctgcttgcattgcagtacttccattcgaaaggcattatctaccgagatttgaagctggataatattttgttgacattggatggtcatgtgaaggtggcagactatgggttatgtaaagaggagatgtggtttggtaagacgacgagcaccttctgtggtacccctgaatttatggcacccgaggtaggacgccagcttgttgcaagaaaaggagatagtgctgatgtattcgttagattcttcttgaacaacgttatggccgtgcggtggattggtgggctttcggtgtgttgacatatgagatgttgctgggacagtctcctttccgaggcgaagatgaagatgagatctttgacgctattttggaggatgagcctttataccccattactatgcctcgggatgctgtgtctcttcttcagcgggtgagtatgaagctgggtctctcttgtgtatggtatgctaaattttgtaacagcttcttacccgtgatcctacgcggcgacttggtgctggcgaaggggacgctgaagaaatcaagcaacacttattcttccgcgacgtcaactttgacgatgtctatcataaaagaatcccaccaccatacttcccggtgatcggtaatgctactgacactagcaattttgaccaggagtttacaagggagcagcccacattgactccggtccatacgcaattgagcgaggcggatcaaaaggagtttgctggcttctcttgggtgggtgtcttctctctcactattgataggatttacactgacccaacaacgtag

SEQ ID NO: 1327 - DNA, 3148 bp, Cryptococcus neoformans
atgctatcgtcaaggtgagtgacggagaagaatatccttgatggagagtggcgatgaagaaaatttttagctgactcagattaccaggctctcaatgacaagaagtctcaatctgcgcgtgaaggtgcctgcgaggttatctctactctctgcgagaacggtgctgctcagcttctcgagcctcacgttatctcctctgccgagaacactcctttccccgctcttctcgaggctttcgctgacaaggtcgccgctgtcaagactgccgccatcgctgccgtcaaggccatcgtgcagagcatgaacccatgggcttctttcgttctccttcccgctcttcttaacttgatcaggacttctggcaagtggcagatcaaggctggttctcttgagattctccagcagttgatcacttctgccccttaccagatgggcgaggcgatgcctgaccttgttcctgttctcgccggagccgtttgggacaccaagtctgatgttaagaaggctgcgaaggctaccctcgagaaggctgtgtctcttgtcgagaacaaggatattgagaagttcgttcctgctttggttaaatctctcctcaaccccatcgaggaggttccgaagactatttctctcctttcagcaaccaccttcgtttctgaagttaccgcccctaccatctccctcattgctcctctccttatccgaggtcttgatgagcgacctaccgccaccaagcgaaaggtttgtgttatcgccgacaacatgtccaagcttgtcgactccgaatacaccgttcgacctttccttcctcagcttttgcctcgtcttatcaagactgctgagaccatcgccgaccctgaggctcgatcagtcgccaaccgtgctattgttacccttcgtcgaattggtaaggtcccagttgagtctgatggctcagaccttcctcctcttcctgtcgctgagggacctcacctcgccaccaacttcgtcgctcttgtcaagaagcacggtggtgtttccgttgaacagaccaaccctggtcttgcctacgccggtgtcctcgccgcttctcttgtgaaccaccacaacttcgaccagaagacttgggagtctactctccctccttatctcaagctcgctctcccttcctacgactctcttcctgctgttcgagagctccttcagaagaaggctgatgaggctgagactgacgacgccaagttccctgatgaagaagagggcgaggacctctgtaacattgagcagttcaacttggcttacggtgcaaagatcttgctccaccacgccaacatgcgtcttaagcgaggccaccgatatggtctctgtggtcgtaacggttccgggaaatctaccctcatgaacgccatcatcaacaatcaagttgagggcttccctccccccaccgaagttcgaactttctacgttcagcacgacatcgacggttccgaggctgagatctccattcttgactgggttttgagtgacaagcgattgctcgccacccctgaggaaattaagtccactctcgaatctgtcggtttcgacgaagtcaagcagaagaactccattggttctctttctggcggttggaagatgaagcttgctcttgcccgagccattcttttcaaggccgacattctcttgctcgacgagcctaccaaccatttggatgttcttaacgttgactggctgatcaactatctcacttcccttactcgatgtacctccatcattgtctctcacgactctgacttccttaaccgaactgttaccgacgttcttcatcttaacaacttcaagttgaagaggtaccctggtaaccttgaggaattcgtcaagcacgtccctgaggctaagtcctactaccaactcgatgtcgctgaggattatcagttcaagcttcccaaccctcctctccttgatggtgtgaagaccaaggagaagtctttgctcaaaatgcgaaacgtttcattccagtaccctggttcttctatccagcaactctacgacatctctctccaggtgtctctctcatctcgagttgccgttcttggtcccaacggttccggtaaatctacccttgttaagctcctcactggtgagaccgagcccaaccttggcggtcaggtctggaaacaccctaacttagtcatcggttacgtcgcccaacacgctttccaccacattgacaaccaccttgactctactcccccttgagtacatgctctggcgataccagaccggtgaggacttggaggaaatgcacaaggctaaccgggtcatgaccgaggccgagcttgccaagatgaaggagggtgccaccgttatcaaggacggtgtcaagcgaatcatcgatgagcttgttgctagaaagaagctcaagcagtcctacgagtacgaggtatccttcaagggtatgtcctctgccgaaaacatctggatttctcgagacgaacttgttgcccgtggtttcgagaagaaggttatggagctcgacaccagggaggctcagcgattgggtctcatgaggcccttggtcaggagggaaatcgaaaagcacttcgaggacttcgggtaagtgacgttgcttttcgatgttttaagatatttcgctcacgtgtacttatagactcgatgccgaattcgtctcccacaactccatgcgaggtctttccggtggtcagaaggtgaaggttgtcctcggtgccgctacctggcgaagaccccacatcatctgtctcgacgagcctaccaactatctcgaccgagagtcccttgccgcccttatcgcggcccttaagaacttcgagggtggtgttcttattattactcacaaccgagagttctctgagtccatctgtaccgaagtctgggccatgcgtgagggtcatctcgaggcttctggacacaactgggttgagggtcaaggctccggtgagaggattgacaagaaggccggcgatgacgacgaggtcgagtacgacgctttgggtaaccccatcgtcaaggcgaagaaggagaagaagctttctgccgccgacaagcgaaaagccaagaaggaccgaatggctagaaggaagcgaggagaggaagtcttcagtgatgaagagctttaagcttccttttatag

SEQ ID NO: 1328 - DNA, 3325 bp, Cryptococcus neoformans
atggcgagacaatcaaagccattcacggcatctactgtttcacaagaaaagcccaagaagcaggtgatcaagaagaaaaggcttgaccccgccaacgcatacacctacctcccgtctctccccaaacgccaccgtacatccgccttccagaactcgctcagttacgaagaactccaacaggccaaggagtcgtccaagggacgccattatgatggtgaagacgatgaagaatctatgcaggcgagggtgcgaaaagttgcgatgatgattgcttctgaagggcctcaagaagtggatagcgaagaaagtgaagtggactctgacgaagcatgggagagtgatggaagtgacgaagagagatggggagatgtatttaaagagctagaaaagggaaaagggaagaagaaggcaaaagacgtagtcagaaaagtcggtacgactttttatggttcaaggcgccggaaaactgacagttgttacagcctgcgaaaccattgactgtcaatcttgatgaaagcgacggtgaagcccccaaagaaattgccaataattcaaccgttcctatctctcctgagtctgcagaagaagacgaggataatgatgatgacgaggatgaggatgaggatgatgacgaggatgaggatgaggatgaggatgaggatgaagacgaagacgaagacggattgtcggaactttcagcggaagaggaagaccccgacacgcttgccgaccttgacgcttttgtcgaccaactcgccgcgtccgacaagaaacgcaaagctacagagaccgacgccgattcttcagctgagcagaagaagagacgggtcttgcctgtcaagtttaggcaagagatcaaggatgacgcagctttgaagagcagtaagtttgtcaaatatcccgctctgtttgcataaaacgctaaaccatgccgttagaccaaaaattggatatctccgctctcatttcatcccacccctctctcgcttccgcctctgctcttatcaaaccctccaaaccatccactaccaagtcagtcctcaagggcggtgttcttgctgctcctcttcctaccgtccaacaagaacgacttgaccgcgaggccgcttacgcccaaaccaaaactgaaggccaaaaatggtctaccttgatgaaacgagtcaaagaggccgaacacttgtccttccctctccaagcaaaggaccgcggtggcgtcaaatcttccagcgagattcttgccggtttcaagcctcaaaatgaaatggaatctgccgtcgaagcactcttaaaaaaggccaacctgacagaggacgagctcacgaagcatgaagatctccagatggaagctcgtgaaatgacggaagaagaaattaaagctcgtcgagctgaacttcgataccagcgtgaacttcttttccgcgctgaagccaaagctaagcgcgtggccaagatcaagtccaagacatttaggaaacttgcgaggaaacgagcagcaaaggagaaccccgggatggcgttggaggacctcgagaggcttgatcccgaggcggcgcagattgagagagagaagattgagcgtgagcgagcaaaggagcgagcaaccttgagacatggcgcgaagagcaggtgggcaaggggggtcggtggtgaagctgatgatgacgagaggatggcaaaggaagcaatgttggatatgaaggagaagctgttgaggaagattcagggtaaggatgagggttcatcctccgaagaagagagcgaagacgaggaagaagatgaagaaaccgtcaaggccaaggcgtttgaccagctcgctcagctcaactctgattccggtgcggcctcacaagctcaaggcaaaaagggtctcatgcaaatgaagtttatgcaaaaggcgcaagaaaggaggatgaaagaagtcgcagagcaagagaaggatgctcgtatgcaaatcgagctctttggtgaggatggcgaaagagaggaagagagtagtaacgagagtgatgaggagccagccgttgttaatgttggtgggaatgaaggaagactcaagtttagcggtcctactcctggcgtaagttatctcgcacaagcccatgtagttcaaaggactgatacccctcttcacagaccggcgcttccgaatcaccagctcttcctgctccttcagtccaagaccccgtccccgcatccaaatccaaatccatctttacccgtgccccttctccccctcctgtagactccaatccgtggctcaccgctaccaactcctccggcccctctcgaaaacgtcacgcccaacttggatcccagcttaacgacgagaccaaggctgttaaagctatcaagaaggcaagcaagagaagagaggatgaagaggaggatgagagggttgatattgatgtggaggcacccatcgccaccaaatcagtggatatctcaaataataagggtaagactaagggtaagacctctattgctgcgattgcggcggtccaagcggacgaacaggaagaagatgaggaaattgcagacttgcttcctgccagcggcgttaaagcattcaaacaacgtgatcttgttgctgaagcgtttgcgggtgataatgtcgtggaggactttgcgactgaaaaggccagacagattgaggcggatgcctccaaaggttgaagatacctcactccctggatgggtaagcttcatattcttccgaagcaaaaccaagctattctaggtggctgacggaagagaaatattttagggatcatggggcggtaagggtgcaaagaagcgcaaagccaatccgaaattcctcgtcaagacggccggtatcgagcctattgcccgaaaggactttgcccattccaatgttatcatcaccgagaagaaggacaggaaggcgtcccaattccagctcaaggacttgccttatccttacacgagcaaggagcagtatgagaagagctttgaagtgccagtgggtagtgaatggaatagtaggagcgggttccagagaggcactctgcccagggttgtcaaaaaggcaagttcggctcatgacattggattcactcgaaaagctgacaattcttatagcctggagccattatcgaacctgtcaggagactgttctaggcttcgtatattatgtaatgtattgtgcgcacttttgatgtttagtatgcattcgtcgagcttgttatgccaggtgttcgcagtctgtttcttatacaccctttcccgtcagccttttttcggcctggacaactttacacctctcgccccttgtagttttattaccgacaccattaatctaatctaa

SEQ ID NO: 1329 - DNA, 3238 bp, Cryptococcus neoformans
  misc_feature (330)..(330): n=g, a, t or c
atgtttatcgctctgtcaatgtttgcgtctctttgtgctgactatatactagggagtcctccctcgagaacaaggtgcagggtgaggaggtccccgctgctgctgctggtgagttttgtcgcagttacgattattgtttgccgacgactgactgcggcatctgaagccgacgaggagcccaggaagaagcgagagtacaaggaaatggagcacaagactgagggtgacctccacgccaaggttgacatgaacaccgtaagtgagatttccatccccgccaagccttttcctctgctcccacatcataccaccccactccacagattcggntctcgccgctaactctattttcgcccacagatccagttcactgctgccgacttgtacgacaaggacaaggtcgatattgagcacgtcgttatggaggaggtctaccagctccttcaatgtaccgacgccggtcttaccgaggctgaggccaccgaccgtatcggtatttttggccctaacaagcttgaagaaaagtccgaaaagtaagcatcacttgactctcccctgctatgcaatgcactaacatccctttagcgtcctcctccaattcctttctttcatgtggaaccctctctcctgggttatggagggtgccgcccttgtcgccatcgccctttctaacggtggtggtactccccccgactggcaagatttcgtcggtatcatccttcttctttttgttaactctactattggtttcgttgaggagcgtaacgctggtaacgctgtcaaggctctcatggactctcttgcccctaaggctagggtcaagcgagacggccaatggaaggagattgagtcttccgagcttgttcccggagaccttattgctttcaagcacggtgatgtctgcccttctgactgtcgattggttgaggccattgatgtttcgtaagtattcatattccacaagcacgattgcatacgctgataatcgatatagcatggaccaggctgctcttactggcgagtctcttcccgtcggcaagcatgagggtgacgagtgtttctctggttctacctgtaagcaaggtgaggccgagggtatcgtcatcgccaccggtcccaacactttcttcggtcgtgccgctactctcgtcggtcaggacaacgaccaggtcggtcacttgcagcaggtccttgcccgtatcggtactttctgtctcgtctccatcggtatctttgtcctcctcgagatcttgattctctacgccgacttccgatacccttaccgacgtggtcttgacaacatccttgtcttgctcattggtggtatccccattgccatgcctactgtcttgtccgtcacccttgccgtcggtgcccagcagctcgccaagcacaaggctatcgttacccgtatcactgccatcgaagagcttgctggtgtcaccatcctttgttccgacaagaccggtactctcaccaccaacaagcttaccattgacaaggagaatgtcaagtgctactccaagtgggacgttgagggtgtatgtctcctcgctgcctatgcttcccgtaccgagaaccaggacgccattgacggttgtgtcgttggtaccctccctgaccctcaacaagctcgtgctggtatcaaactcctcgacttcaaacccttcaaccctgttgacaagcgtaccgagatcacttaccgagacgaaatggacggtggcaagcttaagcgtgctaccaagggtatgactggtatcatcattgaaatctgtacccgtaacaagaccaacgagcttgaagaccaacttgaggccgatgttgaggagtttgcccgacgtggtctccgtgctctcgctgtcgctttcgaggatgttgctggtgatgacccctccgctgagggcaacggtttcgagcttgtcggtctcctttctatcttcgaccctccccgatcggacaccaagaagacgattgacgacgctatggctctcggtgtcaaggtcaagatggttactggtgaccagcttgctattgctaaggaaaccggtcgacgacttggtcttggtgaccacatgtaccctgctaaggttttgaaggaaggtcccgaggctggtagcaagcacgccaaccttgacgagatgatcatggacgccgacggtttcgctggtgtcttccctgagcacaagttcgagattgtcaagcgtatccagaaccttggtcacctttgtgccatgactggtgacggtgccaacgatgcccctgctctttctcgtgccaacgtcggtatcgctgtcgagggtgccaccgacgctgcccgaggtgctgccgacattgtccttactgagcccggtctctctactatcgtccacgccatctacggttctcgagttatcttccagcgtatgaggaactacgccatctacgcttgtgctgttaccatccgtatcgttctctgtttcgccatcatggcctttgcctggagatttgacttccctcccttcatggtcctgatcattgctgttctcaacgacggtaccatcatgaccctctctcttgaccgagtccttccttctactacccctgactcctgggatcttgccgaagttttctctttcggtgtcgcttacggtgtctacctctccgcctctaccattgctctctacgctaccatggagaacactacattcttcgaggacaggttcggcgttgaacctttgaagggtaactcttacggtggtcacatggttatctacctccaggttgccatcatctctcaggctcttatcttcgttacccgatctcacggcccttcatggactgagcgaccttccgttgctctcatgttggctttctgtctcgcccagctcgtctcctccatcatcgctgcctacgccgactggagtttcagtcaggtccactctgtctctggtggctggattggtatcgtctggatctggaacattgtctggtacttccctctcgatggtattaagttcatcatgaagaagaccgttatcgctgctctccagaggaggaaggcccgaaaggccggccctgccgtcgccgatgccgccctccaccgagctccttctcgacacgagtctctctactccaaccgaaccaacttccttacccgagctgccaaccgactcaggggtggtgccaagatctctatgtctcagaacgagcttcaacggtgagttttcgtgtctggattgtccatttgtctggttactga

SEQ ID NO: 1330 - DNA, 3583 bp, Cryptococcus neoformans
atgcaggcaactccagaaacgctctccctcctcacgaactacctctcctccactgtctctccagacgctcatacccgtcgctctgccgaagagtctcttcgtcaggctgagggtcaacagggcttcctgttgctcgtactcgagctcgtcaaagccgactcggttaatatgatcgtgaggcaagctggcggtgtatacttcaagaacactgtcaagagactttggtctggggatgaggtatgtcctcgtccggccttttagtcttgttgggtttcagctacatttattgactgaattcgattccctaggagacacaaatcgatccggccgacaaggcagccattaaatcacaacttgtccctatgatgattgcgttgggtactcctcagacatcgcgactgcagagccagatcggagagggcctaagccacatcgcttccctggattttccccgtgaatgggaaggtctctgcgacgtagggttgaaacaacccatcatacgaccactcattccatttgcaggaacttgtgaactcactcacgccagataactttgtcatcaacaacggcgtcctggccacggctcattctatctttaagcggttggtcttttaaaatatctttcgccagcacgcctttctgatttcatgattagctggagatctcaattccgcacaaatgagctttacagcgagattaactttgtgttgtctcgtttttgcgaaccatattaccgtcttttccagcatgtcgatcaattgcttcaaacgcctcctgcatcccttcctaccaactcttccattcttcttttgggccaaagccttcttctccttatccaactattccacgacttatctagtcaagatctgcctccattttttgaagaccacatgactgaattcatgggaggcgatcagcctgggtggttgaggaagtatctggactgggaagtagaggagctcaagggcgacgatgatgacgaggctcctggacctttgcaaaaaattcgctcatctatctgcgaaatagctgaattgtatgcccagaagtactcggatgtttttacccagttgggaagctttgtggatggcgtctggaatatgttgacccgtgtcggcaccagcaccagggaagatgtggtgagtgacagtaactttgtcagatcacacattctgactcaagtactttgatagcttgtctctcgtgcactgaggttcttgtccgttgtggtaaagatgggcaatcaccgtgccatgtttgctgcttccgagacgttgaacgctttctgcgaaaagatcattcttcctaacatggctattagaggtgagtcgccctttgtagaaagagcataactaacgctggatctagagcacgaagaagaaatgttcgaagatgacccaatggagtacattcgacgtgaccttgagccctccaccggtaagcgtcatgcgagaagtccatgtacccatactgactcaatgattagaaagcgacacccgacgacaggctgctactgacttcacccgtgctctcatggagttatttgaaaaagaagtcacgggtatcatcaaaggttacatttctgtgttcctccaagagtacaacaaaaatcctgtaggaaactggaagtccaaagacactgccatttacctgttgacctctattgcctcccgagggtctacccaacaggtgagatataaatcactgacatgatggttttacactaactgttatgcagcttggtgtcacctccacaaacgtccttgtcgatgttgttgacttcttcggtcagaatgtcttttcagatttgcaggcagctcccggatcagttcatcctatcctcactgttgacgctatcaaatttttgtatactttccgcaaccaggtttgtcgactaacctcaacctcatcaatgcgacgtcactaattaatcggtagcttaccaaggatcaactcgtctcggttctccccctccttgtccaacaccttgcctctgataattacgtcatctcttcctatgctgctattaccattgagcgcatcctgttcatcaaggttgagagacaggcattgtgagtccacgatccactagaaattgcttgcagaatctgacaaaaatggtgattaggttcactcaggccgatatcaggccatttgcggagaacatcctcatggctctcttcgccaacattgagaaggggggaacacccgagaagatcgctgaaaatgactatctcatgaaatgtgtgtattcttccttgaccacatcggtctgtgtctgattatgattatcaggtgtcatgcgagttatcatcacagcccgaacatccctcacgccttcacatgaaggcatcctcactcggctcgttaacatcatgggcgaaatcagcaagaacccaagtaaccccaaattcaatcagtactgctttgaaagtgtatctgcattgatcaggtttgtgtgcgaaggaactcctgcagctttgccgacatttgaaaacgcgttatttggtcccgcccaacacatcttgaccaacgatgtcgccggtgagtgggagagtgtcattaatctccgggctaactagtacgcagagtttattccctatatattccaaattctcgcccaacttctggaattgcattccccttccgagcttccgcctgcctaccaggcactcaccggtccgcttttgtctgccgctctttgggaacagcgcggtaacatccctgctcttgtcagaatatggaaggctttactccttcgcggtgcgcctagtattgtggccgcaggtcaggtacagggattactgggtatcttccagagattggcaggaagcaaggtcaatgatgtttgggcgtttgagctggttcaggcactgtatgagtttgtgcccatgtaagtgcgattgcatcgttcagttaatgtggctaataaaacgtgcagtgaagtgatgcggccattctcccagacagtctttgtgctccttttgaaccgacttcaaggtaaaccttcgacccaatttaatcattgcttcgtttatttcttcgctttcttggccaatctggacagcgtgggcgcggatttcctagttggtgttctggaaggtattcagactgggtaagttttttttccatttgttgatatgcgcagtgttgctgaccccccttcaggctgtttggcaacctcctgactggcgtcatcttgtccaacacccagaagataaccgccaggaatagaaaattggttgaagttggtcttataaagactctctctcgttcagatagtcttttggtagagccgaacaggcagttctggcctcccattttccttgcccttctggacatgttcactcttccgcaagatatcacctatgccaatcccgaaggatcaggtgatattaccgagctggatcccgaggaagccggattccagtctagcttttccaagctgggcgcgagcgagaagactgtgagtgaccctactgcaggcgtggaggatagtaaggtgtttgcggcgaaagaattagccaagagatcgaacgagaaacccggaatggtatgtggcatgtcctctcatgatacttga

SEQ ID NO: 1331 - DNA, 3384 bp, Cryptococcus neoformans
atgccagtcccagcagtaacgacgtcagcagcaggatccctcaccctccttgaagatcccgacaaggatgtcagggtctacgccctcaaccaccttctctccatcgttggccagttctgggcagaaatgtcggacaagcttccttatctgtaagtctatctttcttggatttggcttttatataagaacatgaactgatatgtaccgcagggaattgttggccgaccctctttccaaagaacttgccccggagaaccgaccgtttgccgcactcctcatctccaagatttacttttacatgggtttccaagatgaagctgtagagtttgcattgaaggctggggtagcatttgagaaggaatctgaaggagagtacagggaaacgatcatcggttcgtcttgcctcgtgtctattggggaggcagaggccggtatgctgattcagtaatggttggatttgtagctggatgcttggatcaggcgattgacaaaacgcaaaaaggagaggatatcccagcggatctgcagagcattgttgactctgttctccgaagcagctctggggagaatgcaaagctcgtacgtctggatcttgtctcagcatccgattctttctgacaaactgtaggcaatgggtttggcgctctcccttcggcggctcgaccttatcgagatgatctatcttagttctagagggccatctcaagcatcttcatcgaagtctgagcgagtcgtgcatgatgagaatttgttgcgatatgtccttgcagaggttgtctcaggtactagcgggaatgaggcttggccggaagatttccgtgccaatgtaagtctccttggggatattaaaaatatatacaagaattgacatttcgctagttgttcagcctccttcgccgattattccatctcaaccccaaccccgattggaattctataactaccgtttgggctcaaagctcagacgttgaatcaacagtagaatccctcgtcaagcttctcgaggttgacgacaacttgacggtgtaccaaattgcgtttgacctcaccgaagtggcatctcaagcgtttatcgacgaggtgcgggaaaagttgggagagaccaaatgggctgcgcctgtcgacggctctgtgagttgtgtccatttgattcgcaaagtcccgctaaatatgttgtaggaggacgatgtccgggtagtcttaaataacattcttcgaggcgacaccagcgccgaactgttcctcaatttcctcagtaggaacaacaagaccgacatgtcaatacttaaagtcaccaaggaaactcttgaagatcgatattccatctatcactccgccatcaccttcaccaacgcttttgcccactgcggcaccacatcggacaagttccttcgtgagaacctcgactggctcggccgagcttccaactgggccaagttctccacaactgccgctttgggtctcattcaccgtggaagctgggtcaacggtaaccgcgtcgtaaagccctaccttcccggaggtgctgctcccaacaagtacagtgaaggaggtgccctcttcgcgcttggtctcatctatgccggtcgtgtcgagtttgctgaggaagagctcaagaagggtttggccgaaggtaacgaccctctcgtccaacacggtgctgctcttggtatgggcgttagcgcattggcttctgccgacgatgaaatttacgacgagattcgaccaatcctcttccaagatgatgctgtcgcgggcgaggccgcaggttatgccatgggtcttgtgatgctcggtacagcgtcagagagagctttggaggagatgttatcttacgcgagggaaacacagcatgagaagattatccggggtttggctatgggtatcgcgttcttgatgtacggtcagagggaggcagcgaaccctgtgatccagaggttgacggaggacaaggtgagcttttcggacattcaacctttgcctagcactgacaagatgcctaggatgccatcctccgatatggcggtatgtacaccatcgccctcgcctttgcgggtacgggtaacaacaaggctgtcaagaagcttctccatgtcgctgtctctgatgtcaatgacgatgttcgacgggctgctgtcaccgctcttggttttgtactcttcagaaaccacactacagtgcctagggttgtgcagctgttggccgagagctataacccccatgtgaggtatggtgcgacgcttgctttgggtatctcgtgtgctgctactggtcttgaggtaaatatagattaaaatcttccttgggatgaaaatggctaatgtgattttggtagtctgccattgagctccttgaacccatgaccaaagaccctgttgactatgtccgtcaaggtgcttacatctcccttgccatgattctcatccaacaatccgaagccgcatgccccaagtctatcaccattcgagaactttttgccaaggtcgtcgccgacaaacacgaagatcccatggctcgattcggtgcttctctcgcccagggtatcattgatgccggtggtcgcaacctgaccctagccctctctacacgagctggtactttgaaccagaacgctgttgtcggtatggcgctttttgttcagttctggtactggttccctctcgcccacggtttgggtcttgctttcacccctacagcagtgattgctatcgatggcaagatgaaggttccacaactggagcttgaatgccacgcccgcccgagcttgtatgcttatccggccactgagaagaaggtggaggagaagaagaaggacaagcagaaggctgccgtgctttctactactgcaagggctaaggcgagggagagggtcaagaaggccgaagcgggtgaggttatggagaccgacgacaaggctgaagagagtgggaagggcaaggatgccgcgcctacaccaaaaaaatctaaaccatctgagccatcctctttcaaaatcccgaacatgtcccgcgttaccccgtcacaattggcatacgtcaccttccctacttcgggacgatacacgcccgtccgacctcttgaccactctcctctttctggctctaatattaacggtaaaccatcaacgttagcgtcaggagcgagtgcgagtggcagtatcgtggttcttcgagacgaaaagcccgaggagcctgcagagtatattgaactgagtaaggagttgtggcctggatggctgccggcaaaccccgaagcggcagcagctattttggcgcaggctaccgcagaagggtctggtggggcgccgggttcgggtgttactgggcaagctcaacaacaacagcaagagcccgaggaggaggcagaggccccaccagcgtttga

SEQ ID NO: 1332 - DNA, 3419 bp, Cryptococcus neoformans
atgttcctagctctgctgcagtcagacgaatccgcgatgaaacaccattgttcttccctccgtgggtctatcaaaatctcgccccattttctgctgatgtataagtagttccggaggatcgacccctcgtcgagctcgtcgaggtgacatccactcctctttcccgcactcatcgccgtctctcgctcgacgacaagcccaagtcccggctgactctctttcgctccgtgcgtcttcccctggtatgggtaccgatagctttggtactccgcgtgttttcggatcggctgcccctaccctttccgcagttgcccaatctcaacttggtgccgacggcgacgatatcgatggtatggtcaaatttatctggggtacgacaatctctttgcaagagagcatgaaccttttccgggattttttgagaggcttcaaacccaagtaccgtgctgtgtacaatgcggaacaatccagacatgctgaggagagtggcggcgttgcgcctcctccgatgactttgtacgacaatctctctgctgagcgtgccgaggtccctctctatgagacgtatctcaaccggcttcgactcactggtgaaactaatttaaacctcgacgcgctcaatctgctcgcgtaccgacccacaaaaaagctttaccagcaattggtcaactatccgcaagaagtgatccctatcatggatcaggtcttgagggatgtgatgattgaattgggtcatgaagagctggagaaagcgcagaccaaattcgctgagggtaacttatctcagttggaattgagtttgattacaaatgagattagagatgtggagtcacgagtgtataaagtcagaccgtttggtggagagaagacggtcaacatgagggatcttaatcccggaggtgagtgccgactttactttgcctggacgtgcaactgataatctgtagatactgacaagctggtgaccgtgaagggtcttgtcatccgtgcaactcccgtcattcctgatatgaccactggtaagtaatgcgtatccaatcttgtgaaccttttgctaactcatctcagctttcttccgatgcttggtttgtcagcacactgttcaagcggatatcgaccgaggaagaatcagcgagccagagcgatgtccccgagacgtctgtggttcaactggcactatgtctcttattcataaccgctccgaattcaccgacaaacaagtcatccgtcttcaggagactcccgatgctgtacccgatgggcagactccacatactgtatctctttgcgtctatgatgaactcgttgacttggtcaagcctggtgaccgagtgatcatcactggtatcttccgatcaatcccagttcgtgtcaaccctcgccaaaggagtatcaaatctttgtacaagacctatctcgatgtcgtccacgtcaagcgtaccaacactgcccgaatgggctttgacccttctactcgtgcgggcgagagcaagccaccgggtgtcggcgttggtggtgaggacgacgaagatgaacttcttgcgcgtcaggatggcgatgctgcgatggacgaggaccttgggtcgcctgtcagatcagccgctgcggagatggaacaacgcattatcgagctctccaaccaccctgatctttacaacatacttgcctcatctttggcgccctccatctacgagctcgaagatgttaagaagggcatcctcctccagcttttcggcggtaccaacaagtctatcgcccgtggtggcggtgggggcggtcctagatacagaggtgatatcaacgtgttgatggttggtgatcctggtactagtaaatctcagattctgcagtatgtgcataagattgctcctcgaggtgtctacacctccggtaagggaagttcagcggttggtttgacggcctatgtaacgagagatcccgattccaagcagctcgttttggaaaggtaattttcatttgtaaattggtggactcaaggctaatgacaatgtagtggtgcattggttttgtctgacggcggagtttgctgtatcgatgagtttgacaagatgagtgatgccactcgaagtgtcttgcacgaagtaatggtcagttcgatgtccttcccatatttgaagccaaattaacttatataataggagcaacaaacggtttctattgccaaggcaggtatcatcaccactctcaatgctcgtacatccattctcgccgccgcgaacccaatcaactctcgatatgaccctaacctccctattcctgccaacatcgatctccctcctacattgatctcaagattcgacttgctgtacttggtgttggacaaggtggatgaggtgaacgacagaaagttggcaaagcatttggtgggactctatttgtcagatgtagaggatcagcctgccgacaatatcattgtgagtctttttgtttcaaggtgaccgatctcaactaacaagttgtgcagcctcttcagaccttaacgtcctacattacatatgcccgctccaaaatccaccccgtcctcaccgaaggagcttctgaagcgcttgttcaggcctatgttgagatgcgcaaggccggtatggactctcgtactcaggaaaagaggatcactgctaccactaggcagttggaaagtatgatcagattgggcgaagcgcatgcgaggatgagattaagtgacagggttgaggaagaggacattagggaggctgttaggttgatcaagagtgccctgagggagagtgctgtgcgtttacttttgtgtctatcatttctgcataaaactgactgaatattcaacagaccgatccccttactggtcaaattgatcttgacctcatcaacaccggtgccggccaaaccatgcgtcgcgcccgagccgatcttaaacgtgaagttatcaaactcgtcgtcgaaaaggcccgatctcagggtattcgctgggcagcagtcattgatgagctcaacaaacaatccagtgttcccgtggatcatgcacagttcgcagaaattgttagggagctggaagaagagagcatagtcaaggtcatgggtgaaagggaaagaaggattatcaagagtctgggtgtatgattactttggagaatgggttttctttcatttttttcgtcgtgtggtgtttgtccttgttcttctgtttggtacaatgtttgcataatataaatgaaaagcttgtactacatcttggacttcaatcgctgttattcttcaaaggccgtaacaacaaatattggatctcgtcatctgcaatatcgcgtaagacattccggtctgggctcacgaaagtccgtaaagaatcggccattcatcaccgctcgattgcctattgcagacatgtcggttgtcggagttgcaaatgcgattgtgaagagtag

SEQ ID NO: 1333 - DNA, 3660 bp, Cryptococcus neoformans
  misc_feature (949)..(949): n=g, a, t or c
atgtacaccatcgggtatggggtcgtctgtcttataggaatgcaacacgataacaatccgagttgcctgaagtgattgttgcaggcgttgttcgagcggaagacaacagaaagtggacgctcgtataatgataccctggaatccatttcacttacgtaaaccggttatttgccgctttctgcagctttggttttggctggcgcaggaagaacggccagccttgacttgtcacttcttccttttcttcttccttccaacccccaaagctcgactgaatactttaagaatggtaattatacggatatcgtccttaaacccacgctaactcgtccgcagggtgttccagctcttttccgatggctttctaagaagtaccccaagatcgtcgagagggtgaaagaggacactcccaagaagatcagaggtccagatggcgaaattgtcgaggagcctataagatatgaaaatcccaatcctaacgggttcgaggtggataatctttatcgtaagttgatcgtcgttggcatgccggacggaccactcatgaagattgatcagtggatatgaacggtatcgtgcatccctgtacgcaccctgaaggccgacccgcaccagagacagaagaagaaatgatggtggaaattttcaagtatactgaaagggtagtcaacatgtgcaggccgagaaaagtcttgatgatggctatcggtgagcctggttcttttgtagctcgatatctgatgctgataaccggttagatggtgttgctcctcgagcgaagatgaatcaacagcgttctcgtcgtttcagagccgctcaagaagccgcagacaaggaagaagagaggagagaggctatcaaattgtttgaagccatgggccacgccgtttcagaagagactgccaaccacaagagttgggataccaacgcaatcacccctggtacaccnttcatggaccttctctcaatatcactaaagtactgggtgtcccacaagctcacaaccgaccctggatggaaagatctcaaaatcatcctctctgactcatccgtccctggtgagggtgagcacaagattatggactggattcgtcgtcagcgaagctaccccacatgggatgccaacacgtcacatgtcatctacggtttggacgctgatttgattatgctttcgcttgccacccacgaacctcatttccgtgttcttcgagaagacgtcttcgcccaaagttctaagggaccccatgcttgcaaaaactgtggcaaggtcggtcatattgccgccaattgtaagagcgataaaaagttcaaagaccccaatgttgctgaagttgccaagacggaggaccccaaacctttcatcttccttgatgtggcttgcttacgcgagtatttggcagtcgagcttgttgtaccaggcatgcccttcccgtttgacctcgaattggcgattgatgattggattttcatgatttttttcgttggtaacgatttcttgcctcatctgccgagcttggaaatccgtgaaggtgcgattgatgtgcttctcaagatctggagggcggagctaccgaggatgggtggttaccttaccaaccacggcaaagtcaatcttgaccgagctcaagttatcttggaagggttggccaagtccgaggatgaaatcttccagaagagaaaggatgatgaagagcgtcaggagcattcccagaagcgtaggaggattgaagagcataagagacaagatgaggataaggcgcgtgaagaggatcgtaacaccttgactctaaacggcacagagtacgttgctgttgataaccccgctgcgaccgcccgtggcggtcctcttcacccatcgttgccgtctcgaccggcattcgacctcgttcccaaggaggatgcagttaaacaaccagaggatcaggaccaaaaggcaaagaaggcaatggctggctccaactcggatatagtcaagaatcgcaaggcgatcaggatggcaaacatgagtgcggctcaggcactcaaggctgagttggagggtggtaatgacgtgaatgtcgacgacaaaaaggcgattgcccaagaaggaaaggaagaggatgaagcggttgttactgttgagaggacggaggacgaggaaaaggagcagctgacgaaggaggaagcgaggggaactttggaagagcaaggcgagaaagagggtgttgatgaagaggtggttcctcccgctatccagacggacgaggatgagggtgaggcgcccgtcggtgatgccaccgtggctgaaaatgacgaatctactatccctgaggacgacgaagaccccacacacgttccccgcaagagaaagaggggcgattccgatggtgatgaggatagcaatgaggaggatgacgatgacgacgacgacgatgctccccctaatcccgaagccgaccagcctattccgaagaaaaagctcaaggtcaatgcagacggaacggtcgactatgaagatgatgttaagctatgggagcccggatatagagaaagatattatgagaagaagttcggtgtaaaattgtcggagagagaattcattgacaagtaagtccagtgccatcatgctcaatgtggcagctaacatcgtcaatagggttaccaagtcctatatggaaggactctgttgggttcttgaatattactaccagggcgttcctgcttgggattggttctatccttatcactatgctccctttgctcaagacttccgcgatgttgggtctatggacatcaagttcgaaaccagcatacctttcaagccgtttgcacagcttttaggtgttttcccggccgctaggtatgttatcattgtctgatcatcaagcgggtgctaatctcatcgcagtcgaattcatctgcctgaacctttacagactctcatgattgacgaagactcccccatcctcgacttttaccctcccgactttgagatcgatatgaacggcaaaaaaatggcttggcaaggtgtcgctctcttgccctttatcgatcagaaccgccttttgaccgctttgaagagtaaggaagagctcctgtctgatgacgagaagagaaggaacagttggggagacaatgttatgtttatcgccaacgagaacccgttgtatgatttattctgtgataagttgtatggtttaagagcgaaagacgtaagcaaggtaagtggccggttttgtctttaaagtttgtcagctgatcattctttcagcctataccgattgacaccaaagcttcgtacggcataactggttctgttctacccgatcccaactgtgtccctgcgtccacattcgacacgcctattcccagtatttcggaatgccctgatcttaaccccaacgactctatctccgtccgatattacttcccacgccaagcgcatcctcatcgatcgattcttctgagaggatataaacctgagcctgcaaggctgacggaaagcgataaggattgggtccgacgtggtggtcaaggtggaagaagaggtcacaggcacaacggcggtggaaacggaaatgtgacaggtggaccgggtatggcaagaggcaggtacgagagtgggccgccacggaccaatggctaccaaccgcctccgcctcggtcgaactatgggggtag

SEQ ID NO: 1334 - DNA, 3703 bp, Cryptococcus neoformans
atggcagctcctatgcaagttgacgaagccgtccctggtgactctagtaagctcaagccatatacgtcttctgatgcatgctaacgtgacttccctcttttagtcgatggtaagcaatagtttggtatacaatgcatagacaagtgctgatagtctggtgcgactgatcagagggcttgtactctcgtcaactgtgggttatgatctcttctgtaccaatagtgttgaattaactttcggattagctatgtgttgggccacgaaggtgagggcatcggataaggatgaactgagattgaacctgatgttatctgtagcgatgaagaagatggccacttccaacgttcttattgttggcatgaagggccttggtgttgagattggtaagctatcttgcttgcggcttgcattgcagcgagcaatcattgaagatacaaaagcttatatatttgatagccaagaacgttgccttggcaggtgtcaagactgtcaccatctacgacccttctgcagtagaaatcgcggatctcggtacacaattcttccttcgtgaagaggacattggtcgacctcgagctgaagtcaccgctccccgacttgccgaactcaactcttacgtccctatcaagattctccctggagcaggcgaaatcacaccggaaatgatcgagccttaccagattgttgtactcaccaacgccactgtcaggaagcaagtagagatcgacgagtactgtaggcaaaaggggatctattttatcgcagcggatgtgaggggtctattcggtagcgtgttcaacgactttggcaaggattttgcttgtgtcgaccctacaggagagaaccctctaagcggaatgattgtcgagattgacgaggtaggtcgctattttctgatcccaaaaaacatttgctcatccagtctctacaggatgaggatgctattgttacctgtcttgacgaaacgcgacatggacttgaagacggcgactttgtcactttctctgagattaagggtatggagggtttgaacggctgtgagcctagaaagatctctgtcaagggtgagcgttgtcgggttccttgatgacaaaaaaaaagctaacatttagataggtccttacactttctcaatcggcgacacccgtgggttgggcaagtacaaatctggcggtctcttcacccaagtgaagatgcccaagattcttcaatttgttagtgatgtgcgcataaattaaatgacattgctaatccgatgtacagaaaacccttaaagagtccctcactaaccccgagttcttcatcaccgactttgccaaatgggaccgacccgctgccttgcacgttggtttccaggctctttctgcattttacgaaaaggccggtcatcttcctcgacctcgtaacgccgccgacgccgagcaagtcatttctctcgctaaggagatccactctgctgctggaggcgaagacgtccttgacgagaagattctcaccgagctttcttaccaagctactggagacctttcccctatggttgctgtcattggtggtttcgtcgctcaagaagtcctcaaggcttgttccgccaaattccaccccatgcaacaaaacatgtactttgactcactcgagtctctccctgctacccttccttctgaggctgacgtccagcctcttggatctcgatacgacgggcaaatcgccgtcttcggtaaggcctttcaggaaaagatttccaacactcgcgagttccttgtcggttcgggtgctatcggttgtgagatgttgaagaattggagcatgatgggccttgccactggtcccaacggtatcattcatgttaccgacctggacaccattgaaaagagtaacttgaaccgacagttcttgttcagagccaaggatgtgggcaagttcaaggctgaaagtgcggctgctgccgttgcggacatgaaccccaatttgaagggcaagatcattgctcacgatgacagggtcggccccgagactgaaagtgagtatatccatgtgaatggcttgggcagtgctgaccaacggcagatgtctatggtgatgaattcttcgccaatcttgatggcgtcaccaatgccctcgataacgtgtcagcgcgtcagtacatggaccgacgatgtgtgttctactgcaagcctctccttgagtctggtactcttggtaccaaggccaatactcaggtcgttgttcctcacctcaccgagtcatattcatcttcccaggaccctcctgagaagtctattccctcttgtaccgtcaagaacttcccgaatgccattgagcacaccatccaatgggcccgagaagcgttcgattctttcttcgtcaatcctcctactactgtcaacctttatctttctcaaccagattttgtcgagaccaccctcaagtcttctggccagcaccacgagcatctcaaacagattgagaaataccttgtgaaggagaggcccatgtctttcgaggagtgtatcatgtgggccaggttacaatatgagaacaactatgtaaatgagatcaagcagttgttgttcaacttgcccaaggaccaagttaacgccaacggcactcccttctggtccggacccaagagggctcccaccgctcttgccttcaacattgacgatgtaggtcctggagcttatttgagcggataatagatctaattctagtatagcctcttgatatggagtacctcatcgccgctgccaaccttcacgctttcaactacggtctcaagggcgagcgagaccctgctttattccgaaaggtggtcgagtctatgaacgtccccgagttcactcctaagagcggtgtcaagatccagatcaatgaaaatgaacctgttgaaaacaacggtaacgatggcaagttctcatatcaatggcaaaagattgcgctaactggtgagatatagatgaagatgacattgaagctattgtttcttctcttccccctcctgcttccctcgctggtttccgacttcaacctgttgacttcgagaaggatgatgactctaatcaccacattgacttcatcaccgccgcttccaacttgcgtgcccgaaattatggcatcacccttgccgacaggcataagaccaaactcatcgcgggaaagattatccctgccattgctacaaccactgctctcgctgttggtttggtttgcttggaactttacaagttgattgacggcaaaaacaagcttgaggactacaagaacggtttcgtgaatttggctttgcccttcttcggtttctctgagcctattgcggcggcgaagcaaaagtatggcgagactgagtggaccttgtgggacaggtttgagatcgagggcaatcctacgttgcagcaattcctggaatggttccaggagaaccacaagttggaagtacagatggtttctcagggtgtttccatgttgtggtcctctttcgtcccttctaagaaggcgagtagacgctccgactgatgattctcgtaatgacatagctaatattaacgcttaggctgccgaccgaatgaggatgcgcatgagcgagcttgtcgaacacgtcggcaagaagccaatccctcctcatgtcaagaacttattggtggaggttatggttaatgatgagaatgacgaggatgtcgaggtgccctatgtgttggtgcacatctaa

SEQ ID NO: 1335 - DNA, 3540 bp, Cryptococcus neoformans
atgtcctcctctgccccaagcgacccgcctctctcagccagtagtctcaccgtaaagcataaaaagagatcctccaaagacaagagcggtactccttcccctcggcctagcaaaaccgctcgtctcgatcaagaggatggcgcagacgatcctatggacgtattggaggaagggaaggacggacgatcgagggatcccatggaagccttagaagacggagcaatgcccaaagttgaagacgagtatgaggttcaagctgaaagagaggtcgacgctgcaaaggactttgccgatgttactgcccctggacaggaggccaagttgaagcttgtacaccaggtcagccagatccgggaagcggagttgtaacaagccttctgaccaatatctacaggtccgacatcaggttgctattcctcctgattacccctacatccctatcaatcagcacaagcgcaaagatccgccagcccgtacctacaaatttgagctggaccctttccagtttgtgtctacttcctgtattgaacggaacgagtctgttcttgtatcagctcacacttcagctggtaagacggtggtggctgagtttgctattgcgacatgtttgaaggaagggaggcgagtggtctatacaagtcctatcaaggtaagtacagttttaggcgcatccaacaaaaacatttaccatcaatattgcgcaggcgttgtcgaaccaaaaattcagagaattcacggaaacatttggtgacgttggactgatgaccggtgatgtgactatcaacccagaggcgtcatgtctggttatgaccactgagattttacggtctatgctgtaccgtggttcggaagtcatgcgagaggttgcttgggtcattttcgacgaggttcattacatgcgagacaagggtgagtcatggataaaagaagcaagccagtagctgactaaatccttcgcagaacgtggtgtcgtttgggaagagacaatcatccttcttccccacaccgttcgctacgtcttcctctcggccaccattcccaactcgatggaattcgccgaatggatctgcgcaacgcatgagcagccttgccatgtcgtttacactgatttccgaccgactccgctccagcactaccttttcccagccggatcagaaggcatatatctagtcgtggacgagaaaagcaatttcagggacgacaatttccaaaaagcaatggcagccttagcgcagggtcaaggagaagacccggccaatcctagcggcggaaagggcaagaagggcaagaccaagaaaggcggcgcattaaagggcgaaacatccgacatctataaaattgttcaactcatcatgcgacgcaacctcaaccccgttatcattttcgccttttcgaaacgtgaatgtgaagatcttgctatgcaaatgcaaaaattcgatttcaacacacccgatgaagcggctaccgtcgcacaggtgtttgaaagcgctatcggttccttatcggaggacgacaaaaaactttcgcaaatcgaaggtatattacctttgctcaaaaggggcattggaattcatcacggcggattgttgcctattctcaaagaagtgatagagatcttgttccaggaaggtttgataaaggctttgttcgcaactgaaactttctcaatcggtctaaacatgcccgccaaaacagtcgtattcacgagtgtgcgcaaattcgatggtaaagatttcagaaacctttctggtggtgtaagttttcctcttttttgagctaggtccaactgacgatcggactgaaattaggaatatatccaaatgtctgggcgagccgggcgtcgtggtctcgatgcgcggggtatcgtcatcatgatgtgtgatgaaaagatcgaacccgaggcagcgaagggcatggtcaagggccaagcggaccgtcttgattcagctttccatcttggatacaacatgatcattaatttgatgagagttgaaggtgtgagccctgagtacatgctggaaaaatgcttcttccagttccagaattctatgagtgtaccagttttggagaaacgtgggttccttgataataagatcaacctggttcgagctgctgatgtcagaatgtcgaaaatatagaattgaaagaggctgaggccgagagggacgccatcgtgattgagcgcgaggatgaaatcgaagagtattacgagctccgacaacaactcaaagaacgtgggcaagatttccaagctgtcattacacaccccgcgtactgcctccgcttccttcaggccggtagacttgtcgaaatccgcgacggtgataaggatttcggatggggtgtagtcgtcgcttttaacaaagtcgtgaatcaaagaggtcgacctccaatttggacggaccaggatccacctcagaagcaatacattgtcgacgtgcttactcgagtcgaaacaggagcgtccatccctcgagaccgatcggcgtctgagatttcccccccttcaggtgccgacaagggtgaggtcgccatcattgcttgttctctctccactgttcagtctatcagccaataccgagtcaaccttcccaaagacttgcgcggtcaacaggagaagaacactgccttcagggcagtcaatgagatcaagaagcgtatgcctgacgggccacctttgctcgacccgatcaagagtatgggcatttcggataaatcgtttgtcgatttagtcaagaagattgcactattggaaaaccgacttcaaactctcgaaatcacaaagtctcctgagcttccacgtctctatgacctctacgaccgaaaacaaaagagcattcagtctgtcaaatccttgaaacgccgcatcaattctgtgcatgatatccttcagttagaagaactcaagtctcgtaaacgggtattgaggaggttgggtttctacaaccgccgacgacgtggtggaaatgaaggggcgtgtagcgtgcgagatttccacgggagatgagttgatgttgacagagatgatgtttggtggcacatttggtacactagcacccgaacagtgtgctgcattgctgagctgtttcgtctttcaagaaaagtcagaggcaaaggtgaggttaaaggaagagctcgctgtcccacttcgcactctccaggagacggccaagagaatagccaaggtgtcaaacgaatcgggcattgcgattgttgaagatgagtatgtgcagagcttcaaggtggaaatgatggatgtagtcttgcagtggtgcaaaggtgccaaattctctcagatctgtgaagtgagttttcatctctttcactgttattgtagacttctttccactgaccactcttgaaaagatgaccgacgtctttgaaggttccattatacgatgctttagacgattacaagaactcatccggcaaatggggcaagcagcacatgcgatcggtaacacggagctggaagaaaagtttgcaaagagtatggagcttcttgagagacccaacactgtcgttttcaacccttcgtga

SEQ ID NO: 1336 - DNA, 3694 bp, Cryptococcus neoformans
atgtttcctgccgttttctcctgctcatcaactgtccagaacgtcacaatcgttgcccatgtcgaccatggcaagacctcttttgccgattcgctcctatcctccaacaacatcatctcctctcgaatggctggtaaacttcggttcctagactctagagaagacgagcaagaacgaggaattaccatggaatccagcgccgtctcgcttcgatttgacatgactcgtctttcgcccgatggtacatctagtatccaacagtgcatttgcaacgtcattgatactcctggtcatgtggactttgccagtgaggtttcaacagcgagcagactgtgtgacggtgcactcgttctggtcgatgtgtgggaaggtgtggcaactcagacgatcgccgttcttcgtcaagcttggatggacaagctcaagccattactcgtaatcaacaagatggatcgtcttatcacagaactcaagctgtcaccttcagaagcttatcatcacatttcacaattgattgagcaggtcaatgccgtcatgggttcattctacgcgtctgagcgaatggaggacgatttgaggtggagagaagaaagagaaaagcgacttgcggcaaggaaagagcagcaaggcgaagatcttgatgatgatgaagagtacgaggagaaggaggatgaggatatctattttgctccggacaggggaaatgttctgttcgcttctgctatcgatggttgggcgttccgtctgggtaaatttgcccgtctttacgctgaaaagctcaaaatcaaagaaggaaacctccgtcgagttttatggggtgattggtatctcgacccgaagaccaagagagtcgtggggcgcaagaagcttgctggacgaaacctcaagcctatgtttgtccaatttgtactagagaatatctggcgagtctacgatacagtcctcaacgagtagtaagttcgagctgttttatgacccaaaccgacatatcctaatacagatgctagcaacccggatgcagtccagaagatcgtaacagctctcaacattcgcattacccctcgcgatctccgatccaaagacacccgcaacctcctcaacctaatcatgcaacaatggcttcccctctctaccgccactttccaatccatcattgaagtcatccctccacctccctctgcccaagccatccgccttccgtacatgctccacccagaaaaggcaaaagcagctgccgctagcggtggtttgaaggctgaaaacgagctggagagggggttgtacgagtgcgaccagggagaaggagctgaagtggttgcgtatgtgagtaagatgtttgctgtccgcaagggggatttgccagagtacaaaccgaaagaaatgacggctgaggaaatgcgagcgagaggaagagaggagcgagaacgacgtgcggctttagtggcggagcgacaggctaaaggtgaagggcttgatgggcaaccgttgcctgaggaccttgctaagccactagagtcactttcactcgagaacatccaacccgctacttcggagaaaccagccgtcgacgatagcgactctgaagttctcctcggattctcccgaatattctcctctacccttcaccgcggtacttccctcctcgccattctcccaaaattcgactcttccttgcccccttctcacccacacaacattaaacacactgtccccatcatcgcttctgatctttatatgatgatgggccgagaacttgtgtctgtcgacagtgttccagcgggtcatgtgtgtgctattggtggcttgaacagggctgtacctcgaagcgcgacattatgggcgcctgatgcaaagggcgttgaggaaggatttggaaaggaggctttggtcaatttggcaggtgtaggtgttggagcgaacgccattgtacgagttgcacttgaaccagagaaccctagtaagtctatttcgttcgatacttttcaatccatgtgattttgacgatccctgggtaggcgatatgccaaagttaatcagaggtttacgaattttgaaccaagccgatccttgtgcagagtactttgtacaggaaagcggagaacatgtcatcatcactgctggagaattgcatctcgaagtacgtcctctttttcccccttgatatctctagtgatacgattactctattagcgttgtctcaaagaccttcgtgaacgttttgccaagtgtcctattcaacagtccgcccctattgttcccttccgagaaaccgccgtcaaggcaccggacatggcacctcccaagactaccggggcaccccgaggtactattaatggtacagtgatcaacggtcttgtcaagttcaggttgagagctatgcccttgccagagggtgtcgaaacctttttgcttagccaacaaggtgctatctctaagatgcttgtccgtgagcgcgatggcaaggaaggtgaagaagaaaccgatgtgcaggagggcgctgaaggacaaagtggtgagggtgaagtcccagaaggtcagcaggaagcccgtcaactctctcccgaagagttctggactgagctcgagaggttgctcaacaaggccggcggtgattgggctggagccgcggacagagtatggagctttggacccaagagagtgggtgccaacttattgttggaccctgttggcaccaaacatctcaggttaaggcgacgtgaacagctcttcacccaagcgcgggcacaaggtcaatcagccgatgatgcccttctctccaccgatcatgctgttgctgcggatcaactagcttctctcagctccatcacctcctctgataatgaagctgcgcgagctgaacttcgtttgctgagagattacgagtcatctatcgaaactggtttccagctttccactttccagggcccgctctgtgctgaacctgtggtcggaatggcttgggttgtggagagtgtggagcttgataggcaaggaatggagtcggagcaaggaaaggggcaggtggtgggtggagcgctcatctcggctgtgagagatgcgtgtaggcaaggcttgttggattggagtccaaggataaagctcgcaatgtacacctgtgatattcaggcatctagtgggtctattcgccctctttactctgtgatgaaaagtttcgctaatcttgattgtagctgatgtactgggcaaggtctatggtgtcattgccaggcgtcgaggaagaattgtctcggaggagatgaaggagggaacttcattcttcactattcgagccatgttgccagtggtggagagtttcggtttcgccgatggtgagtccagctcttactgtttcatttacaatcccctaatcaaatacgatcctgatagaaatccgaacgcgaacttccggtgctgcctctcctcaactcattttttccggctacgaaacccttgacctcgatcccttctgggttcccaccacccaggaggagctggaagatcttggagagaaggctgataaggcgaatgtagctaaggcctacgtcgatggtgtgaggaagaggaagggtatgtttgtggagaggaagattgtagagtttgcggagaagcagaggacgctaaagaaataaatgtaccaagtcgtgaagacaagtgcagaaggaagcagagccaggtcgaagacatagtacaatag

SEQ ID NO: 1337 - DNA, 3693 bp, Cryptococcus neoformans
atgcgcctgccggggctgtcgtggtcatggaaaaggtgggtatattggtaatattgattaggaagaggcactaagttgtcacagaccgacaaaagagactaccttatcgacctcgaaaagactgcccaggcttcttgggccgagcagcacctctttgagaccaacccccctcctcttcctgagggtgtcagctcttactctgaattcttcgcttccggcaagtctatggaggaggttcacgagaaaaaccccaaatggttcggtacttttccttacgcctacatgaacggttctctccatcttggtcacgctttcaccatcagcaaggtcgagtttgccgctggttttgagaggatgcgtgggaagagggtcttgttccctgttgggtaccacgccactggtatgcctatcaaagtgggtgtcttgactgtccagcaaggtttttttatggacattattaacgattgtgatttaggccgcctctgacaagcttatccgagaaatggagatgttcggtgaggactttgctcgctacaaggaggatgagcccgaggaggttgagcccgccgctgctaccgctgcccccgccaagtccctcgagtctaccgatccctccaaggccaagaagggaaagctcaacgccaagtcaaccggtctcacctaccaattccaaatcctcgagctcatcggtgtcccccgtgacgaactcaagaagttcgctgatccttcccactggctccactatttccctcctatcgctaaacaggacttgagcggtcttggcgccagggttgactggaggaggcaattcattaccagtatgtgatgtcgttaaacaaggcagagtgatgaactgacaatcccataagccgacgcgaacctctactacgacagcttcgtccgatggcaaatgaacaagctttacaagcaaaaccgtgtcaagttcggcaagcgatacaccatctactcccccaaagacggacaaccctgcatggaccatgaccgtgccagtggtgaggctgtaaaccctcaagaatacactgctgtcaagatggaagtgctcgaatgggggcctactgttcctgagggggtgaagaaggccgtcgaaggcaggaaggtttggatggttgctgctacgctccgacctgaaactatgtatggtcagaccaactgtttcgttggccccaacctcaaatacggactcttcgaggcttccgacaatgaacttttccttgttactgagcgatcagcccgtaacatggccttccagggtatctttgaccgacccaagggcgcttgcaacaaggttgcggacattattggttccgatttgctcggtaccaaggtcaacccccctttcggtctcgtcaaggaagtctacgtcctccccatggagggtgtccttgccaccaaggtgagtgctatctattatataaatgacatgtgctaatttttttggggcagggtaccggtgttgttacttctgtcccatccgactcccccgatgactaccgaacccttatggacctccgtaagaaggccgagatgtacaaaattaagcccgaatgggctgccatcgaccccattccagtactcagaactcccaaatacggcgatatggccgccgaggtcctctgtactgagctcaagattcaatctcagcgtgacaaggacaaacttgccgaggccaaggaccttacttacaaggagggcttctacaacggtgtcatgaccgttggtgactttgcggggactcctgttagtgaagccaagcccaaggtccgagagcagatgatccaggctggtttggcttgcccttacgccgaacccgagagtgaagtcatctctcgaagtgccgacgtttgtgttgttgcccttgttgaccaatggtacctcgactacggagaggacggctggaagactcaggctttcaagtgagtcctttgtcatatcaaacaccggtaaaaaccatgctgacacaatagttaggcttctcaataagctcaacacttaccagaacgagacccgacacgcctttgagggtgtcctcaattggctcaaccagtgggcgtgcgctcgatcttacggtctcggttctaagctcccttgggatcctgtctggcttatcgagtctctctccgactccaccgtctacatgtcgtactacactgtcgccaacctcctccacgaagacatgttcggcaagaaccccggtccgcttggtattacccctgagcagatgaccgatgaggtctgggagtacgtcctcgctgacggtcagctccctgccgacagccctgtcgatgccgagaaggccgctcagctcaagtaccatttcaactacttttaccctctcgacgtcagatcttccggcaaggatcttatccctaaccacttgacgttctgggtctactgccacgctgctctcttccctgagaagcactggcccaaggctgtcagggccaacggtcatttgatgcttaacggaaagaagatgtccaagtctaccggtaacttcttgaccatgaaggaggctaccaagaaatacggttccgacgcgatgaggttgactctcgccgatgccggtgacgacatcaccgatgccaagtgagtaatcatgttacagtgtagttgcgattggctaacgtacagctcagcttcgaggagactgtcgccaacgctgccattcttcgacttcacacctgctccagttgggccgaggagatgaagtctaccaaggaccagctcaggactggtgaatggaatgactttgaccgtggctttagggcagagatggatgctctcatcaaggaggcgtacggcgcctttgagcaaatggagtacaagcgcgccctcaaagcgggtctctatgactttgagaacgctcgaaactggtaccgaatggtgtctgaccccgtcaacagcggctccggcatgcaccgcgacctcgtcttcgcctggcttcgcgcccatgtcctcctcatcacacccttcactccccactattctgagcacatctggaagaacgttcttggcgagacttcctccatccagaccgctcttttccccgagccttcaggccctatcgaccccacagtcctcgagcagaccgagtacctccgtggtgtcgttgatgctatccgatctgccgaggcgcaggctggtaagaagaaggggaagaaggctgctgctgccgtctatgaccctagcaagcccaagaaggtcaggatgtacgttgccaaaaacttccctgaatggcaagaaaaggctatcggtgtcatcaagaaccaggcctgggatggtgagaaagtggacgacgttaagctcaggaagggtttggaggaggttggtttaatgaaggacaagaaggtcatgcctttctgccaggctttcaaggtgcgttcacctcttttctttctagccgctgaaggttgctgataaaataaacagaggaaacttgctgttaccggtccctctgcctttgaccgaactcttcccttcgatgagctctactctctcaagatgctcgcccctctcatcaagtcttctctccgattcgaggaaattgacgtgctcagtgtggaggaggctagggagatcattgagaaggatggtgagaaggaaggatgggccaaggaaaagattgaggttgccgagcccgctgtccctggtgttcagttctggaacgtatag

SEQ ID NO: 1338 - DNA, 4004 bp, Cryptococcus neoformans
atgcaccccaagtataagaggaaagcggccaagatgaaagcctcgaagcagtcaggaaagtctgacgatgggcaatctgtcatggaggagcagaagcaacttcaggcgagaaagtttcccgggttgtccatgcctgaccaagattggaagcctgccgagaaatatgtcgacgaaagggccgcaaaagaaccgcacgagacccttccggaatcactttcgaccagtgatactatggcccagttagagtcgatcgcgtctcgccgaaatagaccggcggctgaggatttcttggacggggagcctgctgcgaagaaattgcggagtgccactagcagtggtcatgacgggtcgtcaggacgacggggcggatatgaaggaggcagctttagagattcttttagacatgggcgtccgacggttgatgagaggcccgtactctacaagatctacaatggcactatcgcgaatatcaccgattttggggcttttgtaactttagatggcgtagaaagaaaaatcgatggtaatcaaaggtcaaatgaaggtaagttatcccaatcgtgccttcccatgcttgatttgaactgacactttcaggcttaatccatgtatcgaatattacaaatggaagagttaactcaccccgagacttccttaaacggggtcaacgagtcaaagtcaaagttatggctgtcagtcctaagatcggtctaagtatgaaggatgtcgatcagaacactggtgatgatctttcgtgagtgcaagtgtatgctgcacctgctttttgttgacttagttataagcccacatcttactgtcaagactgctgaagaggccgcagtgcagcagcaaagcatgtcatcttatgcagctagtggaagtaacagcacccccctcttagcagttgatgagcggcagcgatctagtgcaaagagattatcaagtcccgagcggttcgagattaaacagctcatagccagtggggccgtatctgcagcagatgtgagtattcctactgtacgcgagaataatgggctgatgggattgcagtaccctgatcttgatgaagacttcagcactaacgtcgccaatcatgagattgaagaagacattgatgtcgaagttaatgaagtcgaaccggcgttcttatcgggccagaccaaagtcaccctggaactctctcctgttaaaatcatcaaagcaccagacgggtaatgttcattctgttcgatatacacgacaattttgttgatcaccgttttagctcacttaaccgttctgctttagcaggcgcttcattggcgaaagaaagacgtgatctcaaacgtttggaagcgaatgagcaggccgacgcagagaccagagagatcaaccagccttggcttgatcccatggctaaccaaaacgagcggcagtttgcatcagacatcaaagggaacctgcttggccaaaaggccgctcaaatgcctgcctggaaagctgcaaataaagttgtgtcgtatggcaagatcacttctatgagtatacaagaacaaagacgcagtctgcccatctacaaattacgggagcagttggtcgccgctattcgagatgtgagtaccttcttgttcactttcagtcaatcgaatactcatgtgcattcgtagaatcaaattcttgttgtagttggagacactgggtctgggaagactactcaaatggcgcaatacctcgctgaagagggattcctcgaaaaagggcgtttgggatgcactcagccgcgaaaggttgctgctgtttctgtcgctaagcgtgttgcagaggaagtgggttgtcgactcggggctgaagtcggctacactatccgttttgaagatatgaccagtcctgagaccaagatcaagtacatggtcagtcgtttcagcttttactttgactatgactaacttcctatgtagaccgatggtatgcttcttcgtgaattgctggttgatccggattgctcgaaatactctgtgattatgcttgatgaagcgcacgagcgcacaatcgcaactgacgtcctcttcggtctcctgaaaagtaggttaagctcctgatgttactcgccatgatgctaatactgttattaacagaggcttgcaaacgacgcccagatcttaagctaatatgtacttctgccacactggatgctgccaagtttgcgacctacttctggggttgcccaatctttaccattcctggccgaacataccccgtcgagacactttatacaaaggagcctgagcccgactacctggaggcctctctcatcaccatccttcaaatccatctcatggaaccagcaggcgatgttcttcttttccttacaggtcaagaggagatcgatacagcatgtgaggttctatatgagcgagtcaaggcattgggtcctcaagttccagagcttctcattttaccggtatatgctgcacttccctctgagatgcagtcacgcatctttgagccagccccacctggtgcacgtaaggtggtcatcgcaaccaacattgcagagaccagtatcaccattgatggcatatactatgtcattgatcctggttttgcaaagcagaatgcttatgacccaaagcttggtatggattctttgatagtcactgtgggtcttcatatcagttgtcatgaacaaactaatgttgtgtagccgatctcccaagcgcaagcacgtcaaagagctgggcgtgccggccgcacgggccctggcaagtgctatcgtctctacacagaggtcgcctaccgtaatgaaatgttacccaacccaattcctgaaatccaacgaaccaatcttgcatctactattctcactctgaaagcaatgggaatcaacgatcttatcagtttcgatttcatggatcctcctccagcagcaaccatgttaacagctttagaacaactttatgctcttggtgccttggatgatgaagggctgttgaccaggattggtcgaaaaatggcagattttcctctagaccctcctttatccaagatgcttatcaaatctgttgattatggatgttctgaagaagccttgacaattgtggctatgctgcaagctgggggccaagtatactatcgacccaaggacaaacagactcaagcggacgccaaaaaggctaagtttcatcagccagaaggtgaccttcttacattacttgtgagtgatccataatttaattacatcaggcatggagagtagtactgaattaaagttgttaggctgtctataatggatggaaaaactcgaaattcagtaacccatggtgcttcgaaaactttattcaaacacgagccatgaaaacagcgcaagatgtaagaaaacgtgggtgtaaaatttttgtcaatgttattgttggttatgaagctgatttttttaatcagagttgattggaattatggatagatataaacacgatcttggtaggtccttatcgccatcaaagcctcttatgtgtttacaactctttatagtgtcatgtggtaccaattacaaccgagtacggatggccatttgctctggattcttcagaaatgctgccaagaagggtaagcttgtctttttcatggtgatgtttgttctcatgtgctgacgatctgttccagaccccactgaaggttataagacacttgttgagggtacacctgtcagcattcatccctcaagtgccttgttccagcgaccccctgaatggtgtgtgtattatgaactggttcttactgccagtaagtctaactgtactaaggtatttcaataaatgctcatcagtttcacagaggaatacatgcaccaggtcactgttattgaaccaaaatggctttctgaagtggcaccaacattcttccgtattgctgatcaaaacaagattagcaagcgtaaggcatctgagaagattgagcctctgtttgatcgttttgctgcagataaagatgactgggtatgtatgttctggactggtgatccaacatga

SEQ ID NO: 1339 - DNA, 3803 bp, Cryptococcus neoformans
atggcgataagaagggcgctgattggtattccaagggtgtgaagactgtcgaagcaagtattctccctgaatgatatagacttgaactgatactgttgcaggataaatggcaacttctcccagcttttctcaaagtaaaaggccttgtcaagcagcatcttgactcctttaactattttgtcaatgtcgacatcaaagctattcttgcggccaactctcttgtcatttcagatatcaaccccaagtactacatccgatataccgacatccgtgtagggcgtccagcacgacatgatgctaatcaagtggcctctgctctttcgccgatggagtgtcgattgacagattccacatatagcgcgccgatctatgtggatgtggaatacatgggagaagaaaagaggagcaagcagaggggtgtgcagattggcatgttgccagtaatgttgaggagcgatttgtgtaacctcaaagggaagaatgaggcggagctagcgaggatgggagagtgcccgatggatccgggaggatatttcgttgttaagggaacggagaaggtcatattggtgcaagagcagttgagcaagaatcgtatcttggtaatgaaggataagaaggatgaggtgatggctgaagttacatcgtgagtcattcgttcttcgtatctctatcgccatggtcagaagcttcaaccagactgggattttggtcggattggtcgagccagttcagtctttttgaattgcggccagtcccctgatcaaaacgaatttgttcgcgccgaaccagttggaggcttggtttttaaaaccacgctaattcgctttgggacacaatggctcgttgtaatgctgatcatgcacagttcaacgcacgaccgagttgtcaaaacctatgtcgtcagtaaagccaaccgtctctatctccggcacaactctttcaaggaattcatccctatcgttatcgccctcaaggctatgggtctcactgcagacaaggaaatcctccaactcatatgcggttccgacgaacgataccaggaggcctttggtgtttccctcgaagaagctgccaaggagaagacctttacgcgccgtcaagcgctcgaatggattggcgccagagtatctcccaaccaggctaaggatgacagcgggtccaaccagaagcttaccccaagcgatattgcccagcaggctcttgctgcaatggttcttggtcatgttcctgtgcgaaacatgaacttccgacccaagtgcatctatcttgccaccatggcgcgaagggttctcatggccatgattgacgatcatatggttgatgatcgagattacgttggtaacaagcgtctagaacttgccggtcagcttttgtctttgctctttgaagattctttcaagacttttaacagygagctcaaaaagcgaatggacaaaattctggaaaagcccaaccgtgccggtcctttcgatgccgggactctgattcgtcaaggtggtgatcccatcactcaggcgtttgtccgttccatctccaccggcaactggtcgcttaagcgattccacgtcgagcgggcaggtgttacccatgtcttgtctcgtttatccttcattgccgcattgggtatgatgactcgtatctcttctcaattcgaaaagacgcgtaaggtctctggtcctcgtgctcttcaaccgagtcagtggggtatgctctgtccttccgatacgcctgaaggtgaagcatgtggtcttgtgaagaacttggctcttatgacccacattactacggacgtacctgaaacgcccttggtcaagatggcgttcatgcttggtgttgaggatatttcccttgttaccggtaatgaactctaccggcccggagtgcatatggtgcaggtgaatggtacgctcatcggtgtgaccaacatggcgaaacgatttgtgagacagtttagaaagttgaggcgagctggaaggatgtctgagtttgtgtcaatctttattaaccatcaccacaagatcatctacattgcaagtgatggtggacgaatttgtcgaccgatgattattgttgaaaagggaagatcacgagtgacaacggagcatgtgaggcttttgaaagagggcaaagtcactttcgatcatttcctccgagcaggcttggtggaatacctagatgtcaacgaggagaatgactctttcatcgcgtgttacgaaaatgagatcgaagaaggaacaacgcatctcgaaatcgaaccatttactattctcggtgctgtcgccggtttgattccttaccctcaccataaccaatctcctcgaaacacctatcaatgtgcgatgggtaaacaagctattggcgccatcgcatacaatcagcttaaccgaattgataccttgctgtatctcatgacataccctcaacagcccatggtcaagaccaaaacgatcgagctgatcggctacaacaaacttcccgccgggcagaatgctacagtcgctgtcatgtcttactctggatacgatatcgaagatgctttgattctcaatcgtgccagtgtagaccgaggttttggtcgatgtcatgttctcaagaaggtgacaacgccaatgcgaacgttccataacggttcacatgaacgtactgcttatcctgaccctcctcctcgacccgacgcatatacttttgttgataaggccgatggcatgaccgctcccggtgctactatcaaccaatacgacgtgatgatccatcgagaaacccctgtcgatactcgtggtggtggtgcggacacccagctgtacaaaccaatgcctgtcacccacaagacacctgaaccgattttggttgacaaggtgatgctaacagagggcgaggatggtgcgttgatcaaaatcttgacgaggcagactcgaaggccagaactgggtgacaagttctcttcgcgacacggtcagaagggtgtttgtggtttgatcgtgccccaggcagatatgccattcaatgatcaaggtattgtacctgatatcatcatgaatcctcatggtttcccctctcgaatgtatgtacttcctttctgtggttcagaagcaacgctaacgaccatataggactgtcggaaaaatgattgagctcctttctggtaaagccggtgtcgtcgctggtaaactccaatatggcactgcatttggtggttccaaggtcgtcgacatgtcgcagatccttatcgacaacggtttttcgtatgggggtaaggatatgttaaccagtggtatcaccggtcagccgatggaagcctacgtctactttggacctatttattatcagaaacttaaggtatgcctcttgcatctcgcccaaaccatcagggactgacaagaatgatgtagcatatggtcatggacaaaatgcatgctcgacctactggtccacgagctaatcttactcgccagcctactgaaggtcgttcgaaggacggtggtctccgtctaggtgaaatggagcgtgattgtttaattggttatggtgccactcagcttttgttggaacgtcttatgatctcctccgatgcgttcgagactcaagtatgtgagagctgtggtatgttgggatacaataactggtgtcccaaatgtaagagtggtaagggggttgtagggttgaccattccgtatgcggccaagttgttgatacaggaggtaagttttcgttttcctagtaaatgacacgatgaaaactgacaaacgaaacagctgatgggtatgaacattatgcccaagctttgcttggaagacaccgtctag

SEQ ID NO: 1340 - DNA, 3796 bp, Cryptococcus neoformans
  misc_feature (2779)..(2779): n=g, a, t or c
  misc_feature (2830)..(2830): n=g, a, t or c
atggccatgggacgttgtcagacatagggcgggcgtcaatgcacaagcgcatggcttcggattcatccattttaagcggcgataatgccacaaaggcgggccttgcgtgagttgcttcatatttggtcccgtccttgctgacttgggtagatcgcgctcgccggctgcttcacctacctacgatacggcatcttcacctactactcctacggtggacatgtccttccatccccgagcatctaccgattcgaccgtttctctcccgttggcactccacacgaccgaaagtctgccacctggcgccagacgaggctacgagaatcgatcgacatcattctctggctcttctcgtgaaatcattcgtccactctccaaccccgctgctagactgagtaaccctcaagctcagagtcagacacgcgcccctcttccttccttatacccagctatcctttcaatggtctctgctgcgttcaaatcatacatccctcttgccgacctcaccaaagatggtatcacgtacaaagattccttctccggccaagctgctgtgacactgatcgcagagctcatcaagacgtctgatcgaaatttggctctgctgctcggtcgaagccttgacgcccaaaagttctttcatgatgtgacatacgaccaccgattgagggataaccctaaagaggtgtaccgatttaaagacaggctcgctgcaccctttacggacacaaacggcaatggggaaagcccagtttcggaagggagattgacgaggaacgggagtggagcgtcaagtacggcgatgggcttgggtggtggattgaaagctttgacagctgcaaggcctgcagattcttcctcttcaatgcatactgaatctacaccagtatctatgaccccatctcgatcttcgaccatgcctttcctcgactccgactcgccagatggcttggacagcgaagatactctcccagtgggtgtattcacccttcttacagactgttactcccccacatgttcgcgcgacagtctttgttattctatcaattgtcccagaagactagagcagatgaagaggctaaacatgaagccggagcctgggttgaataggaagctcagtcgtgagagtttagtggatgtcaaggagactggcactctgtggattcattctgtttcgcaagagatcttggatagtgtggatgataaagagaagaagaggcaggaagccatcaacgaagttatctacacggagagggactttgtcagggatctggagtatcttcgagatgtgagtagaccttataggtaattaccaagtgctaacgacatatagtcatgggtcaaaccgctacggacgcaagaagtcatcgatgccaagcgccgagacgactttgtccgacaagtattttggaatgtccacgacgtcctctccgtaaaccatgtcctcgccgaacgtctcacgaagcgccagaaaaaggaaccagtcgtgtcacgtattggcgacatctttctcgaacgtgtcccactcttcgaaccgtttgtcacctatggtgcccatcaacttttcggcaagtatgaattcgagaaggaaaaaggcgcgaacccagttttccaaaagtttgtggacgatacagaaagaaaaccagagtcaagaaagttggagttgaacggttacttgacaaaacccactacacgtctgggtcgttatcctctcttactggaagctgtcctcaaatatactcctgacgatcatccggataaggaggatttgccagaggtgatcaagatgattagagggttcttgacgaaagtgaacgcggagagtgggaagagtgagaatatatttgaattggcgcaaatcgagcaacagctggtgttcaggccaaatgaaaggattgtaagtctcgaagtgagaaagattatgagcaaatcttgacgttgatacgttcttataggatctgcgactgcgagacaagaatcggcagttagtgcacaagggtccgttgaagagaagaggtggcaatcgagaagagattgcagatttactgggctttttatttgaccatgcgtttttgcttgtcaagcccaaatgggtaaacaagagtgagcagtacaaggtttatcgccgagtgagcccttttttgtcaaataaaatgctgcaaaacatgaagctaacaacttctgcgtggaatagccaattcctctcgagttacttgtcctcgtcactccagatgaacaatacaactctggcaaattgtcatatggccatgggcgttcccgactcatcacacgtcaccccaactcaaaaaccaaccactcttcccagaataactctataacagcccctccgaagccagaatcaaaacacggtttttcgattacgatccttcacctcggcaaaaaaggctattcgatgcagctatgggttgacactcatattgggaggaaaaagtggttggagaatatagataagcaacaagggttgttgagggagaagagtacggttttcgttagcgaaactatcactgaaggaattttgagcggtgtgaggaaagtgaactgttctagtccttatggtgagttcttttcgttgttgtgaatgatgtatgctgatgattgggaagatcaagggaataggatgatcttcggtacagatgaaggtgtttacttcgccaacttgcgcgatgaaaagctccgcgaaccagtaaaagtcattaaccttatcgacgtcactcaagtcgatgttatcgaagagttccaactcctcattgtccttcacganagatgtgtcactaccttcccacttgacagtcttgacccttccgatcccaangccgctctcaagcgagggaaacgcatttcatcgcacacaagctttatcaaatcgggtgtatgcctcggcaagactttggttgcgatcgtcaagagctcaacgttgagcagtacaattaaagtgatggaacctgtggatctgagtcaaaatcggaaaaagacacaagcggggtttatgaaaaggctcaatggcaaagacgacgcattgaagcttttcaaggttagtcatcatttcatgttcctgattcgcagattctgacacttcatctaggaattctatattcctacggaatccagctctgtccatttcctgaagacgaagctctgtgtcggctgcaccaaggggttcgagattgtcgacctagagacacttgatatgcagggtttgctcgatccgtcagatggatcgctggactttgtgttaaagagggataacgtcagaccgattgcaatttacagaatcgaagaggatttcttgctgtgctacgacggtgagtctatatggtagccccagatattttgcaagatgctgatggaagcagaatttgcgttctatgtaaacaagaacggatggcggtcaaggcctaaatgggcgattgtttgggagggcattcccacatcttttggtaaagtcttaccatactgagcgattgccgaaacagatgaactaacgaaaaatagcattgcaatatccatatgtcattgcgtttgaaccgacgttcattgaagtgcatcacgttgaaactggccatctggtccagatcatccctgggaacaatatccaatgcctcttcgccgacactcctccttcacgagtcaatgcccctttaccaccgaatcgcatgatgtacgctccgcccactctcgggactcccccttatgcccgtcctcccaatatgccagggtatcctgcttatcccaacgtatcttatcctggtcatccccaacaacctcgacaaacctctaa

SEQ ID NO: 1341 - DNA, 3782 bp, Cryptococcus neoformans
atggtcgctgctttcgaccccctcgccccctcgcaggcatcctcgtccaccagcccggacaacaccacgttccatactctcaccagagagaggcagttcagacatccgcccgtcaacgcctcagatgttcctgccctcgacgagctcgtcgctccccacatcaagagtttcaacgcattgatagaagatgaagggaacccaggtgcaaagggtctgctgcagatgggcgtggaggactcggagagaaggtgttttcgatggcaagggaagcgaaggcggtttgggcacaaaattgagctgtatgtcgggcgtctgcattgcccaaggccttgctaatgcccatctgatcagaccgaatcgaccgggtcgcccttagtaagccccttgttcccgaaaaggacaagcttgccgttgagcgaagggtcttccctaccgaggcacgtattccatggcacttcctttagtttaccgctgacgctccttacaggcccgggagcgtcttgctacctaccgttcaaaattgacagtcaacatcaagtggacagtcactgacgaggacggaaacaggaaggagtttgaggagatcaaggagtgcggtttgttgcctgttatggttcgagtaagtattggcttgtacaagtatgcctcgaattgctcttaacaacctcggcagtcaataagatgtaaccttcaaggccttcctgccaccgaactcatcaaacacagcgaagagtctacctctttcggtggttactttatcgtcaacggtaatgagaagattatccgatatctcgttgttccccggcgacacaaccctatcaatctctaccgaccttcattcgccaagcgtggtgcttcctacactccctacggctgtcagattcgatgtgtccgaccagacgaaaccgcttgtaccaacactattcattacttgtccaacggtggtgctaccctgcgttttgcgtggcgtaaggtcgagtacatgattcctcttatgctcatcctcaaggctctcgtcgatgcgagtgacaaggagatctttgagggtcttatccagggcgagtacgacaataccttcttgaccgaccgtgtggagttgttgttgcgaggccaaaagtcgtggggtttacacactggtgctcaatgtttggactacttgggagaaaagtttagggttgtgctcaatgttcccgatgactggagtaacgtccaggttggtggctaccttttgcgaaaggttgtgctggtgcacttgcctgctcctagggacaagttcaggatgctccttttcatgcttagaaagctttactctcaggtttctggtgccacttgccccgacaaccctgattctcctcagcaccacgaagttctccttcctggtttcctctacggtatgattatcaaggagcgatttgatgactgcctcaacgccgtcaagtcacaaatccaactcgacctgagagacggtaaggcgagaagtttcatggatcccaagtactttaccagcgtactgtcaaaaacgaattgggatatcggttccaagctgtcatacttcctcgctaccggtaaccttgtctcacccaccggtcttgacttgcaacaaacatctggtttcaccattgtcgccgaaaaactcaacttttaccgatacctcagtcactttaggtgtatacaccgaggtgctttctttgctgaattgaagacgaccactgtgcgaaagttgatgcccgaatcgtggggtgagtcgttctcgtcaagattcttgtagaatgttttcaactgattgtcaataggtttcctgtgtcctgtacacacccccgacggttctccatgtggtcttttgaaccacttgtcgcacacctgtcaaatcgtcacttcatcccttgacgtttcacacatccccgctctcctttcggcccaaggcatgacccaagtgttcgcctcttctatcgacggtcgtcgcatggtttgcatccagcttgatggtaaagttatcggttacgcttccccaatgaaggccaaacagctcgccaataggcttcgaaagctcaaaactgaggcagactccaaggtgcctcttgatctcgaaatcggttacgttcccgttacgaagggtggacagtaccccggcctttatctcttcgccagcaggagtcgaatgatgcgccctgtgacgtaccttgagaatggcaagcttgaccacttgggctcgtttgagcaggtgtacatggatgtggcgattaccaaggaagagatcgaaaagggtgtctcctctcacgtggagctggatcctaccagcatgttgtcagttattgccaacatgactcccttctctgactttaaccagagtccccgaaacatgtaccaagtaggtcaccaacggtgtcattcttgacagaaaacaatgctaatacataaatagtgccaaatgggtaaacagtcgatgggtactccttcaacagctatcagcaagcgtaccgacaacaagatgtaccgactccagtctggtcagacacctgttgttcgtcccgatcttcacaaccaatacggtttcgataacttccccaacggtaccaacgccatagttgctgtcatttcttacactggttatgatatggaagacgcgatgatcttgaacaagtctgcccacgagcgaggtttcggttacggtacagtctacaaggccgatatctttgacctaaagggtgtgcccggagcgagtcgaagcgccaagcctactttgcactttggtctcggtagggatgtcaaggaggaccacgacgcgaggaacattatcagtcaggacggtttgcccatcattggtaccagggtcaaggctggtgatcctctgtgtgcctacattgacgacaccaccggtcgaaccaagttccacaagtacaagggtgacgaaaccgccttcatcgacgaagttcgtgtcctcggttccgatgctggtgatgccgagctccagaagatccacatcaaactccgtatcccccgttctcccgtcatcggtgacaagttctcttcccgacacggtcaaaaaggtgtatgttcccaaaagttccctgcgatcgatatgccttttagcgagagcggtatgcagccggatgttattatcaaccctcacgctttcccctcgcgaatgactatcgggatgtttgtcgagagtatggctggtaaggcgggagctttgcacggtcttgcccaggacgctactcctttcaagtaagtccccagtcctttttctctttcatattgcaaaagggctgacggaatatcaggttctctgacaaggaccgacctgttgactactttggcgagcagctccgagctgctggttacaattactacggtaacgagcccatgtactctggtatcactggtgaagaattccatgcggacatctaccttggtcttgtctactaccagcgtttgaggcacatggtgaacgacaagttccaggtcagaacgactggtccagttgatcctctgaccagacaacctgtcaaggcaagttctcgtcgtcccgcatactttttgatatagtcagttactgactgaagaacttttttgcagggccgaaaacgtgctggtggtatccgattcggtgaaatggaacgagatgctcttatcgcgcacggtacttccttcttgttgcaagaccgactcatgaactgttccgactactctaccgcttgggtctgcaggaactgtggttcactcgtatcgctcggtttcgaagaagtcggtggcgctcagggtatgcaggaatactgtag

SEQ ID NO: 1342 - DNA, 3917 bp, Cryptococcus neoformans
atgctaccactgcaacacaagcccttgacaatattaattggctttttgaactactcatatatttcacttctagtgatccgtgccacaccccttttaagtccgcccacgtggcttataggctggacgcgcgtcttggatgagttcgttgttcgccgtcattcactcgatccttctttagcttacaacggtttgccgtcttctttatatttttcttcctcttcattactctctaatctcgcatctaccaccatgaccgaaggagaaagacccacttttgatatcgcagtccccgctaaagatcccgaacccaaggaggacgacaaacccaaacacaccggtgacaaaggcaaggctagagatgagagtaaagacgaagggcctgagatggtgcgtttagatgtcaggactagagtcaaggatacgcagattgctgactaggtgttcgtagagtgaggaagacctgcagctcaaggctgagctggagatgcttgtccagcgattacgggtatgtcgcctctcagcgctgtagcaaaggttcgattgttaaccagcgtacaggaaccggactctgggctttatcagcccgctcttgagtcacttagaacattgatcaggacatctaccagttcaatgacttccgtccccaagcctcttaagttcttgagaccattctatgaggagatgggcaagattagggatggatggagcgaagatttgaaggagcaaagagtaagcgagattctctttatattggtgcccggtccaggaacttacgtataatatactataatatagtctctccttgcttccatcctttccgtccttgctatgacctactccgatactggcaagcgcgaaaccctttactatcgagttctctccggttccgaagaagctcctggtctctggggacatgaatatgtacgacacctcgctgctgagctcggagaagagtatgccgctacatacgcagctttaggtgaagatgccgacattcctcaaccagacaccaaatacacgaccgaccagctgagagccctctcgatcgagcttgttgaattctttttgaagcacaatgcggaagccgatgcggtggatattttgctggaagtggagaacatttcggccattacgaagtatgtggatgacaagacgttcgaaagggtgtgcagatatatggtcaggtgagcttggcactttttatcgctagtaggaagtgcaggcgcttatacgattcatcagctgcgttccgttgttggttaaccccgatgaccaatgcctttcctcgaaactgcatctgttatttattctaaatacgaccgttatcccgaagcccttgctcttgctgtccgtcttaacagcccggaacttatccgcaaatactacgaggctcctacaaacccgtatgtgtaacattcttgtcttcgcaagctcatgctgacaattgtgtagtgtgatgaagaagcagctctcgtacttcctcgcccgtgctcaaatacctcttcattgggtacacaccaatgaagacgctgagcccaacgatactatacctacccaaccggaagacgttcttgagtgcctcggtaacgttaagctttccactcacttccgaaattttgggaaggctgttggtgttgaagaggcaaagtctgttgatgacatctacaaaactcatctcgagccctcatctcgaaacaccgctattccggactctgcccgtcaaaaccttgcctccacctttgttaacgcctttgtcaacgccggtttcggtaacgacaagcttatggtcaacgccccggaaggtcagagttggatctacaagaacaaagctgaaggtatgatgagcgctacggcatctgttggtttgagtcttctttgggactcagagagcggtatcgaccacattgataagtactcttactctgccgaggaacacatcaaggccggcgcgttccttgctaccggtatcgttcattctggtattcggtccgatcccgatatcgcgtttgccttgcttgaagagcacgtcgacagccaaagcattcccctcaaagtcagtgccatcaacggcatcgccatcgcttacgccggttctgagaggcaggatattgccgacaagctcttgccatacgtccaagatgagtccacatctatggaagtctcttctatggctatcctcgctcttggtttcgtctttgttggatcttcaaacggtgacattgcgagcgagattttgcagactttgatggagagagaagagaaccaattggcttccgagtggacagtgtttgcttgcttgggtttgggtttgctttatttatgtgagttggcaacgttggcatcaaaaattcgacgtcgcaatatactgatcgcatcttggtacagccgctcaagaaaagtccgaacctactctcgccaccctcaaagccatcgagcaccccatcgcccaaatcgctcagaccatcgtcaacatttgtgccaacgctggaaccggcaatgtcctcaagatccaggaaatgctttacatctgttccgagcacgctacagagaagaaggatgagaagaaggaagacaccgctgctgagggcgagggtgaatctcctgttgcctcatccgaagttcctggtgcaatccctgctgccggaccacccgtcccccctaccgctgctggtgtgcctggtacggacattgaaggcgacgtggatatgagcgatgttgccgccgaggctggggcgcccgatggtggagctcagtctgctgttaccggtgaggaaggcgagaaggagaaagaggcagagaagacggcggagcaattgaagcaccaggcttttgctacgcttggtattgcgttgattgctatgggcgaggatgttggtgccgagatggctttacggcagttccagcacttggtaagttaatacaaacgccagagacattagaatggatgctgatgatctgattttagatgacctacggtgaccctgtcatccgcaaatctgtccccttggctttaggtctcatatccgcttccaacccccaactctctatcctcgataccctttccaagtactcccacgactctgatcttgacgtcgctatcaacgccatcttggctatgggctttgtcggagctggtacgaataacgctaggttggcgcaaatgttgagaggattggcggtgtattatgcgaaggaggttgactgcttatttatggttcggattgctcaggttcgttatccatccccgtccgcatcggagtagaggagatcaaacgtgctgataatgtattgtagggtcttgtgcacatgggcaagggtactattggtatcaaccccttctacagcgaccgtcaggttatgagcaagaccgctgtggctggattgctgtctgtcctcgtgtctttcaccgacgctagaaaatgtgagtcgcatgcgctgctctaattctgtttgccgaagctgacctcgttcagtcgtcttgggcaagtaccattggatgctttactggatcgttcccgccatgttccctcaattcctcatcactcttaacgaagaactcgaggaaattccggtcactgtgcgagtcggacaagctgtcaacaccgtcgctcaggcaggtacgaggcatggtatcagtggtgtacgttcaaattctgtcaaaaatacattcgccgtcggggagctaacaaaccaaatatgcagttccaaactcatcaatcgccagttcgaattgcaacaacagaacgagcagagctgggaaccaacgagttcttcccttatcagagcgtgttagaaggcttggttatcctcaaaaagtgagtgttgccttatttgggccttggaaccgtttgaggattataatgttgattttgagcttaggaacgagcagtataacgcggaggaccttcattaagtag

SEQ ID NO: 1343 - DNA, 3949 bp, Cryptococcus neoformans
atgctccgtcacgcactgagatcagtacaacgcattttaaccccaagccctattgtgtacccacgcctacaaagaacgtacgcagcaatgtccgctgaagaaaccaaggtcccttctcaagaatccttgcccgtagaggagatcaaccccgccggcccgcaaccagcaatcgctaccgagggtgccgctgaaaaatcgaagaagggcggtgagtaacataaatgtagatgtaaatagtcgctgaatatacattgtatagccaagaaggaggccaaacgacttgaaaagctcgccaaagctgccaccaagacttccgctgcacaatctcaggcccccaagaaggaaaaggctgagaagaaggagaagaaagccgaagttcctgctgaagcttgggttgacacgactcccaagggcgagaagaaaggttagtggtcttgtgtgatcgtggcaatgttcaagctaatgtaattgattagatgtctctggtaacttcccctctggctatgaccctattcaggtcgaggctgcccattatgattggtggaatgccaaggggtttttcaagcctcgttacggcgccgatggaaagcccttggacaagggaactttctgtatcactttccctcctcccaatgttaccggtaatttgcacattggtcatgctttgaccgtctccttgcaggacgctttaatccgttggtgagtattctgatgttgatcatgtcacaaactaacttttttttaggaagagaatgcagggtcaaactgtcctttatcttcccggatatgaccacgcgggtattgctacacaagcagtcgttgagcaacgtcttatgaagactgagggtcactctagacatcattacggccgagaaaagttccttgagaaggtttgggaatggaaggaccaataccagggcaagattaccaaccagatgactcgtttaggtggttctttcgattgggacaaggtggcgttcaccatggacgacgtgagaagtagacgactgttccagaaggaccaagctgacagagtttcttctagaacttgagtaccgccgttagagaagcattcgttcaaatgcacgaaaaaggtctgctttacagagctaaccgactggtgaactggtgtgtttaccttaacacctctctttccaacctcgaggtaggttctctcttcaccgaagtttcaattttccgctaatttgcaatccgtattaggtcgatcaacttcaccttactggccgaacccttctcaatgtcaagggctacgatgccaaagagcgtttcgaattcggtgtcatcacttctttcgcttaccccatcgagaactctgatgaacgtatcatcgtcgctactacccgtcctgaaactatgcttggtgataccgccattgctgtgcaccctgatgaccctcgctacactcatcttcacggcaagtttgcagttcatcctttcaacggcagaaggattcccatcgtcacagatgccattactgtcgacatggagttcggtaccggtgccgtcaagatcacccctgctcatgaccctaatgactttgagtgcggtatgaggaacaaccttgaattcatcagcctgatgaacgacgacggtacctacaacgagaacgcaggtccttacaaggtcagtttatgatgttgccgtgactcactggatgtgctgataagggaaatagggaatgaaacgattccatgttcgaaacgccatcgtcaaggaccttaaggagaagggactgtacgtcgagcaaaaggacaacgagatgcaaatccccatctgctcgtgagtgtttgttctactttgcatttgggccgggattaatttgagtatcagtcgatctggcgacgtcgtcgaacaaatcatcaagcctcaatggtggatcagctgcaaacctcttgccgaggatgctctcaaggtgaatcgcttgtatttttcgtcggtttctcatctaaaccaaactccatagcgaacccgtgcgggcgaactcgagattaagccgaagacgtctgccggcgactgggtacgatggatggagaacatgcaggattggtgtatctcccgtcagctctggtggggtcacagatgtcctgcttggttgctcaaatttgagggcgagtctcccgacgtgcgtctggattctttcttcttctcgttaaaaaaagtctgatgtcttaaatattatagacttctgacgacaagaactggatcgttgcacgaactgaggaagaggctcaggaaaaggcgaaggcccgtgctaacggcaagaactttatcttggagcaagatgatgacgtgcttgacacctggttctcttccggtctctggcctttctccactatggggtggcccaacaaggtatgcgtatccaagcttaggagagaatgatgactaacataaagaaagacacccgacatggagcatttctaccccaactccatcctcgaaactggttgggacattctcttcttctgggttgcgcgtatggtcttcttcggtaacacccttaccaacgtcatgcccttcaaggaagtctactgccaccccatggtccgagatgcctatggccgaaagatgtccaagtctttgggtaacgtcattgatcctctggacgtgatcactggccagaagctggagaagctgcacaacgacttgaggatgggcaaccttcccgagaaggaaatcttgaaggctgaggaaggccagaagaaattgtaccccaagggtattcctcaatgtggtaccgacgccttgagatttactttgtgtaactacacatctggtggtcgagatatcaacatggacattggtcgtgtggaaggttacaggaagttctgcaacaagctctggaacgcgaccaagttctgtctcttccgaatggaccttgtcgatttgcagggtgtcaggcagacaagtgctttcgtccccaatgcgtctcacttgcccactggcaaggaaggtcttgtcgaaaagtggcttttccacaagctcaacctcgccagcgccgctatttcggacgccctcgaaaaccgggacttctctgaagcttctactgtcgcctaccaatacttccttaacgatctctgtgacgtctatattgaggctaccaagcccatcttcgaggccaactctgatcctgctgccaagctctccgcccaaaacactctctatacatgtttggaagctggtctcaagttgttgcaccccttcatgccttatgtgactgaagacttgtggcagcgtttgcctaggagggaaggtgactcttgtgaaaccatcatgttggctcctttccccgagaagatcccagaacaagagttccccgcagaagttgctagctttgacctcgttgttgactgtatcaagtctgctcgttcggtcattggtctttacaatctccccaccaacggcaagactcccgaagacaagatcactgtgatcattcaggcccgtaacgccgagcaactcgagttgttgaagtctgtggagactgtgattgttggtttgacaaagggttgcggtaaggttgagtggattcaggaggacagcgagattcctcgaggctgtggtactgaagtcgttactaccgacatcagtgtacacattcctgtccaggtacgtcatctttcagttatagaagcaactgggtcggtaccccgctgacatatctttgttcctttttcttacagggcaaggtcgacgctgcttctgagattgataagctcgagaagaagtccattgtagtcgagggacaaaaggccaagctgcaaaaggtcattcaacaacccaattacgagaagactgtcaaggaagacgtgaggcagcagaacgacgagaagatggaaaagatcgaggttgaaatcgaagcgcttaggatggccattgagaggttcaagggtcttttgtagataggttagagatcggaggagtgtga

SEQ ID NO: 1344 - DNA, 3846 bp, Cryptococcus neoformans
atggaattatttcagcgagagactcagaggggacttttgtcaatctacgcttcttctttgttatgggcatttaatccacgtcaccagaatttgatcccgttgcctccaccggggtgagtatttacaagtgcaaaagttcttcacgcagcaatagcactacatattctcgccgcgatggaagccccccacaaggcccaccacaagccatcagctggtgcgaagcacgcaaagaaagatgccgcaaagggtgtagaccgatcaggcgggaaaaatttcaaccccaaggtacgtacatagcgccctgcaattccccacccttacactcacccttacacaggcattcacaaacacctccttcagagcagccgatagagcggccaggcgtaccgccgagaaaaaccaacagcgtctccatgtcccgctggtcaatcgtaaccctgaggaacgcaaggtcaccaatgaaaaaggcaaaggaatggacgaaggtgccttgccacctccgcccatcgtcgtcggcattgttggccctcctggtgtgggaaagacaactttactgcgatctcttgtcaggaggttcacgaagcacaatctctcccagccgcagggccctgtgactgttgtttctggcaagaccaggagaatcacttttatcgaatgtggcaatgatcttaacagcatgattgacttgggtaaagtggtcgacctggtgcttttgatgatcgatggtagttttggatttgaaatggcaagcggcttctttcgcccggcaatatttagctaacttgctattcaggaaacttttgaattcctcaacattcttcaatcccatgggtttccaaaagtcatcggagttctcactcatgtcgatcttatcaagaaagcctccacccttaaagacaccaaaaagcgcctcaagcatcgtttctggacggaaatctatcagggggccaagctcttctccctttcaggtgttatgaacgggcgttaccctgatgcggaaatcaaccttttgtcaaggttcatctctgttatgaaattccgccctcttgtcttccgaaaccaacatccctacctagtggctgacagaattcaagatctcacaccccgagaggctattcgtgagaacgccaagatagatcggacaatcactctctatggttatgttcgcggtccaaaccttcctccacgtaacgcgaagattcatatccccggtgccggtgaccttgaggtcaaagaggtcgagagattagccgatccttgtcctcttcctacgctcgagagcgaaagaagaaggaaaatgggcgagaaggcaaaattgattcatgccccaatgagcgatgttggcggcgtaatgtatgacaaggatgcagtgtacatcaacgtccccggtaacttcactaaaggaggagatagtaagttcatctccatttccggagaccaataactaatatgattcacctcaagctcctcagggcgagggtgaaaagatggttatggatcttcaagatgccgaaaaaacgtttgcggacaacattcaagcgtctgaaattaggttgtttggccattcatctgctcccttgcaagtcactgaggaacgcaaggatcgcgtccgccgcaaagccgaacctcgttctggtggtcccatgcttggcaaagcggatgaagatgagtttgatgagagtgaagacgacgagtttgacgatagaagcgatactgaggaaggaggtgtgttcaacggagagtcggaccaggacgacgaccaggatgaaagagatgtagcgtacgccgagtcagaatcggatcacgatgatcttgcctttgcgactggctttgagcaagaagggggccgaatcaatttcgatgatgaggatgatgacgatttcccttcggacgaagatgatgaggatgtacctggttggaagcacaacctagcttcccgtgcttcctccactttggccgatagactacgcaagaaacgcaaccttatgacacttatatacgacactcctctttctcccgaggaaattgtcaatggcaaaacacgtccttcttccgccgatgcttcatcctctttcgctgaactgcaaaatgagggtttgttccgaatcagtcacggagagaacaagggcgacgatggtgatcaagtaaaagaggaggtagacagggatcaattaaagaacaagtgggcggacgaggaaatgcttgactcgctcagggggctctttatctccggtcctgttgctggagagggtgtagatgaggatggggaggcatatgaggaggagggcgaggatttcgaggatctagagggaggaagtgatggccgaggcgatggcgaggatgatgtgccatacgttggtgtcaagccttctcaagtaagcgttgaggatgcgcgcgccgctgctttagcaaagaagaaggaggctctcaagatcaagttcgatgagcaatacgacgactctgacgatgaggcgtccaaaatggacttttatgaccaacaaaaggcggaaatggctcgccaaaagcagatcaatgaagaggagtttggtaaccttgatttggatgcccggacgcaaattgagggttatcgttctgggatgtacgtcaggttagagattgaagctgtgccgtatgagttgatcgagaactttgatcctcgattccccatcatcgttggcggtctcttggctgcagaagagagatttggtttcatcactgttcgtatcaagcgacacaggtggttcacgaaaacactcaagacgaatgatcccctcatcttttcccttggctggcgtcgattccaaactctcccgctctaccatctggacgaccattccatcagaaaccgatacctcaagtacactccggagcatatgcactgtttcgccacattctatggtcccgtctcagctcctaacacaggtttctgcgcattcaactctttgcaaggggatgcccccggtttccgggtatcggcaaccggtgtcgtcctcgatgttgatcgatccaccaagattgtcaagaaactcaagttgaccggtgcgccttacaagattttcaaaaacacggcgttcatcaaggacatgttcaacaccgggcttgaagtggccaaattcgagggggcaaacatcaagactgtctctggtatcagaggtcaggtgaagaaggccctaagtaagccggacggtgccttcagagcaacctttgaagacaaaatattgttgaggggtgagtaacatttcactgtgtctgtttctacatcttctgaccagtcgattctcagatatcgttttcctccgagcatggtactctatagaaccgaaaaagctttacaatcctgtgtgctctcttctactttccaacaaggaatcgtggcagggtatgcgtctcacgggtcagattcgtcgggaggaaggcctcaagacacccctcgatcccaattcagcctatcgacccattgagcgcaccacacgacgcttcaatcctctcaaggttccacgtaagcttgctgcttctttgcccttcgcatccaagacgccagaactctcaaagcaacgtaaacctacttacatgcaatctcgtgccgttgtgctgggagaggatgagaagaaggcggtgacgctgttgcagcagatccaaacgttgaagaaggataaggcagagagaaggaaagcgaagcaagatgagcgaaaaggagcatacaggaaaaaggttggtgagaaagatgagaaaagagaggaaaagattagggaagagaggagggaaagattcaagaaggagggattgaagagaaagagggaggaaatgagcgaaggaaaaggtcggggaaagaagagcagagcgtaa

SEQ ID NO: 1345 - DNA, 4058 bp, Cryptococcus neoformans
atggatgcaggtgaataccattcctttacatgcacacgtatacaccgctacaaccgtcttgactcctagcagacgactatccgcttgcatcccagcccctcgacgatggcttcacttacgatcctgattacgactactctcagcagacggccccaaagggcgacgaggacgaagaaaagtacgatgttgacgaggatgagccgatcagccaggaggactactggactgttatcaattcgttctttgaggaaaaaggtcttgttcgtcaacagctcgaatctttcaatgagttcatcgaaaacaccatgcaagagatcgtcgacgatcattcgaggttaactttggatcaatttacacagtatacaggcgttgcaggtgacgaaacagtgagttggcttcattgtctgtttatattgacatgctgataagccctacagagacgttacgaaatttcctttggccagatctatttggctcgggtcaatcatacggagatggatggtagaactaatatgttgttcccgcaagaagcgcgtctcagaaacttgacttactcggcgcctctgtatgttgacatcaaaaagaggactttgacagcatccggcgttgatgatcctgtggaagctgattggcagcctgccgtgggcgatgatggtgaggtggaaggtgctgaggaagaaaaaacatcaatcggcaaagtgcctgtcatggtccgctccaacttttgcctcctgcatggtcttcctgacgaccagtgtcatgagattggagaatgcccttacgatcaaggcggttattttatcatatctggttccgagaaggtcttgattgctcaggagaggatggccacaaaccatgttttcgtgttcctaaaggcagcccctgcgagattcacctattttgcggaaatcaactctcaaaaagaaaaaggtggacgggtggcgaatcatacagaagtcagaatgtacgcaagggcatccggaacaactggtggcgtcattcgcgtatctcttccctacaccaaagttgacatccccctcgttgtggtcttccgagctttgggtattgttcccgatagagacgttctcagccacatctgctttggcgccgaagatgaagcccttcttgaaatgcttcaacccagcattgaagaatcttttgctgtccaagaccgtgacactgccctcgacttcattggtcgccgtggtcaacatgaaaaggcccctcgagctcagcgacagcgtgcggcctttgatatccttcataaagagtttttgccccacgtgtctaccgccgaaggatttgagtcgaaaaaagcgtacttcctgggctacatggtgcataggttatgtatggcggcattaggaagaaaggagttggatgacagagatcattttgggaacaaaaggttggatcttgctggaccgctgatggcggagatgttcaatgttgtgtttgggaaattgagggaagacatgtacagatatctgaagaaggcaagttgagcgtaaagtaatggaattaaagctaacttccggcagtgcgtcgaacaaaacaaggagtttgcccttaacatggctattcgccctaacacgattaccgacggtctcaaatacgctcttgctacaggcaactggggcaagcgagacaatactcgagcaggtgtatcacaagttctcaacagatatacttttgcttctaccctctcccatttgcggcgtactaatacgcccattggacgtgattcaaaagctgctaagccacgtcaacttcacaacacccattggggtatggtttgtccggctgagacgcctgaaggttccgcatgtggtctcgtcaaaaatctcgcgctcatgtcttacatttcggttgggtcctattccgctccagtcatggaatttttggaagaatggggtctggaagatctttcagaatatcaagatgcgcccactgcgacgaaagtgtttgtcaatggtgtctggatgggtattcatcgagacgcacccaccttgcacaacaacctgttgcaaatgcgtcgtggtggccagctcaagtacgaagttagtatcgtccgagacatccgagagagagaactgcgcttgtacaccgatgcgggacgtgtctgtagaccgcttttcattgtcgaccagccaacgcagacattgcgcctcaaacgtgatcacattgacaggatcgaccagatggcagacgagggtcttttgtcaggagcgtgggacaagctactgtccgagggtattgtcgaatatgtggacgcagctgaggaggagaccatattaatagccatgacgcctgaagatcttgtgaacgctcgtactgcacacagcaaacatgagcttgtaagggatagagcagcccacaatcttgaatcctttgatcctgcggctcgtatcaagagtacggtgtggagtcagcagtatacccatatggagatccacccgagtatgattcttggtgtctgtgctagtatcgttcctttccccgaccacaaccaatctcctcgaaatacctatcagtctgcgatgggtaaacaagccatgggtgtctgcctcaccaactaccagcttcgtatggacactatggtcaatgtactctactatcctcaaaaaccgcttgccactactcgttcaatggagtatctcaagttctctgagcttcctgctggtcaaaacgcaattgttgccatcatgtgttattctggctacaatcaagaagactctgtcatcatgaaccaatcttcaattgaccgcggtcttttccgatcgttgtacttccgttcctacaccgatactgagaagatgaagggtatggttaaggcggagacgattgagaaaccggacagaaatgagacgttaagaatgaagcatgggaccggcgatcggtacgccaagcttgatgtcgatggtcttgttgctccgggaacaaacgtcaacggtgatgacattctcatcggcaagactgcacctttgcctgaagacagtgaggagcttggtcaaaggacccaacttcacacaaagcgagacatatccacaccgctgaagagcacggagcagggcgttgttgaccaagttatgctgagtaccaacggagaaggtaacatgtttgtcaaaattcgtgtgaggtccaccagagtgccccaaataggtgataaatttgcctcacgacatggtcagaaaggtactatcggtatcacctatcgacaagaagacatgcctttcactgcggagggtcttgttcccgatatcatcatcaatccgcatgctattccgtcacgaatgactatcggccatttagtcgaatgtctcttatcgaaagtgtcaactctgactggagctgaaggagacgctacgcccttcacagagctgactgtcgaagctgtttccaaagttctgcgagcaaaggggtaccagtctcgcggttttgaggtactttaccatggtcatacgggaagaaaacttcaggcccaggtctactttggccctacgtactatcagagactaaagcatatggtagatgacaagatccacgctcgtgcgcggggaccgttgcagattttaaccaggcagccagtagaaggtagaagtagagatggtggtttacgatttggtgaaatggaggtaagtaacatgatgattcagcttcaggccgctaacaccattacagagagactgcatgatttcgcatggtatcgctggatttttaaaagaaaggatgtacggtgagtaaacgaagttcgagcgaattctgctgttgcgctgacaactcattatcaagattcgtccgatgcgttcagaatacatgtgtgcgacgtctgcggtctcatggccgttgccaatctcaaaaagcaagagttctactgctctgtttgcaggaacagtacccagatctcccaggtgtacatcccgtatgctgccaaactgttgttccaagaggtaaatttccatcattggtatctgcatgaagtcgcacaacgctaaccgtgtccccattagttacaagccatgaacattgcatgtcgaatgtacggggaaacagattga

SEQ ID NO: 1346 - DNA, 4295 bp, Cryptococcus neoformans
atgtcagttcgcgagctgattgatggcagtttggaaggatataaattacttacgggggaccaacaaactcaatggtgcggccggtgctaagcgcaaagttatcaactcaacgtctgtcaagaacgtaatcaagcgggagccctcacctgtccttgccatcgctccagaagccgcgccagaaatagaagaaatacaatctgtcaagcctcgtaccaatggcaaacccaaagtcaaagcaaacgccaaacattggtccgccattcaagaatcccttgcggcatcttcctccaatcaaacatctgagcttgataccgtcagcgcccctgttggttcaacaaagcccgagaatgtaatggagaaggatggttcattgagattcttctggcttgaccacttggagcaagatggaatcgttcatctcgtgggtaaagtgcttgacaagcaaacgggaaagtatgtcagcgcttgtgtctcggtgacgggaattgagcggtgtctctatgtcaagcctcgtgccaaacgatttggtacgttctttatgttaaaatcagaactttcatctgactatttatagctcgtggatttgaaaccgatctcgacgtgtcggaagaagacgttttagacgagttcgaaaacttccgttctcaagtaggtatcgatcagtaccgttgcaagtttgtcaagcgcaaatatgcatttgaggacaaggatgtggaaaaaggagaaagcgattggttagaggttgtctatggttttgaccgtgagtcttgcgttcgggtttaccgactggtgctgaacaaaatagaacctgctatccctatggactcgaatggtgctactttcagtcatatctttggcacaaacaccactcctttcgagttgttcgtcgttaatcagaagattatgggtccttcatggcttgaaatcaaagatatcgctcctgttgagaaggctgtatgtcttatgttttgcgacattgagtaagtgctaactatttgcagtcatcatggtgcaagcttgagttctatgtgaccgatccctcagaagtcaacccgttctccgaaaccgacccttccgcacctaaagacacgcccccttttactatcatgtccatttcccttcgcaccatcgttaaccaccgcgagaacaagaccgagattctgtccgtctccatgagaacatgggataattataacattgaagatcccacccctcctgatcaactccgatcgcaactcaacaccatcgtccgacctatcgagcgatttcccagcggcctcgaatccaaagcgcgatcagaaaaatcccaattccaaacggtgaaaacggagcgagcactactcaactctatgttgggtatgatctaccgccacgaccccgatgtcattgtggggcataatttcttgggaggcgggtttgaagcattactgtataggatgaaagagctcaaagcagatcattggtcgagaataggaaggttcaggagaaagggaatgaatgttagtaagatgggaagtaatgtaaagctcatggccggtcgtttggttgcggatttatcaagtgatgccgccaaggtcagcgttcttacttgtgtgttctagatcatcggctaaccattatgacagggtatgatttcatcaacgacctggtctctcaccgagatgaccaacacccacctcaaggtccaacgcgaagacattgacccagaagacactgccggttattttgaccatactgccacttcacctgatagattgatcaagtttatcagactgtgtgaagtcgatgcctttttccagatggcgattgctgctagagtacaaatcttgccattgaccaagcagctgaccaacttggctggtaattcatggtgaatattttacaattaaatctcggatttagagctgacggatgacaggaatttgaccctcaacggtggtcgtgcggtccgtaatgagtttatccttctccatgagttccaccgacttgagtacgtctgtccagataaagcgccttacaaggcaaagaccagaccgactggggatgatgatgaggttacggaagacattatagcgatgaaaggccagagaggaaaagccaagtatgctggtggtttggtctttgaacctaaaagaggattgtgggacaagtacatcatcatcatggacttcaactcgctttatccaagtattattcaagaatacaacatcgattttacaacagttgagagggacgatgatgagaatgtaagtttttgtggaaattttcaagcaggttgactaatgaaaaacaggccgaagaagagaagatcccagatgttccttcaagcgatgtacctcaaggtgttctaccccgtattattgcgactctcgtcaaccggcgtcgtcaagtcaaggcccttatgaaggataagtccgcaacccccgctaagctcttacaagtatgccattacagaaatttcttttcacttcttgtgataatggctgatgccatgcgcagtatgatatcaagcagcaagctctcaaactcactgccaactcgatgtacggttgtcttggttttgctggttctcgattctcctcgagaccactggccgcattgacaaccttcaagggtcgagagattttaacgcacacccgggagttggctgagtctctgcagctcgacgtgagttgctttccaatgggaaggacctgggatccagctgatagaatgtataggtcgtctatggtgataccgactctgtctttgtcaactccaatgtcacaacctaccccgaagctctcaagattgccaatgagttcaagaagcttgtcaatgaacgatataagctcctcgaaattgacttggacgccgtatttgaacgaatcttgcttctgaacaagaagaagtatgctgctgtcaagatcgatgaagctggggaaagaagtactgaagttaagggtttggatatgaagagaagagagttcagtaaggtttcaaaggatgcaagcgcgtgagtatccgctttggctttgcccatcgaaatatggtattgatgaccatgatagtgcgatactgaaggagatcttgagtggtgaagctacagaagtcgtggttgagaagattcatgaactcctcaccaagctaggagaggctgtacgcaacaacgagattcctatcgatgactacatcatcttcaaggtgagttcgatcatggaagccccactgtcttatgtcgctaaccaccgccttctaaaagcgtcttggtaaaaaccccgaagattacccagacaagaaatctcaaccccacgttcaagtcgctcttcgtatgaaacaaaaaggtgccgctgttcgagctcatgatgttattccctatatcatctgcttggacgaacatggaaagggcggaaagacggcgtctgcggatcgggctttccatcctgatgatttgagaaggcaagggtcggaactgagaattggtgagtcagggtgggctaagtaagttcaaatgatgaaagctaatggcatgtagatcacgagtactaccttgatcagcaaattttacatcccatattgaggttatgtgagactatagaaggcactgagcgagcacgattagcagaatgtcttggtgagtaattatcattcccgacctagagttcaccatctaaacatgtataggtcttgatcctttgagatatacctcgacaggcacagccgaagctcaggaaaaagagttcttcacttttgattcccagatttcggacaacgatcgtttccgcgatgctgatcccctcaatctcgtctgtccatcttgtagcgaggaaacagtatttgtaggcttgcagactgacgcttctgaagtggtacgtctttctgaagactgagtcatgatttgttgctcacatggatgcggcattagtccaatatccgagcaaacggtatttgttgcaattcttgtcagttagtcatccaccccgcctctttacaactccagctcgaaaaccaaattcgatcccatatctcaaaatactatcttggatggatgacttgcgatggcgaaggttgtggattgagaacgagggccatgagtgtatatggaaagagatgtttagggtttatcaaggagaattgctggggtacaatgaggcttgaggtgagtatcggcgctcctcgttctagcatgaagattgaccaataacatccctatagtacacggatgcaaaactgtacaatcagctcttgtattaccgtagtctgtttgacgttgagaagatcctaaatgctgtgcgaggctcgcaacgtttcggtga

SEQ ID NO: 1347 - DNA, 4349 bp, Cryptococcus neoformans
atgtggatagaaagatcgccgacggatagaagaggatgctggcgggagaaaatgagaaaaggggcgtggtggaataaagaaatggttccgctgttgttactacgcgtgtcttcatcagcgctgagcactgagcatctgccgcccagccatacgatttcctcaccgctccttccttccttcctgccaccttcccacagccaccatggaggtacgtcgccccgccacccgccacccttccttccttccttcctccgcagaaagctgactcaatcacaaccacaggcaatcctcgacttctcaaacgacctcgacgtcgggtatgtatcccgctccatgccacctcttgtacgccgctgacccagtcccagactcatcgaccaggtagtacaggcgttctacaccgggtcaggcgaaacagtgagtgcttcctgttccacgtcgcccgagattctcgacatcacattccgccactcctaaacatgcaacaatcaccacagtcgtctgatgctgacttgtctgtagcaacaaacagcacagcgggtcctcacccagttccaggagaatccagattcatggcagcgtgtcccggccatcttggaaacttctcaaaatcttaacacaaaggtgcgccacatttcgctttcacctgcgaatcacgcaatcactgacaggcgtggaacagtatatcgctcttcaggtcttggagaagcttgtccaggtacgatggaaagccttgcccgcggaccaacagacgggtacgtgccctgggatgtccatggggacatgagctgatgaaatgacaggtatccgaaacttcattgtccaggcgacggtcgagatatcgtcagatgaaagtaggatgaggcgagaaaaggggtatctgaacaagttgaatcttgtccttgtccaggttcgttgcctttgtccgttaaagtgcccaatctaattcaaaacagattcttaaacaagcatggcccaaggactggcctcagtttattcccgaaatctgcgaatcatcccgcactaatctctctctctgcgaaaacaacatgatcattcttcgtctcttgtctgaagaagtgtttgacttttctgccgagcaaatgacgcaagcaaagacaaaagccttgaagcagactatgtgcgcggaattcggagagattttcaacttgtgtaatgaggttttggagaaggccaacaagccgagcttgatcagggcgaccttggagacattgttgaggttcttgaactggattcctctaggttatatttttgagacccaaattattgatattcttgtctccagagtgagtttgacttttcccaagcaagttttcgagtggtaataaccctctgcagttcctcgaggttcccgatttcagaaatgttaccctcaaatgtctttccgagattggtgcgctcaacgttggtcccgagtacaacagcaaatttgtcactcttttccaagtcgtcatgaccagcatcaaccgaatggttcctccccacaccggtaagtatcttgtcgaagaaatggtgcattttagctaattcgatccagacatggccggcgcctatgcctcatccgatgacgaggaccagcagctcattaagaacctcgctcttttcctcaccaacttcctccacccccatcttcgtctcattgaaacaccagaaaacaccgaactcctcatcaacgcccacctctatctcgttaaaatctcaaccgttgacgaccgcgaagtcttcaagatctgtttagaatactggctcaaactcgtcaccgaactttacgaggagattcagtcattaccgctcaacgacatcaaccctctcatgaaccttaacctcggcggtatcggtggtggattgaatggcgctcagggaatgggtcttaacggcatgcctctccggaagaacgtatacagtgacattctttctaatttgcgtcttgtcatgatcgagaagatggtcaagcctgaggaagtgctgatcgtcgagaatgaagaaggagaaatcgtgcgagagtttatgaaggagagcgacacaattgtgttgtataagagtatgagggaagtgttggtctacctgacacatctggatgtggtggataccgagactatcatgacagacaagttggccaagcaggtgtgtcattgtctaacatggggtgaaaaatcagagctgaccaaatcagattgacggttccgagtggtcatggaataaccttaacactctttgttgggctatcggttccatctctggtgctatgagtaggtgttaactctcaccttttaatatcttacgctttgactgacttttacgcagacgaggagaccgaaaagcgcttccttgtgactgtcatcaaggatcttcttggtcttactgagatgaagcgaggcaaggacaacaaggccgtctgtgcttccgacattatgtacattgtcggtcagtatccccgattcctcaaagcccattggaaattcttgaagactgtcgtcaacaagttgttcgagttcatgcacgagactcacgaaggtaagtcatttttaagtcatgttctcctcaagcgaaaagcgagacggctttaacacactacttgcaggtgtgcaagacatggcgtgtgataccttcatcaagatcgcccaaaagtgtcgacgtcattttgtgatgcagcaagccggcgagcaagaacccttcattgacgaaatcctccgtaccctccaccgaatcaccgtcgacctttcacctcagcaggttcacacgttctacgaggctgtaggttacatgattgcctctcaaccgaacaagcctacccaggagaggttaattgaaaagctcatggagttgcccaacaatgctgtgagtccttttttaatgatataggtgatcaggtgattaataagccattgcgatagtgggacaaccttatgcagcaggccgcctctagcgtcgacgtgcttggtaaccccgaaaacgtcaagattctcgccaacattctcaagaccaatgtttcagcttgttcctccattggtcccttcttccttcctcaacttggtaggatctggcttgacatgctcgggttgtacaggactgtcagcgggatcatcagcgacgacattgcggcgatgggcgaggttgctaccaagacccccaaggtccgtgccctccgaacgatcaagaaggagattctcaagcttgttgagacctatgtaaagaaggctgaggatattgagggtgtctacaacaaccttatccctggattgttcgatgctattttgggtgactataacaggaacgtgcccgcggcaagggacgctgaagtattgaacgtcactgctaccattgtctccaaacttggcgtaagttgcaaatgtttattgaaaaagggaaaccgatgaagggatactgacgtgttgtgggtttcagcctatcctcacccctcagattgcccctatccttgacgctgtgttcgaacccactcttggcatgatcaaccaggactttgccgagtaccctgagcaccgagttggtttcttcaagcttttgagggcgatcaacttgacttgtttccaaggtgcgttagatttgaagaatagtaatggaaagtaaaaagctgactcggtgaatagctcttttggagattcctcctggacagttcaagttgatcgtcgactctatcgtctgggctttcaagcacaccatgagggatattgccgacactggtttgaacagtgagtacaattgacatttgtctgcagccatcttttaactccatcgtctgtagtcgcctatgagatcgtcaacaattttgccgcttccacccccgaaatcgccaaccaattctatcagcaatacctcctttccctcgttggtgatgtcttctttgtcctcactgacgccgaccacaaatccggtctcaagatgcaaggtatgcttcttgcccagctcatcgctctcgtggagaccggagctgtccaggctcccttgttcgatcccgcccaggttaccgaccctggcatgaacaatgtcatcttcttgaagggatacatctccgacttgttgtccaatgcctttggccacgtccaacccgctcaaattgcctcgttcgtcaacctgatgttcgagactgcggccgaccacaacaaattcaagctcaccatccgagacttcctcatctctctcaaggaattctctggcgataacgccgagctttacattgatgaacgtgaggccgaggccgagaggagagagagggaggagagggaagcagccagccgagtgccgggtatgttgaagcctgctcagatcgaagacgataccgagttataggggaagggaaggggggttga

SEQ ID NO: 1348 - DNA, 4410 bp, Cryptococcus neoformans
atgcgcatgacaggtttcaaatcttacagagatcaagtggctgtagatccattctcgtgagatattccggtggtaattcagtatgagattttattactgaccgatcatcagacctggacacaatgttgtggttggtcgaaatggtagtggaaaatcaaactttttctccggtaagcttcttctcactgaatgaggcctggcctaaactctgcctgtagctatacgatttgtactgtctgatcaatataccaaattgagtcgagaagaaaggcagcgtttgctacatgaaggaacgagtacaagtacgacactttctgcttatgtcgagattgtctttgacagtatgtccgctttatcttcagaatggcttgcctaagctgaaaatttatctagattctgatgggcgcttcccgactggtcgacaggaacttgtgcttcgccgaacaattggtcttaagaaagatgaatattccctggatagaaagagcgctagcaagtcggaagtggatcagctattggaaagtgccggcttctcaaaggctaatccctattatattgttcctcaaggaagggtgtgtaaatagatttgtttcatcgaaaagtaaggctgctgacgagatatcagatcacgcatctgacgaatatgaatgatcgagaacggctcagactgttaaaggatgtggcagggacagaggtctacgagcagaagagggctgagtcaaccagaattatggaagagaccggtgcgttctagtacccttcatgttctgtacaaactaaattctcgtattagacgggaagcgagacaagattcttgagcttctcactaccatcgaggaccgactacgagaactggaagaagaaaaggaggaactcaaagagtaccaagagaaagaccgagaaaggcgctgcttggagtacgcgttgcatcagagagaactggaagatgttaccaatgctctggatgagattgaggcagaaaggagacaagacatacacaatagtaacgagaagagaaaggaattcaatgatcgagaggacgaaatccaggtctgttcttctcgttaattgcagtgattcgctcttctaactgtagttaacagcgctacgaggaagctcttactgcggctaagcattctttgtcgactacacaagcttcgcttaggcagtatgaaaccgagcgggcggatttagtgcgtaacaaaacagaactggaatgcgttatcgccgatttcgagactgctggtcaagtgggagagcataggagggcagagttagctgaagagctggaagtgatgcaacagaaggtagatgaggcaaccgcgagattggaggacctggtgcaagaagctgaacagaggattggggaggaaaaagccgcaagagaagcgtaagttgctgtttcatgttctgctgtcctgaagaactaattttgctgccataggcttgaacctacacaatccaaactctctgtattgttcgccaaacagggacgagcgcagcaattcgcaacccaggctgcccgagataagtatctcaaagacgaaattaaagctctcaaagagcatgagaagaatcaaggaaaacgggtggagatcctgcaaaaggaggtggcgggtgcgaaggaacaattggcacagctttcggccaagtctgaacagcaggtccagggcgagaatgataggagagagaacttgaaaaaaatgaacgaggagattgcacaactgcaaaggaacattgcgggtatgcatgagcagaaaaagtaagtttttttttaccctagtctgccaattgaaggttattaaggtgatttgaagggagctgtggcgggaagagggcaagttggctcagactgaggtcaatgcgaagagtgaaatggaggccgccgagcgttcactgatgggcatgatgaacaaagtaaggaaagcatggcttgtcatcggaagacgtggcgctgaacagacatcaggacacgagcaatggtttaagggctgttcgacaaattgcgaagcgactgaaccttgatggcgtctttggacctctctacgatctttttgaagtttctgataaatacaaaaccgccgtggaggtgacctctggtaacaggttggttttcttttttctttttcttggtgaactcactcctgaaccgaaccatattaatctctgtttgtcagcttgttccacgttgttgtggataatgatgagactgccagcaagctacttgacgttatgaatcgcgaaaagagtggtcgagtgacttttatgcccctcaatcgtcttaaaagtcatagcgtcaactatcccaaagctaacgatgctataccaatgattcaaaagttacaatttgacagggagtatgtcatggcatttgagcaagtacgtattttgggccgtgcatatgcaccattccatgctgaacatctataggtatttggtcgaaccatcatttgtgaagatcttcaaaccgctgcccattatacccgatcccatggtctgaacgccgttaccattgaaggtgatcgagttgatcgcaaaggtgctttgactggcggttatcacgatgttcgacgttcacgcctcgatgctgtcaaagccgcaaagaaatggcgaaccgcatacgaaacagaccacgcgcgtcatgcagaggtgaaagctgcgctgcaaaatatcgaacaggaggtcacaaggaccatgggtcaagtacaagcacttgaggcgaagaaaaggcacatgtcagatgggggagagggctcattcaagctacttacgttaccggcaagggatctagaccaggcaagagatagggtagcgagattagagtttagtctggaagaagctgagggagcatcgagggatgctaaagccaagagagcaagctatgaggaggagctcaggactcctatgaggcaaaacttgacggatgaagagttgagggagttggaaaccttgacacagaatgcggaagcccagaaaaagttgctgtttgaggcaacccagaacagagcaaaggcagtaggagagcgtaatcggttagaaatcgagctttcggagaatcttcggcgaaagagacaggagctacgaggcaaacttgatcgattggaaggtgaagcgggtaatggggaattgcagtctggggaggtggaattgcgaaggagcgagctcaggaatctcgtgcgcgatattgagcagcttgaggaaaaagtttctggtaagtatcccgctctagaagcaacgtcgctgaactttgtatccagagtctgagggccgtgttggagaawtaaactctgaaatctccaaaatctcggagaatctcgagcgtgtacaaactcagcagatggaaaatactcgagccataatgcgtgttcaaaaaaatgctgagcgttatcttaccaaacgacagaccctcatcaacaggaaagaagagtgcaataatgcgattcgggatttgggtgttttaccggaggaagcattctcaaagtatattgaccaaaggtcagataaggtaggtcatgtcatcaaatagaccgggataggatttgacatcgctacagattatcaagagacttcacaaggtgaacgacggtctcaagaaatttgcccatgtcaataaaaaggcgtttgagcaatatagcaatttcacgaagcagcgcgacgaattaatggatcgtcgagatgagctcgatcaatcggctatcaaaattgaagaacttattgagactcttgatcaacgtaaggatgaggcaattgaaagaacattcaagcaagtgtccaagtactttgaagaggtatttgagacattggtcccattagggaaaggagagttaataatgcagaagaagacggatggtttcattgtgagtattgaaggtgattgatatttttagcaaaactaagaggaaccgcaggaagaagaatcagaagagtctttggagcaaggaagagagaaaagtgacattgacagctatactggcgtctccattcgcgtttccttcaactcgaagcatgatgagggtcagcgcatccagcagctgtctggaggtcaaaagtctcttgtggctctcgccctggttttcgccatccaaaagtgcgatcctgcacctttctacctatttgacgaaatcgatgcaaacttggatgcgcaatatcgtaccgcagtagcaagtgagcaacgttccttttttggctcttcctctaccagtattgatcagaatggctttagccatgatacatacgctttccaccagcgcacagtttatcacgactacgttcaagtctgaaatgcttgctcaggctgataaattttacggtgtcttcttcgataaacaaaaggtcagtacgataaaggtgattgaaaaggaggaggccagcgactttgtagaaaccgccgcgcaagtcggacagttgtga

SEQ ID NO: 1349 - DNA, 4352 bp, Cryptococcus neoformans
atgtggcactctgcgcgctcaccctccgctcaccacgtcacgtccgacaacagagacccattacccacaacgtcccataactctatactctctaaactctccccaaaatcgtatatcagtcgacagcgctgagaataacaggccgtccgcaccagtccactccgatttcccgcttcttctgactcgcaacactattgggagaacgaccaagaaggattgagatcctcggggcaagatgcagatgctcacaaaggtcagtcatacagctgggatcctggattagatcggagctcacatttgcatagtttgaaagcaaatccccaagagttaagggcatcgccttccgtacgtctgaagaagcatagaggagcacggagcatggtcccgcgctgacatctcgtgtagacccaaagcagcccttgcttgcggcgtccttgcataatggaacaatccaactatggaactaccagatgggcactttagtggaccgatatgatgagcatgatggtaagtgactcytcataggagaattcaatggcagtactaacatatgttaggtcctgttcgaggtatctgttttcaccccactcaacccatcttctgttccggtggtgatgattacaagatcaaggtgtggaactacaaacaaagaaaatgcctttttactctgactggccgtgagtgactcgaacagctttatgaatgtgacattgacgagtggcagatctcgactatgtccgaactgttttcttccatcgggaatacccctggattatctctgcatccgacgaccagactatcagaatctggaactggcaatcaaggacttgtattgccatcctcaccggccacaaccactacatcatgtgcgcacaatttcacccgtgggacgacctcgtcatctccgcctctatggaccttaccgttcgtgtatgggacatctccggtctccgcaagaaaaaccaagcttctcaagctcccatgtctgccgaagaacaaatcgctcgtgccagccagggtcaagctgatttgtttggcaacaccgatgctgtagtcaagtatgtcctcgaaggtcacgaccgaggtgtcaactgggcttccttccatcctacccttcccctcatcgtctcttgtggtgatgaccgccaagtcaagctttggcktatgtccgaaaccaaagcctgggaagtggacagctgcagaggtcacttcaacaacgtctccatgactatgttccaccccaagcacgagttgattttgagtgcgagtgaggacaagactatcagggcttgggacatgaccaagagaacagccgtccagacctttaggcgggaacacgataggttttgggtgttaactgcccaccctgagctcaacttgtttgctgctggccacgacaacggtctgatagtctttaagcttgaacgagagcgtccccccttctccttgtctggtaatcaacttttctacatcaaagacaaggttgtacgcatggccgacatatctagcggtaacagccaaggcatctgctccgtccgcaagtttggctcccaatacattcctcctcgaaccctcagctacaaccccgctgaacgagctgttatcgtgacatctccttctgataacggtatctatgaacttatcactctgcccaagtctactgcgcctactgctcaggatggcagggatgtgccttcagacggtaagaagggtacagggttctgtgcgctcttcgtggcaaggaacaggttcgcagtcctcgacaagggtgcccagaacatcgaaattaaggatctttccaactctatcaccaagactatcaagtgccctgtccagacgtccgagatattttacggcggtacggcgtccattttgctcgccactccttcttctgtagtccttttcgacattcagcagcaaaagattgttgccgaaatcaatacccctcccgttaagtatgttgtatggagcaccgatggtaacatggtcgccctcttgagcaagcacacaatcaccattgccaacaagtctctttctcaaagcgctctcatccacgagacgattcgaatcaagtctgccgcttgggacgacagcggtgtgctcatatacaccactttgaaccacatcaagtacgctctttctcaaggtgataacgggatcatcaaaactcttgaacagcctgtgtacctcactcgagtcaagggttctgtcgttcactgtctcgaccgttccgccaagccgcaggctattaacattgaccctgctgagtaccgattcaagcttgctctcaaccgcaagaactatgatgaagtcttgcatatcattcgaaatagcaatcttgttggtcagagtatcattggttatcttcagaagaagggataccccgagatcgctctccactttgtgcaagatgagcagactaggttcgatcttgctattgagtgtggtaacttggcggttgcgttggagatggctagggctgttgacaggcatgacgtttgggagaggttgggtgccgctgcgttgcagcaaggtaatcatcaagtgagtgttggttttacgttacatgtcgcgccttactaatacattacagattgtcgagaccgcgtatcagaagactagaaacttcgacaagctctccttcctctatttgatcaccggcaacacccagaagcttaatatgatgcaagtcatcgctggcaaacgaggcgacaatatgtctaggttccaaaactctttgtacctcggtgacgttcgatctcgtgtcgttgtgcttcgcgaaactggccagtaccccctcgcttactacactgccaaaaccaacggccttgacgaccttgccttggagattcttgatgaagctggcttgaccgaggatgacctgcctcctccccctcagaactctggtcactcttccctcgccccccctcccatcatcttctctcaatccgactccaactggcctctcaaggaccttggtgagagcttctttgaccgagcacttgctaacggtggtgtcgacgctttgatcggcggtgaagaaagtggagaacaactggatgcttgggcggcggatgttcctgttgaggaagacgaaggagaggagcaagctgctgatgaggatgaaggatgggatcttgacgccaacgtcgaagtgcctgatgtcgaagaggaagagtttgacggtgaagacgttttggctgaggcggatttgagtcagggtgtcgagcctggtgcgagcgaggatgagatttggcaaaataactctgcattggctatcgaccatgcagccgccggtgctttcgaatctgccatgcttgtgagtggatggactgatctgctttcatgacgatgaaatagtgagctaatgatttatttttacttagttgctcaataagcaagtcggcgttgtcaactttgaacctcttaagcctttgttcctccaagcctaccaacactctcacgtttacgtccctgccaacgcttccctccctcctcttcgactcaatgttcgccgaaatcccgaaaccgccgaacttcgcgacgccctgcctgccgttcctctcaactatagcgagctgaaggcaaccgaggtggccgatgccaacaagtactttgctaggggtaaatttgttgaggcgcttgcaacgttcaaaaatgtattgtcaaaacttttgttggtagttgttgaatccgaggaagatgctgaggaggtgagtttacccttgggtgatgactcctgcacgcgatgtactaacgtcacggacaacagataaaggagcttgtcacctcttgtcgagaatacatcattggcctcactatggaagttgaacgacgacgaattgccgtccaagatcccgaaaacgtcgttcgaaaccttgagctcgccgcttactttactcactgcgaacttgctactcaacatatccaattagcattgcgtagtgcgatgaaggtgttctctgatgcgggtaacaccgccaccgctgctgtgtttgctaggaggttgatcgagacacagcctggtcaggctgtcattactcaagtaggtctagcattggttttgaagtgttatataacggaatagtacattgacattgtctcatcaggcccgtgctgtcatctcccgaggccagcgtaaccctcgagacgttcacgaaatcgcctacgaccaaaacgcatcattcaatatttgcgctgctacccatactcccatttacgagggctcaccatatgaagaaagcgcgtactctggcgccaagtacttgccagagtacaagggtacagtctgcgtggttgatggattgagccaagtcggtttggctggaagcgggttgagaaacatggtttaa

SEQ ID NO: 1350 - DNA, 4581 bp, Cryptococcus neoformans
atgagggtcgaagagctcattttggacggtgagtctgccgaactgagccttaacgacgataatagaagactcatggcctgtaggcttcaagtcgtatcccgtcagaacaaccatatctggtaagtcagatgccaggtcgttccatgacgagtatcctgatgatatccctttctctaggatttgatgaatctttcaatgccattaccggtcttaacggttcgggaaaatccaatatcctcgatgcgatatgtttcgtacttggtattacgaatatgcagtcggtaagcagtattactggattgattgtcagtggtggagactaaaatatggctttcataggttcgagcgaacaacttgatggaccttatctataaacggtacgtgtcactaaaccaagtctgtgcgaaagaatatgctcaacgtggtatttaggggccaagcaggtgttacaaaagcatctgtcaccatcgttttcaacaatgaggacagatcgaaatcgccagttggttttgaaaatacgcctcaaatcacagtcaccagacaagtgtgttcaaagtgttctccaaaatacgagatttggcttatacctttctgtagatcgcggtcggcaatgtctccaaatatctcctcaacgggcataaatccactctccaagctctccaaaacctcttccaatccgttcagctcaacatcaataaccccaatttcctcatcatgcaaggtaaaatcaccaaagtgctcaacatgaagccagcagagattttgggtatggtagaggaagcagcgggaacaaggatgttcgaggagaggaaggacaaggccatgaaaacgatgactaaaaaagacaagaaggttgaggaaattgaaagcgtgcgccaatcagcaaaatacttttagctctcagctgacttcgtcttttcagctgctccgagaagaaatagatcccaaacttgagaagcttcgagctgagaaacgatcgtatctagaatatcaaaaagccacctctgagcttgaacgtctcactcgtctcgtgaaggcgtacgaatgggtcgctgctgttgaaaaggctgaaaaggccacagagactgttaagaaaaagaggaaggacatcgagactgctaaaggcgacataatgagaggaggaaaagagtgtcatggaatggaaaaggagttagaggaaatacgtaaaaagaaagaaaaggtgcgtttcatgattgttgtaacaaccctattgactcatggcatcctgcaggaacaagccaaaggagggaagatccagggtttgactgaagcggtcaacaatttggaacgcgagctggtcaagatcaaaactcagatcgagatcaccgaaagcactctgaaagatgatgccaagagagtcgaaggtgccaaaaaaactgtcggagaggtgagtaacagcgactcaaacgatttggatattgaccctcagatagctttccaaaacgctcgaagataggcgatctgagacttccaaagagagctccgcctttgccgaattgaaagatgcatacgacgccggccaagcggagctttctaaactcgaagaacttcttcagtcacttttgacgggtctctcgtctaatcaaaacgatgaagagaacgcgggcggctacctcggtcaattggcagaagctaaagcccgcctggcagcggctgggacagaagccgagcaggccaaagtcaagattggtctagcggagaaggagttgaaagagaaggaaccgagagctaaaaaggctgagaaggatggagaggggctggtcaaggagcttgcggctaagagagcacaaatggagaagctgagaaagcaggtcgagagtgctggatgggatgaacagcaggaacgcgagatgttggaatctcaagccgagcatcaatcaaagatgaccgaactcatggacgtaagtatatttgacgagcaaagttatctaaggcgtacttacaaaacatgttagaaacgcgacatgcttaaatctcgtcttgcatcaattgacttcacttactctgatcctgaagccaattttgaccgttccaaagttaagggtcttgtcgccaacttggtcgaccttgacgaagaaaacttcagcaactctacggccttggagatctgcgcgggaggaaagctttataacgtggtcgtacacgacgaaaaagtcggctccaagctgcttaaaaatggtaaccttcggaagagggtgacgatcatccctttgaacaaaattgatgctaccaagattgcagctgaggtaagtgcccgcctcatatttttttaccgaatttgtgcaaggtaaataggactgactattgtagaaacttgccgctgctcatcgcgtcgctcccggcaaagtcaatcttgctcttgacctcgttggctacccagaggacgtctctgccgcaatggcctacgtcttcggtcgcacgtttatctgtgctgacaagcgtacagccgaagctatcactttcaacaaatcaatcgcggtaaagtctgtcactgttgaaggtgatgtatatgatccttcaggtacactttctggagggtcagcaccgagcagcggaggtgtattggtgaaggtgcaggagttgaaacaaattgagagggagatcgcaaagcacagatctgcagtagaagaaatcagaagcaagttgcaaagcgctaaaaaagttattgaccaatggaagaaggacaaaaagaatctggagctaagtgagcacgaagtgaggttgctggaggagcagataaagggcagtaatgctaccaaggtgcgcataccagatcaaaggtactgaatcagggcggtactgacatgtctgtagattattgctgaggtggaagcggccagaacatcccttgccgaccttaagaatatcgtcaaccaagctaaggaaaagcagaagcaagcttcagcggattgcaagcgtctcgagaaggagatggccgatttcaagaacaacaaagattccaagttgaatgaaatcaaggtatgttgttattcattatatatggtgtctagcgaggtaaaaatgacccaattgtaacttctatgagtaggcgaatatcactagtaaaaagaacgagcttggaaagaagacattgcaggtcaagacgcgccagaaggcgatccaaaccgcggagcttgagcttcgtaagttgacttcctcttttttcgttctgctatccgagcatttaaatctgatatctttgcagagcaactggaaagtgatctcgaaagtgctaaggctgaggtcgaggaagccactgctgctcaagcgaagacaaaggctgaacacagtgcactgcaagaaagttttaaagcatcacaggtcagtctcgagcttttcattagaactagcaatccagaagctgaaatttcattgacgtatttcattgcagagtgatcataaggctgccgaaacgaagctcaggagcgaagaagctgtccttgtcgcttttgacaacgagcttgccgacttggaacgtgacctcaaagcaaagaaacaggatatatcggatgctgagctctccctcaagaagcttgagcatgatctagggcttgttgaaaaggagaaagcaagtttagtggatcataaggtgaatttggaaaatcggttccagtggatcttggacgagcatcagtaagtggccataatcattcgaattcggagcagatgtactgactggcctttaggttctttggtaaaatcggtactccgtatgatttccgaagtgtagatcttcaacaagcgagggatcagtgtcgagagcttgagtctcaggctaatggaatgggtaagaaaatcaaccctaaggttatgaacatgatcgataggtaagccatcatactcacttccgagcattttggaccatttatgtttgctaatgaaataacaaaagtgtcgagaagaaggagcaagctctgaagaagatgatggctactgttctcaaggataagtccatgattcaagacacaatagaggagctcgaccggtacaaacgcgacgcgctaacaaagacttgggaaaaggttaatgggtgagtgcgatggatccttcctaatcgttagatgctgaaccgtgccatcagtgactttggtctgatcttcgccgaacttcttccgggcaactttgccaaactccaacctcctgagggacaagacttaacccaaggccttgaggtcaaggtccggttgggtagcgtgtggaaggcgagcttgactgaactgagtggtggtcaaaggtgaatctacctcattcgcctggccatattgaataacgtgctgataatcaatctagatcacttatcgcgctctctctcatcatgtcccttcttcaattcaaacccgccccgatgtacattcttgacgaaattgacgccgcacttgacttgcaacacactcagcacattggtcaactcttccgcaacagattcaaaggcagccagtttattgtcgtttctctcaaagaaggactattcacgaacgcaaatgtcttgttccgagcgaggtttcgggacggtacaagtattgtcgaggtcagttgctttcgttgtccgccagtcaatga

SEQ ID NO: 1351 - DNA, 4483 bp, Cryptococcus neoformans
atggcagaattcacactgcaagaacacctcctcgccctctcagatccaccgctgtaccaaatttccgcagaactcgacatcccttctctccgaacatcctccatcgattcctccctttcctccgccattgaagaaatcgcaggtgatccggaatccatcgtgaactcctccccatcgacgttcgacgtcttccgctccatcctcaagcatgcagaccaaccaaacgttgattctggcatactcaccaaattgctggatgtgattgtctcagggctgagttatcactcgagcacggtgatggcgattgtcaatggacaagggtttggtgctgaagccgatatggatgcgccaatggtacataagcagccgcttgaaatgtgggcgtttctgctgcagtggtttgtcaatgccgcagagcgcggggcgggaaagacgaacgatgaaccgagacaggcaatgactgggagaggtaaaaagaagactaccaaaaccgcaggtggagctgggatatcaacatcattcgtattttcagatcacctccccctagtgctcggtacgatgcacaaaactctccgaataccaacttcacgattatggcgtacctcttccgaaagagaagccttcatctcgtgctttgtcaaacccgcataccaactcgccgagacagaggcatacctcaaaatttccgagatccgcctgggaatattcaaagtcatctgtctcgctgtcaaattccatcaacatgcttttggggcccaaacatcgattatgcagaatttgacgtatttcgaacatctctcggaaccgatggcggagctgctggcgattttggaaaaagaatttgatttttcgcagttgggagaagaagttctcagggatgtagcgggaaagagctttgcgcataatgatgcgaaaggtccgaggagtttttcgaggtttctcgttaggctgacagagttgagtccaaggatggtgcagaagcagatgccattgctgctcgcacatctcgatagcgacgtaggtccccttgttaccctttagtccatggatgctttcgggaagattggactaatgttgcgatttcaggcgcaccctatgcgaatggctattgtagagatcatcggtatcctcatcaaagacatttcatcatctgatgaaggtgacgaagagcaaaagacgaagcagatccagaggttctttgagttgttgatggagagatttttggatctgaactcttgggtgagatgtaaagtcctgacaacattgatcaagctctgcgagtaagtggcgtagtcttcattatgcaagaacggacgttgagatagtttacaattaacctgacacaaatagcctacccgccaaatttcctaaacagcgtcatcaaattaccgaacttaccattcgcacacttgaagataagacatcgtctgctcgtcgatatgctatccaactgctgtgtaaactactggagactcatccattcggtgcacttcatggcgggacgttgaatttgcaagagtggcaagagaggtacgaaaaggtggcagaggagttgaaaaaggtggatgcgcaagaattggaaatggcgaaacgggaagtgggggttgaggatgatgatgaggaaggtgaagatgatgaagagcagaaagaggatgaagaagggactaaattcaacaaagaaaaagaagacggggataaagaggaagacgacgaggctcaaaacgaatccaccccaaaacccaagaagaagaaacctcgtcaatcccaactcgacctatccgccatccaatctgaacaagcctccatcgatcccaacctcatcaccaaattgcgtcttaccaagaaatactatggcgatgctctccgattcatcaaccaactggaatctgccatcccaaccttgtgccaattactcgtctccaccacgaaaacagaagtccttgaatccatgcggttctttagggttgcgtacgagtatgatatcgcctcggccgaacagggaatcaagacgatgttgcatttgatttggacaaaggataataacgcgacggctggggaggaaggggaaggaaaagggattcggggcagtgtgattgagtgctataggagtttatatttcgatgtggtgccggatctatcgccaaagcagcaggtgaataggatcacaaagaatatgattgagtaagtatcgtcattcccgtagatttggaaggggaagaggctgatgatgacgcccttttccgggatagacggacgtatggtgctacgttggcagagttgacaagtctggaagagttgatgcgcacgatgatgggagagaatatggtgcataccgatgttgtcaacaagctctggcaagtttacagtgcgtctcctaccttttcttcttttaactatcaaccttccccctgaaggtggagctgattaagaatggtttcgttttgagtaggtacggaacaagaaatccccaaggcgcagaggcaaggggcaatcatcattctcgggatgttggccctggccaagaaagaggtggtaaccgagaaggtggacaaactattgaagattggtttaggaccacttggaatggtaagcaggaaccaaaattaattatagtgcaaagggttttgagagctgatggacaatgtgtcgaatcatagcaagatttggtgctggcgaagtatacttgtatcgctcttcaacgtcttagcgggtctgcgaagaaagtcaaaggtttgctttttccctccgctcaatggaaggtgtgatccacggagactgattctttcatataggctccctccaagacaaaacaatgcgtttaccaatggacaatcctatcttcaccaaactccaagatatcatcgagttttctcccaaatccccccaatggttctccatggctgaacaggctgttaacaccatttacctattgggtgaacagccggatagactttgtacgaagatcataaaagacttgacagccaaggtgtttgaagcgcctgaaaaggaaatggaggtcgagaaggaaaaggagagggaggaagaaaaaaatggagaactggagaatggaaaactggacaatggaaaacaagagatcactgaaaatggtgatgtctccgtgagagcagataacgagccggaaactgtggatgatggtgaaacctctcaaacccaatcccaactcgcccctaccaatgaagaggttgcgcttttgaaagcacaagccagtagctttaggattgctcaaatggttttcattgttggtcatgtggctttgaaacatatcgtttatcttgagcttgtggagagggagttcaagaggaggaaggatgagaaagcaaaaggtaagtccaacgtagcttctttcatctgccattcttcttatagggcattgggagaacggaaaagttgatcgtcaatgcagagaaagcggcagcaaaggctgctgagaaggaccagaacgatctcgacgctgtagcaggtaatgccgaggatgacatcggtgatctcatatccaccatgaaagagaaggaactgctgtatggcgacaagagcttattggccgtgtatggagatttaatcgcgcatatctgtgccagtccaaagaaatacaaagtgagttgtcgatgttaggtgtgggaatcggtggatactgaaatgttttgatgtagtatccttcactccgagaagcagcaacgctgagtttatcaaagctcatgtgcgtctcgtcccagttttgtgaacaacacttgccgttattgttcaagattctcgagacgagcaaagaccctgtcgtaaggagtaatatcgtgatcgctttgggcgatatcgcagtctgctttggtaacttgattgacgacgtgagtaatttcagtctgtctgcactgggacgctcctagttaatacactagagttagaactccgaacgtctctatcaaggcctcgcagataccgaccttgtcgtcaagaagaacaccctcatggttctcacccatcttatcttgaacggtatgatcaaggtcaaaggtcaactgggtgaaatggccaaatgtttggaggatcccgatcaacggatctcggacctcgcgaaactgttcttcacagagctgtcgacaaaggacaatgcgctgtataacaacttgcaggatgttatcagtcatctgagtattggagcacatgccgttgatgaggggactttcgaaaggacaatgcgattcattttcaccttcattgaaaaggtaagcattttgttcgaagtctgtaaaaagatataacaagctaatgtgtcaaaataggaaaagcaggcagaatcaattgtggagaagctatgccagcgattcagacaggcgacagaggagcgacaatggagagacatctcctactgtctttcacttttaccattcaagtctgagagatccgtcaaaaagctcatcgaggggtgcgtcttatatttatactttcaatgaaagatgtcctagactga

SEQ ID NO: 1352 - DNA, 4680 bp, Cryptococcus neoformans
atgatttcacaggcgccagcggccaagaaggcagctccaaaaaagattaacaaagccccattagcgtctaagaagcaccccaatgagtcactttccgatgcaggttcggatacagtttgttcgccgcccaagaagaagacgaaagccgacgatgatgatggcgattttggtaccgaatcaagtgcaaaagcacccactagtaacaagaatgcgagcgaagtataccagaaggtcggacagcttgataaatctagattccaataaaactgacgctttcatagctttcgcaaagggaacatgttttgaagcgtcctgatacctacatcggctctgtagaggctattactcagcccatgtggattttgaatcccgaaacaaagactatggtgcacaggtaggtgtgaaaactgtgtaaatagattctttccatttataccgcttcaggcctattacatttgtcccgggtttccttaaaatctttgatgagatcttggtgaacgcttctgataataaggtaagtgcagtgtgtgttatgaggtctgatggcaactcatccacttttacagatcaatgaccctaccatggactctatcaaggtcgttatcgaccgtgagaagaatgctatatctgtgtataataatggccgtggtatccctgtcgagatgcatactaaggaaggtgttatgattccggaattgatcttcggccacttgtgagttcccatatctccagcttaaatgggtcactcagccattcccatggtagactggcaggaagtaacttcgacgacgaccagaaaaagcttaccggcggtcgaaatggctacggtgccaaattggccaacatctattctcacgagttcagtacgtcggctgttgtgttttgaaagcctctgtgaactgatggttatatagtcgtcgagactgctgacaaggtcaacagcaaaaagtacaagcagatcttctccaacaatatgagcaagaagggcacccccaaggtatagaagacctacgaagtcctgataatgataggctgattattactcagatcaccgacaacaaaaaaggcgaggaatggaccaagattacattcaaaccagatctcgaacgatttggtatgaatgggattgatgatgacaccaacgctcttttgatgaaacgtgtctatgatatggcgggtacagtcaaagatgtcaaagtgtttctgaatgatgaacgtatcaaagtgaaaaattttaagcaggtgagtatacacatgtcaatgacagaaaaaggaagctcatctcatccttcatagtatgtagagatgtaccttaacgcttccactactgccacctccgaagctgccggcggtgctgctgtgaccaagccgccaatcatatatgaggtggcaaacaagcgatgggaagtagctttcgcattatccgatggtgaattcaaacaagtgtctttcaccaactccattgccactaccaagggaggtactcatgttgacatgattgctacgcaacttgccaataaactgtatgtttattacgatcttgttcgacgtgactaatgaagtgaaaagaatggatcaaattaaaaagaagaacaaagctgccccggtcaagccatttcagatcaaaaaccacatgtggatctttgtgaatgctctcattgagaacccggccttcgactcgcaaaccaaagagaaccttacactcaagtcatcagcattcggcagtaaatgcgaattgtcggaggagtttatcaagaaaggtcagttgagtacctttcccgcatgtaaatgtttgatccagtccctcattattctgttcacagtggccaaaaccggtatcatcgacaatgtcttgaattgggccaggtttaaacaggaccaaatactcaagaaaacagatggtaccaaacgatctcggtgcgccaatgcgatgtaggcatgtacattcactaacctacaacattcaggatttctggtattgtgaagcttgaagatgcaaacaatgctggcggccgaaactccaagaactgcactctcattctgacggaaggagattctgccaaagctctcgccgtttctggtcttgcagttgtcggacgtgatgagtatggcgttttccctctcagaggtaaacttctcaatgttcgcgaagctggtcacgaccagattgtcaagaatgtggaaatccagcatatcaagcagattttgggcttgaagcacaaccaggattatgccactgctgacagtctgcgatatggacatttgatgatcatgactgatcaggtgagcatgagcgtccagatgcccacgaatattctgacttgaagatcaggatcacgatggctcccatatcaagggtcttataatcaatttcttggatcacttttacccttctttgcttcgaattcccaacttccttgtggagttcatcacacccattgttaaggtctggaaaggcaaaaaagagatcagtttctatacaatgccacaatacgaagaatggaaagcccaaaataacaacggtcgtggatgggagtccaagtactataagggtctgggcaccagtacctctgccgatgccaaaaagtatttcagcgatctggacaaacaccgtttggcatttgagaccatgcagccggaggataggcaactgattgatatggcgttcaataagaaaaaagccgatgatcgtaaggaatggttgcgtcaatttaaagtgggctaaggcgtgacaatgaattgtatattaaagctaatgaatttatttgcagcctggtacctaccttgatcatgatgttcaatccctccccatctccgattttgtcaacaaggagctgattctcttctccatggctgataatatccgctcgattccttccgtggccgacggtctcaaacctggtcagcgaaaggttctctttggttgtttcaagcgaaacctcaccaaagaaatcaaggttgctcagcttgccggttacgtttcggagaaaaccgcatatcaccacggtgaagccagtttgacgtctaccattgtcggcttagcacaaaacttcgtcggtagtaacaatatcaacttgctggaccccaacggtcaatttggtactcgtcttgcaggtggtaaagacgctgcttctgctcgttacatcttcacaaacctcccacggatgactcgagcaatcttccaccctgcagacgacggattgctcaactacttggtcgaggatggcatgagcattgaaccagactatttcatgcccaccgttccaatggtattgatcaatggcgcagatggtattggtactggtaagttcattccagctacaggcattgttgcacagtcaataacaatgatcaggttggagtactgccatcccaaactacaatcctgtggatatcgtcgaaaacttgcgcagaatgatgagaggtgaggagccggagaaaatgacgccctggttcagaggtttcaaagtacgcattacacgtcaaagctgaggccttgctgaatgcgagttatcttttcagggatttattgagcggattgatcaagacaagtacaaagtcagtggcataatcgagaagattaatgacactaccctcgaaattaccgaattgcccattcgaaggtggactcaagatttcaaggaaatgcttgaagagatgaccacagggaccgacaaagtaccccagaccatcaaggtcagtgtctgatcaggaagggggacagcggctcatagtttcatataggactatgaggagcaccacacagataccacagtgcattttcgagtccatatgaccgagaagaacctcgccgatgctgagaaggaaggcttcgacaaacgattcaaacttactacttctcttggtactggtaacatggtctgtttcgacctgaacggcaagatcaagaaatatgccagccctgaagagatattggaagaattcttccacaagcgcctcgaattctatgggcatcggaaggtatgttatcttacccatcagcactgattagtagactgataacaaaaagcaacaccttgccgacgagctaaacaggcaatttgaacgactcagcaaccaggcccgctttgtccatatgatcatcactaaggagctagtcgtttccggcaagcgacggccagatatcgtcgctgaattgcgtagtctcaaatttaaaccttttcccaagaaagaaagggccaaagaggaaggagaaaacgaagctgccgaggaagaagaagacggagacgaaggacaagctagcgactatgattacctcttgggtatggctatctggagtttgacatcagaaaaagtgcgtgtatcgaaaaaatatgttcaaatttgcaattgacaaagagcatataggttgagaagctgttagcagaaagggatgcaaaggagcaagaactcatcgagttgctcaagctcagtcccaacaatatctgggatcgggatttggacaacttcttggctgagtggcaggtaagttgccggtaccttcttctacttacaagctggttgatcattcaaaaatatagcttgcccttgaagccgacattgctgatgccaaaggttcaaaacccaaagcgaaagccgctgctatcaaagcgactcaaaagccgaaaaagcgtgctatgtaaccaattatcactacctcacatgcattatgtgccataa

SEQ ID NO: 1353 - DNA, 4878 bp, Cryptococcus neoformans
atgccgctccaacggttggagctctacaacttcaagtcgtatcgagaaaaacaggtatttatgacatctcttcggggtcgttttccgaacgctgatcggctctcgtaatcaggtcatctcgtttggcgatgttcccttcgtctctatcataggtccaaacggtgctggcaagtccaatttgatggatgccatctcttttgttctaggagtcaaatcagcgcagctccgatcaacccagcttaaagatttgatctatcgtgggaggagagctgcagctcaggaagccgagagtgaaactcagacacagagtgaaagtggggacaattcaggcgatgctaggtctgcctgggtaatggcagtttatatggacgatgctggtaaagaatggacctttcgccgcaggttcgtcgccttttttaattattaaatggccttggcagattgacgaatatgtgcagtgtgtctatgtcgggttcctcctcgtattttctggatggaaggtctgttgcttggaaagactacaatgctcaacttgccaagttcaatatccttgttaaggcaaaaaactttttggtattccaaggtgatgttgaaggggtggctagtcaggatagtaaagctcttgctcgcttgattgaccggataagcgggtaagtaaaattcaaagcagtggaaatacagccaccaagtatatgtgctcaacaacgatcagttcccttgacttggcgccgtcttatgaagctgctaaggctgcccaggaaaaggccacggaggcgtcctcaacgaattatgcgaagaaaaggagcatgctcactgaagccaaacattttagagagcaacaagaggagatcaaacaatgggaaaggcttaacgactccaaggtgagcgtgtactatgctcactgttagcgcgggactaacgcgtggtataggacgccttgacacaacgcctcatattgtggaaattatatcaccttgccaacaagattagccagtctacccagaaggtcgaggaagcaaacgatcgcctagctgaattcagagccgccagtgtaagcatttcaagtgtcaattatcatgaatgggcactgacggccatgtagagtgaagccgacagcaatttgtctgatgtcaagagagagcaagccaaagcacagttgaatgtcaagaaacgcgaagcaaatctcaagaaagcggaaaaggtttttgaagacaaagtgcgtttacagatcaacgtccaccgttcgcggctgattctcgaaacagaaacccgagctagtggccatagatacccagatcgctcattccgagaaaagggcgagcggcgccgccgcccaggaagaaaaagtaaaaaaggatgagaagaggcaggcagacacggtcaaagagctcgagaagggtttggaactcattacgaaaaatatggaggaggccggaggtgagtgtgcctgtcgcagagaggttgtgggagtttgacagctgatgagcatatcatagagaggcagcggcaaaggagtcaggcttcgggtataactctatcgggagctgacctgaacgagtatcgccagctgtgcgtatacccttggctgacatattcattgacaatggcttacaatcagcgcagacgcgcatccgctaaccttcatgctgttcaagaacgtcagcagcttgaaacgcttcggcgtgaagagaaaaatctcagggatgctcttgcttcagtggaagatcagatacagcaagctcggcgacgacgcgaaaagcttactggagaagttggcaaccttgctgaacgggaagaaactgtgagtcatagtctgtcccgagcctgtctaacatcgtagatgactgccaagatgaacgagatgaatgatgagcgagagcgaatcaaaggccagttggaccacgcacaggccgaaaggcgccggatcaagcaagttatccctgttaatgatctatcattccatactgacgatcattctcagtatgcgggagactgaaatcaatgagcgtcttcaggacacttatcacaagcttctccaagctggggctgatagacgtgaaaatgagagggaggctaagctaaaggagaccctcgctagccttaaacgaatctttcccggtgtacatggtcgagttgtcgacctgtgtagacccgtggcgacgaaatacgatacagctgtcatgactgttctgggtaggaatatcgatgcagtagttgtcgaacacgagaaggttgctatcgactgcatcgaggtgagtttcttccgcccacccaaatttatcatgagttttgcttacagtaaaaccagtacatgcggaatcaacgagcaggacaagccactttcatcccgcttgacactatacaggtgaagcctgtccctgagcggctccgcaacttcgctcgtggcgcccggcttgccattgattgtattgagtatgatcctgctgttgagcgggctatgcagcatgcttgcagtagctcgttaatttgcgataccatggatatcgcgaaatatgtctgctatgaaaggggtcaggaagtcaaaggtacgtcatggtaattttggccgtgcaccatccagactaaaattatccacagctgtaaccctcgacggcactgtgatccacaaaagcggtttaattacgggtggccagggatccggaggaggtaggaaatttgacgataaagaagtcgaaggttagttttttttctcgttacctagctgcttttttctaaattagagtcattaggtctcaataaattaaaagaaacctaccttggccagcttcaagaactttatcgatccaagcctcaagacaaaggcgatgaggctctcctggagagcctttctcggcttgatgctgaatccaatatcgccaaggatgacctcgtgagctataaatggtatttctttcttgagtagatgaacttacctcgttgctgtgtagcatgctattcaagtccgtcttcatggccttcgtgaggaactcacacatgtcatttccactattgaacgtctcacccccgacgtcgaggctcgctcccgatctgtcgcgtcatcagaggagcgtttagctgctctggtggaaactattgagcaggcagatgatgaagtattcgacactttctgtcagaggattggagtttctaatatcagggaatacgaagacgtacaactcagaattgccaaggaggcgaatgatgccatggagagttttgcagctcaacaggcgagagtaaaacatcagtaagcacaaacagtaactgcttcaaaaggcaaacgtctctaacactccaacaggattgactttgagtcctctcagctcagaaatacccgcgagcgcattgcccatcttcgaaacctcgctagcaaagcagaaagcaacgttactgaactacgttctcggcgcgaggaagtccaggcagaactcgaatcccttcaagccgaaattgatcgtcagcgaggtaaactcaacgatgctaatgacgtacgcgacgaagtgattcgccgtgttgatgagatgcgcgagcgctctcgaaaagcgcaaaaaactttggacagggtgatcaaagaaattgcgacgtggaatgatgagatcttgaagtatgcgtcagatagacatgctatctatagaagatgtagactagaagaaattgacctgccgctggtcaaaggaaggctcgacaaagttccgatcgaagaggtaggtggccttgtgattccaaaatggtattcaaccgactcatatctactcaattagcccaccaaagatgaggacgtggtaatgggggatgaggaagctacacagaaaccagtgcaagtcgatgattacggcttggaaccggattttgatgtcttagaagaggaagatagagaggtgagtactattatcgcactagcagttttttgaacaactgcgctgactagagttgcacagaacgaagatgaagaagtcggccgcgaattcgaagctcaaatctccaaaatgagaaatgatctcgaacgtttggccccgaatatgaaagcggtggaacgactggacgaggttgaaagggaactggatgatgcggagcgagaagcggaggagacgagaaaggagagtaaacgagcaaaggacgatttccaggcgataaagaaaaagaggtaagttatcacatcgaaggcttacgggatgattctaatgataaaaaagatgcgatctgttcaacaaggcatataatcacatgtctgaagtcatcgataagatctacaaggacctgaccaaaagtcagaatcaggtaggaggtacagcgtggtttactctagaagaggccgaggtgagtactcaaatgtgctgagtggatttaatcttactaatggacgtcgtgtcttaggaaccatatcttagtggtgtcaattatagcaccatgcctcctggaaaacgatttgcggaaatggaacaactttccggtggtgaaaagacaatggctgctcttgcccttttgttcgccatccacaggtccgttttccagtacaacagacagattcaatcacatgctgacagattgacagctttcatcctgcgcctttctttgtccttgacgaagttgatgcagctttggatgccacgaacgtacagaagctggcaagatacgtacgaagccaggccgacaggaatgtacagttcttgattatttccctgaagagcactttgtgagtaacccattctcagacgaccgtagtgttaacgctcacgcttgatcaaggtacgaaaaagcggacggattggttggcgtatatcgagaacaagaagaaaacagctcaatgactctaactctcgatttgagaaaggtaagttagattgcaattcaagtggcgtaacatgcagtaaagtctga

SEQ ID NO: 1354 - DNA, 4483 bp, Cryptococcus neoformans
atgtatcccggcgctaaactgtatctgcagcggatcaccgaactgcaatcggccggaagttcaaaagagtcgtcaacagagcttgcaaaactcaagatgattctcgatatgtacgcccgggctatgcaactggaacaagaaagagctgcggcggccaacaagcctgacggtccagccgatacgtccacagcagctagcaccaacggccaagctggcccttcaaatccagcccatgtctctatgaaccctacccaaatcgctcagctccgtactcaggcagctgcctatcaacatctctccagaggccagccggttccttcgtatctgcttgcggcggctcaaggaacgcccccaccaggaattggcggtcaaccacctgtaccaacgggattgaacggcatccagggcaaggtggcagataagactgttgaagctgttgtggaggacagtattgaagcgaaaaaagcaagagaaaaagaagaacagcaggacaagacttctgaaggacctgatggtgcggctcctccagatgggccttctcaacctccgtacgcaatggaatttgacgaaacctccatcatctacccttacaatgcctataccgacccgtccttctactccaagcgcaagtttgatgaagaagtcatcaatcctctccacaaacgtcagcgacttataacgccttctatcatgcctcgcggtcttgacccgtatctccttatggaagaacgaaacagatttatcgaaactcgcatggcgtggaggatgaaagagcttgagaacatggattctacagctggtctcggacagccaggagctggcgatgtgcccaacgtcattgaatctgagaagcccggaactcctatgggtgtgcgagcacgtattgagcttatgggccttcgtcttctaggcaagcaacgactcttgagagaagatgtagtccgcgccatgcatggtgcttcccagatccctgccgaccgttcccagttccgacgcttccgaacacacaccctccgtgatgcacgagcgacagaaaccgctgaacgtcgacaacgtactgaacgtgagcaaaggggcaagcaacgtcaccttgcttatattaactctatctgcgagcacggtcaagctctcatcggtgcgggcgtcagcacagcgagaggtcaaggggctgataagatgaagcgactgggtagagcgatgatgaagttgcatgctgagacggagagggaagaacagaagaggatcgagagaattgccaaggagcgtttgaaggccttgagaaacgatgacgaagaggcgtaccttgctttgcttggtgaagccaaagactcgcgtatctcccaccttatggaccagaccgaccagtatctcgagacccttgctgccgccgttgttgaacaacaaaatgacgatgtccatcgcgatgctattatggccgtgccctttgagcaagaagagggtgtcgctagtgaagagatgtttggtgcgaagagacaggatggtgaggaatctggagcagagcgaagggccggcaaggtggattactatgccgttgcgcacaagattcaagaaaaggtcacgaagcaagcgagtatcttgagtggtggtactctgaaggactaccaggtcaagggtttgcagtggatgatcagtttgtacaacaacaggttgaacggcattcttgccgatgaaatggtaggtttatcatctctagtaagacaacgtcgtgctgacttgcaccacagggtctcggtaaaactattcaaacaatatcgctcatcacttatctcatcgaaaaaaagaagcaaccaggtcccttccttgtcatcgttccactttctacccttaccaactggaccatggaatttgagcgctgggctcctgccgttcgtactcttatcctcaagggatctcctgctgtccgtcgagaggcctaccctcgcttgcgtgccatcgacttccaggtgtgtctcacgacgtacgaatacattatcaaggagcgaccgcttttgagcaggatcaagtggattcacatgatcatcgacgaaggtcataggatgaagaatgtcaagagtaaactgagccaaacattaaatgaatattattcttcaagatatcggttgattttgaccggtacccctcttcaggtgagtatattccatgctgcgtagatgatcatcctctcacaagccattagaacaatcttccggaattgtgggctttgctcaactttgtcttgccaaagattttcaattccgtcaaatctttcgatgaatggttcaacgctccctttgccaacactggtggtgaaaagatggagatgaacgaagaagaagctttgctcgtcgttaagcgtctgcacaaggttcttcgcccgttcttattgcgaagattgaagaaggacgtcgaatctgagttgccggataaggtggagaaggtcatctacaccaagatgagtgccttgcaatggaagctgtatgagagtgtacaaaagtacaagacattgcctacggatatgtctgtcgcgtaagtacttttttcttttgattgtaaaagggctacagagctctaacaagattgcaggaaacctcaaaaacgacaaaacctgcaaaacgcccttatgcagctcagaaagatttgtaaccacccatacgtctttcgtgaggtcgacgaagatttcactgttggcaacacgacagatgaacaaatcattcgagtagcgggaaagtttgaattgttagacaggatccttcccaaactgttcaagacgggtcacaaggtatgtgatacgatggataattgagagacttgtgggctaagtgaagtactttaggttttaatcttcttccaaatgacggaaatcatgacgatcgtctccgacttctttgatttcagaggctggaaatactgccgtctcgatggttccaccaaggccgaagaccgtcaaacccttctttcaacttttaatgaccccaattctccatatcaagtcttcattctttccactcgtgcgggtggtctcggtcttaatcttcaatcagccgatacggtcattatctacgacactgactggaacccccacgctgatttgcaagcgcaagatcgagcccatcgaattggccaaaagaaggaagttagggttttaaggttaatctcgtctggaactgtcgaggagttggtcctcgccagagctcagagaaagttggagattgacggtaaagtcattcaagccggtaaattcgacgaggttactactggtgcagagtacgaagcgcttcttcaaaaagctttcgagaccagtgctgaggaggacaacgaagagaccaacgagcttgacgacgatgagctcaacgagcttcttgcgcgtggagataatgagctcggtatatttacagcaatggataacgagcgcaaggagcgtaaaattgctgaatggcgcgcctctggcagcaagggcgaacttcctccccctcttatgcaagagtctgagcttccaccattctaccgacgcgacattggtcaagaactggctgaggaacttgccaatgaagaagaacaaggacgtggccgtcgaaataagggcgaagtacgctacaccgatggccttacggatgaccagttcattgctgcattggagaactcggatgatgatgtcgaagatgcggcggatagaaagagaaagagggccgagaagaaggctgagaggaagaggatgaatgaggtacttgttcaagccgaggcggagggcagaccgttggatgtcgtcgccaccaaggaagtggttgagcctatcaagaagaagagaggaagaccaagtagctccgtgacgccatctgtgacgggggacgaggttcctacaaagaaaagaaagatggagaaggtgcaagggcctgaagtgcagttgatgaccaagctgttcattgaagtgaataagctcaagtcagatttaggagaggatctcaaccaattcttcttggttccggtgaatcgcaaggtgagcgtgttccttttctggtgcgattagctccatctgacttttttcttttttttttcacaggattatcctgattactatagaattattgcccaacctatcgccatgtcacaaatcaaagccaagattggtaaaccctcctacaatcttgcctccttccgcaacgatcttcatctcctttggaataatgcgcggacctataatcaagaagggtcttgggtattcaatgctgcggaggatatgcaggaggcgttcgataagatgtgggacgatgaggtgccacagtttttggcttcgcaagccgctggggctgagaacagtgttggtgaaacatcggcaggggcaagcggtagcagtacaccaatgttcaagcctgttggcgataaaacgactgctcccaaaataaggatatcgatggggaagaagaagatagaggccgcgatggatggggacgaaagcatggatggaggtgaggacgatgactattag

SEQ ID NO: 1355 - DNA, 4892 bp, Cryptococcus neoformans
atggatatggatacaagatacggctgtgggaagtacgagggaaactctagagaggcgacgacccgtggaggaaagctgaatgcagggcaacaaataagaagactaaaaaagctgataattgccacgtgagaagtggaggttgcaaaagtggtcatgtccgccagcagaaggcccaaaggtttcgagcgcctagcagttcatggtcctcgtcagcaaataggcgcgcgggacaagggtcgggcgtcatcagcgcgccagcacgctggctggaggctgccctcgttcgcttctcgttctctatccatccctcaatctccttcttccatcgacatctttccttcctcaaaccccttttacccacacaggcgcaagtcgccaatcgcaaaatgaaactcaaggacatatcacgcacggcaaccttcgcttgggataacacttcctcttcagcgcccctcctcgcaactggtgctgtcgctggtgccctcgacgaaagcttcagcaacgaatctcagctcgaaatctggcagccagactttggggacgtatcaaatgtcaagcttggtggtgaaggcaagccagctttgggcagcatcaccgttagcagccggtgagtttcctttcaatactgcagtcctcaattgacgtgctatagattcaaccagctcgcatggtcagcaccttccactactcacatgaagggagttcttgctgcaggtatggagactggtgaagttaatgtgtttgatccctccaagattgttactggtgctaggtgcgtctacccagtggcttaacgcgtcgctaacatttcattagtgcggatgaggcacgaatcttcaaaagtgaaaagcacactggtccagttaggggccttgactttaactcaatccagaagaatctcatgcttactggttctgtcaatgccgaggtacgacattatcgtagggcatagctcgaataattcttaaccctttcgcagatatatatatacgatctcaactctcccaacaacgcgcctatccctccgggaccaacttctaccaaactcaatgagattacggccctccaatggaatcctacagtatctcgagtgttcgctgcatcttcatcttcaggcttcacctctgtttgggatttgaaggctgggaaggagattgttagtttgcagtatggcggtggtgctgctaagggaatggagactgttggtggtgtggccggtcttcagatggggaaaagaagaggtatgagtgatgtttgctggcacccagaacaggcaagtcgtttgagttaggaatggagtatcatgttgatcctttttaggctactcgacttattactgcctccgaagatgacgaatctcctatcatcatgcttttgggatcttcgaaatactcgggccccggaaaaaattctcagcggtcaccacaaaggtgttctttccgtctcatggtgtaagcaggatgccgacctcctcttgtcatgcggcaaagacaatcgaacattgtgctggaaccctcagaccggcgagatcatcggtgaacttcctactagcaatgattggtccttccagacctcttggtgccctagaaaccccgatttactcgctacggcatcatttgacggtcacattggtattcactccttgcaaacaaccagcattccttcccaatctaccgagaagctcagtgaggctgctaccgctgacgacgttttcggtgcactcgggaacgagcagccccaggatgaaactgtcaacgtcttgtccctcaagcaagctcccaagtggcttcgacgtcctgtttcagcgacctttggcttcggcggtcttctcgctaccacttccaatcttcctggagcatctggtaaacaccaatctggagttgttcacctgcgaactgtcaccaccgagcaagatgttctcaaccgcgccaaggcgttagaccagactgacggccagcaagaaaagcttgcaaagttctgctctgagagggccaaggacgatgatgaagcgtggaaggctctgcaggctcttttcaaggctaattcgagacaggagcttgtgcaattgcttggtttctctcaggaggaggttgcgaagaaggtgcaagacgctatcaagaagttccccaacgccatcaaggcagctggtgacgctactccagtcattgctccactagaagaggaaagtgtcaaaactcccactgctgagaagcctgaagctatcgaagacgttagcaccacttccgatgccggcgttgagtctcatgacgacaaatctgagaagtccgagactaaaaaaagcgaaaatggccttttcgacgatgagactgctccaggaacccctgccgctgcagccgctgccgatttcttttcttcaatggcctctggggctctgcgtaaccctcagcttgatagtatcgtctctcataagtctgaagctgcggagtcgtctgtcgcggctaccgtcggcagccgtgcctcttccgtaagagacgagattgtcaacaaggagaacaccttccaaatctaccccgaaggtgagagtgatatcgacaagcttgttacccaagctttggtcatgggtgacttcaagtctgctgtggacgtctgtcttgcttttgacagatttgcggatgctcttctccttgctgttcgaggtggtcccgaccttttgcagtccactcagaatgcctactttgctcagcagaccaccagtcgtcccttcctccgtgtcttccaatctattgtaaccgaggaccttttggacattgttcaaaacgctgatttgtccgaatggaaagtcgcctttgttgttttgtgtacatttgccaaggataccgactttggcaatcttgctgagcaaattggccagcgacttcagtacagatggcgagtgctctctgcctctgacagttccgaagccaaagcatccgccaaaattgctcgtcaggacgccactctctgctatcttgcggctaaaaagcttgaaaaggtcgtctccatatgggttgatgaaatggctgaggaagaggaagccgtttctgctactcgatacacttcccatgcgcaggcgcttcagtcattcattgaaaaggtttccgttttcaaagctgctaccggctatgttgacgaagatttgcttactcccaccgagtcggcagccgctgctgaggccggggcaagaacctacaagcttgccggcttgtacgacagatactatgagtatgccgatttgctcgctactcaaggcttagtggacatcgctgccaaatatgtgaagatgactcctgttgactacaagggcagtgaacaagtgggtgagcttgataaggccaggcagagaatcttgagcgctgctggtgggaatgtcggtactaagatggctcaaacaactgggaaggtccaaagtacggccggttcttccatcgcgagaggttacgcgcctgcccaacaggcgtccgcatatgcgtcctcccagcccgcgtatgctcttcagcagcctacgacttacgctgcttcaaccgcgccagcttatcaagcaccaccggccgccagcggaccttatcagcctgcatccacttcgaccgcttacgcacctcctcaacctactccgtcatacggcgactcaaatccttacgcacctgcgaccgtctaccaaccatcttctgggtatccacccaacggttatcgacccagcgaccctcaaccacaaggatatggtgctcctcaaccctcattcggccaaactcaggcaatgcctcccccccctcgtgtcggtcagaccaatgctcctatcagttctcctcctttgatcccaggctcgcaacaacggggtatctcaggatggaatgatgcgcctaccttcgctccaaagagacctcaaagtgctgccaaggacgtcaagaaggcttctgctattttgtctcctttccccaactctgctgatccacttgccgctgctggtgctgggttgaacactgcaggggcggctcctccccccggtaggtcacctcagcctggtgtgattcctccccctcccaagaacgcccgacctccttctattgccgcgaaggtacaacctccgcctaccgttcaacaacagcaacagttccaccagcatgcgcaacatcaacaacaacagcgacagcagcagttaacttcccctccagcggctgcaggtcctccaccctctgccttctcgcgtccccctccccctggtgcccgagccggtcctcctcccggagctttcgctggtccccctcctcaacgcgccctgtccccattgggtcccggtaggctcagctcgcctccagggagccaaataaggccaccttcagctgtccagagaccccccagtcaacctggacaggtgcagtctcttgatggtggaattacgggaatgggcggacctcctcccccaggctctaggatggctgggcctcctcctggacggtcagctacgcctcagcagcagcagcgacagcagatcattcctcctgctacctcaccgtctcaaacgaaaattcagtcaccctcttctgagcaggtaaagcctcgacaccgtgagtgcattctttttccttcgtgtacaaaaggaattaacatctattgatgaagccgctggggatcgatcccatatccctgaagcttcaaagcccatttatgagattctctccggagaactcacaaaggtgaagcaatctaatattcctgtatgtgcagtcgcagttatgtacaatgttaaatacttattgagtactgtatagcctcacgtcaaacgaattgtggatgacaccgaaagacggctgaacattcttttcgatgggctcaataacgagacagtgccaaagcaggcggtggatatgatgaacgagatttctaagggtcagtga

SEQ ID NO: 1356 - DNA, 5008 bp, Cryptococcus neoformans
atgacggtcacatttccttactcctctgcgcctgtcaaacaggtcaaggagatccagtttggtataatgagcccagaggagatcgtgcgttgttatttcaagccttgccacctccaaaaaagcaatgggagtgacatccgctaatgtttgccacagaaagccttttctgtcgccaaaatcgaatccaccgaggtcttggatgagaatgggaagcaaaaagttggaggtctgatggatcccaagatgggcagtaagtcgtcccgccttgcgcggtgatgaccttgtttaccctttttgtgttttctttgcagccatcgacaggaattttaaatgtcaaacatgtctcgaaggcatgtccgaatgtccaggtcactttggtcatatcgaacttgctagaccggtttttcatcaaggtttcattgtcaaggtgaagaagatcttggagtgtgtttgttatagctgtggaaagctcaaggtcgacatggtgtgttgattcttttatttctagtttgagttggcgctgattgcttggttgtttctctagcgagatccgatggtagcgaatgcggttcgacgtatcaaggctcaacaccgactcaaagccatttgggccctcgccaaggacaagaagcactgtgaacctgatgagctagatgaaaaggacaacggcgatgccacatttgaggacgaatatctgcaggaacaaaaggcggcaatgaagggtcacggtggttgtggtcacgaacaacccgtatggagaaagaagggattaaaattaatgggtgtctggaagcctaccgacaagggagaggggagtttattttcattattttcatccacgggtcattctaaatgttagcaggatgaggctgccgagccagaggaacgcaatatttctccaggggaagtttacaatatccttaaaaagatcactcccgaggacctgcacatcatgggtctcaatgccgactatgcccgtcccgattggatgatccttactgttcttcctgtacctcccgcagctgtccgaccttcgatcgctgtcgacggtggtgccatgcgcagtgaagatgatttgacctacaagctttcacagatcatcaagttcaacggtgtcgtacgtcgaatggaggcggaaggtgtaccacctagtgtcgtgaacgaacagttcgacttgcttcagtaccatgtatgtacatacatggacaacgacattgccggattgcctagagatcaacagaagggaggtagggccatcaaggctatcagggcgaggttaaaaggaaaagaaggtcgtatgagaggtactctgatgggacagcgtgtcgacttttcagcgcgaacagttattaccggagaccccaacttgcaattggatcaggtcggtgtgcccaagagtatcgccatgactttggcatacccagagcgaggtgagttcactgagtactttctgccctcgcatccattgattcacctaaaatttagttactccatacaacattgtctatcttcaaacgcttgtcaacaatggtcccgccacctatcctggtgctcgatactacgtcaaagacactggagaacgagtcgatttgaagtaccgcaagtcaggtgaaccgatcagtttgcagtttggttggattgtggaaagacatttgaaggatggagagtgagttcaatttgtacgaatggaagaagaaagaatctgaattgacaaacgacagttatgtcttgtttaaccgacaaccgagtttgcataaaatgtccatgatgtcccatcgagtcaaattgatgaattattcaagtaagtggattcagtgcgcacatttggacacgcgctaattcgtctgtttagctttccgtttgaacctttcagtgtatgttccgcaagtactttctcaaggcgttttactgacaataatatagtacttcgccttataatgctgatttcgacggtgatgaaatgaacttgcagtaagtacagaaaaagtggagcagcatgggtcgagattgacagatctgcagcgttccgcagagtgaagaaactagagcagagttgagtcagattgcttgggttcccagacaggtatgtgatacgtcaagcgcattcaaatctaagctgatgacggagctagattgtctcgccccaagcgaacaagcctgttatgggcattgtccaggacactctgtgtggtattcgtaaattcactctccgagacaatttcctcgattggcttcaagtccagcacattcttctttggcttccagaatgggacggaaccatccccccacccgccatttttaagcctaaacccatgtggaccggtaaacagcttttatcgatgaccattcctaagggaatcaacatcacctacaaaaacaacgaaaagccttcgcctatcgacgtgacggatgagaatgtgttaatcgagaatggagagttggtgcacggaacgattgtcaagaacatggcgggtagcgccaacaacggtttggtgcacgtcatcttccgagaattgggccacatcgcggctcgagatttcttttcagcggttcagagagttgtcaactattggttattacacttcggtttctccgtcggtatcggtgacacgattgtcgataaggcaactatggcgggtatcaccaatcgaatggtggaggccaaggaggctgtccaaaaattgatccaagaagctgaagcgaaccgaatgaagcccaagcccggtatgacaatccgagaaaccctcgaagcgtctatcgccgcagagctcaacaaggctcgtgattggactggtaagacgactcaggataacctcaaagcggacaacaatgtcaagcaaatggtggtgtcgggtgccaagggttcgttcattaacatttcccaaatgagtggtgttgtgggtcagcagtttgttgaaggaaaacgtatctcgttcgggttccgacaccgctcattaccacacttctcaagggacgattatggacccgagtctcgaggtttcgttgaaaactcgtatttgcgtggtttgactcctcaagaattttggttccacgctatgggtggccgagaaggtttgattgataccgctgtcaagactgccgagactggttatatccaaagaagattggtcaaagcgatggaggacttgaaggttgcttatgacggtactgtgagaaatagtgtgaatgaggtcgtgcagttcttgtatggtgaagacggtatggacggtgctgcgatggagaagcaggtgagcatgatcatctatgagaagaggaaggccgctaacataaaacagagtctggatattatccgactctctgatcaagcatttgagaggcgatacaagattgatgttcttggaggaagtggcttctccaaggggatccttcaagccggtatcgaccaatcatccatctctctccaaaagctccttgatgaagagtttgctcaaatctcggaggaccgtcgtatccttcgttccgaaatctacccggacggtacccccggtcatcccttacctgtcaacatccaacgtgtcatccaaaattctcagcaaattttccacatcgaccctcgtgttccctccgatctggatcccgtttacttgctcgaacaaagagatgcgttggctgatagactgcttgtggtgcgaggtgacgacaagctttcaagggctgcccaaaaaaatgctactcttgtgttcaacatgcttttgcgatcccatcttgctactcgtcgagttctggaagagtaccaccttaacagggaggctttcgattgggtcattggagaagtggaacaaatcttcaacaaggctgttgtcaatgctgccgagatggttggtactcttgctgctcagtctattggtgaacctgccactcagatgacactcaacacgttccattatgcgggtgtggcgagtaagtctgttactggtggtgttccccgtctgaaggaaattatcaacgtcgctgtcaacattcgaactcctgctttaaacgtctatcttgaacccgagtacagcaagaccgaagaggatgcgcaccagatcatgcggaaattgacatacactcgattgagggatattactgccactgttgaaatcttctacgaccccaagcttgactctacggatattgaagaagacaaggactttgtggacgcgttctttgcgatccccgatgaagacatcagactggagctccattccccttggctattgcgtcttgagcttgaccgagccaaggtgcttgaaggtggttatgaaatgtcgcagatcgttgatgccattgccgagaccgtgggcaaagacgtctttgttattcactctgaagacaatgctcccaagcttgttattcgtattcgagtcgttgctgagaaggaggatgaagaactgttgggtgacgaggacatgttcctgaagaggattgaaggcaccttgcttgatcaggttgagcttggtggtatcactggtattactcgagttttcatctcggaaggcaagcaggttgttgtctcccagaacggtgaatacgatcaggagaaggaatggttcctcgaaacggacggtatcaacctgaaggaggttatggctgtcgacggtgtcaatgctttcagaacctactccaacaactgttacgaagtctacgagactcttggtatcgaagctgcccgaaacgctctctacaaagagctcaacggtgttattgagatgggtggttcttacgtcaactaccgacaccttgcgctgttgtgtgacctcatgtgtagcaagggcgctttgatgagcatcactcgacacggtatcaaccgaaccgatgctggtgctctttcaagagcggcgttcgaagagacagtggagatcttgcttgaagctgcggctgtgggtgatgtggatgactgtaagggtgttgcggagaatgtgttgttgggtcagatggctcctatgggtactggtgcttttgatgtttcacttgacatgaatatgctcaaggatgtcattgttga

SEQ ID NO: 1357 - DNA, 5181 bp, Cryptococcus neoformans
atgcctccaaggcgcacaacaagagctgtatctagctcaacagccgctccagcaccatcgacaagaactagaagaggcaggaaggctgctgcgtcatcggctccttctgtggattcagacgaagatgatgggataacagtgacacagggatcaagtgatcaggaggaagcggaagaggcacaggaagaaactaagccgaaagctagaagaggtgtaagcaaagcaaaacccaaggctgtcccagcacctaaaagaaggaacgttggaacatcagtggctttagagaaagaagattctgaggacgagttgggcctgtcgccgcccagaccgaaagtcaagaaggctatcccggctccaaattccagggtaaaagagcagatggttacctcggaggatgaagacgaagcggaagaggagctgcagaatgcccttcgggcccggcgtgcttccactgccactctggcggcttcagaacctcctacgcccacacctcaagctcatgaagaggacgaccgcagcgcgacaccaagggcctcttcaggcgccccagaaattaggattgaaagggcagattccgatgacaatgatgaagttagcactgttggacaaaagacacccacaaagcctcctcgttcttcttctgagaaaccagtgacccctctcagatctccgcatacctccgctcccgctccagcacctcgtcccgcccaatcaggtcccaaatctcggcttaccatccacaagctcgtccttgtcaactttaaatcttacgctggtcgtcaggagattggtccctttcataaatccttttcagccattgtcggaccgaacggtagtggaaagagtaacactattgatgcgcttctgttcgtgtttggttacagagcaagcaagatgaggcaagggaagttgagcgagcttatccacaactcggcgggtaaagagaatctggagagttgctcagtggaagtgtggtttagagaaatcattgatttggtgcgtattttaaaactaagcatggagctccactgatcaaatgcagcctggggccaacgacttccttctagttcccaactctcaaatcattgtcaaccgaaccgcttttcgcaacaactcttcaaagtacactattaacgatcgcacaagttctttcactgaagtcactacactcttaaagggcaaaggcatcgaccttgatcacaatcgattccttattctgcaaggtgaagtcgagtcaattgctcagatgaaggcaaaagcacagaatgagcacgaggatggtcttcttgaatacttggaggatatcattggaacaacaaagtacaaggagccgatcgagcaggcatcattggaatttgaggccttgaacgaggaaagggttgaaaagatgaatcgacttcgggttgtcgagagggaaaaagcggctctagaagtatgacttattgcccatttatgtataggcagttgcgctaacgaggaaactagggtcaaaagcaagaggcagaagagtatctccgagcttctaacgagttaacgaggatgacttcaaagcaatggcagttgtggatgtaccaccttcaaaatcagacagagatcacttccaaggcaatcgtaagcgcttcatcgtagatgataatgacatactaaacactatcgcaggaacgactcgaaagccaacttgccgccgaacaagagcgtaacgcagaacacatcgctacggtcgatgatttgcaaaaagaatatgaagaaagacttgctagcattgcggaagtcaaagcgatgctggataaacttcataaagaggccaagaagtacgagaaggagcaggtcggttatgcagagaagaagaagcacctggagacaaagatgaaaaagatcaaaaagtccatcaccgaggtaagtcaccttggaagatattgatgctgtcgtcgttaacactatccccaggatggccatgccaaatctgaagccttggctgctattgaaagctacactgagcagttggaaagtaaccgtaaaaaggttgctgatctggaggagaagcttgaatcggagcaggctgagctcgaagaggtcgtcgacagtctcaaaggtcggtgactaaaggctgtgatgtatcgtttctgacgtgacattatagataaaactgctgttttcacaacccaaattgagataaagcaacgagagcttgaaccatggaccgccaaaatcagcgaaaagcagtctgccatggatgttgccaagtctgagcgtgatcttcttgccgagaaagctaccggtattctgaaatcaatgcaagaagccgaagagcatttgcaatcattgcgggatggtgatggtgagaagcaagaagagtacgcgaggttaaagaaggaggcgtccaagattaagaaactgactgctgagggcgaggccaaggttgatgtaagtcgttatctaagatagatttcacattgctaatttatcattctagtcaatgacaaccaagtgggatcagctccgaggcaaggtttcagcctcaaggctcaaaactgatgaagcacgagcttctcttgctgctgacaagagcgagaacgctgtgttgagcagcttgaacaagctgcgcgaccaaggtcgtatcaagggtttccatgtacgtgccggaatgttcatatagaatcacgctgacttgtcatatccagggtcggttgggtgacttgggtgttattgatgacaagtatgatgttgctgtcaccactgcctgtccaacattgaaccacctcattgtcgactctgtcaagcagggtgaggcttgcatcgactttctccgtaaaggcaatatcggtcgagccaatattatggttcttgaaaaacttcctcagaaagcgcccaaccctattcagacccctgagaacgttcccagactattcgatttgatcaagcccaaggatccttggttcgcgcctgctttctataaaggtttgggaaacacattagtggcaaacgacttggagcaggcacagaggattggtttcggttcttctcaaaggtggagggttgtcaccctcggaggtcagctcattgacccttctggtaccatgtcgggtggtggtaaccgagtcgcccgaggtggcatgtcttccaagttcaaggccgacaaagtcgctcccgaagttgttgtcaaattggaaaaggagagcgctgacgctgaggctgagctgcaaaagttccaggaagagaagaaagcaattgaatccgaggttgtgagcttgaagaggagattgccggagattgaaatggagatggaaaagattgagctcgatgtctcaacagctactaaaagaattgttgaggctgagaagagattatcggagctcaagtacgttgccaactctttggtttgtctgaaactgacaactgtactagatcccagagcaagcctgatgcgggtgatgaaaaacgtatcaagactctcgacgccgaaattgcctcactcacgaaggaaaccgacaaactgcgcgaaaagtcttcttccatcaatgacgatatcaagtctctccaaaacaagattcttgaagttggtggagttcgtcttcgtgccattcagtcaaaggtctcgattaccaagggccttcttgatcttgccaacgaatctattaccaaggcagaagttggtcaagccaaggctgagagagatgtagagaagcttgaaaagtctattgcgaacaacaacactacgttggaagaagttgtagaggagctcgagctggttgaaagcaacctagaaggctgcaccgcagatttgaacaaggtcattgattcgattcaacaagtaaacgactcgagtgacgatatcaatgaagactttgagcaaagtaaacaactactggaagaaaagcaagcaggcatcaatgcctttagggctttagaggtgggtttctttttcacaacacagaaaagagctaaaggcattgtgcagatggattacaagcagcagattgaagacaatgcgagaaaattgaaagagagccaggaaaagtaccagttttatgagagaaaattggcgggtctagaacttgtctacattgagtaagtatctaaccccctaactccaaggattgagctcacagcaatgtgtaatgcagcgaggatgacgacgaggaggatgacgaaggcgctgtggatgaagagaagaagttgaatgatgctggtgaggcgaatgaagaggatggagcgggtggagggcatgaagatgaagaggctgcagaggcgccttccaggaagaagaagaaacaaagcagcatggaactcgaacagtattctcccgacgaactgcgggctaccaatgagacggcattgaaggcatacatcgccgaacttgaaggtaagtcaaagtgttttgttcccgctctgggttgttgaaacaaggctgacatttggatctgcagatgacgttaagaattcccgaccgaacctcaatattctcgccgagtaccgcaaacgggaagccgagtttctggaccgagcaagagacctcgaaacggttacaaaggctcgagatgcggccaaggcccgttacgacgagctgagaaaggtcaggttggatgagtttatggcagggttcacagctatcactgccaaattgaaggaaatgtatcaggcaagtttgatttctttgggacgcgttgattcaaggaggctaacggaagcaatagatgattacgatgggtggtaatgcagagattgagttgattgatagcatggacccattctctgaaggcaagtcgacgctgcatttggcatatctaacttgctgaataggcgttgtactgtccatcatgcctcccaaaaagtcgtggcgagccattgccaacctgtctggtggtgaaaagacgctggcctcccttgctcttgttttcgcgttgcacgtcttcaagcctacgcctctttactttatggacgaaattgatgcagcgctggatttcaaaaacgtctcgattgtggccaattatatccagtcaaaaacccaggcggcgcaattgtaagtcttgctgtcatgtgggtgtcgagcaaagcgggctaacgagattcagtattgtcatttctttacgaaatgacatgtttgaacttgcgcatcgtctcgtcggtatttacaaaacatccaacgtgggtcttgtcctgcttttggtcttgtcattttag

SEQ ID NO: 1358 - DNA, 5172 bp, Cryptococcus neoformans
  misc_feature (1558)..(1558): n=g, a, t or c
  misc_feature (2174)..(2174): n=g, a, t or c
  misc_feature (3002)..(3002): n=g, a, t or c
  misc_feature (3352)..(3352): n=g, a, t or c
  misc_feature (4952)..(4952): n=g, a, t or c
atgagaagcactacgtctcttcagacgttcctcgtagaatgtaaatacttcctattggctctattattggtccaacctaattcaattgtggtttgtagaaaacatattcagtttcaaccattcacacccaaggatattgtccgaatttcagaagtccaagttagcattgccgagctgtatcagaataatgaggatggaacaagaactacggctcttcaaggacctttggatgcccgtatggtgtgtcttagtcacatatatatatacgcttataaagcgcttaccacgttgcacgtacatacagggacccaacgagaagggaaagaagtgtgcgacttgtggcgaagacactcagaaatgtgttgggcattatggttacatcaagcttgttttgcctgtattccatatcggatactttaggcccaccatcaatatgctctcttgtatatgtaaagtaaggcctttggcatattcttcgtcgccaattactaatgaatgctacagacttgtgctcgtgtccttctaccagagacagaacgcgcttccttccttaaacgttttcgtcgccctaacctcgaatctcttcaacgtcaatctgctgccaaagctgtcctcgcagcctgtaagaagcaaaatatatgtacgtactgcggtgcccccaacggtatcgtcaagaagtccggtcctcttaggatttcgcacgaaccctaccgagcggccaagatggcaagtatgaaggatgagtggatggcgaccttcaaaaatgcggtggcggagaatcaggcggttgcaacgcatttagccaaggctgtggatgatttgaatccgttaaaggtgttaaacttgttcgaaagaattactgcggaggtgcgttcacttcactacatgtttagggcttcgctaatgaattcctaggattgcgagttactatcactacatcctgaagttggtagacctgaagattacatttggcaatacatctctgtaccacctccttgtattcgaccatctgttgcttcagaggctggaaagtgagttttgtcccgtaatccatttggattcttgctgagaacacggcagcaacgaagatgacctgacggccaagctcgccgagattgtcaactataacaataccctggcactcatgatggacttgggtaggggtattgagatgatttcggtgagtagataacgcgaagccaaatttttaaagctaaagggggaaatttagtccaactgggaagtcttgggtcaagcagttgcgctgtatattaactctcaagcacctggtatgcaaaccattggcgtaagttcgtccattaatatacctttttttcgctgagccacgcatagagtaagcccatccgaggtttcgtacaacgcctcaagggtaaacaaggtcgattccgaggtaatctttccggtaaacgtgtcgacttttccggacgaactgtcattggtccagacccgaatctccgtatcgacgaagtcgccgttccagaaaaggtcgccgtcaagctttcatatccagaaagagtgacagattacaatcttcaanttatgcgacaagcgatcatcaacggttcaaagcttcatcctggtgcgaatgtgctggaaagaaaacatgagaatggatccaccgtgcggatctcgctgaatgtcatgaaggatttggaagcgaggaaaagatatgcgagagagttacagattggagatattgtacaccgacatgtgagggatggagagtaagttggaatgatagttaatacggagaggtaatgctaattatgagcagtattgtattgtttaaccgacagccgtctttgcacaagctgtctatcatgtgtcatcgagtccgagtcaggccctggcggacgttccggttgaacgaatgtgtctgtaacccttacaacgccgatttcgatggtgacgaaatgaatttacgtatgtcacctcatcctgtatcaagttagagcactaattgttttgtatagacgttccgcaaactgaggaagctcgtacagaagctctcgaactcatgtcggtcaagaagaacctggttacaccgcgaaacggagaacccattattgctgctattcaggatttcatcacagccgcctacctgctctctcgacgagaccgattctacgatcgacaacagttcacgcagattntttcttacctcgatgatgccaacttgaagattgagatgcctcctccgactatctggaagcctgtcagactctggactggtaaacaaattttcaaccttctcatgcgacccaataaggaatccaaagtactcgtcaatctcgaagctaagtgccgaacgctcgtcgatcccgccaaggaagaccgttttcctcccgacatgtctcccaatgacggataccttgtcatccagaacagtgagatcatgtgtggtgtcttcgacaaaaacacggttggtgacggaaaaaagaactcggtgttcggtgtcattctgagggattacggacctgaggaagcggcgcaggcgatgaacagattagccaagattgcagctaggtggttagcaaacatcggtttctctctcggtatcaacgatgttatccccggtcctatcctccatgcgtctaaggatgcccgtgtcgagaaagcttatgatgaatgtgacgttttcatcgatcttgctaagaagggcaaattggagaatgcgcccggttgtgaccaagaagccactctggagtcaaagatctcaaagacactttccgacgtccgagaagctgtcggtaagatttgtatgcaggagttgagtagacacaatgcccctcttatcatggccacctgtggttctaaaggtaagtcggctgtatcgaatcaagaaggtcattgctgacaaaaatataggttccgtcattaacgtcgcccaaatggttgcctgtgtcggtcaacagatcattggtggttctcgtgttcgaaacggtttccaggatcggtcgcttcctcacttccgcaaaaantccaagaaccctccctccaaggggttcgtccgcaattctttcttctccggcctcactcctcccgaattccttttccacgccatgtctggtcgagaaggtctggtcgacactgcagtcaagactgccgaaaccggttatatggctcgtcgattgatgaaggcgcttgaggacttgtgtacacactatgatctgagtgttaggaattcggttggaggtatcgtgcagttccaatacggtgacgatatgcttgatccggcttgtttggaaggtgatgctacgcctgtggagtacgttcgaagttggacgcatgcttgtgtaagttttctccccccgtcttatgtgtgagaggngctgatgaaagacaatagcgaacggccggtaaccaaggacgagctctgtatccctatgaagttcgccgaatcgctgctcgaatataccccgagtcttttgttcctcccaacttctctctatccccgcctaagaccaagagtcggcgtcgcaaggaacccactccgccgccgcctgtcgttgcacctactctccccaaggagtgggaaggttgtcaccacaagttcagagagaacacctacaagtttgttgtggataagatcgttaagcaaatggttgaccagaggctggcgaggggtttaccggatgcggatgatgaggaaatggcggaggaatacgaggcgttgttgaactcggatgatcgtaagatagctccgttttttcgctgggccaagtcccgctaactatctgtacagctgctgttcagcgtgtactggagaatgccaacaaggttaccgaagctcaactgagttctttcctcgaaaactgtcgtatccgctaccttcgagccaagatcgaacccggatctactgtcggtgccgtcggtgctcagtctattggtgaacctggtacacaaatgacgttgaagactttccattttgctggtgtcgcttcgatgaacgtcacgttgggtgtaccccgtatcaaggaaattatcaatgctgcaaaggttattagtacgccgattattgcggctgagttggccattccagaaagtgaaacggcggcgaggattgtgaaggggcgaatagagaagacagttttgggtgatgtgagtatgcggatatccacatatatgaagatgctgatagaatttttagatcgcggcagtgattgaggagagttggacaaacgcaaacgcctacattgaggttcacattgatatggatgctgtgcgacgactacaggtaggtcttctcgaaggatatgctggccattggaagatgctaatgtttgatagctcgagatttcactggagtccatcaaatgggcattggttagggccaacaagctcaagatccctgagggcgtaagtgcagccactatcctctccgtaattcttactgacgttcctatagtccattcacatttcacaaaagacctcacgtatccgtatttggattgacgaatcagacaaggataagggtgttggtatctacgaacgtctgaaattcctcaagcgcgccatcccttccgttcaggtcaagggtctccctgctattgaacgtggtgtcgttaccaaggacgagaagaacgagaagatccatcgattgcttgtcactggttacggtctgtcagaggtcatgggcaccgaaggtgtcgacggtctcaagactaagaccaaccacgtcatggagactcaacaggttctcggtatcgaagccgccaggtctactatttacaatgaaatccagacgaccatgaaatcgcacggtatgtcaatcgacccgcgacatgtcatgttgttgggcgatgtcatgacctataagggtgaggtgttgggtatcacgaggtttggtgtgcagaaaatgaaagactcggttctgatgttggcgagtttcgaaaagacgacagatcacttggtaagtcttgggagtatcncaccttatctcgttgcgtatagctgactttatcaattccagtttgacgcttctttgtactcaaagaaggacgaaattcaaggtgtatcggaatgtatcatcatgggaactcctgctcctggttgtggtacctctctcgcgtctatcgtcactcccgctccaccactaccctccaagaagcccttgctgttcgaggcggcgtacaaggcgggccagcatag

SEQ ID NO: 1359 - DNA, 5485 bp, Cryptococcus neoformans
atggcagcgccagagaagcctatcgtgttcactgaacacctccaactcacagccctaggcgtccaacccacctccatctccttccaaacactaacactcgaatcagatgcctggatttgtgtcagagaaaccggcgatacacctcaggtcgtcattgtcaacttgaacgatgctggtgatgtcgttaggaggcctatcacggctgattcggctattatgaacccaagagcaaacgagaagatcttagctctcaagggtgggtcagctacccagaggaaagaagaataagcgactgacacgtgtacagccggtcgacagctccaagtgttcaacctcggcgccaaagccaagcttggtacccaccttatgaacgacgatgtgactttctggacttggatcaacaatactactttgggtatcgttaccgaacgagaagtgtaccactggaaggttatggatggtcagactgctcctaccaaggtgagttgagactaagacatttacgcgctaactagcgacaggtatttgaccgacacgccaacctcactgcgaaccaaatcatcaactatagaatatcacacgacgaaaaatggcttgttcttgtcggtatctcttctaatcccaatgccggccaacccggtgagaacggtttcaagatcaagggtgccatgcaactctactctatcgagagaggcgtttcacaacccatcgaaggtcacgccgctacattcgcttccatcaagctcgacggtgctcccaaccctacaaaactgtttgcctttgcagtcaggtctgctgctggtgccaaattgcacatcgttgagattggtcaccaggcacccaaccctcccttccagaagaaggctgtcgacgtgttcttccctcccgaggccctgaacgactttcccgtctctttgcaagtctcccagaagcatggtattctctacctcgtcaccaagttcggtttcattcacctttatgaaattgaaactggtcagtgtatctacatgaacaggatttccggcgagaccattttcaccaccgccgagtatgagacattgtcaggtatcatcggagttaacaggaagggccaagttttgagtgttagcgtggatgagcagactattgtgccctacatccaacgtgagttcatcatttgctagagctctattgacaatacagaaactctcaacaacccggagctcgctatcaagcttgctactcgtgccggtctccctggggcggacggtatgatccaacagcagtatcaagtttacatccagaacggccagtacggcgaggctgccaagattgccgccaactctccccgtgggttgttgcgaacccctcaaacaattgagacgctcaagaatctccccgctgttcctggtactcttactcccatcttacagtactttggtattttgctcgagaagggagagctcaacaagtacgaatctcttgaacttgcccgccctgttgtccagcaaggcaagaagcagctcctcgagaagtggctcaaggagaacaagctcgagagcagtgaggagctcggtgacctctgtcgaatggccgatatgaacctcgctctatccgtctaccttcgtgccaacgttcctaacaaggtcgttgcttgtttcgctgagctcgggcaatttgacaagattgttctctactccaaaaaagtcggctatactcctgactatgctcagcttcttcagcatcttgtgcgtatcaaccccgacaaaggtgccgagtttgctacacagctcgtcaacgatgagaacggccctctcgttgaccttgaccgaattgtcgacatcttcatgtctcagaacatgctccagcaagctacttctattctcctcgacgctctcaaggacaacaagcccgagcaaggtccactccagacaaggttgcttgaaatgaacttgatgagcgctcctcaggttgcggatgccattttgggcaacgaaatgttcacccactatgacaggcctcggatcgccaacctcgctgagaaagcgggtcttgtgcagagggctttggagcattacgaggatatcaacgatatcaagagggttgttgtacacaccaacttgttcaagcccgagtggctggtggactactttggacgactcactgtcgagcagagctttgcttgtttgcaagaaatgttgaggacgaacttgaggcaaaatttgccgatcgtcgtgcagatcgctaccaagtactctgacttgcttggttctgtcaagctcatcgaactgtttgagcagttcaagagttcggacggtaagtcgtccggctagagattggaatttgaataataagctgacacagagtaggtttgtactactatctcggttccattgtcaacctcagcgaagaccccgaggttcacttcaagtacattcaagctgctacccgtaccggccaaatccgcgaggtcgagcgtatctgccgagagtccaacttttacaaccccgagaaggtcaagaacttcctcaaggaagcccgtctcgacgaccagctccctcttatcattgtctgcgaccgatttgactttgtacatgacttggttctctacctttaccagaacggtttgaccaatttcattgagatttatgtccagcgagtcaactctgccagaaccccccaggttatcggcggattgttggatgttgactgcgatgagacaaccgtgaagaacttgttgatgagtgttaccggcaccttccccattgacgatttggtggatgaagtcgagaagcgaaacaggctcaagctcatcttgccttggctcaacaacaaggttgagcagggttctaccgaccacgcgatttacaacgccatcgccaaaatctctatcgactcaaacaacaaccccgaaaaattcctcaaggagaacaacctttacgaccccgctattgtcggcaagtactgcgagaagcgagatccttatctcgcctatattgcttatgccaagggcttctgtgacgacgagctcatcaatatcaccaacgagaaccagatgtacaaacatcaggctcgatacctcgttaagcgacgcgacgttgacctctggacacaagtcctcaatcccgagtctatccaccgccgtgcccttatcgaccagatcattgccactgccatccccgagtgtgtcgatcctgatgatgtgtccgtcaccgttaaggcattcatgcacatggaacttcacggtcccttacttgaattgctcgaaaagatcataattgagccatcacctttcagcgacaaccgctctttgcagagcttgatgttcctcaccgctatcaagaacgacaaaggcaaagttatgggttatatcaacaagctttcaggatatgacgttgagactatcgccaaggtcgctaccgaggccggtctttacgaggaggcgttcacaatttatcagaagcacgacatgcacgccgaggcaatgagcgtccttgttgaacatatggcttccattgaccgaggcttcgcctatgccaacaagatcaacgagcccgctgtctggagcagactcggtaaagcccaacttgacggtttgcgtgtcaaggaggctatcgactcttacatcaaagctgatgacccatccaactttgaggaagttattgagattgccaaccgagctggcaagcatgacgacctggtgcgatacctccagatggctaggaagactgcccgcgagcccaagattgacactgagctcgcttacgcttacgccaagactgaccgattgcacgatatggaagagttcctcggtatgaccaacgttgccgacgtcttgcaggttggtgagaaatgtttcgatgatgagctttaccaggctgccaagctcttattctcaagcatctccaactgggctaggttggcaaccactttgatctacttgggcgagaaccaggcggcggttgacgcagctaggaaggctggtaacactcaggtgtggaagcaggttaacgctgcttgtgtggataagaaggagttccgattggcgcagatttgtggtttgaaccttgtcgtatgtctccttttctcttagggattcaaagagtgatatgctgatgaaatataggttcacgccgaggaacttcctgctttgttgtcactttacgagaggaatggctactttgacgagattatctccttgatggaggccggtttgggtttggagagggctcacatggtgagatctttttattcgcatgctagcggtggtttgcatgctgactcttgtgtgacagggcatgttcacagaactgagtgtcttgtacgccaagtaccgacccgagaagcgtgcgtattcttattgattggggaatgcgagctaacattgggtcaaagtcatggagcacttgaagctcttctggcagcgtgtcaacattgtacgtaccttctgtctcaaggacgaggcggcctgtactaacattgttgcagcccaaagtcatcaaggccgcagaacaggctcacctctggcccgagcttgtcttcctctacattgtctacggtaagtttcccacatcttttaagatggatggaaatcctaatgcgcagatgtagatgaacccgacaacgcttctttggctatgatggagcgactcgccgactgggaccacgatcaattcaagaaggttattgtgaaggttgccaatatggaaattgcctaccgggccgtgtccttctaccttgctcgacaagtaagtcatcttacattggactttacaatcaatgctaatccaacgtctgcagcccaccctcctccccgatcttcttgctgctcttaccccccgacttgaccacagtcgagttatcaagatcctccaaaccgaagaccacctccctctcgccaaaccttacctcatcgccacccaaaagctcaatctcgccgtcatcaacgaggcttacaacgacctgcttattgaagaggaggatcatgtcactttgcgaagcagtttggagacttatgatgagtacgatgcaattaagttggcgaagagattggagaagcacgagttgttggagtttaggagaatcgctgctttgctttaccgagtgagttgccctgccatggattgggtaaccaagacattagctaatatttgttctagctcaactctttgtgggaagagtctatttctctctcaaaggccgatagattatggcgagacgcccttgagactgctgctgcgagcaaagacattgccgtttgtgaggagcttgcaggctactttgtttctattggcaacaaggatgctttcgctgctattctctatgtctgcttcgagtttgtccgagctgactttgttgaggaaatggtacgtcttcaccccatacttgtttcttagcaatcactgatcagggatgaatagtcttggcgattcggcttgtcagattactctatgccttacaaactccagcaacaacgagatcaagctaccaaggttgcggcgcttga

SEQ ID NO: 1360 - DNA, 5884 bp, Cryptococcus neoformans
atgctgcgacgtccttcggtggccagagggggtgatatggcatttaagggaagtgtaaacgtttcccattcccatacctcgttaccctccatcgttgccccctctctgccgccgacaccatctcgacagcaggcttacgcccgtccaccttctacaattcaaggacaccgctcacggagatcgtctacagcaacgacactttccttgtctaattttggccccaattctcctggtccccagctctcaaccgttctaatcacccccccacttcaacttttggtcagttctaaggaggcaaagaaatctccgtcgttccatgctgcggctcagcgtgcattagacctgtgtcaaagcagtgaaggggcaaatgcagcctatcttcatcctcgcgaaatatttgaacccttacggcttgcaatctccaatcctcagactacatcggtcccgatcctcgtgacatctctcgatctcctttcaaaacttatatcccactctttttttgccgaacctcatggccctccccctggactccctcctcttccagatcttataacccacactattacactttcatattctgaaagctctccgccccaagtagcccttcaggttgtcaaagcactcatggccattgtcctttccaccgacaaaggcatgcttgttcaccaatcatcccttctgaaggctgttcgtaccgtttataatgtcttccttctttccaatgatgccgcaaatcaggtcgttgcgcagggtggtctgacacagatggtgcaccatgtgtttggtcgagtgatacggcccgatataaagaatgcaacgcctgaaagcggcagaggaagtgtcagtgaaaacgaggcaagaagaaggagtggagtgatgcaggagagcaccacagcaggatcgttaccttcaacacctgcaccagagagacatgatagcgtgaacggaaagatgacgctgtgagtagctttcgccagccgtggtctgcctgcggctgactagtaatcaagcgaatctttcgctgcagagaatcctaacgactctatcccggtcgatcgggcccctatcactgattctgtgaatcacgacgcagcagccgaggccgatattgaagttgaggcgcctcgtcttccgcagcacactgtttcgataccagtccctgccagtgttgctgattccaatggtgcaccttcaaaccaacaagcagggcaaggaatagacgaggaaggtggttcgttcgatgcgatgggcaggcccataccaactgaacagctgtttgtcaaggacgccttcttggtgttccgagcactatgtaagctcacgatgaagcctttagtaacagacaggtaagtggatctccttttagtaaccatccaactgatgtctttggcagcgagaaagacctgcgatcacatgccatgcgatccaaactcctctctcttcatcttgttctcaccatacttcgctcccactctgacatttttgtgaatcctctcgtctgtataccgtcgaactcgtctctagagatgactccgttcctacaagcgaccaagcaatatctggcgttgagtctttcaagaaacgcattgagccccgtgaaccaggtgttcgagctcagtgttgagatcttctggtgtatgttgaaggatatgagggcacaattaaaggtaagtcaatgacaatggtcctgtacgtcagttgaccttgaagagtagaaggagattgaagttcttcttaacgaaattttcatccctatcctcgaaatgcgccattctactatccgtcagaaatctatcatcctcggtgtctttattcgcctctgtcatgatccgcaggcccttgtcgagatttatatcaattacgactgtgatcgttcatccctcgaaaatatatatgagcgtttgatgaatatcgtctcaaagatcggccagacacatttcgcacccccaagcaaagaggaactcgcccaggggggttcaagcaaacagacaagtggatcaagtggacctgctataccaccatcgctgagcacctcggcccttggagaaggtgtaggacacaatgctcctcattacgctggtatgccaccggagatcaagttgaggagacagtcgttggagtgtttggtcgctgcgttaaattcactcgtggcctggtctacttcaaaccctggtaccaaagcagggaatttggaggaaaaccactctacaactgatgccgtcgggaggcatcatgcttctggatcagtttcgggttccattgccgaacttgttgctccaacacccatttggccaacagactcgtcgttgaaatcgtcggtttcaggtatggcatccggtatgaatacacctgatttgggagaggatgacgtgggcaagtttgaatccgccaagcagcgtaagacgaatctgcttgagggcatcaagaagttcaatttcaaaccaaaacgtggtattgcctacctcctcgaacaaggatttatccggtccaactctcccgtcgacattgctcgattcctccttaccaatgaagggctaaacaaagctatgattggtgaatatcttggtgaaggtgatgatgagaatattgcgacaatgcacgccttcgtggacatgctcgacttctccaatatgcaattcactgatgcgctccggatgtaccttcaatcattccggcttcctggcgaagctcaaaagattgacagatttatgctcaagtttgccgaaaggtacatgcacagtaacccctcatctcatttcgctaacgccgacaccgcctacattcttgctttttctgttatcatgctcaacaccgatgctcataacaaaaatttaaagcagaagcgaatgaccaaacaagagttcgtgaagaacaacagagggatcaatgatgggaaggatctgccggaagagttgctggctgggatctacgacgaaattacgaccaatgagatcaagatgaaggatgaggttgaaatccctcaaccggcaacttctggtggtttagcaagtgtagggagggatctgcaacgagaggcgtacgtggcgcaatcagagaacatggctagtaaaacggagtcgttgctcaaagcgatggtacggcaacagcgacgaggcgttgttcgtccgacagatcattatcacacggcgtcacgtctggaacatgtgcggttcatgtttgaagttgcgtggatgcctttccttgctggtatctcagctccattgcaagagaccgacgatatggacgtcgttgatctctgtcttgaaggtctgcgttctgccatccgtattgtctgccttttcgatatggaattggagaggaatgcctttgtcacgactctcgccaaattcacttatctcagtaatgtagcggagatgaagccaaagaacatggaagccatcaagagcttgttagatgtggctgtgacggatggaaactacctcaaggcctcgtggaaagatgtgcttgtatgcgtaagtcaactggagaggatgcagttgatctcgagtgggatggatgtacccgatttaaacaggactgtgtatgtaacttcggctggaagcatatgatcatactaatggagccccaggacaacatcaaccgacaagagaaagccatcgtcatcaaagaagaaggtcccaacggaggaggtggcagaagagtctagatcttcccaggttactgtagcggcagatatggtgttttcaacaagtaaaaacttgtctggcgtgagttatagttgactttattaagtcgttccagctgatattgttaaactagtccgcgattgtcgattttgtcaaagccctgagtgaagtttcctgggaggaaatccagtcttcaggttcttcggctcgccctcgaatgtttagtttgcaaaaactcgttgagatttcatattacaacatgggtagaatcaggctggaatggtctaatatctggttaatcctcggcgagcacttcaatcaggtcagtttatatcttcaggcgcgttaccagcctgtcctgttaatgacactgaatttgctttaggtttgctgccataataatcctaacgtcagcttctttgccttggatgccctaagacaactggccatgaatttcttagagaaggaggagttgtcgcatttcagattccaaaaagattttctgcgaccatttgagtataccattgtgcacaacaagaactctgacgctcgcgagatggtgagtgttttgggctgatttacgccgtgaacgattataaccggttatattaggtcttacaatgccttcaacacatgctgcaatcgcgtgtacaaaatcttcgatcaggctggaggacgatgttcggtgtcttttctgccgcttccaaagttgtcacagaacgtgtctgcagctacgcattcgaacttgttacactggtttaccgcgactacttctccctagtcgtcaaatatggctccttttcggatctcactgtttgtatcacggatttctgcaaagtatccaaatttcagaaaatcagtctacaagcaatcgagatggttaggggtttagtaccaactatgctacagtgcccagagtgtctcttgccccaattaggtgacgagggtaaggtacagcatggcgatgacccaatggtgaagtactggcttcctgttcttcactcattctacgaaattatcatgacgggagaagacttagaagtcaggcggctgtgagtttgctccattatcgtgacataggagcaaaggttgacgctcgatccagcgcccttgattgtctctttgacactttaaaaacacatggatctgggttctctgtcgacttctggaacatcgtctgccagcaagtccttttccccatcttttccatacttcgggccaaatccgacatccgcttcaagtcgcctgaagtccttagtatatggttgtcgacaacactcatctctgcgttaagggatttgattaacctgtacaccgtctattttgaggtaatgcaacggtatctcgatggtttgcttgatatcttggtagcttgcatttgtcaaggcaagtaatcaactcgtgagtaatatgctgcggctgacgattatcttcagaaaatgatacgcttgcgcgtattggcacatcctgttttgaacagctcctagaacaaaacgttcggaagctcagcccagagaaatggatgctcattgtgtcggcattcgtgcagttgttcaagactacgactgcgtatcagctatttgatcccgtgatgtgttccgagattgagccgaccggcaatatggacgaaaatgacggtaggtggtagtaacgaagtggtggtaacatcacattgcacaaagcgggttaggctaacctttaggtatagctcccttccagaaattcgtcgccccagccccccttgagcctgcaaccgataaacctccatctcttccttccaccatcagctacggcgagcaacgacgtatcttcaagcaagtcatcgtaaaatgtgtcctacagctccttctcattgagaccacccatgagcttttgcagaacggcgaggtgtacaataccattcccgccgagcacttgctgagattactggacgtgctagacgacagctggagtttcgcgagaaaatttaatgctgataaggaactgaggatgcagttgtggaaagttggtgagtacctttttagtgagaaagaaaaccaggagctgctgctgatcctgaatcaaggcttcatgaaacagctgccaaacttactgaaacaagagtctagcgctgctgcgactcttgtgaatgtcttactgaaaatgtacaacgatccaagagaagcccacagggcgacccgaaaggacgttgttaagagactggtaccgtcagtggactcttatctttctctgcttga

SEQ ID NO: 1361 - DNA, 7584 bp, Cryptococcus neoformans
  misc_feature (4488)..(4488): n=g, a, t or c
  misc_feature (6559)..(6559): n=g, a, t or c
atggccgccctcttctcttccgcagcgccgatgcgccccctcgtcctccacgacgccgcaacgcgcgtctccgtacacgtcccagcctctccgctctccgcctgggtcacatcccaggtagtcgcccaggacttccaggactccatcgtcggccaacacacgcccgctcccgtcgccgacgaggacgaagagcccagtgcgccctccgttgagccccaggtcaagctcctcgcccagttcttgagctttgtcgccgacagggccgtccaagatgcctctcatgaactttcagaggtgctgctcgctgcctacaacaggttcaacgagctcttcctctccgccaccaacgtccactctctcgtccagtccttcgaccccgagacccgagcagagatcctcaaggcttacttcaaggcctttgcgactgccagggagcagctcggtgacaaggtgcagatcgctcacccttcggctcttctcgaggctgccaaggatggcagcacagagctttacgctttgttcggtggccagggtgtcaacgaagtgggtggattgctgttgaaatgatggctcctcgctaaccttttgcgtagcactactttggcgagctccagttgctctatgatacttacacgcctttcgtcgctcccatcatctctgagattaccgacttgttgatctctctcggccacaaggctgacaacgacggctacacctactattctcaaggcctcgacctcctctcgtggctcgacggctcttctcctcaacctagtgtcgagtactttgcctctatccccctttctcttccccttattggtgtcgcccagcttgcgcaatacgtcatttcttgccgagtcactgacatctccccagcggagatgcgagaaaggttcaagggtgccaccggtcactctcaaggtatcgtctctgctgtcgccatcgcttcctccaacagctggtctagcctgtacgagaacatcctcaaggctgtgaagcagctcttttacattggtctccgaggccaagagggcttcccgctcctcgctatcgaccccaagatcgtttctgactctgtcgagaacaacgaaggtgtccccactcctatgctttccatcaacggtctcggcctcaaggcgctcgagggccatatcaaaaaggtcaactctcaccttgcttccaactctcaaatcggcatttccctccacaacggacctaccaactttgtcgttaccgcccctgccaaggcactctacggtcttgtcaccgctctcagaaaggtcatggcccctgccggtctcgaccagagcaaggttcctttctctaagcgaaaggctgttttcactatgaggttcttgcctgtcaacgttccttaccacagccactaccttgaaggtgctacccagaaggttgagaaggacttgggcgaggaattgtgggatgccaaggctttaggtatggccatctaccacactgaggacggtaagtcattttttttgtgtacgcatccgggttcacaaaggcttacaataaaaataaaaacaggctctgacctccgatcctccgaaatctctctcaccacttctctttgtgaccagatcttcaccaggcccatccactgggtcaaggcttgtaacttcccttctactgccacccatgctgtcgactttggacccggtggtaacagtggtatcggacctcttactggccgtgccattgaaggccgaggtgtcaggattgtcgtcgttggtgaaaagggcaaggccgctgccgagttctacgacgctaccaagatccgacgtgaacctgtctgggccaaggaatggtctcccaagctcgtcaagactcttgacggcaaggtccacattgacactcccttctcccgattgctcggtaaacctcccatcatggttgccggtatgaccccctccaccgtcggcgccaaccttgtggctgccactcttgacgccggctaccacattgaacttgccggtggtggtcactacaaccccaaggctcttcgagccaaggtcgctgaaatccagaggcgggtcaagcccggagttggtatcacactcaacgctttgtacatcaaccagcgacaattctccttccagttccctctctggcaagaaatgcgcaaggaaggtctccctatcgaaggtttctgtgtcgctgccggtatcccctcctctgagaaggctactgaaattatcaccgccctcaaggaggccggtatcaagcacattgccttcaagcccggatccgttgaaggtatcaggcaggtcgtcaacatagccgctgccaacccagactaccccatcatcatgcagtggaccggtggtcgtgccggtggtcaccactcttgtgaagacttccaccagcctatcatcgctacttaccctgcgatcaggcagaaccccaacatcagcttgattgccggctccggtttcggtggtgccgaagatgtctggccttagtgagttgtggctttgcagtttagatttttttaatttttttttttggctgacgaaaaaatcgtagcctttccggtgaatggtccgtcaagatgttcggtctccagcctatgcccttcgatggtgtcctttacgcctcccgagtcatggtcgccaaggaagctgacaccagcgcttccgtcaagcagctcattgttgacgctcccggtgttgacgacgcccagtgggaaggtacctacgacaggcccaccggtggtatcctcaccgtcagatccgagctcggcgagcccatccacaagattgccacccgaggtgtcaagctctggagagagtttgacgacaccgtctttgcccagcccagggagaagagggctgcttggctcgagaacaagcgtgactatgtcattgacaggcttaacaaggactttaacaagccttggttcggcgagaagtctgacggcactgtcgttgccgacattggcaagatgacatacgaggagattaccaagaggatggtcaggttgatgtacatcgccaagcaggacagatggatcgacgtttctctccgaaaccttgtcggcgactggttgaggcgagttgaagagagattcgctggcgtcgacggtatccgcaccaaggagtcccttctccagtccttctccgacctcgacaagcccttgcctactatcgagtctttctttggcacttaccctcgagccaagtctcagcttgtcgctgccgaggacaaggccttcttccttgccatctgtcaacgacccggccagaagcccgttcctttcatccctatcctcgacaacaactttgaggtgtggttcaagaaggactctctctgggctgccgaagatgttgaagccgtcttcgaccaagacccccagagagtctgtatcctccaaggccccatggccgtcaagcacgctactgttgttgacgaacccatcaaggacatgcttggcaacattgaagctctcttggtcaagaagatcttgaaggagttctacaacaatgacgagagcaaggttcccgagattgactttatcggcgccaaacccggtaagcccaaggctggtctcgtttccgagtccgtctctggcgacgtcaggactctcaaggtcggcaagaacgtccccgctcttgacgactggctcgaggtcgttgcgggtgccaacgttagctggcttcgtgctgctttgacctctgtcaacgtcgtccagggagctggctacatctccaaccccttcaggagaatcttcagcccccgagctggccagactgtcgtgatcaagtctgagaacggcaaggctgtctctgtcaccgtttacggtgcagccaggtctttcggtcctcacgcggccgacttcaaggctgtcgagctcactttcaactccaacactaacgccatgtctctcatcatgtacgaggagcgacgaggtgtctctgtccctctccatttcgcctttgcttaccaccccgagcaaggctacgcccccatccacgaagtcgttgaaggtaggaacaagtccatcaaggacttttactggaggctctggttcggcgacgacgaaaagttgccctctctcaagcttgacactaccttcacttgtgatgagagcaaggtcgatgccttggccgtccagaggttctgtgacgttgtcggcaaccagggtgaggcgttcaagtctgctaggaacgagaaaatcatggctcctatggactttgccatcgtcctcggctggcaggtatgtttcttattattattttttgcggaattttaggcaaatgctaatggtcacttatgcagtccgtcatgaaggccattttccctgatgacattaacggtgaccttctcaaacttgttcacctttccaacggtttccgaatgatggatggtgttgcgcctctccgagctggcgacgcttgctctgccgaggcacgtgttgtctctgtcatcaactctgacagcggcaagactgtcaaggtgaagggttacgtnctccgtggcggcgagcccgttatcgagatcagctcttccttcctctaccgaggcaagttcaccgactacgagaacacctttgagactatcgacgaggatgactacgtcgttgagctttccaagcccacttctgttggtatcctccaggcgaagccttggttcgaatgggatgatgactcggttcccctcgatgtcggtaccacccttactttcaagacaaagtctgaattgaggtacaaggacaagtccaccttcagctctgtcaagatcagcggcgccgctttcatcagggacagcaccaaggccctcattcaggttgccaccatcgattacgaggcccacaacttgcagggtaacccagtcattgagtacctcaagcgacacggtactgccgtcggcaagcccactcccttggagaatggctactcccttatcgaggaccctaccgccgccgtcttcaccacccctgccaccaacgagccttactccaagatctctggtgactttaaccccatccacgtcaacccctacttctccgaccttgcttctttgcctggtaccatcactcacggcatgtggtcttctgctgccacccgaaagtacctcgagagcgtcgttgccgacaaccaccccgagcgagtcgtttcttaccaggtcggctttgtcggtatggtcttgcctggtgatgagatccaagtcaagcttacccacaccgctatgagggacggtaagaaggtcgtcaaggttgaggccttcaatcagcgtggtgagaaggttatcgacggttccgccgaggttcttcaaccccctaccacttatgtcttcaccggccaaggctctcaagaggttggtatgggtatggagttgtacaacaactctgaggttgcccgcgccgtctgggacgttgccgatgcgcaccttacttccacttatggtttctccatcgttgacattgtcaagaataaccctaaggagcttaccatccatttcggtggtatcaagggtcaggccatcaggcagaggtacatggacctcacctacgacatcattgacgagaacggtcgagttaagaccttgcccttgttcggtgacattgacctctacaccacttcttacaccttctcccaccctcaaggtctccttttcgctacccagtacactcagattgcgctcgtcgttactgagaaggctgcgttcgacgacatgaaggccaagggcttgattgaccagaacgccgctttcgctggtcattcccttggtgaatactctgctcttgctgctatcgccgatgtccttcccatctcatctcttgccgatgtcgtcttcttccgaggcatcaccatgcaacgtgctgtccagcgtgatgccgagggcaagtctcagtacgcgatgatggctgccaacccctctcgagttggcaagactttcaacgagatggctttgcgagagattgtcgacactatcagccagcaaaagtctgttctcctccaaattgtcaacctcaacgttgccaaccagcaatacgtctgcgctggtgaacttcgtgctctcgctacccttaccaacgtgctcaacatgctcaagatccagaagatcgacctagagaagcttagcacaatgatgagcattgaggaagttaaggagaagttgggtgagattattgagggctgttgggacatgatgaaggagaaagaggagaaggacggttctgtcatccttgaccgaggtttcgccaccattcctttgcccggtatcgatgtgcctttccactctaggtacctctggcccggagttctctctttcaggaattatcttgtcaagaagattgacccctctcaactcaaccctgacaggttgatcggcaaatacatccctaacttgatgtaagtctttttctcggtgtgaatccaccatgcactgacggttgtatagcgccgagcccttcgaggtttccaaggcttacgtccagaagatctttgaccagaccgcttctccccgaatggagacagtcctcaataactgggagaaggaggcttgggaatccccctcccaaaggcaacgattggcttanaacatcttgaccgaatgtcttgcttaccagtgagtttgattgtagatcatagcattggtgatactaattggccatttagattcgcctcccctgtgagatggattgagactcaggacgttttgttcacctacgccaagttcgagaggttaatcgaggtcggccctagccccgtcctttctggtgagtgcccacagcccattgtacaatcatctacagaaccagcttacgcttgcgtcaaggtatggctacccgaaccctcaaggccaagtacgaggcccaggacggtgccatctctcttcaacgacagatcttgtgtcatgccaagaaccagaaggaggtctactacgcgtttgaggatgaggctgctgatgaggctcctgccgccgctgctgcctctacctccgctgctcctgctcctgtggctgcgcctgttgccgctgcccccgctcctgttgccgcttctgccggtcccgctgctgctgttgaggatgttcctcccaaggccgtcgacactgtccgaatcattgttgctcagaagctcaagaagcaggttagcgaggtccctcttagcaagtctctcaaggagctctctggtggaaagtctaccctccagaacgagattcttggtgacctacaagttgagttcgcctccgcccctgaaaagggtgaggatctccctctcgacgagcttggtgctgctcttagcgttggctacgccgctctcggcaagcactccatggctcttaccaaccgaatggttgcctccaagttccctggtggattcaacatcaccgccgctcgagcccaccttaataagcaatggggtcttggtcccctccgaaccgactctgcgttgttcttcggtatccttaacgaacctcccaagcgtctcggttctgaagcagaggccaaggccttccttgaccagcttgctcagagctacgcttcttacagcggtatcagcctctcatctggtgctgctgctggtggagctggcggtgcggccggcggtggtgcggtcatga

SEQ ID NO: 1362-2000 - skipped (639 entries)

SEQ ID NO: 2001 - DNA, 279 bp, Cryptococcus neoformans
atggccaaccttggtgttcccgtcaagctcctccacgagtctttgggtcatattatcactgtcgaattgaaaactggcgagatgtaccgaggaaagttgatggaggccgaagacactcttaacattgctctccgtgaaataaccgtcaccgcgcgagacggccgtgtatcccaactcgaacaagtgtacatccgtggtagtatgatccgattcataatcgttcccgatttgcttgcccaggcgcctatgtacgtgtcttcatctcaattccgctcctaa

SEQ ID NO: 2002 - DNA, 312 bp, Cryptococcus neoformans
atgacaagattcacatccgtgagtcgccacatctctctcacatcttgcagctctagatatcctaaccgctacgcaggtctccaacagcgtaacggtcgaaagacccttaccactgtgcagggtatccccagcaagtacaaccactccaagattctcaaagcgatgaagaaggagtttgcctgcaacggtaccgttgtcaagcccgaagttgactctggcgaggaagactctcctgcccccgtcgccaaaaaccacggtgacgttttgcagctgcaaggtgaccagagggtcgccgccaagcagttcctctga

SEQ ID NO: 2003 - DNA, 345 bp, Cryptococcus neoformans
atgaaggtggaaataaattcctatcgcgcggtagcctactggatttgggacgtttccgacgaacctcacaagctttaccactacgcgccgccggacgaagttggcctcgacgatgacgacgatcaggacgtctgcggtatatgccaagcggccttcgagagcacttgccccgattgcaaaatacccggcgatgactgtcccttgatttggggggaatgcacccacgtttttcacatgcactgcttgttgaaatggatcggtcagaaggaagatgaatcacagcaacaatgccccatggacagaagaccttggggtaagtcttctattaaaagtctgtgctcttaa

SEQ ID NO: 2004 - DNA, 357 bp, Cryptococcus neoformans
atgctttcatttttcagcatcatgcctccagcacccacagttcaacaaattcagagcctctattcagccactgtcaatgcgtcccagcgcttcacttcttataactttcataaatactttcttcgaagagccgacgaagtattcaaacccgtccttgcctcattagctccacccgctggttcggcaccttcagatcctatagacccttccagacttgctcagttttacgaacagcaaaagactcaacttgagatacttgagagggcttcagaagttaacaggatgtatgaaggaccgaagttggtagtggaatgctcagcctataacaagtggcggaggggctggtatggaagctag

SEQ ID NO: 2005 - DNA, 390 bp, Cryptococcus neoformans
atggtcaaggctattgaagtcttacgacgagtggaagactctcgtaagctccatcccttagaattgtggtcgctatccgctaacccgtctcacacacagacttctggctccgatgtcgtcgtcgtcgactactgggcgacttggtgcggtccttgcaagatgatctctccccactttgccaagcttgagggcaagtttcccaatgtcaagtttgccaaggtcgatgttgaggagcaagaggacattgccaaggaggctcaaatcaaggccatgcctacttttgtcgcctacaaagacggcaaggtgattgagactgttactggtgctgtccccgcaaagatcaatgtgggtctatactcgttttttttgcgatgtcttaggtttggctga

SEQ ID NO: 2006 - DNA, 360 bp, Cryptococcus neoformans
atggccgagtacaaggaagacctcgaaaagactggcgccggtgcccagaagatccacaagatcaggatcaccttgacctccaagaacgtcaagcctcttgagaagttctgtgccgacctcatcaaccgtgccaaggaccgagacctcaacgtcaggggccccgtccgactccccaccaaggtcctcaagcacaccaccaggaagtctccctgtggtgagggttccaagacctgggacaggtaccagatgcgaatccacaagcgtctcatcgacctcaactcttctgccgacgttgtcaagcagatcacctccatctccctcgagcccggagttgaggttgaggttaccattgctgcttaa

SEQ ID NO: 2007 - DNA, 408 bp, Cryptococcus neoformans
atgccttcaaaaggactaattcgtacccgctgtaggtttttgatgaagctcaataacgagacggtcacgatcgagctcaagaacgggactgtcattcacggtaccatcacttccgtggaccctcaaatgaacacccaccttaagtccgttaagctcactctccgttctcaaccttcatcccaaccacctttgtccctcgactctatagccatccgaggaaataatatccgatacttcatcctccccgactctcttcctcttgatactttgttggttgacgacgcgcctaagcctaagaagaagaaggaaggagctgctgctaggggagctagaggagcagctaggggagcaaggggagccaggggcggtggccgaggcgcgcctagagctagaggaagaggtttctag

SEQ ID NO: 2008 - DNA, 396 bp, Cryptococcus neoformans
atgtcccaacccatctccaagcttgacaatccaagtactctccttcaatctgtctcctcaaatgccgttcacgaaaagatcactatagtgcgtcttgtggccaattgacatgaacccgattactcagcttgtacttttgctctctggcaagaagatcatactcttggaaatgctttgcgatggattatcatgaaggaccccgaggtggagttttgtggctacacagctcctcacccgtcagaacccaagattcatctgcgaattcaaatgtacgagaaccaatccgccgtggactgcttacggagagctctctccaacttgcgtgatcttctcaatgctgtgaacgattcttatacttccagtttacagtatgtttgcttatttcatgtcgtataa

SEQ ID NO: 2009 - DNA, 381 bp, Cryptococcus neoformans
atgtctgctgctgatcacggacgagacccctgcccgtatgtcatcttgaacgatttcggcggtgcgttctcgatgggtgcgattggcggtggtatctggcacggtatcaagggtgcgagaaatagccccagaggcgagcgtctcgtcggatccctctctgctatcaaagcccgtgcgcccgtgctcggtggtaactttggcgtttggggtggtcttttctcaacttttgactgtgcggtcaaggggtataggcaaaaggaggatccatggaacgccatcatctctggtttcttgacaggtggcagtttggcacttaggtgtgagtcttttttttccgtgtgctgccttgagacgagtggggatgtttgggataggggatag

SEQ ID NO: 2010 - DNA, 360 bp, Cryptococcus neoformans
atgtctgctcaacccaaccccaaggctttccctttggccaatgcccagctcaccaaccagatcctcgacttgatccagcaggctcagcactacaagcagctcaagaagggtgccaacgaagccaccaagacccttaaccgaggtatctgcgagttcattgtcatgaccgccgatgtcgagcctattgagatcgtcctccaccttcccctcctctgtgaggacaagaacgtcccctatgtctttttgccttccaagactgctctcggtagggcttgcggtgtttctaggcctgttatcgccgccagtgttaccaccaatgaggctagggagttgaacgcccagatccaggctgtcaagtag

SEQ ID NO: 2011 - DNA, 441 bp, Cryptococcus neoformans
atggttgtcgttgttgaagaagtccgtgacgaagccgccgaggaagtcgtcctccaggaaggcgagaacgaatccgatttcgagaccgactctgaagtttcctccactatttcagacgatgacgactttaaccccgccgacgaatctttctacgaccggctcaccgctctcaaagacattgtccctccccagacccgctcaggcctctacaacaagtacaagtcaacaactggttgggcttggtggggtattcagagcgccggctctcttgcctggttggtgagcaccagcgcccttttggttggtttgcctttggctcttgccattgaggacgaagccagggttgtcgctcaggagaaggagatgcagatgcagagtgccggtcaggcaggtgagtttggcttttttggaacgtgtcataggttaaggcgctattgctga

SEQ ID NO: 2012 - DNA, 498 bp, Cryptococcus neoformans
atggacgtctcccacgtgctcgacgaccgcagcaccaccgccgtcctcccccgcgccgcacccgtccacaccgaccccgccctgctcgccgcctttgacgcctcccccctcgaccccgcagcgtacgccgaccgcgagcgccacctgctccagctcaccctcacctccacccacgccctcgtcgccgccctcttcgccctccccaccaccccctcctccgccggccccgtcaccgccttccccccgcccaccaccctcctccccagggagaagcccctgcccacgccaaaggcccccaccaagtgggagcgcttcgccaaggaaaagggcataagccacaggaagaaggagaaggacgtgtgggacgaggagcgccaggagtgggtcccgcgctggggcaggtttggcaagaacaaggacaaggaggaccagtggctgcatgaagtcaagcccggcgacggtgcgtctgtctttcgtcctgttgactctttgcgctga

SEQ ID NO: 2013 - DNA, 489 bp, Cryptococcus neoformans
atgaatcagcctaataggattgactcatggttgttacaagatgatgagaaaccattaacgatcacggaggaccccaaactgcccaacgcctccactatagtcatacgacgacaggatcatacattgggaaacatgctcagagcacaattaatgctcgaccctactgttctcttcgcgggctacaaagttcctcaccctcttgaaaacgacattcttctcaaaatccagaccgacgagcggtcaaatcctgcagaggctctcaaacgtgcttgtcatgaactgatccggcaaaccgtacacatcaaagctcaattccaacagcaagcaaagaacatcgagatgggtatgggtcccgaacaaggagtcgctccagatgcagcaggtgcgaatggggcgtacgatccgtatggggatgggttcgggagggagggcaatgtggtcgtcggcggtgcagtgagggaccaggggcaggatgtatacgacttttag

SEQ ID NO: 2014 - DNA, 429 bp, Cryptococcus neoformans
atgccgacccgattcagcaacacccgaaagcaccgaggtcacgtctctgccggtcacggtcgtatcggcaagcacaggaagcatcccggtggtcgtggtttggctggtggtcagcaccaccacaggaccaacttcgacaagtaccaccctggttacttcggtaaggtcggtatgcgtcactaccatctcctcaagaaccactactaccgacccaccatcaacctcgacaagctcatctctcttcctgaagccaaggttgacgctcctgagggtaacgttcccgttatcgaccttgtccacctcggcaagttcaagcttttgggcaagggccgaatcaacaagcctttcatcgtcaagactcgattcgtttccaagttggccgaggagaagatcaaggaggctggtggtgttgtcaagctcgtcgcttaa

SEQ ID NO: 2015 - DNA, 492 bp, Cryptococcus neoformans
atgcgttgtatagtgaatcactggccagtactccttcagcttgttccatccccatattttgctagtaaatcggttggggatgagccgagcttatctgggagatcaggtattgactttaagatccgaacaatcgagctcgatgggaagcgaatcaagttgcagattgtaagttgccggcaagaacgtttccgaaccatcacaactgcttactacagaggtgccatgggtatcttgctggtctatgacgttacagatgaaaagtcctttaacaacatccgaacctggctctccaacattgaacaacatgcatcgcccggcgtgaacaagattcttatcggtaacaagtgcgactgggaggagaagcgatctgttacgattgagcaaggacgtgcgcttgccgacgagtttggactgcgtttcttggagactagtgcgaaagcaaacgaaggtgtggaggaggcatttttcacattggccaggtacgtcatgtag

SEQ ID NO: 2016 - DNA, 345 bp, Cryptococcus neoformans
atggtgagtcgtttccgctccagagtacccatatttctcacgcactcatccgaaatagctcatcttctcaccctcacagaccaagtgatcaccgttgagctcaaaaatgacttatcaataactgggactctcaaatctgtggatcagttcctcaacatccgattagataatattagcgtagaggaccccgaaagacatcctcatatgatggcggtcaagaactgtttcatccgagggtctgtagtacggtatgtgcggatggctgcgcgatcggtggacactacgctgctggaggacgctacgaggcgaggtgagttttgtctcgggtgttggcgggtatgctga

SEQ ID NO: 2017 - DNA, 558 bp, Cryptococcus neoformans
atgacgacagacatccccgcgcaacccctcaaaaccactaaagagacacaccccgatttaccgccgggcctcatcatcggccctgatggcaaaccatgtaaagtctgcaactcgtggcaagattgggccaagatcaaagtcaagaagaaggctgccagtggcgcctcaaaagctcctaccaacgcaccgttagaccgaacgccagaccggtcaaattgtccacctgacaccgcagcccttgggcgctctacatggacttttctgcatactaccgctgcttattatccaatcaacgcacccccacagacccagtccagtatgcttaatctcctctcttcactgtctttgctttatccctgctcgtggtgtgccacggacttccaaaaggatatgcgccgacatccgcccgatgtcagtgggagagagagtttgatgaaatggctctgcgagaggcataacgaggttaatgaaaaattggggaaagagaaatttggatgtgatatcaaaaatttggacgtgagatggaaagacgggccggaagatggtagttgcgattaa

SEQ ID NO: 2018 - DNA, 546 bp, Cryptococcus neoformans
  misc_feature (368)..(368): n=g, a, t or c
atggaggtagaactcccatccatgcctacatccatccgtcaaacataccaaggtcgtcttgcagcctccaagcagagccttgacaaaatcagaaaaactcttgtaagtttaacccgccgtgttggttacctccgtctccaatcccaacgatctgatctcctctccggacctgggttcccccacggagacgacccatacaccgacgatccggaaccttactctacccgatcccgtctactagctggcacgcagactcttgaagatggcaccaccaggctcgataatgcgcacaggattgcactggagactgaaggtgttggatctgaaattcttcgaaatttgagagggcagagagatcaattggagancactagggatactgcaagtcgccatcttgtccaagcggactcttctattgatcgagcagcgggtacacttaagaagatgatcttcaaaatgtaccaacaaaaattcctctcggcaggtatcatcgtcgtccttgtcctgctcatcctcctcgttctctactccaagttctttggataa

SEQ ID NO: 2019 - DNA, 477 bp, Cryptococcus neoformans
atgaggagccactacttctccggcctcctgcatccttaccttggctcacacgtctccagccttcccggcaagactctcgcccgagatgtcctccccacctctactgtctcctccgtcaaggagatgatcgcctccgctgagggcatccccgcctctgagcagcgactcatcttcgccggtgtccagatggacgacgagcgtgcccttgctgagtacggtatccagaaggagtctaccatcaacatggtcatgtctctctgtggtggtggtaagaagaggaagaagaagaactacaccacccccaagaagatcaagcacaagaggaagaaggtcaagatggccatcctcaagtactacaaggtcggatccgacggcaagatccagcgactcaggcgtgagtgccctgcgcccacctgtggtgctggtatcttcatggcttggcacaaggacaggcaggcttgcggcaagtgcgggtga

SEQ ID NO: 2020 - DNA, 492 bp, Cryptococcus neoformans
atgcagtccggcaacaacgcagaataccgagaagcctttgccctctttgacaagcgaggcaccggccacgtgccccgtgaatcccttggtgaacttttgcggtccttgggtcagaatcctacccaggcagaggttgccgagctcgagaagactgtcggagccactttcagctatgacgaatttttggcggtgttgaacaggccggatggatggaagcctgccggcactgccgacgagtttatcaagggattccaggtctttgacaaagctggaaacgggttcatcggtgccggtgaacttcgctatgtcctcacccagcttggcgagaagatgactgatgaggaagtggacgagctgctcaagggcttccctgtccaagacggccagatcaactaccactctttcgtccgatcaattctctctcaaagaatgggagagggagatggaggacggaaatgtattctattctacttgtttcttgacgaactttaa

SEQ ID NO: 2021 - DNA, 498 bp, Cryptococcus neoformans
atggccgaatcatccaatatcatctttgacgacaggttcaccgtcgatgtgggtccttttttttattggttacacatttcaactgaacatttcgtttttcccagactgcgactgataaaagatggcaaagtgtcccggataaccgcgacgtcacattcgctttccatgtccctcacgctcgacattgccaacgaactctacccactcgaacagtctgaaacgtttacgctcacactcgcgcggtcgctggggagcgaagtgcggagggtgaagcgagagttgtggaggagtcatgagcaagggttggcggaagattatgattatgtcatgtatggcaagatttacaagtttgacgattcggcgcaaggagaggctcagaccacggcatacttttctttcggtggactgctcatggctctccgtggatcgtatcgacatcttgcgggggttgttgttggagaaaacgtgtatttgctcatgcgcgtaatgaagcgttag

SEQ ID NO: 2022 - DNA, 576 bp, Cryptococcus neoformans
atgtcccgccagctcgacaacgtcaaccccaccatttttgcgccatcagctcccagtttcgtccgaagatcgacaggaaaatcggccaaatcgagcttatgggctcccgaagctttgtcagatgatggggaggactactactccccaggagcgagaagtagcggtagtgtcagtgacgaggaggaaggaagggaagatattgatgcgcaagaggtttatgaccttctgcggtcaataaccgaccctgaacatccagtatctttggagcagcttcgagtggtaaaccctgaggatattcatgttgctggaaatcgtgtgttggtgtatcttacacctacaatcccacattgctccatgtccaccctcattgggctatcattgagagtgcgattattgagggctttgcctccacgatatagggtggatattcgaatcaaatcgggaactcaccaatccgagcacgcagtcaacaaacagttaaacgacaaggaacgagtacaagcggctttggagaacaagcatctgttgagtgtggtggaaggctgtttggcgactgctggaaagcgtggcgaatag

SEQ ID NO: 2023 - DNA, 543 bp, Cryptococcus neoformans
  misc_feature (355)..(357): n=g, a, t or c
atggagtgctcattcggtattactggtaagtgtggctacggcacaaacggcaaagactatgtcatcctcgcctcagacatgggtgcgggacgatccatcgtccgtatgaagtctgacgagaacaagctcaagaccttgggtccccacctcgccatggcttttagcggtgaacccggagatacaaacaattttgccgagtatatcgagaggaatatgcgactgtacaacatccgaaaccatttcccgcttcttccaccagcagcctccgcttgggtccgacgtactcttgcagaagctattcgatcccgacacccctatgctgttaacctccttcttggtgggttcgataccaccnnncaaaaaccccacttgtactggatcgattatctcggtaccaaggcgattgtcccttatgctgcgcatggtatgggtgtgtatgttagtttgagtacgatggataagtggtggtacgaggatatggacaagaaggagggtgtcgacttgttgagaaagtgtattgacgagacggagaagcgtgtctaa

SEQ ID NO: 2024 - DNA, 528 bp, Cryptococcus neoformans
atgatgagacattgggatattgcagaaactcgagacgctaccatattcaaccaactcatccgccaacatgtaagttacactctttcattccatccgctcatcatcctgagctttacacaactgatctctctctctctcttttttccagagaactgcacaaaggacaactttcccctcgtcttctcagaggtagagctcgttgaacgaccggcacctatcaatccggatttcatcaagcgattcttgcccaaactcgattggaaggctttggtggatacggctcggtctctcggtgatactagtctccccgataccatgcctgaaaactggacagatgaggaaatacaagctttacaccatgtccttttcgagttgcatgtggaggaaggaatcatgacatgtcgagggtgtggccatgcctaccctgtggctaacggtatccccaatatggtatcagattttggaatttggtctatgaagcaaaagccaagagggaaaaaagaaaaaggactgattaatttggtttga

SEQ ID NO: 2025 - DNA, 588 bp, Cryptococcus neoformans
atgccgagttccagggggcttcagcccttacacgcgaaaatcatcagcaataacaaacgattattgtttatttacctattattgaacctattaccgacaagtaccctcaagctagcccgccatgtcttattttatgacccagtaagtctcaccagccccgtaatcgacccactggctaacgcgcatagtcttcactctggctggcatgtcgaccaagccatcctcgtcgaagaagatcgtgtcgtctgtatccgtttcggccatgaccatgatgaagaatgtatggctatggacgagacactctatggagtctctgaaaaggtccaaaattttgccgttctctatttggtcgacatcacggaagttcctgatttcaacaagatgtacgaattgtacgataattgtacactcatgttcttctaccgaaataaacatatcatgatcgacttgggaacgggtaacaacaataagatcaactgggctataacggacaaacaagaactcattgatattatcgagactgtctaccggggggcgtccaaaggtcgaggtctcgtcgtttctccaaaaggtgggctacatttttaa

SEQ ID NO: 2026 - DNA, 639 bp, Cryptococcus neoformans
atgggtgcctacaagtatctccaggagctctacaccaagaagcagtccgacgtgcttcagttcgtctcccgtgtccgatgctgggagtaccgacagctcgccgtcatccaccgagcttctcgaccttctcgtcccgacaaggctaggcgactcggatacaaggccaagcagggctatctcatctaccgtgttagggtcaggaggggtaacaggaagaagcaagctcccaagggtgctacttacggtaagcccgtcaggcagggtgtcaaccacctcaagtctcctagaggtttgaaggctaccgccgaggagagggttgccaggaggtgtggtaacttgcgagttctcaactcttactgggtcaaccaggacggtgtatacaagtactacgaggtcatccttgtcgacccctctcacaaggccatccgacgagacgcccgtatcaactggatcgccaaccccgtccacaagcaccgagagatgcgtggcctcaccgccgagggcaagaagaaccgtggtttgggcaagggttccaagcacaaccaccagccccagaaggccacctggaagaagcacaacacgtcagttctgttctgtttcaccttgcctatccatttaccattgctgacgctccgttga

SEQ ID NO: 2027 - DNA, 588 bp, Cryptococcus neoformans
atgccttcgttgcgaatggactcgccgctgcactgttgctacctggtggcgcccgctgtttgtctcacgtatgagaaagttcaaaacattgtcgccaccgtcaacctcgactgtcgtttagacttgaagactattgccctccacgctcgaaatgcggaatacaacccaagacgtttcgctgccgttgtcatgcgtattcgtgacccaagaacaacggccttgattttcgcttctggaaagatggtcgtcactggtgccaagtctgaagacgactctcggttagcatctcgtaaatacgcccgaataatccaaaagcttggttttgaggccaagttcgccgagttcaagattcagaacatggtcggcagttgcgatgtcaagttccctatcagattagaaggtctggcattcagccacggtgcattcagcagttacgaaccggagctgttccctggtttgatttatcgtatgctcaaacccaaagtcgtcatcctcatcttcgtgtccggcaaaattgtcctcaccggtgcaaaagtcagagaagaaatttacatggcgttcaaccagatctactctgtgttgcggtaa

SEQ ID NO: 2028 - DNA, 624 bp, Cryptococcus neoformans
atgtatttctctgtagctggtgcatccgagacagcagtggacaggagagaacgtcttcgaaaacttgctttggagactattgacttggccaaagatccctatatccttaggacccatctcggtacattagaatgccgtctttgtctcactcttcacgtcaacgagggttcttaccttgcccacactcaaggaaagaaacatcaaacaaaccttgctaggcgtgcagccaaggacaacaaggatcagacattaatgatccaagctcccacagccgcgcaacaagtgaagaagaaagtgtttgttaagattggaagacctggatacaaaatcatcaaaattcgagagcctgtcagtcaaaggatgggtttattattcactgtgtctttacctgagataaaagcgggagagaggccaagaaggaggttcatgtctgcttttgaacaacggcgagagattcccaataaagctttccagtacttagttttggcagccgagccatacgagaccatagcatttgccatcccctcaaaagagatggttgacgttgatgaagacccggagtcgacatgggagcactgggatgccgacgagaaggtttacagttgtcaattcttgtataaataa

SEQ ID NO: 2029 - DNA, 642 bp, Cryptococcus neoformans
atgaacatattccgcttcctcggcgacctctcccacctcgcctccatcctcatcctcctccacaaaatccagacaaccaggtcctgccgcggcatctccttcaagtcgcagctcctctacctcatcgtcttcctcacccgctatgtcgacctcgtcacccacccgctcgtctccgtctacaacaccgccatgaagctcttcttcatcgcgtccaccgcgtacaccctctacctcatgaagttcaagtaccggccgacacacgacgcctccctcgataccttccagctctcgtacatctttggccccgttgccgtccttgccctcttgttcaactacaagttcacgccctttgagatcacctggtccttctccatctggctcgagtcggtcgccatccttccgcagctgttcatgctccaaagaacgggcgaggccgagacgatcaccacacattacctcgcagccctcggtctgtacaggggattgtacattcccaactggatgtacaggtactttaccgaaggcgcctttgacgccattgctgtcgttgccggtatcattcagaccgccatctacgccgactttggatatatctacgtcacaagagtcctccgcggccaaaaattcgagctccccgcctaa

SEQ ID NO: 2030 - DNA, 576 bp, Cryptococcus neoformans
atgcgaaaatacaaatggaggtggactgaagcgggcaaaggcgaagacgcgaaaagaaaagcgaaaacaaatgatgataataattctcgctttccctgttactacttctcttgccacttccaattttatcactcatcccagacatatctcaacatgacaggtaatggtaagggcgaagacgacgtcagcttgccgaaagctaccgtcctcaagatcatccaagaaatgcttccagaggatatatctgcatcaaaagaggccaaggacattatatttgactgctgtactgaatggataaagctcatttccacccaatccaatatggtctgtgaagcctcttctaaaaagaccatatcgcctgagcacgtcgtagaagcgctcaaacaactggggtttgaagactttgtggccgaggtggaagagtcgaacaaggactttaaacaggctcaaaaggagcgtgtacgatcacagccagataccaagggcatgacagaggaagaactgctggaactgcaagaacgtctgtttgcgtctagccacgccagatgcagcagggcagcaataaaaataaaatga

SEQ ID NO: 2031 - DNA, 576 bp, Cryptococcus neoformans
atgaacaagagcgcaaagctcttgttccttggtctcgataatgcgggaaagactacccttcttcacatgctcaagaacgaccgtctcgctacccttcaacccactcttcaccctacctctgaagaactcgccatcggcaacgtcaagttcactacttatgatctcggtggtcacattcaagctcgaagattgtggagagattacttcccagaggttgacgggattgtgtttttggtagacagcgccgacgccgagaggttcgctgaaagcaaggccgagttggactctttgttgtccattgaatccctcgctcaggttcccttcctcattctcggtaacaagattgacgcctacggtgctgtctcagaggagcagctcagacacgagctcggcctttaccagactaccggcaagggcaagattcctctccgtgatatccgacctattgaagtattcatgtgctccgtcgtcatgcgacagggctatggcgaaggtttccgatggctcagtcaatatgtattgtctctggactcaacggattggcaaagctcatgtcgcatattaagatctaaataa

SEQ ID NO: 2032 - DNA, 693 bp, Cryptococcus neoformans
atgtctgtaagtgctgggatccgaaacacctcgaaaagatcattcttgatcgagataactgacgccgcacagacgtacgacagcgcacctatgagacggccggatatcaaaaagaaactcgttgtggttggcgatggtggctgtggcaagacttgtctattaacggtctacgccgagaatcgttttcctgaagaatacgtcccaaccgtttttgagaatctcatgaccaccgttccttcccctaccgacccttccaaaatcattgaactggctctttgggatacagcaggacaggaggactttgacagactgcgaccattaagttataacgacacagatgtgatcctaatagtattcgcctgcaaccatcgaccaagcttgttgaacgtgcaagataagtggtatccagaaatggcccatttctgcgaaaatgtccccctcatcttagtttgcactaaaaccgatcttcgcgaagaccaacagaccgtctcccttatggctgctcaaggcacaacaccaatcagtgcttcagaaggtgaacgaatagcaaaggagattggagccagacggtatatggagtgctcagcaaaggctgggatgggtgtaggagaggtgttcgacgccgctattagagaaagcatgaagaagggagggttaaaaaagatgaagggcaggaagtgcgtggttctgtag

SEQ ID NO: 2033 - DNA, 630 bp, Cryptococcus neoformans
atgagccactctcactcaacgcaaacaaacaacgaaggcggacgccacttcattttactattaacccacttacggggcctagccaagatgtcatcaaccggttgggagattcgtttctccaattctcgtcaaatcccctacttctacaactcggaacgtagcatctccacttgggaacccccttctgaactcagcgcagagcaaattcagcaattgcctggcgcggccaagtatatgaatgtacagttggctcaacctgcaggtggcaaggaaggtcaggtgagggccagtcatatcctggcaaagcatgctggaagcaggaggcccgcttcatggagaaatgtccgtgataagatcacaatcacttccgacgaggctcaagctattatcgaacagcacatcgcatatcttcaatccctccctccggctgatcttcccaaggaatttgcaaagattgcctcaacagagagcgattgttcaagcgcgaggaagggtggtgatcttggatggtttgggaggggacaaatgcaaaagccctttgaggacgcgacgtttaacactcctgtcgggcagctgagcgggattgtcaagacggactctggtatccatgtcatcctgcgtactggatag

SEQ ID NO: 2034 - DNA, 639 bp, Cryptococcus neoformans
atgggtggcaaaaacaaccgacgaggaaagaaggaagacggtgagaacaagcgagaattgatcttcaaggaagacggtcaggaatacgctcaggttgtcaaaatgcttggtaacggtagattagaagccaagtgtcaggatggcgagtctcgtcttgctcaaatccgaggccaaatgaggaagaaggtttggattgttgtcggcgacatcatcctcctctctctccgagatttccaggacgaccgtgctgatgttatccaccgatacactcctgacgaagctcgtaacctcaaaacctatggagagttgaaggacttccagcttgtggagaaccaggaggctggtggcgaggaggacgaggagggtggtattgaattcgaggaggctgacattgatgacatctgtaagccctttgctctgcacccatgtttgaaaagacagccactgatggcctatgcagagacggttggcgtggttttttgtgtatataaggaatgcatccaactatctagtgtttatcgtgctttctcttttttccatgtcatctggttcataatatcatcgacactgtcatggccgttgtctgcatcgtgcggaattcgaaagaaggggattgggcgaccctctccacttacgtaa

SEQ ID NO: 2035 - DNA, 759 bp, Cryptococcus neoformans
atggaggatatggaagagctaaaggtgcagatgtcagcgctggaacgagctaacaatatccaagggatagaggaggatagaatgaggaagcgaaggaagaccagtgcctggccaaagaacagagagcttgaggtgagtcctgacttcgcgattccactggccacaccgcagctttctctgccgaaatacgccctccctctcatcctctccatctgcctcgaaacacggcaactgggcacctctatcgcgtctatagcagagtcccatggccaattatccctgacgcaagaccgcggtcttgtttgcaacctcactgtccaacatttagcggcgcggaggaataagagatgtatgctggcgtatttggcgaccagggtgggaggaatcaaggagagatggtgggacgctgggggagggttggcatatctgctcagtcccgctgcaagtgccagtgttaatcctgaggcggacgccccagacctacgctcggctctgagtcctcaagaacttgactttctaaggggatataacaaccttctacttgactacaagagcgatttcctagacgtgctcgacttgacggcagggatagagaagccgcctggggaaataatggtcgatgtgcgagttgtaagggacgctggcgaggtgttcttggatagcggagagagggttgattttaggaagggtcaaaggttcaggctggaaagagcgcaggtggaaaggttaatcatacaggggtacttggaggaggtgtag

SEQ ID NO: 2036 - DNA, 693 bp, Cryptococcus neoformans
atgtcccttggccggtatattggctggtcgatacttgccttcacttatttagtgttggccatcttgcttcgtcttatctttctccaaccttcaaaaacctcgagagcgtcgtatcgacccaaagatgccaaatgttccttgggcgttttcctggggtctggcggccatactagtgagatgaaggctttgttgtcgacactggattatgaacgataccagcctcgaacgtacatctactgccatggtgatgatctgtctttgagagccgtctcagacattgaatcgagcaagggaggtttgatatcatccaagatgtactatctgttaagcctcccacgggctcgtcgtgtaggccaaccactattgtcaacaatggtttcagttttgaaaacactctacattgcagccctaaggctctttctaatccctctactgaaaaacccacgacggccattcgttgatcttttgatcgtcaatggcccaggtacatgtgttgttttggttctagtatcatatattcgtcggatactaggtttagaatatactcgtattatctacgtggaatcattcgctagagttaaaagcctgtctttaagtgggaagatgatcagaccgcttgcagatcgttttttggtccagtggcccgatgctagtgacagcgataatgtcatacacaaagggcttttagtgtga

SEQ ID NO: 2037 - DNA, 636 bp, Cryptococcus neoformans
atggccaacattaactcagtagacatctctcgtctgaaaaatggtgaagtaaacttaggtacatccatcatggccgttcagttcgatggcggtgttgtcatcggtgcggacagtaggacaacaactggttcctatattgccaatagagtcacagataaactcactcatatccatgatcgtatttactgttgtcgatctgggtcagctgcagacacgcaagctgttgccgatgtcgttcaccagcatgctcaggtttatacctctgtctatgggtcacctcctacagttgccactgctgccgcactgtttgaaaagttatgttatgaaaacaaggatcagctctcggcaggcatcattgttgcaggttgggacaaggaaaatggcggatcagtttacaacatcccactaggaggcggaatgttccaacaaccttgggccattggaggttccggctcaacatatgtttatggttattgcgacgctacctatcaagaaggatggtcaaaagaagaaactgtcaagtttgtgaagaatactctttctcttgcgatggcgcgagacggttcttctggtggttgtattcggatgtgtgtcatcacccaagacaaagtggaacgtcactttatctggaaatga

SEQ ID NO: 2038 - DNA, 594 bp, Cryptococcus neoformans
atgatatttgcccgctgcctccccatatacagggcccagactcatcatcaacattctccgtccaactacgacatccgcatatccaccactccccccacacgcagacaaataacatcctgcctctcccgagacatcaaacaagtccttctaatgggaaaatcgcaatccaagttatcttctgaagagctggccgagctccagaaaaacacttattgtgaggctgactgtgcccgggaacagtacaaaggcttcctcaaggactgtcctagtggtcaactcaacaaggaagagtttaagaaaatctaccgacaattctttcctttcggtgatcctagtcagttcgcagattacgtcttcaatgtgtttgacgaagacaaatctggcacaatagaattcaaggagttcatttgcgccctttcggtcacctctcgaggtcgtcttgacgaaaaactcaaatgggcgttccaactgtatgacattaaccaagatggttacatcacctacgacgagatgcttcagatcgtacgatctatttataaaatgactggacaaatggtccagttgccagaggatgaagatacccccgaaggttag

SEQ ID NO: 2039 - DNA, 672 bp, Cryptococcus neoformans
atgtccttccgcgctgtaatcagcaacgctcaccacccgcagtctgtgatggagctcaacggcggctcagtcgtcgccatgatcggcaaagattgtgttgctattgcgtccgacttacggctaggaaatcagcaagtcggtatcgctgccaactttgacaaggtcttccccatcaacgataaactctactgtggactgccggggcttgctacagacgtatacaccttacgagaacatttgcgattccgggtgaacatgtatcgaatgaaggaagagcgcgagatcacaccaaaaacatttacccaccttctttcaagcacactatatgagaagaggtttgggcctttcttcctagaacctgttgtcgctggtctccccactcccacctctcttgaacctcatcctagaccttacatctccacaatggacaccattggttgcataactacaccgaaggacttcgctgttgctggcacggctgccgataagttgtacggtatcgctgaaggtctttgggaacccgaccttgaaccagaagatttgtttgagacaatctcacagactcttcttagtgcggtggatcgagatgcgttgagtggttggggtgctgtcgtcaacatcataacacatgacaaagtaattactcggacactcagagcgagaatggactga

SEQ ID NO: 2040 - DNA, 705 bp, Cryptococcus neoformans
atgccaactcttattctaccgggggaaacagtccctatcccatcgacatcgaaagccgtcgtactaggccccggcatctcccaatcgactccaaccttacaagcttcctctagtaccgcactggggatgctgcattcgggaaaaggaaaggaacggagtcagaaattgtggatagaaggaaactcgaagaggtatatacctgcgcaaaaagatatagtcttggggataatcattgctagacatgccgacggatatcgtgtagatctgggctcttcgcagatggcccaactcgacgctttggcgtttgagggtgccacaaagaggagtaaaccaaacctcaaggttggtacattagtgtttgcgcgtgtgatgtccgctagtcgagatatggaacctgaacttgaatgttttgatcccaatactggcaagtcggatggttttggtgagttgaaagggggagtgatggtcaatgcaaccctccagctgtgtagacgtcttcttgatagaaaccacattgtcttgcccactatcgcttctatttttccttttgagattgctattggtcttaacggtcgagtgtggatgaaggcagagacggtgggcgagacgttggcaatgaagcgtttgatcgaaagcgtggatgatcacatcatccccgtggaagaaaaggcaatcaaggagaaattgcgagagtacctgtcctga

SEQ ID NO: 2041 - DNA, 693 bp, Cryptococcus neoformans
atgaccacccaccacccccgcgcacttcccatcgtccttataaccggcaccccaggtaccggcaagactttgcactcccaactcttagtatctgagctctcggaggccgattcgcctatacccatgaaacacctcaacattggagatatcgtcaaggaacacggatttcatgaaggatgggatgaggaatggaagtgctggattgttgacgaagagagattgttagattggatggaggaagttgtgaatccaagagatggaccggctgagactgggtttgttattgatcaccatgatccctcgcttttccccgagcgatggattgacctcgcggtcgttctcacttgcgacaacggtatcctgcatgaccgcctgaccgcacgtaactaccctgccaacaagatttccgaaaatattaccgcggagatcatgatgacttgtctcaatgaaactcgtgaatcctatgctgaggagatcgttgttcaacttcagagtgagggtaaagatgatggagaagtggaagaaaatgtcaggaggatagcgcaatgggcggagaactggacaaaatcagcaggaagaggaatcatagacatgtatgggacatcgataagattgatggacgctcggattgtagatggtaccgattgcttgtccgtgcttcttgtagaatatattatgtgcattgattcgtaa

SEQ ID NO: 2042 - DNA, 666 bp, Cryptococcus neoformans
atgaccatcgcacgaccaccgatcgaacattccttcccttcggcttttataacctgtcttatcattccattatcctcgttactcacctccagaacaaatcgcaaaatgcctcgcgaagctccgatggcccccgtttcccgatcaaaccgccctagtatcgtaggccctgacgagcctgaagctccgtaccccctcaagcttgaagggaccgttaccaaaggttttggtagaggtgcgaggtatctggggatccccacagccaatcttccagacgagtctttgggtccactcaacgatcttggtcttacaggtatctactacggcttcgcccgtaaagtcgagagcgaagctcaattggaggcgttacctaccatcaccgcaccttaccctcccgaacaccacgcccagagatggagtaaggaagatgagaaagtttggccgatggtgatgagtgttgggtggaatccttactttaaaaatgaaaaaattaccgctgaagtgcatattatgcaccccttcaaagctgatttctatggacaccacatgagtatcgttatccttggatatatcaggcccgaacttgactacgtctctaggttagctcaccccaaccatcctctctgctttttatttcccctgcggacgatctttcagattagaggctga

SEQ ID NO: 2043 - DNA, 609 bp, Cryptococcus neoformans
atgtccaatgaagcgaaccgagaattagctagattatggcgtgtttcccgaaccgtccacgagatggttagagatcgagggtacttgcttgccgattatgagatcaacgtttcgttcgaagagttcaaggacaggcatgctgacaaatcttcaagccgttccaacatgagcttcgatgccattcacgagaacgacaacaccgacaaaatctttgtgtacttttgcgcggacaagaatgtcagcaaggcttctatgaagacttttattggttctatggacaagatgggtgctaggcgaggaatcatcatctggagtgaaaagatgtcaccggcggccaaaaaggtgcgttaaatgcagtccgagtatcacctcgaagatttcccagaatccgaccttctcgtcaacatcaccaaacacttcctcgtccccaagcacaccgtcatgaagcctgaagaaaagtctgctctcatcaagcgataccggttgaaggagactcagttaccacgtatcatgatcaccgatcccgtggccaaatactacggcttgaagagaggacaggttatgaagattgagcgagcgagtgagactgctggacggagtcatttttag

SEQ ID NO: 2044 - DNA, 612 bp, Cryptococcus neoformans
atgaggcccttaacagaggaagagacaaaggctgtgttcgaaaagctcgcaaactacatcggaaagaacctcgttcacctcatcgacagggatgaggatgacgagtactgcttccgtctccacaaagacagagtgtactatctcccccttcccatgctccacttggccacctctgtcgcccgacctaatctcgtttctctcggtacatgtttcggtaaattctcaaaaactggcaaattcaagcttggtataatgtgtttggactatctcgccaagtacgcaaagtacaaggtctggattaagccttctggagaacttcctttcctctacggtaaccacgtcgccaaagcgcatttgggaaggataacggaggatacacccgaacatcagggtgtggtggtgtacaacatgtcggatgtgcctttaggattcggagtaacagcccgctcaacactcgatacacgtaaactcgatccgacgggtattatcgtcttccaccaagcggacgttggagagttcttgcgtgatgaggataccatgttcagctctttcaccaggttaggaatagcagtggaagtcgggagggtttggaggaatagacggaataggtga

SEQ ID NO: 2045 - DNA, 531 bp, Cryptococcus neoformans
atgcagctttcacgaactttcctccgtcaactccggcccgcctcttcttctcgagtcgtcctccgatccttctccagctcccgatccactttctccgagacccctgctggcgacgccccagttaacccaaagattgcccccatagttgacagcatctcttctctgagcttattggaggtttcagaacttgttactgcccttaagacgaaactcaacattactgaaatttccctccctgctgcctcttcccccgcctccgctgctgcttcctcgacatcgtccgaagcccctgttgaagagaagcccaaggagaagacaattttcaccgtcaagctcgagaaattcgatgcggccgctaaggcgaagatcatcagggaggtcaaggctctcatgcctaatatgaacttggttgaggctaagaagttcgtcgaatccgttccccaaacccttaaagaaaacattcccaaagaagacgccgaaaagcttcaaaagactctgcaagatttgggtgccaccgtctctctgatctaa

SEQ ID NO: 2046 - DNA, 777 bp, Cryptococcus neoformans
atgccctatctcagtgtctttgtaacctctcccgatacccattcggagcgcagatttgattcgggtctcactgttcagcagctcaaggataagctcaccccaattaccggtatttcacctcagtatcaagtaataaaaatctgtcgatcggccgatcagacctctggccctcctttggcggtgcttgatgacgactcccggacattggcaagctacggtctggaggaatggaattgtattaaagtacgatttccttttttacagccatcgaaagcaaagctaaccctttcctgccaacaggtagacaatatcgatcctaactaccgcccaggggaattcaccgacgaatccaatctagagcgttttgaactgagccctgaagaatacgctgctcgttcagacactgtccttgctcatctgaaagccaacaagctaggacgatttgctgatgctccaaccactctcgattcccctcttcctcctcccccaatgatcatggacccgactatcgtcccaggaaagaggtgtgaggtatcacatggtgaagatgggatggcaaaaagaggcacagtgaggtttgtcggggaagcaaagatcggaaagggtggaatctgggttggagtagagcttgacgagcctctggggaaaggagatggagaaattgagggcacgagatacttctcatgcttaccaaagcatgctgtttttgtcagatctgcgaaagtcacagtgggggacttcccggaagaggacatcttttccgacgacgaaatatag

SEQ ID NO: 2047 - DNA, 717 bp, Cryptococcus neoformans
atgtggttttgggagagtgtagatgtggtgaagaaaggtcgcccggagattggcggtgttataacgaggcgcggtattcactttgcacgatacttttgcacttctcaaaatttgttgtccataacatatccccttcttaagcatcatgaaaagaaactcctcaaaaaagttgattttctcagttggaaacaggatgcttctcagcgggaagtcaaggtgatgcgcaagtatcacatccaagatcgagaggactatcacaaatacaacaagttgtgcggttcattacgatcattaatccataaactctcacttctcccggcgaacgacccattccgacaacaaaaggaggctgaaatgcttgacaagttgtatgatatgggtatcctcgacatcggctccaaaccctctgacattgaaaacaaagtaacggtctcctccattgcccggcgccgtcttgccgtcgtcgttgcccgtctcaaaatgtccgaaaccgtctctgacgcggtacgcactatcgagcaaggtcatatccgagtaggacccacaccagtgactgatcctgctatgcttgtcacgaggagaacggaggactttgttacttgggttgacacaagtgctaggaagaggactattatgaagtataatgacgaggtgagtgttatctttgaaccttgtggttccttcctctcagttaagcaccaggagagcgatgactga

SEQ ID NO: 2048 - DNA, 726 bp, Cryptococcus neoformans
atgctacgccagcccggaacccagatcaagtatgtgagatatagaacactggaaccagtcatcccagcaagatcgctgatatgtctttataggcttacaaacgtcagcattgtgcgtatgaagaaaggtggtaagagattcgagatcgcttgctatcaaaataaagtctcggaattccgatctggagtcgagaatgatctttccgaggtccttcaaattgaacaggtttttaccaatgttcccaaaggtttagttgccaagaaggaagactggtccaaatgttttggcacggatgatttgaataaagtgattgaagaaatcttgaaaaaaggtgaactacaaatcaacaatctcgagaggacacaacacctctcatccctctcccgtgaaattgcaaccatcgtttctgaaatgactgtcgatcccaacacctctcgaaaacacactgttggtatggttgagaaagctatggcagaagtaggattcagcgtccgagccgacagacctgcgaaagctcaagctctggaattgatcaagaaactcgctgaaggggatgtcttaccggttcgaagagtgaggatgagagtacggataactatgcctggaaaggatgccaagagatgcaaggacaagattgtcgccgaatgtgacgaggttgaggaggaggatatgggtatggagtgggaagcggtaggtctcttacctacggttcagaacgtgaactaa

SEQ ID NO: 2049 - DNA, 753 bp, Cryptococcus neoformans
atgtcgcccttccttccagcactcagatcaggtaagcaccgccgcccaccccgccgccaccgctcaccccgccgccaccgctcacacccaccagccgccaggcccgccgcgttcagacccgcactcgcactcgcccgtccgctctcaagcaccgccgtcgcccccaggccccacacacccacctccgccatcaactcgtacgaccactcgccctccaccactctgccagacaccaccatcgcccagcaaaagagcaaccagttgagtctcgagacacctagaaacggcgccgagtatgtcctttcaacgctcgacaagattgtcaactggggtcgccaagggtccatgtggcccatgacctttggtctcgcctgctgcgccgtcgaaatgatgcacatggctgccgcccgatatgatcaagatcgactcggtgtcgtcttccgagcgtccccccgacagagtgatgttatgattgtagcaggtactttaacaaacaagatggctcctgcgttgagaaaagtgtacgaccaaatgcccgaaccccgatgggtcatttctatgggttcatgcgccaatggcggtggctactaccactactcgtactcggtcgtgcgaggctgtgaccgaatcgtgcctgtcgacatctatgtccccggatgtcctcccaccgccgaggcccttctctacggaatgctccaattaatgcgaaagatgaggcgtaacaggcagagtgtgcgatggtaccgaaggtag

SEQ ID NO: 2050 - DNA, 759 bp, Cryptococcus neoformans
  misc_feature (522)..(522): n=g, a, t or c
  misc_feature (525)..(525): n=g, a, t or c
atgtcaggcttcctcaactcgatcggtcgtctccgtgcccctaagcgatcccccaccaacactcccactcagcagggcttctttgatcctctcccttctccgggcgtcgagaacgccaaccaatcgtatcggcctccatctcccgggcccaagcccctctatctatgtcagccgtttgtgaaggccgcgctcgttaaaggtagttttaagactatcgttgcgccgcccaagtatgtcgacatcaacgagtgggtggccatcaacttgtttgatttctatcataacctcaatcaattctacggcgttttgacagagttttgcactatgcagaactgccctacgatgtctggtggaaagactctaaacttcctttggccagatcacaaccagaggctagtctctctggcggcgccaacgtacattgatttcgtaatgagttggttacaaaagcttttggaggatgaaaatgtcttccctacaaagtctgggaaaccgtttgaccactcatttgcatacacggcnaancacatctataagcaccttttccgtatttttgcccatctttaccatgcccatttcgagcaagtcctccacctctccatcgaagcgcacttcaattctctcttcgcccacttcctcgcattcggaaaagaatttgatcttttggtaatgaaggaccttatgaccacccagggtatgggacaaggtgttgcggagttgagcgagaagtggaggcagatgggtattttggagtcataa

SEQ ID NO: 2051 - DNA, 726 bp, Cryptococcus neoformans
atggcataccctgcagcccagagccgcttctccgcgagtgcaccgctccccaccaccccgctcgcacgcagggactcggcacgcaccgcgccacacccctcgctccagcagcagctctttggcccgcccgcagccggcgccgcaccccccagcatcgtcgacaggccgctcgcacgcacaaagggcgcagaggtcgccgtgggcgcatgggcattcatgtttgcagagatcgttgcatacagccagagcagggcggacagcgtgtccgatctcgaagcgaggctgtcgtcattaggctacgatgcaggccagaggctcctcccgctgctgctgttgcgcaacacccaggcggccgggaccaaagaacccaaaagggaacaccgcctcgttccgatactccaattcatccatacgcaggtgtaccgctattgctttggcagggccgcagacggtctcgagcgcagcgtcgaggaagaaaatgaatacatgatcacgctgaaccagccgcctctgacccagtttatatctgtgcccaaggacatgtcgcagctgagctgcgaggcgtataccgcggggatagtggagggtgtactggacggtctcgaggtgcctgcccgcgtcactgcacacaccgtgccgaccgatgcgttcccccagcggtcagtcatcctcatcaagctggaccagaaagtgatggacagggaaggcgctgggcaagtaatgtag

SEQ ID NO: 2052 - DNA, 687 bp, Cryptococcus neoformans
atgagcggacgaggtttctctagaggcggcggtggtggattcagaggcggagcgcgaggaggacgaggtggtggccgaggcggtttccagcagagggatatgggtcctcccgacactgttctcgaaatcggctctttccaacacgacgttgaatccgagatgctctgttccctcacagcacctacaaaaattccctacttcaacgcccccatctacctccaaaacaagacccagatcggcaaggtcgacgagattctcggtcctatcaacgaagtgtactttaccgtcaagatggagcaaggaatgttggcgagcagtttcaagaaggaggacaaggtgtatatctccggagagaagttattgccgattgagagattcctgccaaagcccaaggttgccggcggtaaggagcgaggtgcccaaggaggtcgtggtgctccccgaggccgaggtggtgccggtagtcgtggtggacgaggcggcttcagctcacgaggtggccctggcggacggggtggtgctaggggtggtgccggtggacggggcggtttcagttctcgaggtggtggtgcgcccaggggcaggggtggtttcaggggagggacaataaggtgtaccaggaggatatgtgtgatagattttcttccattcgtttgctctggatatgtacatgtactttcattttga

SEQ ID NO: 2053 - DNA, 759 bp, Cryptococcus neoformans
  misc_feature (59)..(59): n=g, a, t or c
atgtctgctcccggtggtggtggtgcttactcattttcccttacaaccttctccccttncggtaaactcgtgcaaatagaacacgcccttgctgctgttgccggtgggactacttctttgggtatcaaggctaccaatggtgttgtgatcgccaccgagaaaaagtctccctccatcctcctcgacacctctgctcttgagaaggttgccccgatttgccccaatatcggcttcgtttactctggtatgggccctgattttagggtgcttgtcgccaaagctaggaagattgcgcaagcatattggaaggtgtatggagagtatcctcccacaaaggtcttggtgcaggaggtggctgctgttatgcaaaaggcgactcagtctggtggtgtgaggccgtacggtatttctgtgcttattgctggatgggattcccacaggggtcagtccttatggcaaattgacccttcaggatcttattgggcatggaaggcgagtgcgatcgggaaaaacatggtgaacggcaagactttcttggagaagcgatacaacgatgatctttccctcgaagatgccatccatactgctctcctcactctcaaagagggctttgaaggccaaatgacagaacaaactatcgaaattggtattgtaacatgtcctacgcccgagcagatgcaggaaaagcctggggagaggttgcctcctacatttaggaagttgactgaacaggaagtaaaggattacctttcgttgtag

SEQ ID NO: 2054 - DNA, 774 bp, Cryptococcus neoformans
atgggcatcggacaggcatcggaagaagtcggaggaagaaagtgggatgagcctgataattggcgccgggtattggacgaatgggattcggtggattatcttcgattctctgcatcttcgtctgcctctcaacgtcaactcatctgtgcttctttccatctttgcctactcgcccccaatgtccacttccatcctccgcaactccctcgccagggcagtccacaagcgtgccctcaatcctccggacaactcctggtctcatgctcgcccagcgacggtgtgtaccaacaagtttactatagaggagcaatgcgaaaggtgctgaccataaacagactcgcctccaccgagtccgtgactgccgctgagagcattgcccttcttaactcccaaaggcagcaccgacctacgtctcctcacttggccatctaccagcctcagctcacatggtatctctccagtttgcatcgtatcaccggtgtcgcttttggaggtgccctttacctttccgccatggcctacctacttcacccccttgtccctgtcatcgactctgcccacctcattcaactcgtgcacgacttgcctggatggttcaagggaagcgccaagttcatcatcgcccttccctttacctttcactgctacaatggtttgaggcatttgaactgggacatcggaaaagctcttaccattaagggtgtctaccgaacaggttacgctgtcctcggtgccactgtcctctcttctctctacctcgctttcttcatttaa

SEQ ID NO: 2055 - DNA, 828 bp, Cryptococcus neoformans
atgcccacccctttggcgctcctcttatcggcaatcttaataataggcacctacttcgcgatgcccttttggccattccggaaatcgaactacgaccctcgagggaaacactgttacatcacaggcggctcgtcggggttgggcaaggctcttgcggagcggctggtgaagcaaggagcgcatgtcacgattgtcgggagagatagtaaaaaggcggaaggtgtggttgaggaactcaaagtgagtttagaggcaccgggccagatcatccagtgcatcgccgcagacctcacgtcccctatcgcctctactaacgctatccacgctgcgtgcaagccacacgcagaccaagcgcctgactatgtctacctctgtgctggattctctcggccgaaactgttcgttgaaacgacaaagcaagagttgaaagatggacttgatggtgtgtactgggtatcggcttataccgctcacgtgtgtttcatgatgagcaaacaacgccgtactggcaaaatcatctttgtcgccagtttcctctcctacgtctcttttgccggatactcatcctactctcctgccaaatacgctcttcgcggcctttcagatgctctgcgctcagaaatgttactgcacaatattgatatccacatcttcttaccgtgtggtatcagcggccctggattcgatgcggaaaataggacaaagccagctgtgacaaagaagattgaagaaggggatacgcctatcaccccggaagtctgtgcggcggctttggaaagtggtgcgtctattttcttacatttatgtaagatgaagaaaactgattag

SEQ ID NO: 2056 - DNA, 786 bp, Cryptococcus neoformans
atggccgtccgtactcaatttgaaaactctaccgacattggtgtcttctccaagctcaccaactcctactgtctcacagctctcgcttcttctacaaacttctactctgtctttgaagccgagctcgccgatgtcgtgcccatcgtccacaccaccatcggtggcacccgaatcatcggtcgtctcaccgccggtaacagacatggtcttctcgtccccagctccaccaccgaccaagaactacaacatctccgtaactctctcccccccaccgtcgccattcaacgagtagaagagcgtctgtcagctttggggaacgttatcgcttgtaacgactatgtggctttggtgcatcccgacatagatcgagagacagaagagattattgccgatacactcaaagttgaagttttccgacaaactattgccggcaacgtcctcgttggttcttactgtgccctctcaaaccagggaggtctcgtccaccccaagacatctcgatcagaattggacgagttgtcttctctcttgcaggtccctcttgtggcgggtacagtgaaccgaggttcagaggttatcggtgcggggttggtcgtgaatgactggtgtgctttcactggtttggacacaaccgctaccgaggttagcgttatcgaggctaccttccgtgtttctccccctattaaatatcgattgatactaacaacatctacaggattgcaaggacaaacttctaccgctgtcatcaacgaaatgcgagattcccttatcgaccactacgcttag

SEQ ID NO: 2057 - DNA, 615 bp, Cryptococcus neoformans
atggccgagaagaagcagaccgttatcctcaccacttctgacgatgagcaattcaccgttgagaagattgtcgctgaacgatccgccatgattaaatctatgatggaggaccttggtgaccaggagggtcagcccattccgctccccaacgtctcttcttccgtccttaccaagatcctggagtactgcgaccaccacaagaacgaccctctccccaccggtgacgccaacgacgctgatgactctagaagaaagacttctgagattggtgactgggatgctcgatggatccaagttgaccaagagatgctctttgagatcatccttgctgccaactacctcgacatcaagcctctcctcgatgttggctgcaagaccgttgccaacatgatcaagggtaagactcctgaagagatccgaaagctcttcaacatcaccaacgacttcactcctgaggaggaagagcagatacgaaaggagaacgaatgggctgaggagagtctgtttcatattatacctagatgtcatcgtttgttgacaaacactttcgttgcagccgttaaacaacttcatgtatggggtgtactttatatttttcgcatgttgttcatatga

SEQ ID NO: 2058 - DNA, 762 bp, Cryptococcus neoformans
atggctatcttcggtctcttcggaagctctgaccccgcccctcaagaatcctcggcctccgctgagctgttcagttccacaaccttcagatcaaacgtcgtcccttcccagccggaagcccaggggtcctccttcatccccgatcctccttcccagtccgctcccgcacccgctcccaccgcacccgccccaacagcccttgatgcatttggatccgcgttcgatcccgctagactccacccattggctggattgagtgaaaacctagattttttacagctcgatgaagaaaagttgaacgaccttgaaggagcggccagtgttttgccaagcaggggctggacggatgatctctgtgttggcacagggacgacttatctttctggtttggctatcggtggcacctggggcttaaaagaaggaatgtcaagaccgctgggaaacaacccctccttcaagctccggctgaacagtattcttaacggttgtacgagaaggggaagttttatgggcaattcgcttggtgttttggctattttctacaatatctcaaactcttcttttgacgccatcagggggaagcatgatgtacttaatgccatggctgcggcgggtttgagtggagcgatttacaagtcaactgccggcttacgacccgctcttgttggcgccggtcttggaacagccgctgcagctggctggtccgctttcaagaactttgtgatccattttaaggggcacacagttcttcatcatcactaa

SEQ ID NO: 2059 - DNA, 741 bp, Cryptococcus neoformans
atgatacagaattatccaacgatggccctctacgctcctccgccaccatcttaccaagatcatgcagctggacccgtccaacaccatggattcaacccttacagtgacaacggtggctccatccttgctattgccggcaaggactttagcatcatagcaggagacaccagacagtcagaaggatatagcattcaaacccgatatgctcgaaaagtttggcaattaaccgataaagtggtcttggctaccaacggtttcgcggcggacggaaacaatttcgttaagagggtaaagcaaagattagaatggtatgagcacgcccataacaaagctatgggcctcaaatctatcgctaggatgatccaaaccatgctttacggaaaacgattcttcccttactatgtatacaacattttgggtggtatcgaagaagacggatccggagctgtctattcatttgaccctgttggctcttacgaacgagaagcttgtcgtgctgcgggtgccgctcaatcactcatccaacccttccttgacaaccaagtttatttcaagaaccaacaacccgaacctggagctgctcccttcgtccccggtaatcttcccctctccaccgttctttctcttgtcgtcgactccttcacttccgcaactgaaagacatattgaagtcggtgatggcatggagatctatgttgttatggccaagggaaggtcaacagactttgcttggggaaggtaa

SEQ ID NO: 2060 - DNA, 816 bp, Cryptococcus neoformans
atgcagtctttaaatgccttggggaacaggcaaatagcgagtttgaatgcagacttgtctagaatggagaatggtgaaggaggcccggcaattcaaggtgagttgcgcgacagttcaaccatatccggaagagttatagacatggcgtatgtcacccttctcacaatgaattggatgcttatccatctctttcaaggtcaaattacgactactctcagtgctctatcgcgactgatagacgattatgattccatggcgaggaaggagatggttaccgttgcccgggataaggccaacaccaaaaaacgaaagtcaactcaaagtgggttgagcgattgtccagttgcagttccactgatatggtaccaggcccggcaggatttgctcggatcatcttcctcctcttccccctatccatcaacagcgagtacttctgtgtctcagcgtcgcgcgccaaatcaatcatccttcgcagaatctccatttgcttcctccgaccctctctttcggcccaatcaccctccatcatcgcgcgaggattttgctcttcgcgaacacactttcttacaagagtctgagaactctatagatcaatatattgcgcaaggaagagcagtgctggggaatcttgttgaacagaaaggaatgttaaagggtactaagagaagactattggacgccgcgaatacgttgggaatgagtagagaaactataggatgggtggaaaggcggaccaaacaagatgcttggatcttcggtgcgggagcaacattcacattgtttagcttctgggcgatttggtattacttgggataa

SEQ ID NO: 2061 - DNA, 801 bp, Cryptococcus neoformans
atgcggtacgcggtgctcgtaacaggcccagcaggtgccggaaagtctactttctgtgcctctctaattacacacgctcaaacgattggtcggtccgttcatctggtcaatcttgatcctgctgccgacaagttcgaatacgagccgactatcgatataagggatcttatcaatttggaagatgttatggaggagctggagtttggaccaaacggtggtttgatatattgtttcgaatatcttctcaataatcttgattggctagaagatgaattaggcgcatatgaggacgactatcttataatagattgccctggacaaatcgaactatacacccatgtccctcttcttccccgcctcgccacattcctttctacttctctcaacttcagaacatcagcagtctacttgatagactcgcagttcatgcaggacaagagcaaattttttgcaggtgtaatgagtgccatgagctgtatgctctccttgggaattagcatgttgtgtttgatgagcaagatggacttggtaaaggataagaagggccgaacgaagagagaagttggaagatatcttgacccagaccccaatctgctacttgaggatatcaatcagggcaccaactcgaagttcaaccagcttaaccgagccgtcgtctcactgatagaagatcagaacattgtgtctttcttaccgctggacgttacatcagaagactctgtaaatactgttctcagtcatatcgacaacatgatgcagtatggcgaggatgaggagcccaaggtccccaaggacggatga

SEQ ID NO: 2062 - DNA, 774 bp, Cryptococcus neoformans
atggggttgacttatccctctgtccgagacagcgtggacgaaaatgtatttctcttcgtccccaacctgatcggctacacccgcgtcatcacggccgccgcttccttattcttcatgccttaccaccccaaagcatgtactatgctctactccgtctcgtgtatgcttgatgtagtcgatggccaagccgcaagggctttgggacaaactagcagatttggagctgttttggatatggtgactgatcgatgcaccactgcctgcctgttgtgcttcctctcaagcgtgtaccccacttattctatgcttttcatgttcctcatcacccttgacttctcctctcattacattcacatgtactcgtctctcaccacgggatcatctagccacaagactgtcacctctgatgtctcccgtatcctctggtactattacaacgattcccgtactctcttcgtcttctgcttcgccaacgaactcttcttcgtctgcctctacctcaaccactactggactactcccttgatggccaactttcccattcccaccgctatcctaacctcggagctcactgccgctcaccccaagttggtcggcggggtgatcaatgtgttgaggaacttgaattggccgcaagtggtggccgctatgactttcccgatttgtgcggggaagcagattatcaatgttgtgcaattctggaaggctagcaagatcgtaagtccaagttcccctgtcctcctttcgctctctttttcttttaaaaatgaatga

SEQ ID NO: 2063 - DNA, 666 bp, Cryptococcus neoformans
atggagaacactgctaccttcaaaatggttttgtgcggtgacggtggaactggaaagaccacctttgtcaaacgtcatttgaccggcgagttcgaaaagaagtacattgccactctcggtgtcgaagtccatccccttactttccacaccaacttcggcactatctgcttcaacgtttgggacactgcgggtcaagaaaagtttggaggtcttcgtgatggttattacattcaagggcaatgtggtatcatcatgtttgacgtcacttctcgtattacttacaagaatgttcctaactggcaccgagacctcgaacgagtgtgcgaaaacattcctattgtcctctgtggcaacaaggttgatgtcaaggagaggaaagtcaagactggtaatgtgactttccaccgcaagaagaaccttcagtacttcgaaatctcggcgaagtctaactacaactttgagaaacctttcctttggcttgccagaaagcttgttggcaaccaatctctcgagtttgtggctgctcctgctcttgcgcctcctgaggttcaagttgaccaggcgctcattgccaagtatgaagaggagcttaaggctgctgccaacgcccctttgcccgatgaggttagtttttcaatgtgtttaatgagaagattcatctgttaa

SEQ ID NO: 2064 - DNA, 654 bp, Cryptococcus neoformans
atgccccgcccgcccgaagacccagatgtgagaaacagcaagacattggcgtacatcctccgccacggcgctgagaaggagggtctctatatccgttccgatgggtttatcaagcttgccgatgtcgtgcgtctctcttttcctctttcactctatccgtcaattagggtgctgaatgacaaccccaagggcgaatactttattcgcgcaacgcaaggccactctatccagctcgagtcgactgcacatctcgaacaagtgaaagatgatgaagaagggaaaagaaaggtaggcttgatggtccatggcacgagatgggagttgtgggatacgttgaaacaaggtctccaaaagatgacccgccagcatatccacctcgcccctggcttctcgggccccatcacccctcggcccaactccacactgtacatttacctcgacctgtccaagcttgtcgccgctgggatcccggtgtatgtcagtgcgaatggggtggtgcttacccctggttccaagggcggggagaatggagagggggcaggagtggggaaagagttttggagaagagcggtaaggaggaaagaggggaagaggtgggttgtgtgggaggatgggagggaggtggagagggaagagttatcaggtgaggagtag

SEQ ID NO: 2065 - DNA, 846 bp, Cryptococcus neoformans
  misc_feature (397)..(399): n=g, a, t or c
atgtcgacaactgctgtagaaaccgtcaccacctctcccgcgactctcaccactgccgtcaatgatattaatctcgattcgtatgatgaagagcaagtaagacttatggaagagaggtgcattcttgtcactcccgaggacaaggtttatggcgaaggaagtaaaaaagtctgtcacctcatgtctaacatcaacactggtcttcttcatcgtgctttttccgttttccttttccgccccgccgatggccgtctcctccttcaaaaacgtgccgacgaaaagataactttccccagcatgtggaccaatacttgctgttctcatccgttgagtatcaaagctgaacttgtggaagagcaccaggcaggtgcgttggccattttgtctatagagattnnnactgacttcgttgcaggcgtgaaagccgccgccattagaaaacttcctcaagagctgggaataccagagagtcaacttaagcctgaggacttccatttcctcactcggatacactatctggcgcctagtagtggcgtctggggagagcacgagatcgactacattctgttctctaccctcaacgtggaccttgacctcaaccccaacgaggtcagtgatgccaaatatgtttcaaaatctgaacttgaggccatgttcaccgatccttccaattcattcaccccgtggttcaagcttattgctcgagaccttcttttcccttggtgggatgagatgcttgccaagtctagatcggccgggtgggacgaggagagcggagttggagaggttcgagcggacgtactggctaacggaccgaaaataaatgagctcattcggatgatctga

SEQ ID NO: 2066 - DNA, 765 bp, Cryptococcus neoformans
atgacgcatcctcaacgacggaggtatgtcacaattggcccccttcttctcgcccactcactttctttttgcacaaaactaggtctcagacaagatgcccgccgtccttacgaactccgatccacatccttccagctatccacgcactcttcttctgacggctcgtctactgccacgcaaggtctcaccacagtagaagtttctgtgtttgggcctcgggaacccaggaatagaggtttggcaagccacgatcgcgcggttgtaagcgtcgaggttggggtggttccgtgggctgctggagcaggagctagacggacaaggggcgataaacggttacaggagataggagctgcgatcagacaaacgtttgaacctgtcatcatgacacacttataccctcgaagcgagatcgcaatccacgttcaagtcctttccgcagatggagggattcttcctacatccatcaacgccaccaccctcgctctgattgatgcgggtatagccctccttgactacgtctcctctatttccatcggcctacatctcctacaacccctcctcgatctttcacaacctgaagaatccgatctcccatcccttgtcattgcatctcttccgtcctctggtaaaatcacgttagcacaaatggagacacgacttcatgttgaccggtttgaggagatgcttactttaggcgtagaagcctgcaaggtcttgaaggaagagatggatggagtggtgaaatcggacagaaagaattgttga

SEQ ID NO: 2067 - DNA, 801 bp, Cryptococcus neoformans
atggcccacaaatcacacagacacaaggccctccaggctcagctcgaagctcagcctaccatatcccttatatcccaaaaaactcgaaagcctcccgctccgtccatggacgtagaccaagacgacgacgttcttatcagtaccaacgctgcttcggcccctaataccaccgatccctcagacgctcctgtctctgcgaccaccacatcttctggatttgcccctcttaccgctgccgcccaatccactgtccttaaaaacgagttcagaaggattcctatccctccgcatagaatgacaccgttgaagagagattgggtcaacctttatacacctatggtggagatgcttggtcttcaagtcagaatgaacccgcagcgaaaagctgttgagttgaagacttccgggcacactgtagattctggtgcgattcaaaaaggggccgattttgtcaaagcatatgcccttggatttgatgtcaatgacgctctggcgctcttgaggttggatgacttgtatcttgactcttttgagatcaaggatgtcaagacattacatggagaccatctcgctcgtgctattggtcgtatagcaggtgaaggtggtaaggtcaagttctctatcgagaatgccagtagaacacgaattgttctggccgacacccacatccatattcttggttctgtacaaaatatcaagattgctcgagatgctgtcgtttctcttattcttggttctcctccaggcaaggtctacgcacatctcaaggcagtcggtgcgaggatgaagcaacgtttttag

SEQ ID NO: 2068 - DNA, 858 bp, Cryptococcus neoformans
atgggcgctctgtctgaagtggagatgcgattccctgccgtaattaaggtatatttaagattatgttttattaacacatcccacctactcggtcggttttttcgagcagacggcttggcagacggtattcatccatctctttccacagcctgtcaccaaagcaaacacaaaccagagcattttaaaatgaaccccagatcactcactaccgctgttcgatccttcacccgcagagtcccccttcgacctgctcttcctgccgcccgaacttttgcccctcagcttcaagcgcgagcttacagcgaagagaaggagttccacgagaaggaggacaagcggatagctgatctcgaggccgccaaggctgagtcagacaaaaaggctgctgagtttgaggagaaggtcaaggagttgacaaccgccattcgaaggaccgccgaggagaaggccaaggcttctgaattcgccatctcctctttcgcccgcgctctcctcgacacagctgatgttctctctactgctctcaaacacgtccctcaacccattcccgccgagaacaaagacctccaatcccttcacactggtgttgaacttacccacaaggctcttctcaaaacttttgagtcacacggtgtgaagaagctcgaaagcttgaagggcgaacagtttgatcccaacgtgcatgaggctttgttcactgttcctcaagcggttgctcccaaaaaggagaacggggagcctcatggccctaacgaaatttttgacgtaagcaaagaaggttggacgattggttctagggttttgaggccagcgcaggtcggtgtcgttgcttcggagaaaaggaatacagatgggtag

SEQ ID NO: 2069 - DNA, 783 bp, Cryptococcus neoformans
atgggtattatcgttgttaccagttaccttctcattgcgctattgaacgaaagtgtaattctagggcctgaccctgatttgccacttatccgagagcggatgagctctgtaagacggaaaatattggtgctttcagggaaaggtggcgtggggaaaagcacatttactgcaggtttgtcttgggcccttgcagcggatgaagagtgccaagcgggaataatggacattgacatctgtgggccatcgatccctttgcttatgggattagaatcttcaaccatccacacctcggcctctggatggtctcccgcttatgcacttgacaacttagctgtcatgtcgatcgggtttttacttccttcctcgtctgatgccgtcatctggcgtgggccgaaaaaaaatgggcttattaagcaattcctgaaggatgttgagtggggtgatttagactacatggttgttgacacgccccctggaacaagcgacgaacatctgtcgattgtgcagtacttgaaggaggcaggtatcgatggcgctgtacttgtaacgacaccgcaagaagtggcactgcaagatgtgagaaaggaaattgatttctgcaagaaagtcgggattcccattctgggactggtggagaatatgtctggttttgtttgtcccaattgcaagaatgagagccaaatatttgcccccacgacgggtggggcggaggcgatgggcaaagagctcggaatagaattactgggaaaagtgccactggaccctagaattgatgacttgtga

SEQ ID NO: 2070 - DNA, 867 bp, Cryptococcus neoformans
  misc_feature (78)..(78): n=g, a, t or c
atgtcctcgcctccacgatacaccgaagagccaaatctacgaccagctccttcaaaggcctatggcacaacccccgcngacactgctgccacgcaaccccttctcgcagctcaggcgtctactaatgcccaacgcgcagccgaggaaggttggcgggacgacgaggataatgtgtcggacaactacaagctcggtgtctctgtctctgactgcgatactgaaatccgaatgctctttatccgcaaagtctactctatcctcttgattcaattgctcgccacggcaggagtgtcaattcttctctccttgccgtcggccaaggactttacccataccaacccgtggatcatgtggatcccactgattggtagctttaccagcttgttctttgtctactggaagaggcaccaacacccggcgaatttgatcttgttgggtttgttcactttgttcgaagcgacgatgattgggttggctgtgagttactatgagagccgaattgtaattcaagcgctgttcatcactcttggcgtcttcattggtcttacactcttcaccttccaaaccaaatacgacttttcctccttcgcacccatcctcttcattggcatctggggtctccttaccacttacctcatccagatcttcctcccattcaatgccaccgtcgacctcggtattgcctgtttctcgaccctcttgttctctggtttcgtgttatatgacacacagcagattatgaagaggttaagtgtggatgaggcaattgcgggagcgttgacgctttacttggactttttgaacttgttcttgagcatcttgaggatagtgagtgctgtcaacaatgattgggaatttggaagctga

SEQ ID NO: 2071 - DNA, 825 bp, Cryptococcus neoformans
atgcctcagcttcatatcgcaatttcctttcttaccaaggctaccagtaaagtcgctgtcgtgactggtgcctctgtcggtatcggtctagctgccgctactgccttcgctgaggccggcgccaatgtcgttctgctctatgcaagaagcaagcatactgaaaagaccgcttccgatctagctgctcgaacgggggtcaaagtcaaggcctatcaactcgacgtgcgggactatgacgccactcagcggttggttgaaaatgtcgtgaaagagcttggcaggctggatatctgggtagctaatgccggtattccccaagacgacactatcctcgatggcaaccggaaacactgggaggacatcattgccgtcaactacaccgctgttgtatatcaagctcaaatcgttggaaaggcatttaagaagcaggggaacggctcgttcatcattacagcatctgctgccggtatcgccaacatccgacctactgaccaaggcgtttacaactctagtaaagctgcagtgatcgctctggcccgttcgcttgctcaggaattcaaggatttcgccagggtcaactctgtgtctcctggctatatgggtgatgcacaaggcgcgccggagtctgagattaccaatgccttgactcgtcaggtcctcaaccggacaggggagtacagagagcttgctggtgcctatctttaccttgcttccgatgcttcgaccttctgcaccggcacagatttgagtaccaccagtgtaaccatcttctctcatcgtgctgaccaagttgtaaggattgtcgacggtggctatcactgctaa

SEQ ID NO: 2072 - DNA, 939 bp, Cryptococcus neoformans
atgacttacccaaagattcatagcaagaggcattttgttgatttctgttttgtgatggaaagagaagagacgatgaaaaggtgtgttagcgttgaaatatttctgggatgccgccagaaaaacaatcaccgctctcaactttttaaaactgaaggacagccacgtggccaaagtggaggggccggaaatagcgggataagggatgtgtggcaaacggggggagggatgacgcgctgtcattcactcctggcctctgcaggacacttggcaggaaggaacaaggaaggaggaaagaaagataaaccaggatacaagaatagacgaaacactttagcccatcaagctgactcaaccattatggtaagtcccctcacctgtccgtccttctccagcttatcatacttcacgaacaagtcaaacaccctccgtccttacctcaacgccgtccgcgcaaccctcactgccgcacttaccctgtccaacttctcatctcaagtagttgaacggcacaataagcccgaagtagagtgcggcacctcgccagaggttgtcctccatccgttgatcatctcgaggaatgagagcgaaagggtgctcatagagcccagtgtcaactcaatcaggctcagtatcgcaattaaacaagcagatgagattgagaagattctgtgtcacaagtttaccagattcatgatgatgagagcagaaggtttcgttattctcagaagaaagcccttacctggctacgacatctcgtttttgataaccaatttccattctgaatcaatgctcaagcacaagcttgtcgatttcatcattcaatttatggaagacgtggataaggaaattagtgagatgaagctttccctcaacgccagggcgcgaattgtcgcagagagttacctttctacggtaggtttatcatcttcatctcgatag

SEQ ID NO: 2073 - DNA, 684 bp, Cryptococcus neoformans
atgttctcctccgagatagcgcgtatgaggaaattgggcgttcagggggtaagttctcacgctcaaggctccagtgtatgttatcttgctgataagtttatcccttatactctctctctcctcgctctcgctttgtgtgtctatgtgtgtgtggtgctctcctctcctctcttgccatcggcttcactcaacctcttaacggtagtagcctctgggcttatgatgtggaaaggtctctgtctgtttacgaattccgaaagtcccatcgtcgttgtcctctcgggatcgatggaaccagcattttacaggggtgatatcctgtttctcataaaccctacggatgtaccgtatgaagttggggatatcactgtttacaaagtccctggaagtgaaataccgattgtccatcgagtgatagaatcgcacaccacaaacacaacccaactcctcctcacaaaaggcgataacaacccgggagacgatgtcgtgctctacaacggtcttcaatggattgagcgtcggcatattatcggtaaagttcgagggttcctcccatatgtcggctacgtaacgattgccatgaacgattacccgcaactcaagtatgcgctgttgggtaccatcggcttagtcatgctcgtccagcaggagatagcagagcttgagtctgatagatggacatga

SEQ ID NO: 2074 - DNA, 819 bp, Cryptococcus neoformans
atggtactgtccggtaagttggcattcattatcgaacactcctgtacgccagaacatcatggaatgtatatgactgacgaacttatcttgcagatagcaacccttgaaggccataccgggaatgtagttgctctagcatacagcgctttagggaaatggattgtcacgggtagcgaagacggaacagtcaaggtgtgggacacacggacggctcaaactcaacgtatatacctacatgattgccctgtcaacgacgttgtaatccacccgaatcaaggagaattgataagctgtgatcagtcaggatcagtcaagatatgggacttggcggagaacacatgtacacacgaacttgtaccggatgaagatgtacctatcagaagcgttagtatatcatcggacggaaatactctcgtagctgccaatgacggcgggatggtttacgtttggcgtatcattccagtgccgaatgccaacgctaatctcgtccctgtcaccagtttccgagcccatacaaagtacatcactcgttgtcttctcagccccgacaccaaataccttgcgacatgttcagcagatcatactgtcaagatttggtcaacggcgggaatagactatactcttgaaaagactttgacaggccaccaaagatgggtctgggatgcggcgtttagcgcggactccgcgtatctcgtgactgcctcgagcgatcatgcagctaggctatgggatttgagccttggggagactgtgaggcaatacgatgggcatcatcgagcggcagtgtgctgtgccttgaacgatattaaccttgcgtga

SEQ ID NO: 2075 - DNA, 801 bp, Cryptococcus neoformans
atgcagacaatcaagtgtgtcgtagtcggagacggtgccgttggaaagacctgcttgctcatctcgtacactaccaataagttcccatccgagtatgttcctaccgtctttgacaactacgccgtcagtgtaactatcggtgacgacccatacactctgggtctctttgatactgccggtcaagaagattatgaccgtctccgtcctctctcatacccccaaactgatgtcttcctcgtttgcttctctgtaacatctcccgcgtctttcgaaaacgtccgcgaaaaatggttccccgaaatcgcccaccattgccccggcgttcccgcacttattgtcggtacccaggtggatttgagggacgaccctgctcagacggagaagttgggaaggcagaggatgaagccgattacacaggacatgggagaaaggttggcgagagagttgggagccgtgaagtatgtggaatgttcggcgttgactcagagaggattgaagaacgtttttgacgaggccatcgtggcggcattagaaccccctatggcgaccaagaaaaagtctaaaaagtgtctcattcttaagacaccccttctttttggcttccctttcgcccattatctctatctcattcttcgtctatcattcgcttttcatttctgccatcacttccttcttgatccaagatacccaacattcctcatcccttgtcaaatatcagcttgcaatatttttcagaatttgaactttactttgcctcgcccctcgctgttctcaaactcatgtcacattatcgtgttctaa

SEQ ID NO: 2076 - DNA, 903 bp, Cryptococcus neoformans
  misc_feature (561)..(561): n=g, a, t or c
atgtcggtactggttcagcaatgccactgtatcgtatccgtctgctcacaactcacagtcgtcggtcttaccggcggcatcgcttccggcaaatcaaccgtctccaaactgctctctgaaagacatcatcttccgattatagatgctgatctcattgctcgcgaggtcattgagcctggcacatccggttactccctcgttgtctcacactttggccctgaccgcatcttgcaggaagacggagtatcgctcgatagaggagctataggtgatatcatctttcatgatcctgaggaaagaaagtggttgaatggggtcgtgcacccgagggtgaagaaggaaatggtcaaacggatcataagatattggctaaatggggaatggtgtgtgatcgtcgatgtgccgctattgattgaagcgggtatgtggaagtgggtgggggatactgtcgtggtatatgtcaatgagcgtctccagctgtcgcgcctcctcggtcgccaatctaatcctcctttgacccaatcccaagcttcaagccgaattgcatctcagttaccactntcggccaagctttcctacgccacgtctgtcattgacaattccggttcattttcagacctgaacgaccaggtcgataggacggttgccaagtggaaggcacagcaaggcggagattccggttggtggtggagggtttgctggttagtaccgcccgtggggctagcagctggtgcattgagcttgctagctgtttggaggaagggcaaaaaagacaggaggagagggagaggagaggtctcaaggagggacaattccgagcaagcatcagaaaggatagagctcatggaactgaaggggggaagacggagaactgcgagtgggagtgtcacggacgaagaataa

SEQ ID NO: 2077 - DNA, 747 bp, Cryptococcus neoformans
atgtacgcgtctgtacctcagcagatatggccgatcaaggatacatgtcgtctggttctggcagtggccgtgcttctggtggagaggggagtgacagaaactcgtgcgcatcaaaacttgaactctgaagttactgagtgtactaacgcaggtattatgtgcagaattgttctcaaagtaggcatggttggtgattcgcaaattggcaagacatcattaatggtcaaatacgtcgaaggcagctttgacgaggattatatacaaacactgggtgtcaactttatggaaaaggccatcagcatacgaaatacagagatcaccttctcaatatgggatttgggtggtcaaagggaattcgtgtcaatgctccctcttgtctccaatgatgcggtggccattctattcatgtttgatcttacacggaaatcaaccctcaatagcgtcaaagagtggtatcgacaagcacgtggatttaacaagacagctataccagtgttaatcggaacaaaatacgatcagtttgcgtctttcccaagagcagagcaagaggaaattaccagacaggcgaagaggttctcaaaggctatgcacgctccactcattttttgttccacttcacactctattaatgtccagaagatcttcaaaattgttttagcaaaggctttcgatcttaagatgttgatttccgtattcttcgggaagggtattaacttttcattcgcagtgtgtcattcccgaaattga

SEQ ID NO: 2078 - DNA, 831 bp, Cryptococcus neoformans
atgtctcgctcttacgaccgagtagaatacgctcttgaagccgtgcgacgaggaacatgcgccgttggtgtccgtggtaaatcatgtgtggtcctcggtgtggagaagaaatcaactcttcaacttcaagatcctcgaacggtccgaaaggttgccatgctggatgatcatgtttgcgtggcttttgctggtcttactgcggatggtcgtatcttgattgacaaggcgagaattgagtgtcaatcacaccgactgactgtagaggaccccgtcagcattgaatacatcaccaagcacatcgctggtattcaacagcgatacactcaatcaggtggtgtccgaccattcggtatatccgctttgattgtcgggtttgacccacatgacactattccccgactgtactctaccgaaccaagcggtatctactctgcctggaaagcttgttctatcggaagagcatccaagactgtcagggaattcttagagaagaactatgtggaagaccttgagagagaacaggcaattaaattaacagtgaagagtctgttagaagttgtgcaaactggtgcgaagaacattgagattactgtgatggagtcatatggtgttgttaaagcccttgagcaatctgatatcgaaaaaattgtcgctgagattgacgctgagaaggaagctgaggccgaacgtaaacgtcaacgtctggctgccacacaagcagggcaagcatctatggccatgggttcttccgtgccttctggtacagagacaccggccggccgccctcaagaacatgcttcagcccctgggggtgacagtggggtgcaatag

SEQ ID NO: 2079 - DNA, 795 bp, Cryptococcus neoformans
atgatggccattgaatgcatacaattgaggagaatgacagacaagatccatcatctcgagaagtctacctccacctccgtctccaacaccatctcctccgtcacctctgccctctctccctcttcctccatcaagcctccccgaatggtcctcattggccctcctggtgctggtaagggtacacaagcgcccaacatctccagcaagtactgcatctgccacctcgctactggtgacatgttgagggagcaggtcgccagacaaaccgagttgggcaaggctgctaagcagattatggaccagggcggtttggtttccgatgagattatggtcggcatgatcaagcaggagttggagaagaacgccgagtgcaagaacggcttcatcctcgacggtttcccccgtaccgttccccaggcttccaagctcgatgccatgcttgccgagcgcaaacaagctatcgaccacgctatcgagctcaagatccccgacgtcttgttgatctcccgaattactggtcgattggtccaccccgcgagcggtaggagttaccacaaggaattcaacccccctaagaagcccatgaccgacgacattaccggcgagcccctcatccaacgttccgacgacaacgtcggtaccctcaggaagcgattggacacttatcacgcccagactggccctgttgttgactactacaagggtacaggtgtttggacccctgtcgatgccgctcagagccccaagttggtctgggctagcatcagcagtattttggaaagcaagaagaactaa

SEQ ID NO: 2080 - DNA, 891 bp, Cryptococcus neoformans
atggccgctgcagccgcctttgacctgctcgacaagtacatccccggcgcctcagattctctgaccattgtcaatgccaccaccgcgcaaaacaccctctatccaggtgtcgactttgccgccctcaactggctcgagagattatgggcatcctactacgtctgggtcggcaaccccatcattgccaccggcttgatgagctttttgctccacgaaattgtctattttggacggtgtatcccttggctcatcatcgatgctatgccctacttccaaaagtggaagcttcagcctaacaagcacgtctctcgcgcgcaaatcctcaaatgcaccaaggtcgttcttctcactcacttcacctgtgaagctccccttatcctcgccttccaccctatctgttgcttgttcggaatgaagacttacgaaatacctttttcatctatcggtctcatggctgcgcaaatcgccttcttcttcgtctttgaggacactttccattactgggctcacagggctttgcactatggtcctttgtacaagcacattcacaagctccaccacgagttctctgctcctattggtatcgccgccgaatatgcccatcctcttgaagttttgatcctcgcgcaaggaacgatctctggaccattcttgtacgctgtattcaggaatgaccttcacatcctcaccgtctacgtttggatcactcttcgtctttggcaagcagtcgacgctcattctggctacgacttcccttggtctctccgacacttcctccccttctgggccggtgccgaccaccacgatttccaccatgccactttcacttcatgcttctctaccagtttcaggtggtgggactactactttggcactgatcaaggtaagtga

SEQ ID NO: 2081 - DNA, 900 bp, Cryptococcus neoformans
atgttcagaaactcgtacgactcggataacactaccttctccccccagggaaagctttttcaagtagagtacgctctcgaagccgtcaaacagggttcagcagccatcggcctcaggtccaacacccacgccgtcttgcttactctcaagcgatcaactggcgagcttgcgacatatcagaagaagctcatcaggattgacgatcacgttggtgtcgccattgctggtttgaccagcgatgctcgtgtcttgagcaattatatgcgacaaaaggctatgcaatctaggatgacatacggtcgcgccacgcctgtcgctcgtctcgtccaaagtatcgccgaccgcgctcaaacaaacactcaagagtatgggcgaagaccgtatggagttggattccttgttatcggaaaggacgaaaccggccctcacctctttgaattctccccagccggcaccgcttttgaatactatgcccactccatcggtgcccgctctcaatcggcaaagacataccttgaaaaaaactatcatctgttccccaacgcctcacttgaagagttgatcaaccatggtctttcggctttgcatgatacccttcaacaggacaaacatctctcctctttgaatacttctatagccattatcggtcctgccgagggacaaggagtggaggatgtgagcaaatcagcagcggcacagagaggtggatttagggtgtgggagaatgaaggtgtggaagggattttgagaggatggaggaggagtaggggggagccagaggaggggccagaggctgaaggcgagtctcaagctgaggcttcagctgagggccagaatgaaggtggggcgggacagcaagagggacagctcccggcggaggacgtgacgatgcaagagtga

SEQ ID NO: 2082 - DNA, 918 bp, Cryptococcus neoformans
atgggcatcgccatcctctctggtgtcatctcttccctcgaaacccgcgcttctcttcctcgcaaccctaacgcctcttccgaacctccttccggtatctccacccctaccgcctcccaatttcttgatgccccagaagcttcccttcctagcactttcatcgctaccgtcggacgcgaggagaccggccgcaagctcagacgcactttggccgacatgggctctatcgggaaacaagtccaggtccgcgctggtcaagggaacgtcaagaccgtggacgaggccgatgtcatcttggtgtgttccaagcctcagattgcgaggtcgatcttggaggaggaaggtatgagcaaggcattggagggaaagctactcatttccatctgtgcgggtgtgaccatctcccaactgaagagctgggtgcccgagagcacccgggtggtgcgagctatgccaaacactccttgtaagatcggagaaggcatgactatcgtgacccccctgtctgacgctctttctcgaacacttatcctcaacatctttacttcttgtggcagatgtcgattcctcgacgagaagcactttgacgcttgtaccgcccttgcgggctctggtcctgcgtttgtggctttggtgttggaggctatggccgatggtggtgtgatgatgggtttgcccaggtctgaagctttggaactagctgctcagaccatgcaaggaaccggaagaatggctcttcaaacaggtttgcaccctgcccaattgaaggacagtgtcactactcccggtggatgcaccattgccggtttgttgacacttgaagacggccgggtgcgatcaacgatggccagagctatccaagtcgccactaacgtaagttttatctattctctcttttctccggaaatctgcagctaa

SEQ ID NO: 2083 - DNA, 831 bp, Cryptococcus neoformans
atgcgctccctcccctccaccctcgtacaccgcctcttctccgtcgccacctccctcctgctcttcctcctcgcgctcggacccatcccacaccatgtcgctttcgtcatggatggcaacagacgatacgcgagagagctcggtcagcaagtagagagtggccatgctgaaggtttcaatgccctcagaagaactctcgagatatgcctacgattgagaataagagcagtgtcgatatacgcctttgctatagacaacttcagcaggtcagaaaaggaagtcggtgctctgatgaatctcgccaagcagcgtcttgcagagctgtgtgaacatgggtgcgcatgtctcaagtatggcgtcaagatacgctttataggccagcttgatatgctgccacctgatgtgctccaagccgtccgcgacatggaggctatgacccaggataacaaaaatggcgtattgaatgtatgctgtccgtacgcttctcgggatgagatcaccactgcgatgaaggaaagcgatgtgttcgattcgctgggagtgtctaaagcaatcaacactgtggacaagagtctgttcgtcaatcccgaagagccagaaaaacttgatatactcgtccgaacatcagatgtcaaaagactaagtgatttcatgatgtggcaggcttcagacgatacccagctgcactttgtcaaaacctactggccagagtttggattatcagatatgttacccattcttcttggatggacaaaaggcatggatgcggaaacttggttggtgttgaacgcgagtgtcgagtggtattgtgtgatgcatcttacgatctaa

SEQ ID NO: 2084 - DNA, 921 bp, Cryptococcus neoformans
atgtcctttctgaccgtttcgagagatatccagttcgtagactacgacaatgtccgattccacctgtccaccccgtcatccaagactcagcttcttctctccatgggtatccaatgctggcctgaccttgtcaagtatggtgcccgtgaacatctccaaaacgagtaccaaggctatttcctcgctgaggctgatacagagcctgagtacgatgtcagtttgttgattgatttggaaagattgccggagagcccgggtacgtggcaggagcgagctgcccttatctccaaaattgcccatctcaagtccaccgcaatgtcctctcctttttttgccgcttttgcagaacaagcgtctcttcaagcatcttacaaggagcctgccggtgcccagcaagcagacttgcaaccatccgaggtcaagggagatttgaagattgtgaagtaccgcgaagaagaagccatcttcatccaagccagccacgatcgagtgactatcatattctctacggtatttaaggaggagacagaccgagtatatggaagagtgttcttgcaggaattcgtggatgctcgaaggctgcacagtcttcaaaatgctcctcaagtcatgtactctaaccgcgagcctcctctcgaaatccgacacctccctggactcaagaacggcgaagattggggctatgtcactttcgtcctcttccctcgtcactttgcaaatccatcccaagctcttgcgactatcaaccgtatccagctcttccgcgattacttgcactaccacatcaagtgctccaaggcatacatgcactctcgaatgagatacagggttgctgaattcctcaaggttcttaatcgagcgaagcctgagattgctagtgagaagaagaccgctagcggtaggacgtttaggtcacgttag

SEQ ID NO: 2085 - DNA, 864 bp, Cryptococcus neoformans
atgtccaacgaagcctctttatgcaacagactctatatacgctcacttttctctatcacagcccaagatgtttatgacaaggtaagcacacacgctgaccagacacagctaacggctcccagatcagagtacgaccggggtgtcaacaccttctccccagaaggtcgattattccaagtcgagtatgctatggaagcgatcaagcttggttccacaacagttggtatcaccactccccacggcaccgtgctcgccgttgagaaacgtgtcccctctcccctcctcgaatcctcctccatcgaaaaaatcatggaaatcgactctcacatcggttgtgccatgtcaggtctcacagccgacgcccgaacaatggttgagcacgctcgagtcacaagccagatgcacgcgttcacctacgacgagcccattggtgtggagagctgtacccaggcggtttgcgatttggcgctgaggtttggtgaaagtgtggaggacgatgatgcgttgatgtctcgaccgtttggtgttgcgcttcttattgccggtatagatgagaagggtcctcaactctaccacaccgacccctccggtacatttgtccgctatgaagccaaggctatcggctccggttccgaagccgcccaacaaggtctccaagatgcttatcacaagcaaatgaccctcgccgaagcgcaatctttggcgttgaaggtgctcaagcaggtcatggaggagaagctcgacgagagcaatgttcaacttgcgcaagtcacaaaggaaaagggattcgagattctgggagagcaagcattgaagggcgtcattgagactcttctagaagaagtaaatgtagaatatgcatga

SEQ ID NO: 2086 - DNA, 921 bp, Cryptococcus neoformans
atggagaaaaagacgaaagatgccatagatgtgcttgaaccgagagcaattgtcgattaccctgattacctttcccggctcattccaatcatccatccgtctccgccgtcggcttcgtcctcagcttcttgctttatagacgaactcgctgtcgatttcactactctttcactatcgcctatacaacatgtttacaggtctcgtaagcccatatcactctcatattattcacgtaaatgctcatctcctccgcagatagaacatacatctaccatctccgccatctccccttccacctccacctccggcttcacacttactctctcctcctctgcgcccattcttacagactgtcatatcggcgattccatctgtgtcaatggcgcctgccttaccgtcactgagttcgactctgattctttccaggttgggctcgcacccgagacgctgaggcgcacgaatttggggcaagtaaaagtgggtgacaaggttaattgtgagagggcgatggctgggcatacgaggtttggtgggcatatggttcagggccatgtagacggtacagcgaccatcatctcgaaaatccccgatggtgactctatccggtacactttccaactccccgccaccaccacgcttctcccattcatcatcgaaaaggggtacatcaccatcgacggtgcgtcactcaccatcacccacgtcaacgacgcccaacggtcttttggtatcatgctcatcgcgcatagtcaagcaaagttgacgttgacagacaagaaagaaggggatacggtcaatatcgaagtggattgtgtgggcaagtatgttttgggaagtgtggagaatagaggggattgtggagaagatcgtggagagaaagttgaaggaaaaaggattataaaattacttttatgcaggtag

SEQ ID NO: 2087 - DNA, 900 bp, Cryptococcus neoformans
atggacggaaagtgcctcttgttgagcatgtgccaactcggcatagctgcgcttcgaattgaccaaagagtctttgtcactccttctaaccgcaagcttgacgtcaatgtcgttcagtcaaactatcacatcgagcttacaccatccgacgtgggtatgtacgacagagtagtcattcaagatattttgaaggagattgcacaaactcagcaagtcgatttgaatgcaaaacagaggttcaaggtggtcatcattaacgaggcggatgctcttactcgagacgcccaagcagcattacgacgaaccatggaaaagtatatgaccaatatgagacttatcctctgcgccaatagcacaagcaaaatcatcgctcctattagaagtcgatgtttgcttatgcgagtggctgcccctacagatgacgaaatgtcaacagtcctcaattacgtcgccaagaaagaacgattcatgcttccatcttctgccaacaatgccatccttgaaacatcgcaaggcaatcttcgaaaagctttacttgtttttgaggccatgcggatgcaacaccccgacctgtctggtgatgtcgaggttgccaaacccgattgggagacttattgtggaaaggtcgcggatgcgatcttgcaggagcaaacggcgcaaaaattgttagatatccgggcgaagatttacgagttgctaagccactgtataccgccaacagttgttatgaagaccatctcagagaggctagttgagaaggtggatgacacattaaaaccgcaaattgtgcactggaccgcttactacgaacttcgaatgcgaatgggatcaaaaaagatattccacatcgaggcatttattgccaaggttatgactgtttacaagcaatacacactgtag

SEQ ID NO: 2088 - DNA, 885 bp, Cryptococcus neoformans
atgaaatgttgcagaaagggatctagccactacgatatccatatatctggtgacgtggaaggctttggaatcttctatctaatgtgggtgaattatctaaactacgttcacttccgattgattttagttccgaagcaagtagacgagacgggctctcaaatcgagaaacaagtcaatgccacagcttccacttcgacttcgaggcctgccttatcttcccacgagtctgaaggctcgtctgttatgaagactaagaaaaagaaaaaggctcaaacccctggtattgtgttcatctcgagagtgcctcctggtatgactccgcagaagataaggcatttgatggggcgttggggagatattgggaaagtgtatgcgcaacggcgagatgctcctggcggttataacccaaactcggcaaatcagaagaaacaaaagcatgccagcgccaactttactgaagcctgggtagagtttttggataagtccgtggcgaagacggtagcttcgatgttgaatgcgcaagtaattggtggtaagaaaggcgatagatggagagatgatatctggaccatgagatacttgagtggattcaaatgggagatgctcggtgaacaaatcgcatacgaaaggcaagctcaccaggctcgccttcgaactgagatcactcgggccaagacggagcagaacgagtacctcaagaacgttgagctggcccgtactctggagaaacgtaaagcaaagaaggctgctgccggtggaccttcggagagtgcaccaaaccaggatgctcactccaggagttataaacagaggaacgttgtggagaaacccaaaactctggagggccagggaatggacggggtcttgaataacatctttggatag

SEQ ID NO: 2089 - DNA, 891 bp, Cryptococcus neoformans
atgggtgttttggtttcattgctctctcgttcggttgttcaaatgagtattgcacctctcaggccttccatgtccgaatcctacgccataaacatgccctcagtcgcagctcaaaccgccccatctcctaccgataagtactctgtcattttacctacatataatgaaagaaagaaccttcctgtaattgtttggctcctggccaaaacgtttgaaactgacggaatcaactgggaaattgtcattgtcgacgatgccagtccggatgggacccaagaaattgccaagcagcttgctggaatttacggagaggacaagattgtcttgaaaccccgtgcgggtaagcttggtctcgggacggcgtatgtccatgggttgaattattgcactggcaactttgtcattatcatggatgccgatttctcacatcatcccaaattcatccccgaattcatcaagcttcaaaaactccacaacctcgacattgtcacggggactcgatattcctctcatccgtctcctaaacctactgcctcctctctttctatcgggcttggtcctggtggggtctacggatgggatctcaagcgtaaactcgtgtcccgcggagccaactacctggcagataccgtcctcacccccggcgttagtgatttgactggcagtttccgtctgtatcgcctgcacgtcatcaaagacatcatctctagatgcacgagcaagggttacgttttccagatggagattatcgttcgagcgcgggctttgggttacactgtgggagaggttccgatcacctttgtggacagaatttatggggagagtaagctgagcgggaatgagattgtcggatatgccaagggtgttgcaagtctatggtggagtgtgtaa

SEQ ID NO: 2090 - DNA, 909 bp, Cryptococcus neoformans
  misc_feature (6)..(6): n=g, a, t or c
atgcgnaaatatcataggtcacagaacttagcggcgtcaatgtgtaccgttatacaccctttagttcttctgtctgtggttgatcacgctgcccgagtgcccttgtcgaagaacaagcgagtgctgggtgtgctgttaggacaagataatgggacttccatcaacgttgcgaacagttttgcgattccatttgaagaagatgagcgtgatcccaagacattcttcttagatttggattatgttgaggaaatgtggagaatgttcagaaaagtcaacgccaaggagcgccctataggattctaccacactggtccccgtcttcgctcatccgacctcgagatcactgaactcttcaaacgtttctgccctcgacctgttatggtcattgttgatgttcgaacttctggtggccgaggtgacactggtatccccactgacgcctactttgcagttgaagagatcaaggatgacgggactgccactcaacgaacatttacccatgtctcaacctctatagaagccgaagaagccgaagagattggtgtggaacatcttttgagagacatctcctcttcgtcatccgccccgtcatcttctttactcaccacgcaatccctttctacccgtgtcgcgtcccaactccaatcacttcgtggtctgcacgctcgtctgcatgaaattggagagtacctcgaagcggtacgtagcgggaagatgccaattaaccaccaggtggtgtatcagttgcaggagataattggtctcttgcctcaacttggaggagatgtggagctgggtaaggcattcaggatgggcgtgaatgatcagagtttagtagtgttcttgagctcgatgatcaggacggtgttggctttgcatgatctttacgttccctgccgttcgctctga

SEQ ID NO: 2091 - DNA, 852 bp, Cryptococcus neoformans
atggtgagcaacaccatatcgttgatcctccttgaaggcgagattgagacctcttacacagaggccgacaactcctgcgtcgttgctaccgacactggtaagtcacaaagcacgcagcgcgaagatctgacagtctttgccaaaacctccccttacgtccttgatgcccctgtctttgccctccatcttggtttgcactttgtcaccaaatacaagcacatccataagtgttttgtggacataattggccttaagtggagccgcatctctgtcgacggcaagcctcacaagtggtccttcatacgagacggtgacgaaaaggcgattgttgaatgcgttgtggatggcactgccggccccgacgctgccaccgcgaacgtgaaaattggtatcaaggatcttcttgttttaaagacgagcggatcagctttcgaaaacttccaccgagatgagaataccactcttgctgatgttgcagaccgtattttctctacatccgtctctctccaatgctctatttcccttcctcctaatacccctctcaccatcgacaaccttgggtctattgccaaggaactcgatttccctaagatgaaggagcttatcctcaaggatgtcctcgacacttttgctaccgacgaaagcgctagtgttcaagctactctttacctcactctccagaagattttggcttcatgccctgccgtcaaggacgcttctatgcagttacccaacaagcactacattgcttttggcttggacaataaattgggttacgaaggtggtgctgaggtcttctaccctgctgccgatcccagcggttacatcacggccactgtcaccaggaaataa

SEQ ID NO: 2092 - DNA, 933 bp, Cryptococcus neoformans
atgtctgaagttgcccgaaagcccaaggacgccaaggcgttcctcactgacttcctcatgggtggtgtctctgccgctgtctctaagactgctgctgcccccattgagcgtattaagctcttggtccaaaaccaggacgagatgatcaagcagggccgtcttgctaccccttacaagggtgtcggcgactgcttcgccaggacctacaaggacgagggtcttgcctctctctggcgaggtaacaccgccaacgtcatccgatacttccctactcaggctcttaacttcgccttcaaggactacttcaagtccatgttcggcttcaagaagtctgagggttactggaagtggttcgccggtaacatcgcttccggtggtgccgctggtgcttcttctcttctcttcgtctactctctcgactacgcccgtacccgtctcgccaacgacaacaagtccgccaagaagggtggttctcgtcagttcaacggtttggtcgatgtctacaagaagaccctcgcttccgacggtatcgccggtctttaccgaggtttcgtcccctctgtcgtcggtatcattgtctaccgaggtctctacttcggtctctatgactccattaagcctgttattctcgtcggccctctcgagggtaacttccttgcttccttcttgctcggttggactgtcaccacctccgctggtcttgcatcttaccctctcgacaccatccgtcgacgaatgatgatgacttccggtggtaccgtccactacaagtccatgttcgacgccggttctcagatcgttgccaaggagggtatgaagtctctcttcaagggtgccggtgccaacatcctccgtggtgttgctggtgctggtgtcttgtctctctacgacaaggcccaggagctcatgttcggcaaggtctactgtgagtga

SEQ ID NO: 2093 - DNA, 981 bp, Cryptococcus neoformans
atgacaatcgtgacatcatatcgcagaatgacttccatggaccttcgagtgggaggaaagtacaggattggcaagaagattggcagtggttcattcggtgatatctaccttggtgtcaatatcgtttccggcgaagaggtcgctatcaaacttgagtctgtcaaggccaagcacccccagctcgaatacgagtccaaggtgtacaagactcttgcaggtggtgttggtatccctttcgtcaggtggtatggaactgaatgcgactacaacgccatggtgcttgatttgttgggcccctcccttgaggatttattcaacttctgcaaccgcaaactcagcctcaagactgttcttttgctagccgatcagcttatctctcgagttgagtatattcactctcgtaactttattcatcgagatatcaaacccgacaatttcttgatgggtgttggaaagcgtggaaaccaagtgaatgtgattgacttcggattggctaagaaataccgagaccccaagacacacctgcacatcccttacagggagaacaagaatcttactggtactgcgcgatacacttctatcaacacccatttgggtgtagagcaatctcgtcgagatgatcttgagtcattgggctatgtcttgatgtacttcctccgtggccaacttccttggcagggtctgaaggctgctaccaagaagcagaagtatgaccgcatcatggagaagaaaatgactactcctaccgaagtcctgtgtcgaggtttcccccatgaatttgccatctatctcaactactgccgctctcttcgattcgacgacaagccggactattcttatctccgcaagcttttccgtgacttgtttattcgggagggatttcagtatgactacgtctttgactggtctttgcagccgggggtgaagagctctggtgccactggtgaggacggattgcagggtaagcagaatcacttttga

SEQ ID NO: 2094 - DNA, 975 bp, Cryptococcus neoformans
atgcaaaaagttcaagagcggccaacggaaaatacacgatatttcatctttcgtctctttgactcttaccggtataccaatacaaaagaccccatcactatgagacaaaagagagccaagacgtacaagagggtaatgaccctttacacccagacttttggatttaggcagcccttccagatcttggtttcccaggatttgctgctggaaggagccaagtcagaattgaatatgcctaagcagtttgtcaccgtcattcagggcgagtgcaagccaatgataacgcagtgctgtatggaggcgctttataagcttgggaaacccgtacagaggacaacagatcttgccaagacgtttgaaagacgaaaatgtaatcaccgaacagcactagaaccggatgagtgtttgaaggacgttatcgatgcaggagctacaaacaaacaccgatatatcctcggcacccaatccaccactcttctcaccgctatggaccgtatccccggcttacccgtcatccactttaacccgcgcggcgtcctcgtcctttccccaccatcgactgccactatccgagagaagaataaagtagaggaagaaagacgtttggagggagtcaaggtccttgaaggtgttgttgatggaggaaacgtggttggtgcggatcttgcgcctgtgtcgggtggacctgcagagaaaaggagtagaaaggtgaagggaccgaacccgttgagtgtgaagaagaagaagactccaggccaggataaggaaggggagagtaagaagaggagaagggttgaggaagaggaagtgaaggaggatgagaatgaagtgaatgcggaggggaaaagaaagagaaaaaggaagaagaagaagactgcggttggtgaggccattgaagagttgaatgctacgaatgccgatcggacggagaaggcggttgtttctgatgatagtgatggcagtgaagaagaatag

SEQ ID NO: 2095 - DNA, 981 bp, Cryptococcus neoformans
atggagtttctgccgctgcgcaccctcccagcgccgccacgacaacaatcaacaacaaatcctcattccagacactttcactcttttcgacaccccctcttcatcaaacacccggccgccatcacccatatccatttttgcccaacaaaaccacatcggtatgccgtgacatcttccacaagagtgttgatctatgcaccgaagaccggaaaggtggtaaagactatcactaggttcaaggacactgctcgaagcggagagtttaggaaagatggtaaattagtagttgctggtggagacgatggtgttgttcaggtcttcgacgtgaacagtcgagcaatcttaagaacgatgaaagagcataaccaacccgtccgagtcacccatttctccccgcatcttccccaagtgctctccgcttccgacgatactacagtaaagctctgggacttgtccacacaagcatgtctctccaccttttcgtcccacaccgactatgttagatcatcaattttctccccttccgacccttccctgatactctctgcatcttatgattccactattcggctacacgacgtccgactgccagaagacgaggctaatgtcattactatgcgacatggtggtgctcccgtggaggatatcttggcgttccccagtggaggtgtggctgtcagcgtcggtggacctatattgagagtttgggatcttgcaatggcaggcaagtgcgtgcgagcattgtccaatcaccaaaagaccgttacctcagttgcctttgatggtacaaagggacgagtcttgaccggcggtctcgacaacatggtcaaggtctacgacgttgaagactggaaggttgttcacaccatgcgttaccccgcacccgtcttatctctcgcggtttcccctgatgacacccacatcgcagctggtatgactgacggtaccctttccgttcgtcggcgatcccaaagcttctga

SEQ ID NO: 2096 - DNA, 1002 bp, Cryptococcus neoformans
  misc_feature (614)..(614): n=g, a, t or c
atggcctgtttttgcagtggtgactctcgacaaaggccgacagctcgatacgcacaaagaactggcgcagaaacacaggcgcgagaaaatactcccgacgcggtgaaagaggtgccacaagcagccccttgcaatttcccgccatttcgcacccaaactccggcaaagtggcgatcgccgcttttcttcccccgaagcgttctctgcccagtcgcaacagtttcccaagtttcacctcatctttctcttctcttcttctcaaccttcaaccaaaaaaacaacccccagggtatcaccttaacagctcgcaagatgtctgcctctcaaatcattagcaagcgcagaaagttcgtcgccgacggtgttttccaggccgagctcaacgacttcttcacccgagagctcgctgaggagggttacgccggctgtgaggtccgtgttacccacgcccgtaccgagatcatcatcagggccacccacacccaggaagtcctcggtgacaagggtcgacgaattagggagctcaaggctttgatcgagaagaggttcaagttccccgagaacgctctcgagctctacgccgagaaggtccagtaccgaggtctctccgccantgctcaggccgagtccctcaggtacaagctcctcggtggtcttgctatgcgacgagcttgttacggtgtcctccgattcgtcatggagtctggcgccaagggttgtgaggttgtcgtttccggcaagctccgtgctgctcgtgccaagtctatgaagttcactgagggcttcatggtccactctggtcagcccgctcgtgactttattgactacgccgtccgacacgttctcctccgacagggtgtgctcggtatcaaggtcaagattatgaagccttccgaccccgccggccgacagggtcccgccaagaacctccccgacgatgtccagatcaccgagtatgtttattattcagtacacagacgtagaaccttgttcttttgctga

SEQ ID NO: 2097 - DNA, 900 bp, Cryptococcus neoformans
atgtccggtacttatgcagtggaacaacagctccgacgacaaaccagagagaggagagaatatatcttcaagaaatcccaagagtctcaggagagagcgatctacgaacggaaacagaagatcaaagacttgttggctcaggggaaacctctccctacagaattgcggaatgaggtgagagagcttggagggaaggatttagtgcttgatgaagctcagcaagatcctcgatctcacatcgacgacgaatatgctaaagtcggcacgtacgaccctaaaattgtcattacaacctctcgttccccctcttctcgtcttcttcagttctccaaagaactccgactggttttccccaactcctaccgtctcaacagaggtaacaccgtcgtcaaagacctcgtctccgcatgtaatgctcaaggtgtaacagacctcgtcgtcgtccatgaacatcgtggtgtccccgacgctctcattgtctcccatctcccccatggtcctactctctccatgacgcttcacaacgttacccttcgacatgatgtcagctccaactcaagtacagtgtcagagcagtaccctcatctgatctttgatggcttctctacaaagttaggtgaaagagtgaccgggatcttgaaggcgctgtttccggtgcctaaggacgatgcgaagagggtgatgactttcaagaacgaaaacgattttatttctttcaggcaccatgtatttgccaatactggtcacaaggatgttcagcttgcagaggttggtcctcggtttgaagctaagccgtttgaaattcgtcagggcactgtcgatcaaaccgaggcagatgttgagtggctccttcgaccttacttgcgtacagcgaagaaacgcaacattctaaatgtttga

SEQ ID NO: 2098 - DNA, 993 bp, Cryptococcus neoformans
  misc_feature (216)..(216): n=g, a, t or c
  misc_feature (535)..(535): n=g, a, t or c
  misc_feature (543)..(543): n=g, a, t or c
  misc_feature (675)..(675): n=g, a, t or c
atgcagcccggcccttcgaaggatatcttgcggttcaccggccacaggcaccttcggcagcgcattcttctttccatcctttccggcaaatctatgcggattgatggtatacgctcagatgatgtccacgtcggtctcagagactatgaagtcaaccttctaagactggtagagaaggtcactaatggaagcacgattgagatatctgtcacaggnacttctttcattcttcatcctggattactacctgggggtagtttcaatcacagctgccacattggtcggtcaataggatattaccttgaagtactgctcccccttgctcctttttgtaagaagccgttcaacatcacactgtatggcgtcactggtgaagagggacgtgacatgactgttgatatgattcggactgtcacacttccacatttacatctttttggaatttcagacggactcgaactacagattaaaaagagaggatccgctccccttggcggtggccagatttttttcaaatgccctgtcgtccggcagntgaatacnttacatttcgttgataaaggcaaaatcaaaaagattcgaggagtctcttactccactcgtgtttctccacaatttgcaaatcgcatggtggaatctgcacgatcagtgttgaacagatatgttcccgacgtntatctctacacagatgtttataaaggagatgactccggaaaatctcctggctatggcttaaccctggttacgcaaagtacaacttctgctgtacatgctgcagaatctctctcagttgcaggagaagttacaactcctgaagatgttgctttatttgccagccgtcttcttttagaagaacttagccgtgggggttgcatcgatagcaaacaccagtggctcgtggcgctgctcatggccctcgggaaagaagatgtcagcaagtgcctgttcggtagtttgacaccgtatacgtatgtgaactttagaaactattga

SEQ ID NO: 2099 - DNA, 873 bp, Cryptococcus neoformans
atgccctccccggccgtagaccttctcaagcaaaagacagcaagcctgccgaatgcccctatcagcgtcgtcgctgccaacacccctgtgacggctggaaaccagctgcctacctctgtccctctccctgtcctgcctgcagttgaagctgccaaacgtttggcagcatatgccgctgtggaccgacacatcgcacacgagcacaaggtcattggtatcggatcaggatccactgtcccctacgtcgtggacagaatacttgctcaagggtttgaagccaataaagaccgggttttccttcctaccggcttccagtccaaagagcttatcgttaaagctggcttgactttgggcgacgtggatcaatatgctcgaatcgacgtgaccattgacggtgccgatgaggtcgacaacgagctcaactccatcaagggcggcggcgcttgtcagcttcgtgaaaaggtcctcgcagaggctgctgatacgtggatcatcgtggccgactaccgcaagaactctgaagttctcggcacatcttggactaaaggaattcccatcgaagtcgtcccctttgcgtacgccaaagtcctcaccaacctcgcccacatgggctccccacatgttcttcccaacggtcagcctggtcttagcttgcgtatgggtaagatgaaggctggacctgtggtcagcgataatggaaactttatcattgatgctcccttcgctgaggaattgatgcgacagcctgaagagctgttgcacaagatcaaaatgttgaccggtgtcgtcgaagtcggacttttctgtggcatggccaaggctgcgtactttggtaacgaggtgcgtcatttttttacgtacatcaaacagtag

SEQ ID NO: 2100 - DNA, 945 bp, Cryptococcus neoformans
atgtccatgctaaggaccatcaagcctaaaaacgctcgtgtcaagcgtgctttggagaagagagagcctcagattgtagaaaatgacaagacagctatctttgtccgcggtcaaaactcaagtgacaaagttcgaaatgtcatgaaggatctttactctctcaagagacctcatgccatcaacttttcccgaaagaacgacatccatccctttgacgacgcctcctctcttgagttttttgccggaaaaaatgatgcgagtctgtttgtaactggccttcacagcaagaagcgcccgcacaacctggtgttctctcgaatgttcgacggtcgtgtgttggatcaaattgagcttggtgttgaagggttcaaggccatgtctgaatttcctactcttaaatcttctctcggtgtgaaaccaatgatggtcttccattctgacctattcgacacccaccccacctatcagcagctcaaatctcagctccttgacttgtataacggtcaccccatcaccgaagcgccattgcttaccactttggaacatgtcatctctattactgctggacccgtgtctgacacgactcctcttcctcaagttcacttccgggtctacactgttaagctcatcccttctggtactcgtgtgccccgaatccagcttacggagatgggtccttcaatcgactttgttgtcagaagactccaagaacctgatgaagaaatgatgaaagcagctcttaagaggcccaagattgccaagagcgatgttgagaagggtctgggaaagaagaggaagaatatcgagactgacgaaatgggagataaggttggcagaatacacataggcaagcaggatctggcaaagatgcagggtagaaagatgaaggggctgaagcagggatgggaagaagaggaagacatctggggccgacggcatggatga

SEQ ID NO: 2101 - DNA, 870 bp, Cryptococcus neoformans
atgaataggccgccaatacccttggttaagcaccgtgtctacatcgagcaggaaggcaaaatcgtctcccccttccacgacattcctctctttgccgacgagtccaagactatcctcaacatggttgtcgaggttccccgatggaccaacgccaagatggagatctccaaggaggagactttcaaccccatcaagcaggacattaagaagggcaagctccgatacgtccgcaactgtttcccccaccacggttacatctggaactacggtgccttcccccagacttgggaggacccgaacgtcaagcacgccgagaccggggccaacggtgacaacgaccctctcgacgtctgtgagatcggcgaagccgtcgcgtacactggccaagtcaagcaggtcaaggtgctcggtatcatggcgctcctcgacgaaggcgagactgactggaaagtcctcgtcgtcgacgtcaacgacccgcttgctcctcgtctgaacgatatcgaggatgtggagcgacacctccccggactgatccgtgcgaccaacgagtggttcaggatctacaaaatccctgacggcaagcccgagaacgtcttcgcgttctctggtgaggccaagagcaagaagtatgcggtggagattattcacgagtgccatgaggcttggaggaagcttgtgcacggtgagactgccgccagcactgacgcttacaacttggccatcaccaacaccaccgtcaagggttccaaggggttcgtctccaccaatgacgcggcttacgcctctgtccccgccgactctcgcaagcccgctggccccatagacccttccatcgacaagagcttcttcatctcctccgcctctgcttaa

SEQ ID NO: 2102 - DNA, 849 bp, Cryptococcus neoformans
atgttttactctgtcaacaatattgcagggatatgctcactacgatgtttagcctggtcgccctccacttcgtccgagaatatggaagctcttgctcaaagtggacaacctccaggcagaagattatctacgctgggttcagtctatactcgttttcaagctattatgtccacgatacaggagcggttgaccattcagacagtcaaaaacgatacattccggacactggcgacagatactcaattcaagggcaaagtcaaagaggacatgttgattaggttgttggaagcttttacagaagatgaatcccagccattcaaatacgtacaagggatgaacgtcctctctgctcctttcctgttcaccatgccctctcagctcgaggcttttcaatgtttctcaacattcatcgaggacggttgtccactctatgtacaaccatctttgaaaggtgtccacaaaggtcttactctgttggataagtgtttagaggtagttgacccagagctatatgatagattagcgagcaagaacctcaaagcagagatttatgctttcccatctgtcatgacactctgcgcctgtacgccgcccttggaagaagtccttcgcctatgggatttcctcttggcatttggcttgcatctcaacatactctgtgttatcgcccaattattgcttatacgtcaagacttgatggatacgccctcaccgatgaaaatccttcgaacatttcccccgctagaggcacggcccgtcatcggcgtgaccgttgccctcgtgaaagatatcccggaggagctgtaccgagaactagtagctcatcctttcctgttaaatgggagctaa

SEQ ID NO: 2103 - DNA, 978 bp, Cryptococcus neoformans
atgcctaaggccacttcccagactttcagagctcagcctgcatccgccgctcaacgacctaagaaaggcggcgagtcctctgccgccgcggccgctggaggaggtgcacgaaaccatcttttcgacactgctaagttcggccaacacattttgaccaatcctctcgtcgctcaaggcattgttgataaggcaaacctcaagcctacggatgtcgtcctcgaggttggtcccggtaccggtaatttgactgttaggatattgccggcgtgcaggaaggttgtagctgtggaaatggaccctcgaatggcggctgaagtacagaagcgtgttcttggaaagccagagcaaaagaagctcgagttgatagttggtgattttgttaaggccgacttgccatactttgatgtcctcatctccaacactccttatcagatttcttcacctctcgtcttcaagctcctttcccaacgtcccatcccacgttgtgccgttctcatgttccagcgtgaattcgcccttcgtctggttgccacaccgaacaccaagctatggggtcgtctcgctgccaatgtgcaactctacgcccgagtcgaacacgtcatgaaagtcggtaaaggtaacttccgaccgccacctcaagtcgaatcttctgttgtgaggattatgccaagagatcctcctccgcctgtcaaatttgaggagtttgacgggttgaatagaatcattttcagtagggcgaataagaccttgcgggctggattcaaggcaaagggtgtggttgaattattggagaagaattacaggacctggtgtgcggagcagggagcggtgagtatcaaaaagatgatcattgaagataatttcgacatccgggagaaggttgaatccatcttagtcgaaactggtttcgcggacagccgagcggcgaagatggacgtcgacgaccttttgaagtacgttttgcgttccctcatttga

SEQ ID NO: 2104 - DNA, 864 bp, Cryptococcus neoformans
atgcaaccctcttatgctcaagaccttggtaccggcactattgatgtaagcttctcacatctcgcgcgttctacgccatactcaccacgctcacagcacggatgctatggctccatgatgaacgtgcttggtgaatgcatcggtgctttgggtatgatcccttgctgcccttgccccaacccgttcaacaacatctctcagggtgccgtcggtttggtctcccggtttggtcagttctacaagtctgtcgatccaggtttggtcaaggtcaatgtctgcactgaggatgtcagagttgttgatgttaagatccaactcacttccgttccccgtcagaccgtccaaactaaagacaatgtttctgttgaagttgacagcgtaatctgctggcacgtcatctccccttaccgagccgcatttggaatcaacgacgtgaggtctgctttggtggagcgtgcccaaactacccttcgtcaggtagtcggtggaagagtccttcaaagtgtaatctccgaccgggagggtcttgctcatgaagttgccgagatcatcgaagctaccgccgagaagtggggtgtcgccatcgaatctatccttctcaaggacatcaatttctccgtcgaattgcagcaatctctttctagtgctgccactcagaagaggattggtgaatccaaggttatcgctgccagagccgaggttgatgccgccaagttgatgaggcaagctgccgacattcttgcatcgccagctgctatgcagatccgtcaactcgaagctctccagaacatggctcgatcatctggcagcaaggttgtcttttatgttattctgatctcgtctcatgatatttgcaattgctga

SEQ ID NO: 2105 - DNA, 945 bp, Cryptococcus neoformans
atgatgggcctaatcctgttgtccccatcatgtattccgaagaatgtaagagttcttgctggccattattttagcagtagcagactgacacaatatcttttagacaaagatgcaatggattatttccgtgctatcgccgcgaaggaggaaaagtctgaacgtgctctagaactgacagaggtcattgtcagaatgaatccagcacattatactgtttggcaataccgtttctctttgttaacgtctctgaacaagtctctcgaggacgaacttcgactcatgaacgagttcgctgtccagaaccttaaaagctatcaagtctggcatcatcgtcttctccttttagatcgcatttcccctcaagatcccgtctctgagattgagtatattcatgagtcccttctgcctgatcccaaaaattaccacacctgggcatatctccattggctatattctcatttttcgatccttggtcgtatatctgaagcccagtgggaatctgagcttgattggtgtaacgaaatgttaagggttgatggtaggaacaacagtgcttggggatggcgatggtatctaagggtgtctagacctggagctgaaacctccagccacaacctacaggacgagcttatttatatcttgaagtcaattcacttcattccccacaacgtatctgcatggaattatctccggggttttctcaagcacttctcattgccacttacgcccattcttccagctattttaccatacaccgcctccaagccgaacaccgatatggaaactgatactccgttgcctgtccctctggctctcgaatatctcgcagactctttcatcgaacaaaatagactcgacgacgctgctgaagtgtttgagaagcttagctccaagtatgacaagatgagggccggatactgggaattcagaaagggaatgtgttga

SEQ ID NO: 2106 - DNA, 993 bp, Cryptococcus neoformans
  misc_feature (868)..(870): n=g, a, t or c
atgccacatcactgttccagcgcgacgacgacgatcgcgaccacgtgcgagatctgctcccgaactactagcgcgcagtccagccagaacctaaatccacccttccgacccaacgccgtttgcttttccatcgcttccccttttacccataactcacaaccacccccacaaaatatgtccgcccctcagcccgcctctgccaccatcttcccccccggcgtcacccccttcgcccagcgaaggctccccaagaccatctgcatgtttgacgtcgatggcaccctttctctcgcccgtcagagcgcgacccccgagatgtttgctaccctccgcaaactccgtgagagctgcgccatcgcctttgtgggtggctccgacctcaccaagatcctggagcaggtcggcggggaccaagggctgagcaattttgactatgggtttgcagagaatgggttgatcgcgtacaagttgggccagcagctcgagtcggcgagttttatcaagcatgtaggagaggaggagtataagaagcttgtcaattggattttgaggtatctctccgaagtggacattcccatcaagcgaggcacgtttgtcgaatttcgaaacggtatgatcaacgtctcccctatcggcagaaacgcatccatccaggagcgaatcgattttgaaaagtatgacaaggagcatggtattcggggagacatggtcgccaagctcgagcgagagtttttgcatcttggattgacttttgcgattggcggtcagattagttttgacattttccccaagggctgggacaagacatattcgcttaggcatatcgagggtgaaggctttgaagagattcactttttcggcgacaagnnnacctacaagggcggtaatgattatgagatcttttccgacccccgaactatcggccacaccgtcaccagccccgagcatactatgcagctcctcgacgagttgtttttgacgactgctccttga

SEQ ID NO: 2107 - DNA, 1050 bp, Cryptococcus neoformans
atgctttgctttcttgcttacatacctctcttgtatcatacaggtctagaaaacctccccggtgaagtcaccttcttgcttgaagagatccgtgagaaagatgttcgtataagccgtgagttgtttatctctcaacgtcatttctccgctgaacaaagtttagaatatgtacaacgtataaactcccgacacatgtcattgacaaagactgccaagaccctcgcatctcttcctccttcaaatgcgacttttcccttgcctatacctcctggggcattattgccgagtagtcatctgtcccaaaaagaagcgcaatcgcttgctaaaatacaaaatgaatgggctcaggttctcactctgcaagatgagaaagtgaagcttgctgaacgacttgagcgaatagtcttacgtgcaaaagaacgggcaaagcatcaatgggtcaaggtcggtggtatggaaattgaagaggtagaaaagtggagtggaacgggagaactgggcaatggtgaggttgtccttccacccggtggattgggcagtggaatagatggccgaccggccaagaaacgtaaaccgaatattccgtcactatctgtgaaccacacgaaacaggcaatacatcccagcatctcgatgccccctcccccgcccccctcaagaccatcattatccgcgagatcatcacattccaacgtcccttccacttctcacactcacacgtcttcccttgggcagcatggttctcgttccagacgagtgtcagttgcttccgacgaggatgcggacggggagcctgatgaaggagatacggatatggttgatgcggccgatgcggaaggagagacggatgaaactctctattgtatctgtcgacagaagagctatggcgaaatgattgggtgtgactgcgacaagtgcccgtatgaatggtttcacgtcaaatgtgtcaacatcagtggaccattgccagacacatggtactgtcccgactgtgtcgccaggtatggtttctcaaatgacaagggcaacaaaaaagcacgcaaaaagtaa

SEQ ID NO: 2108 - DNA, 999 bp, Cryptococcus neoformans
  misc_feature (188)..(188): n=g, a, t or c
atgatagctacacaaagaccatttcctatcccatcccctgtccctctcgcaccatcatctaccgtcctgccgaccacagtaccggaaaatgcgcctgaacattgccccggggttgaatcttcgcaggctggtaaggcagatgcttgtgaaggctgtcccaaccaatctgtctgtgcagaaggacccanagggcctgaccctgatttgccacttatccgagagcggatgagctctgtaagacggaaaatattggtgctttcagggaaaggtggcgtggggaaaagcacatttactgcaggtttgtcttgggcccttgcagcggatgaagagtgccaagcgggaataatggacattgacatctgtgggccatcgatccctttgcttatgggattagaatcttcaaccatccacacctcggcctctggatggtctcccgcttatgcacttgacaacttagctgtcatgtcgatcgggtttttacttccttcctcgtctgatgccgtcatctggcgtgggccgaaaaaaaatgggcttattaagcaattcctgaaggatgttgagtggggtgatttagactacatggttgttgacacgccccctggaacaagcgacgaacatctgtcgattgtgcagtacttgaaggaggcaggtatcgatggcgctgtacttgtaacgacaccgcaagaagtggcactgcaagatgtgagaaaggaaattgatttctgcaagaaagtcgggattcccattctgggactggtggagaatatgtctggttttgtttgtcccaattgcaagaatgagagccaaatatttgcccccacgacgggtggggcggaggcgatgggcaaagagctcggaatagaattactgggaaaagtgccactggaccctagaattgggatgacttgtgaccaagggatgagctttttggatgaatatccagagagtccagccactatggcttatttagacattgtgcaaagaataagagagtcttga

SEQ ID NO: 2109 - DNA, 963 bp, Cryptococcus neoformans
atgctggaggactatcgacggaaactgactgttaagccccgaaggaggagacagggtaagaccgactaccaggcgaggaggggtctcgtctcccaggccaagaacaagtacgcttcccccaagtacaggcttgtcgttcgtatcaccaacaagcaggtgatctgccagatcgtctacgccaagctccagggtgacgttgtcttcgcccacgctacctccaaggagctcccccgatacggcatcaagcacggtctcaccaactggaccgcctgttacgctaccggtctcctcgttgcccgacgagctctcaccaagcttggccttgccgacaagtacgagggtgttgttgagcccactggtgagctccagctcattgagcccctcggtgacgacgagccccgtcccttcaagtgctacctcgatgtcggtctccgacgcacttccactggtgcccgtgtcttcggtgccatgaagggtgcctctgacggtggtatcttcatcccccacagcgagaagcgattccctggttacgaccccgagtccaaggagctcgacgccgaggtccttcagaagtacattgtcggtggccacgttgccgagtacatggagtctcttgaggaggaagacgacgagcgattcaagaagcagttctcttcttaccttgccgacggtgttggatctgacgacattgaggagatgtacactaacgcctacgaggctatccgtgaagaccccaccttcaagcccaccgagaaggacgtcgccaagtggaaggccgagtctctcaagtacaagactttcaagctcaccaaggagcagaagcaggagcgtgtccaggccaagattgccgcttacaaggctcaagctcgatgtcgaggaggacgaggagtaatctcatggcgtctgaagggtttatgcattcaggcatttgggataacccgttattatggacaaatgttgtaa

SEQ ID NO: 2110 - DNA, 990 bp, Cryptococcus neoformans
atggctgagcgaggtggtttcggacgtggtcgtggcggtgccggtggccgaggcaggaggggtccccgacgaggcggtaagaaggaggaggacaaggaatgggtccccgttaccaagctcggtcgattggtgaaggacggcaagatcaagtccatggaggagatctacctcttctctctccccgtcaaggagttccagatcattgaccttttccttcctgccctcaaggacgaggttatgaagatcatgcccgtccagaagcagacttctgccggtcagaggaccaggttcaaggctttcgttgccgttggtgactttgacggtcacgttggtctcggtatcaagtgcgccaaggaggttgctaccgccatccgaggtgccatcatttctgccaagctctccatcgttcccgtccgaaggggttactggggttctcacattgctgagcctcacaccgttccctgcaaggtctctggcaagagcggttccgttatgtgccgattgatccctgccccccgaggtaccggtatcgttgccgcccctgcttccaagcgaatgctccagatggctggtatccaggactgttacacccagtctaagggttgcactgccacccagggtaacttcttgaaggctaccatggctgccctcgccaagacctaccagttccagtcccccgacctctggcgttatcgctcctggtcttactccttacgacgagcactcttcctggttggctatcgccgccaagaaggccgccaactactaaattgttgttggaatttagggttttatctagcgggatgcgatttggtcctttgctgcgtctttgaggatttcagtttctttcgtcttgttgtgccggtgcagttgcagaagtgtgattctaaggcatttaagtggaaatgcgcatacgaatgttcataccgaaaccgaacgtcgggtattgaacatggccgtatcgaacgctccttcctcttccgttactaa

SEQ ID NO: 2111 - DNA, 1047 bp, Cryptococcus neoformans
  misc_feature (974)..(974): n=g, a, t or c
atgctcaaggacattgtagaacgaacatcttcccctgcagaggctccgaaagccccggcacctagctctaccggcttccccgtcgccgttcatcgctctcagcgaccatctgcgtttgcacgagcccgaagggcacaacaagctttgaaagaagaaggaaagcaggagataggctatggaaaggctgtagataccgtcccaactgtacaggctgcaggaccttcatctgcttcaagcatgacagaatgggaagaggtaaagagacaagtgcaaggagataattcaaagagagtacagaatatgagtcagcaagagcgagaacaggagatcgaggaacttagggagagactaggcgacaagactttggatcttttgaggaaaagggctgaggctcgtcagtcaaagcgcaatcttctagatgtccccaaaagcgaactgtcatctatcgacttggagcagcctttcaatgcaaataacacacagaagattttgcaggatgtctcagaggagaatacaaggcgggtcgacttaatgagcttcgaagaaagggagcaagagacggaggagctaagggaaaggtttggagataagatcatggaagctttgagaagaagggccgaggtaaagttaacagaagggaagagcaacgtcgtggaacgctcagtgaagcccgatgtccctgcttcatcgagtacgtctgacgacgacacgaacctcgacattcttaaagccaaatacttccctacccttccctcagagccatcgaaacttgagtggctgcaacccatatctgcgccttcaagcgacaagtcgattaggtttgacctttctggaaaagtactttctgccaaagatacagcatctcttcccacccatctgggcttacatcatcatggagaatcacccgacttagctggctatactttccaggatatattatatctctgtcgatcaacagtaccgagtcagcgtanaaccatgatgggtgtactcagccggatcctaggaagattacaatggggaattggaccaagctgtccagactga

SEQ ID NO: 2112 - DNA, 957 bp, Cryptococcus neoformans
atgaggaagaaggaagccagagaagtcaagcccgaatatcaccccgagtggaagcttacacgagttatttctggccatatgggatgggtgcgcgccgttgcaatggatccaggaagtcaatggtttgccaccggtgctggtgatcgtgttatcaagatatgggatcttgcttcgggagaactcaaactgtcattaactggacatatctctaccatccgagggttagcagtatcagatcgtcacccgtatttgttttcttgcgcggaagacaagatggtcaagtgctgggatcttgagaccaacaaggtcatccggcactatcatggtcacttttccggcgtctattccctttcagtccatcctacgttagacgtactagtcaccggtggtcgagatgcgagcgttagagtatgggacatgcgtacgcgagccaacatcttcacactcactggccatacgagtactgtgggcgatgtcaagactcaggactctgatccgcaaatcatatccggtagtatggatagcaccgttaggctatgggatcttgcggctggcaaatgcatgaacactctcactcaccacaagaagtctgttcgtgcccttgcgatccatccgacggagtacagctttgctagtgctagctcaggtggcaacaatatcaaaaaatggaaatgcccagagggcatctttgtcaacaactttgtcggtcatgaggccatcatcaatacactgagtatcaactcggagaatgtcttgttttctggagcggacaacggtactctcacattatgggattacaagactggtttgcctttccaacacctcaaggatattccccaacctggttcactcgatgccgaagcgggagtgttctgttctacatttgacaaaacgggcacgcgtctcattacaggtggagcagataagacaatcaaggtgtattccgagcaggcatag

SEQ ID NO: 2113 - DNA, 915 bp, Cryptococcus neoformans
  misc_feature (360)..(360): n=g, a, t or c
  misc_feature (390)..(390): n=g, a, t or c
atgaaacgtattcatcagtggaacaccatcacaagctatataaaatataccaggtacagcatacgcctcttttcctccttcagcctgcttacaatttcctcagcatgtaaaatcgtctctgtgccatccggtagctctgccgaaggtctcccagcaagtaccatcatcatggacgaggtatccggaaaagccaaagccctcatcaatgctcgaaagctaactgccttgcgcaatgcatgtggctcagctgtattcttgtccctctttccagccgtaacgacaaaacatcttcttctttttggctccggagctcaatgtgtatcccacgcacttctttttcttcgtcttcatcccttttcncaagtgacatttgtcgtccgctcaataaancaaagatcccaatcctcagcctctgcgatccaatcgcaattcccagcagccagagtctctctctcagtacattcctctccttccgatgagctgtctcagctggtggcgacggccgatgtcatagtcaccgcgacttcctcccttacaccactcttcgactcctcacctacttgtcccaagcctggtgctagggtgattatgatcgggtcgtacaagccggagatgcacgaggtagatcaggctttgatgaagcgggcagccaaagtcgtcgttgattccagaaaagcttgcgagagagaagctggtgagattatcgatgctggaattaaggtagctggaggagctggattagtcgaattgggcgaattattagaagaggccggcttgccaggtgctgtcaaagacagcggagatacctttgaaaaagaggttggtcttggtattcaagatgtcgccatctcaaaagttgtattggagcaagccgaaatcaacaacatcgggacagtcatcgaggattatgattag

SEQ ID NO: 2114 - DNA, 963 bp, Cryptococcus neoformans
atgtccctagccgccacctcgcagcctcttaataagtccttgcatatcaagtatatccaagatcttgacaagaaaaaggacttggcctactatataacctctcatcttcggctcaacgggatctactggggactcactgccttatatatgctagggcagccagaagcgcttgaccgggaaggtgtcattgagtatgtgctgtcctgctgggacgatgagactggtacctttggaccgcatcctggtcacgatggtcacatcttggccacgctttcgggaatccaggttttgctcatggaagacgctcttgatcgggcggatattgagcgtatcatttctttccttctcaaacttgttaatcccgacggctccgtatctggcgacaaatggggagagtcagacactcgtttttcttatattctgctctcctgcctttccctcctcggtcgtctttcaagccttacagacgaacaaatagaaggcatcaccgaaaatattcgaaagtgcatgaacttcgatggaggattcggccttagtccgggcacagagagccattcaggacaagtttgggtctgcacagcagcactaaccatcctggatcgactggacctcgtggaccgagatttgttaggagcgtggttgtcggaaagacagctacctaatggaggtcttaacggaaggccagagaagctcgaggacgtatgttattcttggtggtgtctcgcctcattatccataatcggcaaaatccactgggtcaacgcggataaattaattaacttcatattgagcgcccaggatcttgatgacggaggcataggagacaggccgggggattgggtcgacgtcttccataccatctttggagttgccggcctctctctcctgggctacccagatctacgagatattgaccctgtctactgcatgcctgcagacttgataagtcgtctttttgcgtag

SEQ ID NO: 2115 - DNA, 1011 bp, Cryptococcus neoformans
atgtcagacaccccttcctcagacacccctcccaaacgacgtgctgccgataccaccgccgttcctcctcaaaaatcttccaaaatgtccgcgacagctcctcccttcaatcctactcgccctttaacgaaaaaacctgctgcttcattccacgatatcgcccaggaattcaagcccaaagtcaaaactgaggaagtagaggacgctatggaggtggataaggaagcggagggttctgcgagggttacaaagcctctgcctggtgggaagagaaacgtacagagggcggactttgtacccgtccaggcttctgtgcctaagtctactgaggacaaggagaataccagaagattgattgttgtgctttcacaagcttgcctcgaagcatacaagatttcgtctggctcggcaggcaagagctctgcaaaagaagcaaagtacgctttattgaactgtgacgaccatcagggaatcttggccaagacaggtagagatattgccgatgctcgacctgacatcacacatcaatgccttttgacccttcttgactctcctctcaacaaagccggcctcttgcaggtgtatatccatacggcaaagggtgtattgatcgaggtgaaccctagtgttaggataccgcgaaccttcaagcgtttttctgggttgatggttcaattgcttcacaaactttccataaggggtgttaacggtagcgagaagcttttgagagttatcaagaaccctatcactgatcaccttcctaccaactgcatcaaacttaccctttccgccgatgccccaactgttcgattgtccaagtaccttaatactcttcctgagtcccattctgtctgtgtcttcgttggtgccatggctagaggagcggacaactttgcagaccaatttgttgaccaaaaggtctcaatcagcgattacagtctttcggcgtctgtggcatgtgggaagttctgctgtgcgatggtaagctctgctgttacttcatcactttga

SEQ ID NO: 2116 - DNA, 840 bp, Cryptococcus neoformans
atgcagagtagaaaagtcaaacaggcgagcgcatcgaatccgagcagtgagcagaaggaggagcaacagcaatcacgatggaagcaaatgatgacactttcaacgaactgcgtgagatgcaaaaaaaaacaaaggtggaggtggaatgtcagggcgtccaagtggaggcacggtaggagcgaaatggattcttcaaaaacccaaccaaaaagattgatcaagatggccgctatccaggctcttcctactgaggtgcagaagattgcgaacgagggaactgtcaagctttttggcaagtgggagtctgagggtgtcgaggttaaggacatctctctccaggactacatcaacgttaaccacgctgtctacgtcccccacactgctggccgatacgccaagaagcagttcgccaagggccgtatgcccattgtcgagcgactcgtcaacgctctcatgatgaacggccgaaacaacggtaagaagatcatggccgtccgaatcgtccaacacgctttcgagatcatccacctcgtcaccgagcagaaccccatccaggtcctcgttgacgctatcatcaacactggtccccgagaagactctacccgaattggttctcagggtaccgtccgtcgacaggctgtcgacgtttctcctttgaggcgagtcaaccaggctatctctctcttgaccattggtacccgagagtccgccttccacaactccaagtccgtctccgagtgtctcgccgacgagcttgtcaacgccgccaagggctcttccaactcttacgccattaagaagaaggacgagcttgagcgtgtcgccaagtctaaccgataa

SEQ ID NO: 2117 - DNA, 1074 bp, Cryptococcus neoformans
atggtctcgaagaactgttgttcactcattgtgtatagccaaataaatgtaatgacaggaaatgatagagttgagtccactcgggatcatctccatccacgaccccacaaaggagcgctcatcatcgtcgctcttgtctgcactttctcattttctttattttgctctatatctgtccaagatggccatctcaaacgtaagcttccacggcggacggaggacaccatatccagcgctgacataacgcagcaccccgccctctggaaacagcccgctccagcaaactctgctttcaacgactacaacacctttcccctcggacaaacgcagcgccacaacacttcttcccaccatggtcccatgtcccacacccaacaacctcttgtcaccggtacttctgttctcggcatcaagtttgacaagggcgtgatgattgcggctgataacctcggttcatacggttctcttgcgaggtttagagatatccagcgtcttcatcctctggggaaacatacccttttgggtgtggcgggcgacatgtctgattatcagtggttgaaaagggagctcgatggactcttgtatgaatctgctctctccctgaccgattcccacccatcgctttctccttccaatatttacactcttctctccaatctcttctacgctcgtcgaagcaaagttgaccccatctggaacgccgtcctcgtcggtggttgggacgacaccaaaaaagaaagtttcctcgcatatgtcgatttgcttggtacaacttattctgcgcccacactcgcgacgggctttggagcccatctcgcgcaaccgctattgagggaagcatatgaagcaaaggcggggattgatggcaaggggccattgttgacgcaggaggaggcggagaaattgattgatgattgtatgaaggtgttgttctacagggatgcgagaagtatcaacaagtaccaagtcgctactatcacagatgaaggtgtcaagatcagtgactctagatcagctcctacagaatggaagtttgcagagggtttgagagggtacggggcgcagacccagtag

SEQ ID NO: 2118 - DNA, 1053 bp, Cryptococcus neoformans
  misc_feature (811)..(813): n=g, a, t or c
atgtcaggcaccgacgcgcgaacatcacagcagtcgacttcatcgtgtccgtcgcgactattgactcgtacggtcaacaatattttacaggaatatcagtacctcgatctcattaggcgaatcattaacgtaggagaggttcggccagaccgtaccggtacaggaactgttgctctctttgctcctccttctttccgcttttccctcgccgacaacacccttcctcttctgacgacgaaacgcgtcttccttcgcggtgtcattgccgagcttttgtggttcgtttctggctgtaccgacgccaaaatgctctctagccagggtgtagggatctgggatggtaatggaagcaaagaattcctggagaaggtcggacttggccacagaagggaaggtgatctgggacctgtatacgggttccagtggagacattttggtgccgagtacactgatgccgacggagactacaagggcaaaggagtcgaccaattgcaaagggtaatcgacactatcaagaacaacccaactgacagacggattatcttatcggcttggaacccaaaggatcttcccctgatggctcttccgccctgccacatgttctgccaattcttcgtctcacttcctcctgctgattcaccgggttccaagccaaaactttcttgcttgatgtatcagaggtcttgtgacttaggccttggtgtcccattcaacattgcgtcttacgcactgctaacccatatgattgccctcattaccgacaccgaaccgcatgagtttattttacaaatgggagatgcgcatgtgtacnnngatcatgttgagccattgaagacgcaactgggaagggagcctagagaattccccaagttaaaatgggctaggagcaaggaagaaattggagacatcgatggtttcaaggttgaggactttgtggttgagggatacaagccatgggggaaaatcgacatgaagatgtctgtaagtacagatatttatcagactatccctgtaactaatgatggcaatgtcaggcttaaatcaagcccctag

SEQ ID NO: 2119 - DNA, 990 bp, Cryptococcus neoformans
atgtttataaaggtgagtgccataaagtgcatatttgctatcaagaagattaaagtaggagaaatgaaacatggactagatatgacagctttacgagaagtgaaatttcttcaagagttaaaacacccaaatattatctctttactagacgttttctcagtcaagcaaaacatcaatctggtgctggaattccttgatacagatttggaagcggttatccgggacaaggccctgattttccaaaatgcggatatcaaaagctggatggcaatgtccttaaggggattggaatacattcataggaatggagtgcttcaccgggatttgaagccgaacaacttattgatcgccgctaacggtgaactcaaaattgcggatttcggtcttgctagagaatttggagacgccggaaacaaaatgacctgtcaggttatcacccgatggtaccgtcctccagagctcctctttggttctcggtactactctcctacagtcgatatatggtcgatgggaactatttttgttgagctcattctacgagtgccgttccttgctggcgagaccgacatagatcaattaaagaagactttccatgccatggggacacctaccgagcaggattggcctggatatacaaaacttcccgactaccatgaagttggatcattccctaaaaatccttggtggaacatgatatcatccataggaagagaaggccaagatcttgctcgagaacttttgagatttgatccagcccagagaccttctgcgaagaaagcacttttacattcatttttcacttcctatccaccacccacaccaccaatcgctcttcctaaacctttggctgaattgagaccccgagagctggcaccagatgaaactcaagggaaaccgttgttgacctctggagccggtcaaagtttgaaacgtaaagccgaatcgcctcgcacaagtcaaagtgtcccaagaaaacttatcttcacatag

SEQ ID NO: 2120 - DNA, 1077 bp, Cryptococcus neoformans
atgtgcttatggcccctcatacagtccgctcaagcatcaaaacccgttcctgtggagactcagcatgaggacatgatcgttagtctagcctgtgccatgccttatatcctgtttctgaccaattactctcatcagcacgatgcacagcttgactattatggaaagcgacttgccacatgctcctctgacaggactatccgaatttttaacgttatcaagggagaagcaaagggtgaacctgtgatccttaaagggcacaccgccgccgtctggcaagtctcatgggcccacccttccttcgggtcaatacttgcatcttgttcttacgacgggagggttttcatctggaaggaagttggacaggggcaaggcaagggaagcggtggagagctgcaagacggctgggagagaatcaaggaacacacattgcataccgcgagcgtaaactcgatcgcttgggctccttatgacttgggaccaattcttgcttgtgcttctagcgatggcaaggtctccgttctcagcttccaaaacgatggatctatagaggtcaacatcttccctgcccacggcaccggtgccaacgccatctcctgggctcccagcgtcctctctaccgtttcaggcgtaagccgctcccaacagccatccaactctctcgctcctcaaaagcgatttgttaccgccggctctgacaacctcatccgaatctggggatttgatgaagagcagaaaaaatggaccgaagaggagaccatcaagggtcacgaagactgggtcagggatgtcgcttgggcgccgaacattggtttgccggggatgtacatcgcgtctgcttctcaggaccgaaccgtgcttatccactcccgcccatccccctcctcttcctggacatccgctcctctcctccccagccttccccaatctcaggaccctcatttccccgatgccgtctggcgtgttagctggtcactcgccggaaacgttctcgccgtcagctgcggtgatggtaaggtcagcttgtggaaggaaggtgttggaaagggatgggagtgcgtcagtgatttctcgagctag

SEQ ID NO: 2121 - DNA, 966 bp, Cryptococcus neoformans
atgcgtgcgaagtcagacggatacggaacctcctcgccgcgtggaagtggacgggatcaaatcctccgcccagcagccaacgcgcgtccatctgcatggtaccatatccttttatcacctatacaactctcctcgtcacatataatcatacacatcacaatggcaaagctcgcagagaccccttccgtcggctttgacttctcaaactatgccagaaatcagttcttgggccagcgcctccagggcattccgaaggcgacctccactggtacaaccatcgtcggtgtcatttacggtggagggagctcaggagaggagccaggcgtctgtcttggtgctgatacacgagccaccggtggacctatcgtcgcagacaaaaattgtgaaaagatccattacttagcccctcacatcagatgctgtggtgctggtactgctgccgacacagaattcgtcactaatctcatatcttctaatctcgagcttcatgcgctctctcaaggccgacaagcgcgcattgttacggctatgacaatgctcaaacagtatctctttcggtatcaaggccatgttggtgctcatcttgtgctcggcggtgttgatgccactggaccacacctttttactgtccacgcccacggctccacggacaagcttccttatgtcaccatgggtagtggtagtctcgccgccatggctgtgtttgagagcagtttcaaagaacatatgacgagacaagaagctatcgacctcgttgctagagcgatccgatcaggtgttttcaatgacctgggttctggttccaatgtagatgtcgccgtgatcacaaagaatggaactgaaatgctcagaaactaccagacccccaatgaacgaggcctgaaatcgcgcaactacaaattccgccgtggaaccactgcttggacaaaagagtctgtgcgcagtctaatcgtcacagaggaataa

SEQ ID NO: 2122 - DNA, 1008 bp, Cryptococcus neoformans
atgcgattcgctggtggtcgtcctttgagaacagctagggaggcggagctgtacggtggtgtcttgtctgctgctcttactagggaacaccttttgctttctgccgagttccttcgtggcgatgaagaacacttcctcaacgtcctcgcttccgttctttcctcgtctcaattctaccaacacgagctcaatgagctcgttatccctgtcgttgaggcggagaccatctctgcccaggctactccttctgccatcgccctcgaccttgcccattcccttgctttccgacgaggtctcggtaactctctctacgccaacaagaactaccccgtctccattgacgacgtgaagacttttggtgaagccgctttcgccaagtccaacattgccgtcatcggtactggtatctccactgaggtcctcgccaagtccgttggcaacgctttcggcactggtactagctccagctctaagctctctactcccaaggccgcctattacggtggtgagacccgggtgcctctcgacatccatgctcctgctactgccgcccctaccatggttattgccttcggcacctccgctcccccttctgccgacctcaaggtccttaagcaccttctcggtggtgagacctccgttaaatggactcctggtgcttctcctctggctcaagccgccgacaagatccccggtgcttccgccaaggctttcctccttccttactctgacgcctctctgttcggtgttgttctttctgcccccacaagtgccgaaaccaaggctttggctcaggaagttgccagcatcgtcaagggcgccggcgagttcaaggaggaggaggtgaagagggccgttgccaaggccacctttgaggacgccgctagcaccgaaaccttgtccggtttcgtcgccgctgctggtcctgctgccctcattggttccgttcccgaggcgcagtccttctctggtgtttctgcttcttccatctccaaggtgagtttataa

SEQ ID NO: 2123 - DNA, 1053 bp, Cryptococcus neoformans
atgccatcgttgttgagcaatgcccaccccaagttggcagaggctgtcgctgctcgactcggcatcaccctcaccccttgccacgtttcaaagttccgctcccttgaaacttcggttcagattcactcttccgtccgagatgaggacgtcttcatcatccaatctccttcgcctcccgacgtcaacgaccatcttatggagctgctcattatgatctccgcatgcaagaccgcttcagccaagagaatcactgctgtcattccttgttacccttatgcgaggcaagataagaaggacaaatcccgtgctcctatcacttccaagcttgtcgccaacctcctcgccgttgccggtgccgaccacgtaatcaccatggatctccacgcctctcaaatccaaggtttcttcgacatccccgttgacaacctcttttccgagcctacaatgatgcagtacatcaagtctgaaattcccggatggagagatgctatcatcgttagtcctgatgctggtggtgccaagcgagctaccgccctcgccgaccaactgaacctcgactttgccctcatcaatcgtaaacgtcggcgggatcttgccgcctccatgtgcctccccaccgttccccctacccctaccggctccgactctggctctgtccactctcatgacatcgacgacgaatcaaacattgttgagaaaatggagttgcttgtcggtgatgtcaagggaaaggtggcaatcctcatcgatgatatgattgacactggtcacacagtcaggttggccgctggtgttctgagggagaatggtgccaaggaggtctacgctttggtcagccacggccttctttctgataccaccatggagaacctctcagacctacctgtcaagaagctcatagtcaccaactctattgatcagaccaagcgagtcattgcttgcaacggtttactcgaaactctggatattgcccctgttattgctgagagtatcagacggacgcacaacggagagtctatctccgcacttttcaggccgcatgattcgttctaa

SEQ ID NO: 2124 - DNA, 1131 bp, Cryptococcus neoformans
atgtaccattcgatgcccgacagtcatgaccttcctgcgcaaagcatcgcttcgtccagccggcaaccttcttccattctcaatcgcgcagatcagcatgcctccgaagcagggccaagccgcagtgcttccacggacaaaggctatcatgccgatgttgtgaatcgtcccaaaggcgatcatctcggcgtgccaccatcctccgcctatgcacgtggtcctacctcgcccacctcagagctgtctccgttaagctgttctggtatgacgccgcatctagacatatgcaaataccccacacagcaacttctgcggctgcttgccggattattacaacacatcgcaggctctaatgatcaattacgggcagagcttgaggccgaggaggacgatgaaatggatgagcaacatgtggatgataatacggcaaatgtggactggagatcacgtcctcattctcgggcatcaggaagatcttatgttccttccggcacatcgtcaactgccgagctcttctccgaacccgcttcttcgactttgacctcaccggctctcacatctcggtcgtcctccgcagcatccaatcccacatcgtacccattatctcaattccccctctttactgcatccaaatcatctttatcgcacccatctgccctcttggcctttcatgctaggcatattccctccatttccatcgaagcatacttgttacgtatactcaagtattgtccggccacaaatgaagtgttcctaggtgtattggtgtatttcgacagaatgacgaaattgggaacaccggccggtattggtggcgagagctcgaaggttggaaagaagggaaagggtttcgcaatcgacagctacaacgtgcataggctggtcattgcaggagttaccgtcgcgagcaaattcttttctgatgtattttacacaaactcaagatacgccaaagttggaggcttacccccgactgaactcaattccctggagcttcaattcttattacttaatgacttcagattacgcgtgtctgttgaggaaatgcagaggtatggcgacagactgttagcttatcgaggaagcgggggaggatatcggaacagttggagtggagagaaggcggagtga

SEQ ID NO: 2125 - DNA, 1050 bp, Cryptococcus neoformans
atggacgacaaagaactcgaaataccggtagaacattccacggctttcggtcagctcgtgacgggtcccccgggagcgggtaaatcgacctattgtcatggcttacatcaggcatccatcggtagaccagtgcatatcatcaacctcgatcctgcagtcccaaaccctccgtatccatgctctataaacatcacggaactcatcacactcgaaagtgttatggaggaatacaatctaggaccgaatggggcgatgctttattgtatagaattcttagaggccaatttcgactggctagtggagaggctggatgaggtcttggctgaagagggggggaatggatatgtggtgtttgatacgccgggtcaagcagagttatggacgaaccatgatagtttgaagaacgtggtcgaaaagttggtcaagatggactatagactagcggctgtgcatctcagcgacgcgcactacataacagatgcctcaaaattcatctctgtagttttgctagctcttcgggcgatgctgcaaatggaaatgccgcatttgaatgtgctcagcaaaatagatttgatatcaacttatggagagctcccgttcgacttgagctattacacagaagtccaagatctgtcatacttactgggcagtctggattcagaccctcgaacagcaaagtaccacaagttaaataaagcgttggtagagcttatagaaggcttttcattagtcggatttcaaaccctcgctgttgaggacaaagaatcaatgcttaatatcgtccgtcttgtcgataagatgacgggctacatatttattccgtctggcgacctcgaaggaaccaacgccatcaatacccaagctctgtttggtagtgccatgtcgtcggcgaagcttacaggaagagcaggcggggacgtaagagatgttcaggagagatggatggataacaaggaggcttgggatgaatgggagaagaaagaatggaagagagaagcagagaagagcccagatgggcactggaataccagaagggatgaaaggcggtga

SEQ ID NO: 2126 - DNA, 975 bp, Cryptococcus neoformans
atgtcctcgctcaaccccgaaattgacggccattcctacaaccgcccggacgctggagctcagactcccgttgacgccaaggctgcgcgaagggcccgtttcgaaaaggtctttgaccagattgccgaggagcttttgacgtatgtcaagggtgagggtatgcccaaggatgctgtagagtggtaccaaaaggtactttaccacaacactcccggtggcaagctcaaccgtggtatgtccgtcgtcgacactgtcgaaatcctcaagggccgagaactatctgaggaagaatacaccaatgccgctatccttggatggtgtgtagagctcctccaagcttatttccttgtcgccgatgacattatggaccagagcgttacccgtcgaggacagccctgttggtaccgagtgcctaacgtcggtaacattgctattaacgacgctttcatgcttgaagccgccatctattacctcctcaagaaacacttcaggagccaaaagtactatgtcgacttgatggaactcttcctagagactaccttccaaactgagctcggccagttggtcgacctcattaccgcgcctgaagaccacgtcgacttgaacaaattctctctcgagaagcaccacctcattgtcgtttacaagactgctttctactctttctacctccccgtcgctcttgccatgcacatgtccggtgttgaggacaaggctgctttcgatctcgccctcaaaatccttctccccctcggcgagtacttccaggttcaggacgactatctcgattgctacggcaagcccgagcacattggcaagattggtactgatatcctcgacaacaagtgctcttggaacgtcaacaccgccctcgctcacgctacccctgaacagcgtaagatcctagagacgcttttgacaaatacttaccgacaatatatctttccatcaagtggaaaccattcagttggttga

SEQ ID NO: 2127 - DNA, 1014 bp, Cryptococcus neoformans
atgttaaggaccacacttacacgtttcaacacttcatcaagtctaaccacactcaaagcaaacatgtccaccactgctgctatcaataccgccaccggcacttctcgaagtattaccaagactgtttacgctcacgaggtctctgaaggtgccggtgccactgtcaggaggtctatcggtactagggagcttcggaatcttactcctttcttgatgctcgatcattttaaagtccttcccggtgctggtttccccgatcaccctcaccgcggtatgcaaactgtcacttacttgttccgaggtatcttcaagcacgaggacttccttggatactctggaactttaacacccggagatgttcagtggatgacagccggtaagggtatcgcccacgccgagatgcctatatttgacccggacccaactaaggctgagcctgttgagggtatgcaactttggattgaccttccccagaaggagaagtacattgaaccagaataccaggaccgaaaggctgaagatattcctgttatccaccctaaagatggagtagaaatcactgttctttctggtgactctcacggtaccaacggctctgttactccggtcggcggtgcttggtacttgggtttcaaacttcagaagcccggggcgagcgtgtatcagcctcttcctgaaggttacaatgccttcatctatatcgtgaagggaaagctgcaaatcggcgacgacaccaagactcatgacaagttcaacttgcttgttctttcttccaagcctggagagtctggcgtgacccttaccaggccagaagacgacactgatgctgaagaagcacattttgttgtcattgccggaaagcctctcgaccagcctattgttcagtatggccctttcgtcacctgcagtcaaagacaggctatggaagcaattatggactatcagacagggaagaatgggttcgagcgtgctgttggttggaagagcaagatcgccaaggatttcaggggttaa

SEQ ID NO: 2128 - DNA, 1119 bp, Cryptococcus neoformans
atggccgcccaagcagcttcagcggcacaatcagacgatggtttcctcgatcaactcatcgcttccatgcccaaatccaccgtcccgcccgaatctggtgtgggccctgcagcgccgaagaaggaagtaacagttgaagactttgaaaagctgctcgactccactcccttgttcatgcgagagactccgaaagatggagacgataatcctgtcttggaagctttgaggagtttggttttcgagggtgaaggagatgagatcgcaacgaactttaaaaatcacggcaatgagctccatgctcagaaatcatacggtgaagctatcaaggcctactctgaaggtatcgacgcccacccctcttctgcaactttgctcgttaccctttacaacaaccgggccgcatgtcatctcattctgaagaactaccgttcagctctcaaggataccagtgccgttattgcactctacaccgctggcaagattccccagccggacaaggcgctcgtaaaagctctgttcagggccgcacaatcgctagttcagctgagcagatggaaggaggggggtgatgttgtcgaaagaggaaaagaactcgcggagcaagtgaaggaggacacgaaagtttgggatacactagagaaagaagtcgtcaagggcaaaaagagagacgatgatcgggtggagaggataaggcgagacaatatgaccaagcttgcgttgcgcaaagcagtggaagatcggggtttaatagtcgtcgatacccctagcccaccggacaacccccaccctttgcatttcgacgaacaatctattcctaccatcaacgaagaagtcggttggaccccgccgcctccgcatacacccattgttttccctgtcttcttgctttacccaccatacggacaatcagatttcatcactcatttccatgaagatgccgcgtttgaagatcaactttcagccatgttccccgtttctccatcggcaccgcagataccatgggcggaatgggatgagaaacacgagtactatgtgcctaatttagctgtgtacgtggagaccaaagagaggagactgttaaaggtcggcaagattgacgttgagagaagtgttgggtaa

SEQ ID NO: 2129 - DNA, 1128 bp, Cryptococcus neoformans
atgtccatccccacagagaagcctgctgggccgagcgcattcacaccgtacctcgatgctgtcgccaacgtcttccaccccgtttccggccctgtcttgaacacttatgccaaattccacggctggaaggagaatatgggtttggtccagcccggtaccgtggaaaacttgaccagggatgcgcagcaggtgcaactcgccaactggatgtttgacggtgccagagcagatgtggctaaggtcatttctggtaatcccgccttccagttgacacattccttctctctcggatccaccacccggcccgctgcttacaactttggtgtcatctttgctaatgccaagaccttcttacaaggtggtcttgacggtagcggctctttgaccatgcgtgccaaccaaacttggtccgcccgagacctctctaagatccaggctcaggttaccgacaaacccggccacaccatggttcagttcgaacatgaccacattggagaccactacaccttctcctggaaatccatcaaccccaacctccttgactttaccggtatccacatggcttccctccttcactccgtctctccccgactttctcttggtttcgagactgtgatccaatatcccgaacccgccatcctccagaccgcaacctcttacgtcgccaagctgacctccctgcccaaccccgttgcagcccttacccctaccgcccctggccttccttcccccttcgtccccagctggatagctaccggccatctccaacctgatggcaacgtccaagctacttactaccagaagctttccgacaaggttgacgttgcccttgacttccagaccatcctccgaccgcagtccatgttgggccctgccaagagggaggctctgacaactttggctgccaagtacgacttcagaatggctactttcaggggacagattgacagcgcgggcaaagttggcatgtacctcgaacagaggttcactcctgctttcgccttccttgttgccggagagattgaccacgccaaaaacgcctccaagtttggtgttggcattatgattgagtcctctacgatgacccaggaggagatgattgccgccggcatgttgacccctgtgtaa

SEQ ID NO: 2130 - DNA, 999 bp, Cryptococcus neoformans
atggaaggactacaaaggctacttcaaggaggacgaggtatgggcatgggcggcgcagctggcggtcagactgtagtagcagacaatggcgaaacagtgcatatttctgctctggcgttgttgaagatgctcaaacatggtcgggcgggcgttccaatggaggttatgggtctgatgctaggcgaatttgtggatgattatacgatctcatgtgtcgatgttttcgccatgcctcagagtggtaccaccgtgactgtcgagtccgtggaccatgtcttccaaaccaaaatgctggacatgctgaaacagaccgggcggcctgaaatggttgtcggctggtatcattctcatccaggtttcggctgttggttgtcgagcgttgatgtcaacactcagcaatcattcgagcagcttcatcctcgagcagtggctgtcgttatcgaccctattcaatccgtacgaggaaaagtcgtcattgatgccttccgatcgatcaaccctgctgcgcttgctaccggacaggaatcacgacaaacgactagcaacattggccacttaaacaagcccagcatccaagcgttgattcacggtcttaacaggcattattatagcttggcaattgattacaaaaagacagaagctgagcagggaatgttactgaatctgcataagcgtggctggactgaagggttgaagatgaaggactttgaggagatggagcaagggagccaaaaggccatcgagaacatgctcaatcttgctgttgcctacaccaaatccgtacaagaggaatctactatgactgaggagcaattgaagacacggcatgtgggcaaattggatcccaagcgacatctgtcggaggcagctgagaaggctatggaagaccaagtgtcaaagtctagccatgggagttttggccgagttgtagatgtagatagctcaatatcatgctcgaaaacgacaataacaattcatacaacagctttgcagtcctga

SEQ ID NO: 2131 - DNA, 1014 bp, Cryptococcus neoformans
atggattggattcaccttttcccatctcaactattctttcattactttttccccaccaccagaaaagaaaagatgtctaactcaccacccacgttcgaatcgtacctcgtcgttggtggatgcggatttctcggcagacatattgtcgagcagctcttgggtaggggagagacgcaggtctcggtgtttgacattgtccaaagacactttgattctaatgtcaacttttacattggggatttatcaaacccccaagacgtcgagaacgcgctcgccaagtctcaagcaacagtagtcatccatactgcttcccctacccacggtatgggccgtgcattgtacgagaaagtcaatgtcaccggtacccgtaccctcctcgacgccatcctctccccttcctccaccgtctccaagctcgtctacacttcttctggcggtgtaatctactctggcaaggaggatatctgcaatgccgacgagaggctggattatcctgctgtcccattggatgcgtataacgagacaaaggtcgctgctgaaaagatggtcttggaggctaacgggcaagaaaaaggaggtgaaggcggggccaagctgttgacctgtgcgatccgtccagcggggattttcggtccgggcgacagacagatgatctctggattctacagtgtcgtgaaaaacggccaaaccaaatggcagattggcgacaacaccaacttgggcgacttcacctacgttggcaacattgcccacgcccacctcctcgcggcagacaaactcggggacgaagatgagaaaggcgacgaggaagacgaggggatcccgatcgccgggcaagcgtatttcatcacgaacggtgaacctatttacttttgggatttcgcccggaccatctggcgtcagctgggtcacgttcccccttacaccatcgttctcattcaccaaatatcccccgtaattactgatataagtaccatatcatcagcctgtcctgtagggtgtttgaattgctag

SEQ ID NO: 2132 - DNA, 1008 bp, Cryptococcus neoformans
atgttacataatagaggctggccgggagaaaagccagaaaaaggcgtgagcagagaattgaagtcggcggtcgccgtaccgataggagctcgcgcgtcgtcgatgacctctcaacgtcaagcatatagggtgtcattcgagctcttactctcagactgtcctctccagaacctatatcacggacctcaacgtcaaccacagactatacgagtgaccgtccaacatgtctcgttcatcttacgatcggtgagtgtatcccaatatctcaccatcttctctcctgaaggaaggctttatcaagtcgagtatgctttcaaggccatctcttcagccggtatcactgctgtggccataagaggcaaggacacctccgtggtcattacccaacggaaagtccctgacaagctcctcgacccggagaccatcacccacctgtttcaaatcacccctactattggatgtgtcgtgaccggcttgatcgccgacgcgcgggcgcaagtgcagcgaacacgatcagaggctgctcagtttaggtataaatacggttatgagattactcccgaatctctcgcgaagcgtatggctaacatcaaccaagtttacacccaacgagctggcatgcgacccctcggtatttctatgattttgattggtcccgatgacgaaagaggacctcaactgtttaaacttgatcctgcgggatattttactggctacaaggccacttcttcaggacagaagcagactgaagccgccaactatctcgagaaacgatggaagactttggaagctgagaagaaggatttggatcgagcaggtgtgattgagatggctattgaatgtctctcgtcaatttgcgcaacggatttcaaggcgtctgaaattgaaattggtatttcctcattgtcaccggatgagaagcacattgaaggacaggatggaaggtttaggcagatggacgagcgggagagagatgagtggttgattagagttggagagaaggactag

SEQ ID NO: 2133 - DNA, 1056 bp, Cryptococcus neoformans
atgtccgccacacagttgccagaaatcatggatgccatcttgttcaaacatccctacaaagttgcggtcgaacaggtcccgactcccaagttgcagaccgaaggagatgtcatcatcaaggttcatctcgctggactttgtggctccgatctacacctttacagggctaaagaagatgctgggaaagactatactatgggacatgaggttgtgggaaccattgtccaaaagggcaaggaagtgaacagcttcaatgtgggggatattgtagctgtaccttttaccatctcatgcgggaaatgctattactgctcaacctcccacaccgcccgatgcacttcctcagccttgttcggtactccttcccttccgggttgccaggccacctatgttcgtgtccctcttgcggcatcttgtcttttactcaagcctccacaactgcctgaagagttgatgcttttgatggcagatatcttgcccacgggatacagtgcggcttggaacgcttggagacttcttgatcggggaggggagcgtggtggaaaaggagagaagaaggatatttgcgttgtggttgggtgtgggcctgtcggcctttgtgccataacttctgcgcaaacactcttttccaaagtctttgccgtcgatcctacgcctgcccgccgagagttggctatcaagcacggagctaccgctcttgttcctggcgaactgcaatcagccgtcatggctgccaccgaaggtcgtggtgctgatgccgttctggaggttgtgggcaatcaaggggccttcgatactgccttgagcattgttaggccttacggagccgtcagcagtgtgggggtgcatgccggggagctcaagattgatggtggtttgttgtatgacaagaacgtgaggcttcaatttggacgttgctctgttaggcacttttatccggcagctctagaagtgctcatgaacaaccaagagctcttcaagagctttattgagtataaggtcggtttcagtcaagctgaagaggagtgtccagccacgcaattatactgtagataa

SEQ ID NO: 2134 - DNA, 1116 bp, Cryptococcus neoformans
atggctcccaaagacagaacatcagagtttcactccacactcaattctatcaagtcacgctcagccctcaccaccaacagggcaaagggcaaacagcaagatagagaggcgaaacagccgttgatatcgaatggtccaggtcagactggagcgaagagcgagttcgggaagatggcgggtggaatagcaaaagacattaatgcgacgacgttgaagctgcaaaaactggcacaattggctaagcgcaaaacccttttcgacgaccgtcctgtcgaaatctctgaactaacctacatcatccgacaagatattgcttctttgaattcccaaattgcccaactccaagcatacatcaaatcttccaaggggggtaagggtggttccgccgcttcgggaagtaaggggaagggcaacggggggaaacaagaggaggagcataacagcaatgtggtgatgcttctgcagagcagattggcgaatatgggaatgggtttcaaagatgtgttggaattgaggacacagaatatgaaggccagtaaggatagaacagaacagtttatgcataccgcgcagggaagctcgccgggagatcgcaaaggaaaatcccgcgccaacacgcctactcccaaccccagctcctccctctctaacctaggttctaaaaggggagagaaggaaggacaggacttcctggctctggatattgatggggatagaggagagagcgggattggaatgggaggcgactatcagcagatgcagttggtcgagcagcaggacacatacatacaatcccgctccaccgccatcgaatccatcgaatctaccattgccgaactcggcaacatcttttcccaactcgcaacaatggttgccgaacagcgcgagacagtccagcggatcgacgcagatacgacagatatcgccgcaaacgtctcgggtgcgcagagggagctgttaaagtattatgcgagcgtgagtagtaataggtggttgatgttgaagatttttggggttttgatcatctttgtaagtccatttgttcttttgctgttggcattctttgtcctcggaattctttgttctcggaagaggaagacgctgatggtgatttag

SEQ ID NO: 2135 - DNA, 1083 bp, Cryptococcus neoformans
atggtgtaaacagtccgtttaaacatccggactcttggaaacgactatgacaagacggaagacgacatcaaggcgcttcaaagtgtgggtcaaatcatcggtgaagtattgaaacagcttgacgatgaacgattcatcgtcaaggcatcttctgggccccgatacgtcgtctcctaccgacccactttacccgtccacaagctcaaacccaccacccgagtctccctcgacatgacaaccctaaccataatgcgtatcctcccccgtgaagtcgaccctatggtttacaacatgtctcttgaagatcccggatcggcttcttttgccggcatcggtggtttgggcgaacaagtgagagagttgagagaggttatcgagttgcctctgatgaatcccgaattgttcgagcgagtgggtatcaacccgcccaagggtgtgttgctctacggtcctcctggtacaggaaagacactcctcgcaagagctgtagctgctactctgaataccaactttttaaaagttgtctcttcagccattgtcgacaagtacattggtgaatcagcacgtcttatccgagaaatgtttgcctatgccagagaacacgagccatgtgtcatttttatggacgaaatcgatgctatcggagggaggaggttctcacaaggaacaagtgcggatcgagagatccaacgtacccttatggaacttctcaaccaaatggacggttttgaatctcttggtcgcaccaaaatcattatggccaccaatcgtcccgacacgctcgaccccgccctcctccgtcccggccgtctcgatcgaaagattgagattccccttcctaacgagcaaggtcggttggagattttgaaaattcatgcgaaaaaggtgaacaagagtggggatattgattatgaggcaattgtgaaattgagtgatgggtttaatggtgctgatttgaggaatgtttgtaccgaagccggcatgtttgctatccgagatgatagggatgctgtggtccaagaagactttatgaaggctgtcaggaaactaaacgaggcaaagaaacacgagactactatgtga

SEQ ID NO: 2136 - DNA, 1047 bp, Cryptococcus neoformans
atgtctcccatcgccaatggcaacccccacggcagctctttcagcgtcagggaacccgagaggaccggcgaggtaagcaagaagatgcactccaaggttgttatcatcggctctggtcccggtggtcacaccgccgccatctacttggcccgagccaacctcgagcctgtcctgtacgagggaatgcttgccaacggtttcgctcctggcggtcaactcaccaccacgactgacgtcgagaacttccctggtttccccgagggtgttaccggtaccgaaatgatggacaagttccgagctcagagtgagcgattcggtaccaagatcatcaccgagactgttgcgcgtgtcgacctctctgtccgacctttcaagtactggactgagggcgaggaggaggaacacgagttcatgaccgccgacactatcatcatggctaccggtgcttctgccaagcgtcttttccttcctggtgaggatacctattggcagtctggtatctctgcttgtgccgtttgcgacggtgccgtccccctcttcaggcaaaagcccctcgccgttatcggtggtggtgacagtgcggccgaggaagctacttaccttaccaagtacggttctcacgtctatgtcctcgtcagaagggacgagctccgagcttccaagattatggctaagcgactcacttctcaccccaaggttaccgtcctttggaatactgttgctactgaggccaagggcgacggtgaagtcctcacgtcacttaccatcaagaacaccaagactggtgagatcggagacctccccgtcaacggtctcttctatgccatcggccacgagcccgccacttccctcgtcaagtctcaagttgagcttgacagcgatggatacatcaagactgttcccggcacctcccagacttctgtccacggtgtcttcgccgccggtgacgtccaggacaagaagtacaggcaggctatcacatctgctggttccggttgcattgctgcccttgaagctgagaagctcatcagcgaggaggaggcttga

SEQ ID NO: 2137 - DNA, 1194 bp, Cryptococcus neoformans
atgatatcttcaagaggatcagtagaaggcttcctcaaggtctggtcgaacccttctcctaccgaaacgcccacaatccactttcctcctgttggacgtcctctggcccgtatgacagaaaaccttaatctacaaaaggctcttcttcgacgtatcgaagaagcaggtaaaggcatcgtcgacattcgtgaaaactccagagtaagggagatgcgtcttggcgaaggtggtcgttgggttggcttgcggatcggagatgaatgggtccggggatccctagtagttggagcagatggcccaaactccccagtcaggcatttctcggagattgaatcgtacggtcatggttacaacacccacgccgtggtcgctactctcaaccacgaccccgatcctctctaccccaacactaccgctttccagcgcttcctctctaccgggcccatagccttcctccctctttctgacacatcatctacaatggtatggtccactcttcccgaaaacgctgctgctctcaagaaactttctcatgatgcccttactcaaatggtcaacgctgctttcactctgcctgaagagacactttccagcttgtgcgaggccatgctgtctgctcagtctgaaggaacacctttgacagcgccccaaatcgtcactctcatcgctaccctccccacccctcttacatcctccgatcagcccatcatcccacctgccatcacatccatccaccccccttcggtagcttccttccctcttcgtatttctcacgcgacatcctacctcggagaacgtaccgctcttgtgggcgatgcggcacatacgatccatcccctggctggacaagggctgaacatgggtttggctgacgtcaagtgccttgcagaagtcctcgaagagaccagacgattgggaggcgatttgggtagtcttgaaggtacaaaaggttatcctaaagagcgatatcctttgaaccatttgatgttgagtgcgacggataagctacactacatctttcgagcgaggaacgggttggtcaactgggtgagaggtactggattcgatgtaatcaacgagttggggcctattaagcggattttaatgcggtgcgggatccggagtcggacttggtggtgcttctgcgagaacagaaaaggaacgggaatttggaagagcgcgtgcggaagataa

SEQ ID NO: 2138 - DNA, 1182 bp, Cryptococcus neoformans
  misc_feature (897)..(897): n=g, a, t or c
atggggctcacgagttggtggccggcggcaaggacgagccacgtggagttcgcgtggggatcggaaacgggtccgcgttgttgttattctcgagattcttcgttgcgcaggatctggcgtgcagatacacctgaacgaggcagcgtacggcagagcaacgctgacatcccagccacatacaccatgtccgccatccgcactctcgcaaaccccgtcaccgcctgcttctccacctcgctctctccccgtgccgcattccaccgctttctccatgcgctctccgcctccatccgccgcctcgacctctcccgcgacccgagcaagaccttgaaccgcctcaagcagcacaggttcaccctggccaacacgctgccccgcgcgttcatgcttctatgtgcatcctacagtctctacatcatgaccaccccgcccttcccgctcaagcttgggatacccatcgcgtacgtcgccgctgtcatcttgccgatcacgtctcagtttgtctggcctgccacacccatctttgcatggctcatcactttcttctccgcccgtttcatcccttccgggcgccggccagaaatccacgtcgcccttcttccagctcttgaatccgtcctctacggcgccaacatttctgatctccagacaagatataccaacgctttccttgatgtggtcgcatggctgccctacggcgtgttccatttcactcttccattcgtcgtggctgttatcctttggtcgctgggacctaggggtgcggttcagttctggggcttggcctttgggtggatgaatttgctcggtgtagtctgtcagctcctgttccctgctgccgcgccttggtacgaaatcattcacggtcttacccccgccgactattccatggccggntctcccggcggtctcatgcgtatcgaccgcgtcttccactcttcaggctataccaacgcattcggttccgctcctcttgtttttggtgccttcccctccctccattccggatgtgccgtcatggaagcgctcttcctttcccatttcttcccatctctcaagggtctgtattggggctacgtcggtgtcctctggtgggcgaccatgtacctctcccaccactacctcatcgacctcgtcggtggagcttgtctgagcgtcttggtgtttcttgtgcatgcctga

SEQ ID NO: 2139 - DNA, 1113 bp, Cryptococcus neoformans
atgatgagccgttgtgcgtggaatgtcttcccatctatcgttggccgccccatccttcgagccgaggagcgtctcggtacttctcaactgaaagatatcatgattggtgacgaggctgcagagaatcggtcttacctccaagtcactcaccctatggagcacggtgtcgttaagaactgggaagacatgcgacatctttgggattacacgttcaatgagaagatgcatatggaccctcgaggcaagaagatcttgttgacggagcctccaatgaaccccaaggcgaacaggcaaaagatgtgtgaggtaatgtttgaggagtatgggtttggaggtgtttacgttgccatccaggccgtcttgactttgtatgctcagggtttacaaacaggtgttgttgttgactctggtgacggtgtgacccatattgtgcccgtgtacgacggtttcgccctaccacatttgacgcgccgtctcgacgtggcaggtcgggatgtgactcgatatctgatcaagcttttgcttatgcgaggatacgcatttgagcgcacagcagactttgagactgttagaggtatcaaggaggctttatgctttacgagttatgatctggaaatggacaagaagttggccgaggaaacgactgtcatggtagagaactataccctccctgatggaagagtaatcaaagttggttcagagaggtatgaagctccggaatgtatgttccagcctcatcttgtggatgtcgagcaacctggcgtggctgagctcctctttaacaccatccaacaagcggctgtcgacacacgtacagaactttacaagcacattgtactttctggtggctcatccatgtacccgggtttcccctcgcgtctcgaaaaagagatgaagcaattgtacttgacacgggtgttgggtaatgacacttctcgtctaaagcactttaagatccgaattgaagatcctcctcgacgaaaacacatggtgttcctgggtggtgcagtgcttgccgatattatgaaggacaaggacgcgttctgggtaaccaaagaggagtgggaagagcaaggaatccgggcattggacaagctcggccgtggggattga

SEQ ID NO: 2140 - DNA, 1215 bp, Cryptococcus neoformans
atgtccatcctccgtgtcggtacgttgcacctgcgctcggtctgcaaagctcacactacaatagctcccgcgctcagggcaaaggccgtccccagggctgttcccctcgtctcaaagcgcaacgccaacgacctctcaatcacctcccctcccaatccctctgcctccgttcgcccagctatcagatacgggcctcctaccggtggccggtcttcagactctggacgcaccgtcaccgtcttcggttctaccggtttcctcgccaggtatctcattcaaaaacttgccaggcagggaactcaggtcattgtgccttaccgtgatgaggatgaaaaacgtcgcttgaggccatgtggtgatttgggacagattgttcctcttgaatgggatgccaggattcctgagcaaacagcagaatgtgtcaagcatgctgatgttgtgtacaacttggtcggaagggattacgagactaggaactactcttatgacgacgtcaacgtcaaggttgctcagtccattgccgagatttctgccgacatgaacatccctcgtctcatccacgtctcccacatcaacgccaaccccgagtctccctccgaattttaccgcaccaagtacgctggtgagcgagccgtccgagatgccttccccgaggccaccattgtcaggccatctcaattatttgggcacgaagactggttgctcaacgccattgcccgataccctattctctgcaagctgaacaatggcaacacgaagcttttccctgtccacgttgtcgacgttgcccaggcccttaacctcatgtttgatgcccccgtcacttccactgcctcgacctttgtccttcccggtcccgagctctacaactatgccgagctcgaaaggcttgtttctgccctcaccctccgacccatctcctccgcccctagcctccccaagcctgtcgccaaattccttgccaacctcgttaaccgtggtctttggtggcctaccatctctccagatgaggttgaaaggatgttcattgacgatgccggtgcggaagcattccaggttcactctcctggtcccgatggatggaacgctcctcccaggccgcagattgtcggtgttaacggtgagcccgtcaagagctgggccgatttggatatgcagcccgacaccatagccgagcacgctatcaagcctctgcgacgttaccgatcaacgtaa

SEQ ID NO: 2141 - DNA, 1155 bp, Cryptococcus neoformans
atggctgacgacagcgtgccccttccctaccccaacctcaaggttccgacttggtattatcaggtgcaacatgttgactacaagaaggacgaagcggagaagtctttctgggaggctgtcgagaaagatggtatgtcccacagcataaactctgacaagacggaacttatccagaagctggaagaaaagaacaagcagcaggtggaggagtatgatcgtaaattgaaagatgcggaagagaatgaaggggacagtgagatttcggagttgttgaggaataaggcgatgtattttgttaggataggggataaggagcgagcgctgccggctttggagattgcgattgaaaagacggcaggattgggagcaaaaatcgatcttgttttggccattgtgcgaattggattgttcttctctgacatccacctcgtcaccaccaacattacccgtgcaaacaatcttatcgactctggtggtgactgggaccgaagaaatcgattgaaagtgtatcgtgccctccgacatttgactatccgagagtttaaagaggctgccgagcttcttatcgactcattgtctacttttacagcagcagagttgatggagtatgacgagtttgtggcgttgaccattttggctgctggtgttggatgcgacagaaagggtatcaaggacaaggtcctcgcgagccccgaagttaacggtgccctccccaacatcccttcattagccagcttgacgaactctctctacaagagcaactattctgctttcttcatcgccctcgccgaagttgagcaacagtatcttctcaccatcccctatctcgtcccacatgcccgatattatgtccgcgagatgcggatcaaggcttactctcagcttctcgagtcatacaggagtctcacgatggaaaggttttgccgttcatttggcgttagcgagcagtatatggacaaggacttatcgaggtttattgcgagcggacgattggcgtgcacgattgataaagtgaacggggtgattactaccaacaagttggcgagccagaacaagacagcgatgtatgaacaggtgctcaagcagggcgatgtgctcttaagcggtgagtacttaattccttgttataaagtacgtatgctgacgatgatatag

SEQ ID NO: 2142 - DNA, 1209 bp, Cryptococcus neoformans
  misc_feature (747)..(747): n=g, a, t or c
atggccaccgttaatatccgacgagatgtggacgacaagttctaccgttacaaaatgcccctcctccagatcaagattgaaggtcgaggcaacggtatcaagactgttgtgcccaatatggaagacattgcgcgagccttgaacaggccgcctacctacccgaccaaattctttggttttgaacttggtgcccaaacatccatggccaacgacaggtatatcgttaacggtgctcataccgctgaccgtttgcgagagctccttgacgttttcattgagaaatttgttctttgtccctcttgcaaaaaccccgaaaccgaaattgtcatcacaggcaggtcgggtcacgaggacatgcatcgtgactgcaaagcttgtggtcgtcaaaaccccattgatatgcgccacaagctttctgtctttatcatcaagaacccacccaagaagaaggacaagggtggcaagaagggcaagaagtctggtggtatgacggccgaagccaacctcggtgggccaatggtgtttgagaagacagaggatggtagtggtgaagatgatagttcccctgatgcgggcattgcgggtgtccctaccactggcaccgaaattgacgcggtgcttggacgtggcgaccccatcctcggtgaccctgatgccgctgaggcagcgtccaagaagctcgccaaacttgacgttaacggtggcggcgatgaagaagaggacgaggatgccgattcaccttatgcngctttgggttcttggttggagaacaacaaagaagccgatgacgcctctatcatcgcgcagatcaaagatctcgggattgctggcaagcacaaggttttggtagagattggtcagcatctgttctcggatgacatctgtgacgagatcgccggtcgaactgcccttcttcaagctcttgtgacgtctgagaagcatcaaaagtctctcttgggtggtatcgaacgcctcatcggtctatccccttctctcgagtctcttattgccgctggcaccacttccaagattctcatggtattgtaccaagctgatatcatcgaggaggacgttgttcagcagtggggtacccacgttagcaaaaagtacgtggacaaggacaagagcaagaaagtcagaaagaatgccgaagccttcctcaagtggctcgaggaggctgaggacgagtctgacagcgatgaggagtga

SEQ ID NO: 2143 - DNA, 1146 bp, Cryptococcus neoformans
  misc_feature (982)..(984): n=g, a, t or c
atgccgtcaaattattctccatgccttgtggtcccatcatccattacggacggtcgatgtcaagctgcttctccagatggatgtccatgctcctttagaagagtgagttgtttctcaaaatgtccaatacataacgctaatatcgcattattcagatgcgacgaggtcatgcgaccagctatagacaggaaggtcctccatccaatgcattataagaaacagagaatgcagtggtccttgaatgattctttcaagaagggcctgagaaatgccttgacaggattaggaacatcaaattcgttcggtgtaccctttgaaagacatcaggcaactgaccttgatcttccctccgaggacgagctcgtggcgtatggcgaggatacgtttgagtctattctcaaatacatggtgtcttccggtctcggtacagaattctctggatccagaccacagcctgaggtcctccagctcttacataccagcggcctcatgacagactcaaatcccaatataaatcggctcacaatcacttccaaaggctttcaatttttgctcgagaagagacagactcagttgtgggagatactcatgtactacttgagtgccaaagaagcaaactctgaacggtcatccgaggtcttgtcaatgttcttctccctcggatgtatgcaactaggacaagactattccgcgtccaactccttccctggcgctcaagaagctctcgacgatctcgcccaatacggtttcatttacaaatcatcgcctgacagcgatcaattttggcccacccaccttgccacctctttgtgttccggcgacgcttccgccatccaatctcagagtgcagacgacaagcgtttcctaatattggaaaccaattacaaaatttacgcatatacttcaaacgagctcgagatcgctatccttaatctctttgtcgacattcgcattcgggtaccccaacctcgttgtaggaaannnaccgtcagcacggttaaagccgccatggaaaagggtatctcagcccgacagatcatcgcctatttgtccagtcatgcccatccacaaatgcaactctcccccaccattattacatcccaccattgtcgatcaactttatttatgggatcgagagaggaatag

SEQ ID NO: 2144 - DNA, 1200 bp, Cryptococcus neoformans
atgcaccttggtttacggtttggagcagcctgcccggaaacatcatcgctgacacatgttttgcttgatctctttttttcgcttcgaccatatatctccatctttacagatcactgtatctcaatcgctcagataaattttatccggcatccgcgcgtccagtcctatattagccccaacaggccaactgaaggttgtttgaagctgctccacttgtttgaatcgaatatggttgctgtcgctggaccaaaggctcctggggtgggcatctcgttcggtcagagtgtcgtgcccaatcttaacatcaaacaaatctgtccgaactgtaggaccgatcctcccaatattgttgaggagtatgccaagggtgatctagtttgtgccgactgtggaaccatcctaggtgaccgtatcgtcgatacgaggagcgaatggcgaacatttgcgggagacgagaatggggacgatccctcgcgtgtcggtgatgctggcaatcctcttctcggaagtaatcacctcgacacaatgatttctcacaaggacggtcgaaccggtatcgctcgagatctcaaccgcgcacaagcacgagccaacactctgtccaatggaatctatggtaaatcttctgtggcacaactatccgctgtcttctcccgtatcggagaaaagtgtgacgcgatgcagctccctcgcggtgtaagagaacgtgctcaacacgtttacaagattgtcgatgaggcgcgagcaatcaaggggaagaatgaacctgctgtcattgctgcctgcattgtttacgcttgcagagatgccaaggttcatcgtaccttccaagaagtatgcaaagccctcaaaatcagtaagaaggagctcggacaggtcttcaaccacgtcaagagtgttgttcagtcttccagtgctcagggttcgatggtgtctgtccacggatcaaacaatgcgcaagaatctgctgaaggtttattgggtcgttttgcaaactatctggatctgggcaacgccgtgttcaatgtgtctaagcatatcgcaggggaagccgttgcaaagagcgctatcgacggcaggagtcccgtgtcgatcgcagcaggtgtattgtacttcacatgtgtactgttggggaagagtaccaccgccaaggatatttctgcaatgggaggagtgtcagagtcaaccacgaagctgtga

SEQ ID NO: 2145 - DNA, 1206 bp, Cryptococcus neoformans
atggctgccgtcgagaccccttccaaggttgctgcttctgcccttgcaaacattgacctcaacaccgccaagaaggcttccgagcccactctcctttccaagctccaagctgctgctcctaccaagcctgtcgtcgaggaggcccaggctgcccccgaggatgacgttgaggagtaccgtaagcgattcgtcggcgacctcgattgcgaggaaaaggacgagcccttgttgaaggagacgaatgcgaggtttgtcttgttccccatcaagtaccacgagatctggcaaatgtacaagaaggctcaggcctctttctggactgctgaggagatcaaccttgcccctgatcttcacgactgggagaataagctcaacgacaatgagcgatactttattgagcacgtccttgccttcttcgctgcttctgacggtatcgtcaacgagaaccttgttgagcgattctctgccgaggtccaggctgctgaggccaagtctttctacggtttccagatcatgatggagaatatccacgccgagacctactctctccttatcgatacctatatcaaggacactgctcgacgaaacttcctctttgacgctattgacaccattccttgtatccgaaagaaggccgactgggctcttcgatggatctctgacaagcgatcttgtttcggtgagcgactcatcgctttcgctgccgtcgagggtatcttcttctctggttctttcgcctccatcttttggctcaagaagcgaggtctcatgcctggtctcaccttttctaatgagctcatctctcgtgacgagggtctccacaccgactttgcctgcctcctcttcacccatctccgaagacgccctcaccccgacactatcgccaggatcatcaaggaggccgtcaccattgagcaagagttcttgactgacgctctccccgtatctcttatcggcatgaatgccaaactcatgtgccaatacattgagtttgttgccgaccgtcttcttgttgccatgggtaacgagaagatctggaactctaccaacccctttgactttatggagatgatctccctccaaggcaaggccaactttttcgagtctcgagtatctgcatactccaaatctggtgtcaaccaggccgtcggtgccgccgatcacaacgccatcaagaagggcttttctctcgacgaggacttctaa

SEQ ID NO: 2146 - DNA, 1218 bp, Cryptococcus neoformans
atgtccgcccctgccacatctgaagctggaccttccagcaccaaccccccttccgtcgagggcaagaaacagcctgtcgtcatcctctgtattggcatggcgggatcgggcaaaacgaccctcatgcaacgacttaactcccacctccattccaagaatacccccccgtatattctcaatcttgaccctgccgtaacgcacatgccttactcagcgaacattgacatccgggatacggtcgattacaaagaagtcatgaagcagtacaagctcggccccaacggtggtatcttaacagcgttaaatctgtttaccacaaaatttgatcaggtattggggtatgtggagaagcgggcggagactgttgactatatccttgtggacaccccaggacagatcgaaatcttcacctggtccgcgtctggtgctatcataacggatgctattgcttcttctcttcccaccgtcgttgcctacattgtcgacacaccgcgaactgcgtcccccgttaccttcatgagtaacatgctttacgcttgttctatactttacaaaacgaaattaccattcatcatagtattcaacaaaatcgatgtgcaacctcatgagtttgccctggactggatgacagactttgaaaaatatcaagaagcgttaaacgataagagcagagacgagcatggggaaggaagttatgtgaacagcctaatgtcaagtatgaaccttgttctggaggagttctataacaatttgagggcggtgggtgtgagcgcgatgaccggagagggtatgaaggcattttttagtgcggtagaagaggccagaaaggaatatgagaccgattacaaacctgaactagatcgtttggcagctgagcgggccgcacagaccgaagcagacaaaaaagctcagcttgagcgtcttatgcgggatatgaatatttcggactctcctcggtccggacctggtggtaacccctttggtcctcatgcccgtaatgaccgtgaagatcgatactatgatgacgagggcgaagcgagtgacatcgacgagcaggagcaagaagctatcaggagacaaatggaggaagaagaagaagatgcagaagcggaagaattgggcaagttggacgtagaagagccagagatcggaagcttggccggtggagctgctgctgctgctgcgagtcggggcgtaacatggcctgcgcccagatag

SEQ ID NO: 2147 - DNA, 1200 bp, Cryptococcus neoformans
atggccgccccctctgaaactaccatccaactatcgccagaagctgaggcccagtacgagagaatcaccagaaatctccaagaagtaactagcggggaggttatcaggaaggtcttaagcgaagggaaggtcgtcaaagcttactggggcactgctcctactggcaggccccacatcgcctattgcgtcccgttgctcaagatcgccgactttttgacagccggtgtcaatgtcaaggttttgcttgctggtgagttgattctccacgctttcctcgacgcctctaaatctacactcgaaaccgtccagtaccgagtcaagtactactcaaagcttctcataaccgtcttcactgtcctcggtgtgcctaccgacaagcttgaattcatcacgggttccagctaccagcttaagcctgactatactctcgacgtctatcgattccacgccttgacttccaccagagaagccgagcacgccggtgccgatgttgtcaaggagtcagagtcccctcttatgagcagcttgctctaccctggtcttcaggctttggacgaacagtacctggatgttgatttccagttcggtggtgtagaccagcgaaagatcttcatgtatgccgctactttccttcccaagttaggctactccaagcgtgcccacctcatgaacgccatggttcctggattgtccggtggaaagatgtctgcttccgacccaaaatccaagatcgacttcctcgacactgctgccgacataaaaagcaagatcaaggctgctctctgtccccctggagaggttgagaacaatggtgtcatcgcatttatcaagactgtgctcattcccatccaagctctcaggattgaacaggccgaacgaaggggtgagaaggctcccgttggtgaaggaagctttgttaagcctggcgctcctgagggtaccattttctccatctcccgacccgagaagtttggtggtgacattcacttcaagagttacgaggagctcgagaaggcatacgttgctggtgatattcaccctggagacttaaaaactggtgttcaggaggctctgattcaattcttgggtccgattaggaagtctttcgacgaagacaaagagtggcaggaggtcgagaggacggcttatcccctcttctgttgcccccactgccgaggagcccaagaaggcggtgagtaa

SEQ ID NO: 2148 - DNA, 1119 bp, Cryptococcus neoformans
atgcttcggctccaatccctgggttccctcccggcccatgccgaaccagcttggacagtatctttcaaccctacccgctctctcctcgcatcatgctccacagatcgcacaatccgtctttactcctacattataccctcttcctccgatggtttaccaagccaggacgattcccaggccgtgtttagtcttgctaaggttatagaaacggaccacaagaggactgtgaggagtatagcgtggtcccctgatggacgaacattggcaagtgggagctttgattcgaccgtcggtgtgtgggaggaggttattccgctttcggatgacgaagaagaagaggatgagggtgcacaaggggtgtataaaccggctggagagtgggaatgcgtgacgacgttggaagggcatgagagtgaatgcaaatcggttgggttttcgagtgatggggctctgctcgcgagttgctccagagataaaagtgtatgggtgtgggaagtccaaccggacgccgattttgaatgtatcgcggtcatgatggagcactctcaggacgtcaagtccatcgcctggcacccacacgaagagatcctggcttctgcgtcatacgactcttacatccacctcgcttacgacgaccccgattctgactggtgcatcttccaaaaactccatccctctctcccttctactccactcaccatcccatccacttccccgtcacatttaattgatgcgttggttcctacggaagaagagaagaaggcagaggcggagttgcaagtcccgccgttggaggaggatgagactgtttggtactcggcgttcaaagagatcttacacaccgccgctcactcgcgttcagtcttttctctttcttggtccccaccctatccatccgccgagtctgccggctccaccgactctactgatttagggatgctcgcttctgcgggggaggatggtaagattatcatctggcaaatcaccaaagatgcgcacggcgtgaacgatatcaactcggtagcgtggtgtgtgagagaagataaaaagggatgggggatgttgagtagtgcgggggatgatgggagtgtcaaggtttggagggtcgtcagggattaa

SEQ ID NO: 2149 - DNA, 1170 bp, Cryptococcus neoformans
atgagacactttacaggttcgttcaactttggtccccaacatcctgccgcgcacggtgtgcttcgacttatcctcgaacttaacggtgaagaaatcctccgtgccgacccacatattggtcttcttcaccgaggtactgaaaagctcatcgagtacaagaactatacacaggctttaccctactttgatcgactggactatgtttctatgatgaccaacgagttgtcttactccattgctgtcgagagattgcttaatattgaagtgccggagcgagccaagtggattagaacattgtttggagaaatcacccgtgttcttaaccatcttatggccgtcctcacccacgcgatggatgttggtgctcttactcccttcttgtggggtttcgaagagcgtgaaaagctcatggaattttacgaacgagtatccggagctcgtatgcacgcggcctacgtccgacctggtggcgttgctttcgacctcccgcacggcttgctcgacgatatcttcaagtgggctacacaattctcctctcgagtagatgaagttgaggaggttgttaccgggaaccgaatctggaagcagagaacgattggtattggacctgtaactgctcaacaagcgttggactacagcttttccggtgttatgcttagaggtagtggtattccttgggatatccgaaaggtggctccttatgatgcgtacgacaaggtggagtttgacgttcctgttggcaagaacggtgactgctatgaccgatatctctgccgagtgcaagaattccgagagtcccttcgaatcattggacaatgtcttaacaagatccccgacggtgcttacaaggttgacgaccacaagattgtccctccccctcgagcttccatgaaggaaagcatggagagtcttatccaccatttcaagattttctctgaaggttactctgtccctccaggagaaacatacgccgctatcgaagcccccaagggtgagatgggtgtctacctcgtttccgacggtaccaaccgcccttacaaatgcaagatccgagcacccggtttcgcccacttggccggagcggactttatgatgaggcaccacttcttgccggatgcggtcgctatcattggtactatggatttggtgttcggagaggttgacaggtag

SEQ ID NO: 2150 - DNA, 1230 bp, Cryptococcus neoformans
atgcacacctctctccgtcttttatcacaaaacatcaaacaagcccgcataatggccaaccccgtgtacatcgtctccgcctcccgaacccccgtcggcgcaaaggacggcgccctcgccaccgtctccgccccgcaactcggtgtcgtcgccgtcaagcacgccgtcgagagggccggtatcaagccagagcgcgtcgaggagctttacatgggcaacgtcgtccaggctggtgttgggcagtcgcccgccaggcaggtcggtatcggtgcaggtatccccgagactgcagatgccaccaccatcaacaaggtctgtgccagtggtatgaaggccattatgcttgccgcccaaaacatccagcttggccagaggggtgtcatggtcgccggtggtatggagagcatgtcccaggctcccttccttgtcccccgtcagacacccgcgttcggccactttgagaccaaggactctctcgtcgtcgacggtctctttgacgtgtacaacaagttccccatgggcaactgtgccgaacacaccgccgccaagctcaagatcacccgtgaagaccaggacgacttttgtctctcgtcctacacccgcgcccaagaagcgtgggccgccgacgcgtttgccgatgagattgcgcccgtcaccgtcaagggccgaaagggagatgtcgtggtcaaggaggacgaggagtacaagaagcttttgaaggacaagtttaggaccatcagaccggtctttgtcaaggagaacgggaccgttaccgctgccaacgcgtccaccctcaacgacggtgcttccgccgtcgtcttggcttctggcgaggttgtggagaaggaaggcttgaagcctcttgccaagattctcggcttcgccgacgccgcttgtgctcccatcgacttccccaccgcccctaccctcgccgtaccccttgctctcaagaatgccggtgtgaccaaggacgagatcgccctctgggaattcaacgaggccttttccgtggtgggcgtcgcggctgaaagggtgctcggtttggacaggtccaaggtcaacgtcaagggcggtgccgtcgccctcggtcacgtacgtcctttttcttatactctccctcccccttctttcaacaaactggccggcggaggtgacggagccgctgggttgggccctgtaccagagtttgatcgtgaatcaggtactatagcaatggtcggaatatcataa

SEQ ID NO: 2151 - DNA, 978 bp, Cryptococcus neoformans
atgaccgatgagcttcccccaactaccgaatctaccgatgccaacggtatcacaactatagttagctggaagtacaacgcggatgatcaaaaggtcaaggtgaccaggagagtgaggagacggttgcaggtctccactgtgactcagacaatggcggagaggaagcaatggccaaaattcggtctcgacaaaggaaagcctcctggacccgacagaaagactaccattatcggagagaaccttcatttcaagatcgcccccatcagcaaggtatgtgccatccaacgtgttgaacctgaacctgaaacagctgtcaaggctcccaccggaaaggcggttgtctgtcgactctgtagtggtcaacattacactgcgagatgtcctttcagggaacagcttgctgctatcgacaatctcaatgcagacggagcagaggaagagcaggttgttgtttctggaactctggccgccaagggtgctggtgagacaggtggcaaatatgtccctccatctcaacgcgcaggggccactggtgctggcgactcaatgttccgagctcgagacgagcttcctacccttcgtgtcacctccctttccatcgatgccgaagaagacgatcttcgggctttgttccaacctttcgccaagaatggcaagcttggaagggccaatatcgtcagggatcgaaacacgagggtcagcaagggtttggcgttcgtcagtttcgagagcaagagagatgcagaggcggctatggctcacttgaatggccgcggttacgattcattgatcttggaggtcgcctggtcacagtcgaggagaacgaacgtagttgtagtatataggagtgtgttgatgcggcttaaaagcggcgagcggtgttatgccgccttgtatatgcagcccgatacccatacgaaaatactgtcatcgtttattgaatcaataaagaaggaagagcatggacatgcggcctga

SEQ ID NO: 2152 - DNA, 1188 bp, Cryptococcus neoformans
atgtcttgccccttccacaccaccacaaacacctccaaccgcagtcccttgccagaccgtgcacttctcctcgcaatgaagtcccagacaaacactttcattctcggcacgcgcaagtcaaacctcgccctcgtacaaacaggtcacgtcgcagacgatcttcgacgtctccattccggcgcaggcagcaaattcggcgagactagagaggaaggtgacgatgccgaacaaggtgatgtgccttttgtgcatccctacactttctccattgagtctatgaccactgttggtgaccgaaaccagactaccccactccacctcctctccccttactcctctacccagcccgcaaaatccttatggactgatgagctcgaagctcgactcatcaacggtcactttgacatgctcgtgcactccctcaaggatgtgcctaccgttctcaaggacggatgcgaaattggatgtatggctaagaggcatgatcctcgcgatgctttggtagtcaagcagggattaccgtacaaaagactggaagatttgcccgacggagctgttgtcggtacaggtagtgtgaggagagtagcgcaattaaagagggctttccccaatctcgtttttgaggatatgcgcggaaacctcaacacgcgattcaacaaactggacaacccccaatcgccattttctgctcttattctcgccatgtctggcctcgaacgtttaggtatggcccatcgtgccacgtcgcccctttcctctccaaccctcatgcacgctgtcggtcaaggtgctcttgccatcgaaattcgatccaccgaccctcgcgttcgaaactgtttaaggggattaggccattggcaaactgaatggtcttgcggtgccgagagaggttgcttgagggttttggaaggaggctgctctgtcccggtcggtgtagagtctgagctcgtcgagcttgacgaggacgagctcactctccattcttgtgtcacctctactgatggatccaaacatgtcctttttacccctcctcctgtccttgtacgatcataccgtcaagcagagcagttcggtgaagaatgtgctcggagattgagagggatgggtgcaggggaaatcttggatgagatcaacaagctcaggggagcgagagttgagggacttggaaagcgctatcgagagaagtag

SEQ ID NO: 2153 - DNA, 1131 bp, Cryptococcus neoformans
atgggagagggcttcttttctgatatggccacagtctacaaccaatgcccagtcagcagacaccctaaaacttgctcttcgtctccttctgttcatctctttgggcacgaaatagtcctcgacgtgtccatcccggcgcttatcctctccaccgtcggagctgctttcctactccgatacactctctccatcttcaggcttttccttgagcttactgtcttgccaggaaaggactctcgaaagggagagacatgggctgtggttaccgggtgtacttcaggtatcggcctcgaatttgctcgacagcttgccgccaaaaagttcaatattatccttgtcggtcgaaggcagtctgctcttactgatctttccaaggaaatcgagagcaagtacgatgttcacaccaaatctgttactgtggacgtttctacccctggtagtgctcgagacgacgcgctcactcagcttgagcttttggcccaaaaccttgacgtgggtattctcattaacaatgtcggtgcatcacacagcatgcctgtagctttccacgagactgagcgttccgaaatgagccgtatcatcgagaccaacgtcacctggacctatctcgtcactcgctccatcctcccatcaatggtcgcccgctccaagcaaaaaggcgctcccaaatccctcgtcattactatcggttccctctccggacgcatcccctctccgctccttgcgagctattctgggacaaaggctgctttggctacttggacaaaggcattggcggaggaggtcaagcctcagggtgtgatcgttgagcttgttcaggctgctttcgttgtatccaacatgtccaaaattcgtaaatcttcacccttcgtccctacccctgcgccttttgttcgctcaactctcaactctatcggccttccgcgcggtgcccaaggccgtccgcatgagcgcacacccttttggtctcatgctattttggactatgtcgttgggtttgcaggctatgtgagtgagatggcagggatcaaggtcatcctcgggatgcacaaggatattaggaagagagctttgaagaaggctgctagagatgagaagaaagcggagaaaagagtgaataaagcgagatag

SEQ ID NO: 2154 - DNA, 1161 bp, Cryptococcus neoformans
atgatgctgatattcagtatagaaacctatcattctccaaggtccgcttttatctcttgcaactcaaaacgcatttcagctaaatgtgccgtgtctataggtcatgagcgatctctcaaccaaatcgtctttaactccgaaggcgatcttctcttctctgcctcaaaggatagtgtcgtcaatgcctggtacacctcaaatggcgagcgactggggacttatggcggaatcaagggcggcgatgggcacaacggtagcgtctggactgttgcggtggattctcaaacaagatttttacttactggcggtgccgacaatgcgatgaaactgtgggaagtcaagactggagaatgtttgtacacctgggagttcctaaccgctgtgaagagggtcgcatggaacgaggatgatgacatgttcttgagcattactgagcagagaagtggacagcctagtgtgattagaatattttccatcaaccgagaggaccccagatcccgttcgtctacctacccttggtttttcttttcttttgctattgctgacgcacgtgcagaatccaccacccctatcactgaaatgcgcctcagcgggtctcgtgccaccgttgccatctgggctcctttgtctgattatattatcaccggccacgagtctggaaagattgccaagtacgatgttaagactggagaggaggtgcaggccgttgaggatgagcactctgctttgatttccgacatacaactgagcccggacgggacttatttcatcacagccagtaaagacaaaacggcgagattgtgggacattgaaactcttgaggttatgaaggtctacaccacagagactcccgtgaacagtgcggtcatcacccctgatcgaccatacatcattctcggcggcggtcaagatgcgatgaatgtaacaaccacctctcagcgagcgggtaaattcgagtccaggttcttccacaagttgtttgaggaagaggttggccgtgtaaagggtcacttcggtcccatcaacaccctctcggtgcatcctcaaggacgggcctacgcgtcaggtgctgaagacgggtttgtgcgtgtgcactggttcgaggagtcttatttccgtagtcggccttttggggaccttgagcctgagcccgaggtatag

SEQ ID NO: 2155 - DNA, 1263 bp, Cryptococcus neoformans
atggccgagcaagaaccacaggtccagtcccaacaacaaaaacaacaaaaacaaaaacctcaacaacctccttcaggcgaacccaaagccaaatccgccaaagagctcaaaaaggagaaacgcgccgctgctgtcgcttcccgagccatccctaccgaaggaggagttccagagggtccacaaggtggtaaacaatcatccagcactgccacttctgatggccgtcgctctcccgtggttcatctcaacccttcttctcaaaatcccgcttcttcagccggcccttccgcccctcgcagacctcccaaccactctgaaccctcagcgcctaccctctccgttatccagcaaaaccttttcttctcccatctgccacaccaggctcctgccgataccgtctccgccctcgacacgggcaagatccacccgataatcgtccgtgtgggtgtgctgatgaacagtggacagttgaggggtgcgaatgcgagaacgatcgggatgatgtcggcgtttaaagaggtgattagggattatgaatgccctgatcaagcggttttgtggaaggatttgccagtgtatttgagtccgatgattgcttggctggaaacttgcaggcctaaaggtgtgggaggcggtaatgctatccgatggttgaagagtgagatcaataggttgggtgagaagggggataaatccgaggcagagcaaaaatcgtatttggtcgatgcgattggtctctaccttcgcgacagaatagaatttgcggaccaggttattgcagacagcgcaaaggaaaagatcaagcctggagacactgtcgtcactttcgctcgatcatctgttgtcgaaacggtcttactcgaagcctggaccagcatgcgagaacaagaccccgatgcaaccttcaacgtcgtcatcgtcgactctagaccccttctcgaaggtgaaaagcttctcaaagtgctcaccgccgccggccttccttgtacttacattctcctccccctcctctcctctatcctccctcaagccgacctcgttcttctcggcgcctctgccctgcactcggacggtgctctctactcccgcgcgggtactgctgtcgtcgccatgctcgccaaggaacatcgcgtccccgtcgttgcttgtgtagagacatacaagtttggagaacgtgtggtgcttgatggtgtggcgacaaatgagttgggtgatgtggagggtttattggcattgccgacaaagaagccgtgcattaggtaa

SEQ ID NO: 2156 - DNA, 1164 bp, Cryptococcus neoformans
atgacagtcaacccttcttcttcattagctggaaacgaagaccttttgagagacaaagaggtcgctctcatcaagttgggcactctctacagagattcaaggtatttatctatccgtacaatgatctatagaacctttctgacacttgtctgtgacgacaattttggtagcatgctcgacaagttgtctcagttgataacggactctagaactttcatgtcacatatcgcaaaagccaaaacgactaagctagtgcgcacactcctggaccttttccctcaagattcaaaggatatgcagatgaaggtcattcaagagaatatagactgggcccgcacagaaaagagggttttcttgcgccaaagcctggagataaaactcattaacgtcttgttggatgccgagaaataccaagaggccttgactatcacccaaactcttctcaaagaactcaaaaaattcgatgataagattatcctgaccgaggtgtatttattggagtcgcgtgctgcccatcacatgcacaatcacgcgctggcgaagacggcactaacctcagctcgcacaactgccaacagtgtatactgtccgcctacgcttcaggctcaacttgacctgcaatctggagttatcatggcggaggacaaggattacaaaacagcgtactcctacttctttgaagcctttgaaggtttctgtcaatccgccgagagagacaatagagcactgagcgccttgaaatacatgctgttgtgcaagattatgatcggatcccctaacgacgtcttctcgttgttatcattgaaaagcgccgccccctacataggcaaagatgtggacgcgatgaaagcaattgcgacggctcttgaggaacgcagtcttgatcttttcaagacagctctgcaaaattattccgaccaattgcagaaagacgaaatcattcgttcccatctctcttatctttatgacacgctcttagaacagaatcttatcagagtcattgaaccctattctgcagtcgaactgtcatggatagcttcagaagtggggcagagcctgcaagtcattgaagacaagttgagtcaaatgattttggaccaaaagttctgtggtattttgaatgaacgcatgggtactctcgaagttcatgatgatttcaaatga

SEQ ID NO: 2157 - DNA, 1293 bp, Cryptococcus neoformans
atgtcgtacgttaccattttcatatccgttctttacacgtcaggccgtatacacctcttcatcacgccccatttgacgtcctcaacatttcatttcatccccacatcatcgcatcttcctacatctgccgccttgaccccctactacatcttcatttccaccaaacgaggctccatcatccgccattctacttccactttacgtcgagccggtcagaactttggacatgcccagggtggaggaaatggccacaatggagagatcttatgtctggcagcgagtgaagacggaaaatggcttgtcagtggaggaagggataaggtgatgggtgtatgggatgtcagtgaaagagagcccaagtgggttgacccgtcgtatcagtcgatcgccctttcaccacttaacaacccgtcgtaccacatcctctccgcctccctctcccgtcatcttgctcttcattccctttctaccctctctgtcattgacacattctttggccatcaagattctatcccgtctgtctcttctcttaagcccactttggctgtcacggctggctcccgagatcgatcatgtcgatggtggaaagtcgaggaggaagttcagcttgtcttcagagcaggtgggaagactaggaaggatttaaaaggtttaatgcccgcggaaaggaaggaacgtttgggaggaggatggacagagggtgttgagccggaaaaggagaaggacagcaaaggcaagggaaaagaatttatggaaggttcagttgactgtgtttgcatgcttgatgatcagcatttcgtctctggtggtgatagcggatctcttcttctttggcacactggaaagaaaaagcccatcttcactcaggctttcgctcatggattcacaccgatcactgcagaaaaccctatttccgctccccgctggatcacttccattgcagctttaagaggtaccaacctttttgcctctggttcttgggatggccaaatcaaattgtgggctatgaaccaagaattgaaatctttctcttatgtcgatgtcgaaatacccgccaaggggttcgtcaactctcttcaactcagttctcttccttatgagactatttctcatgcttctcttccggagtcaggagaaaaggagagtacaaatgcaaagtcagaaattgtgttggttgctgctgtaggccaagaacccagactgggtcgatggatgagggataagcttgtgaaaaacggagtgttggtcgccagactcgagctggataggaaaggcaaagccatgatgatctag

SEQ ID NO: 2158 - DNA, 1278 bp, Cryptococcus neoformans
atgcgtttatcccgtatcctcactgctatatccctcctgctatcgccattaatatcctctcttccccacgaacagctcgatcctcagctatccaacctttttggaaatgacaccacgacagacgggcataccaataactgggctgtgctagtctgcagctctcggtactggttcaactatcgtcacatggccaacacactcgcaatgtaccgaaccctaaaacgtctcggtcttccagattccaacatcatcctcatgctagccgacgatgtggcctgtaacgcacgcaacgccttccctgcgacagtctacgccaacgccggaaaaatgctggatctgtacggagaagggatagaggttgattacaaagggtatgaggtaacagtggagagctttttaaggttattgacaggccggcatgatgctacggttccgcgctcgaaacggttattgagcgatgcgtcgtcgaatgtgttcatctatatgactggtcatggaggaaatgagtttctcaagtttcaggataatgaagaggtttcggcgtatgacgttgcggacgctatcgagcaaatgtgggagaagagaagatataacaagttgctttatgtgattgatacctgtcaagcaaacacaatgtactccaagttttattctcccgaaatcatcgctacgggatcttcatctttgggcgaaagctcgtactcccatcacaatgacatggatatcggcgtcgcagtcattgacagctttacccacaacgtccttcaatatctcgagacagtgggcaagacttcacgtaacagtcttcaggaattcgcgagtcgttcttttggtacctgtttaggtttcaacacgtatgatcctgccaaaatcttttctcatcctggaatatcaacttccctgagcagtgtccctccggaacaaatccttattacagactttttcggagctgtagctcgagttgaaatatcgccccaaagtgcagagctgcccttggaatctcgactaatagcttccaaagatggttgggagcatacgagcttgagtatcaacgatggtagtcttacggaggagatacccgaagtgttacctaggaagatagaagggaccaagaaaggcaatggggagtggaatcggcctcttgtggataaaacgagtgaatggggattcttgcctccataccttatcggagtcgtttcgttcatttggctttatatctcgttgggggataaggaagacaaggatgacagtgaagaagtaagggaggaggaactttga

SEQ ID NO: 2159 - DNA, 1122 bp, Cryptococcus neoformans
atgcggtcttctcctgtgattgaaatatctccagcgtcatctgggaccgctatattccaacacaatcccaaaggagacgcgacgcttagacgagaatgggaaccagggtgccagccagatgagctatatgacgctttcttacctgcttggagagcaagtttgcgaaggcttctcgtaaggcgcctgagaaacgagagtacgcaaatggcagactggcaaaaacgagtaagaagcgaagctcgcgataaatatttctattggactgcagtattcggaacgcacacgtttttcatgatgtttttaccaattctctttttctttggccatccattggaaggcagaggcctactgcatgtcgtagggttaggtatatacatttcatcgtttgccaaggatttggtgtgcactccacggccgtacagtcctccagtaattcggttaagtatgagcactcatcatcatgaatatggctttccatcatctcactctacaaactccgtcagtattgcgctgtatttgggacaatggatattcaaactccaggatcgcctgggatggccgactgtactacttagctggctgatgctagcagtgtatatgacaagcgtcataggcggcagagtgtacacgggcatgcactccatcggcaagaacgaggcatgggtgaattcgggctcttggacaggtaggacacgtcagttctggagtatgagtaacatgatcgttaataacgtaacagttcctgcgatcattgcacccctagcgtttactttgatccaccgtcatccggaacccttcgaagcttgtccatgctttgaagacgctattgcggtgcttgcagtcatgcttggttccactttaggccaatggttcacagttgcaatctggccgtccattaaggtccaaaatccgactgccttctattcgtataacctggcaacaattattctctctataatgttcagattggtttttgggctcggaacattgtttgcttggaggctccttgcaaaatatacacttcgccaagtgcttcctcctgtgtttcgcagctgttctctcttacttcattcaagtttaccagctcgacgattctacatctctactgcgagtgaagcctaa

SEQ ID NO: 2160 - DNA, 1050 bp, Cryptococcus neoformans
atgcacaagcttgacgctcccaaatccacctcatgcctccctgcgatgtccggtaatggctcctcatcctttgcagccccaccgtcggcacgcattctcgtcatccctcctcaattccattctatgacagccggcgcaggggcaggccttgtatcatccatcgtaacatgtcctctcgatgttgtcaagactcgtttacaggcacaggcagcctcggtacaccacaaggactaccaaacagttgaaatgatcattaaggatatatggacatcaggcggcttcaggggtttttataggggactaggaccgacactggctgggtacttgcctacatggggaatatatttcaccgtgtatgatttggtcaaggacagattgggagcttgggcggcgcatagtgatttacctacaaaaccgtcgatggtgcatattgtagcagcaatgacggctggagccaccggaacgtgtatgactagccctttatgggtaatcaagactcgattaatggttcgtccatccgatcaagcacgatacagaaacactctcgaggcaatagtagacatttacagaaacgaaggatttagagcattttacaaaggactcttaccgtcattgatgggcattagtcatgttgctgttcaatttcctctctatgaaaaagcaaagtcctggtccggtaagtctatctcaaaagcaagggatgcagataacaacacagagggcgaccattcctccttaacaccttcaacgatccttatctgctctgcattctccaaaatggttgcttcaatagcaacctatcctcatgaagtcctccgaacccgtctccaaatccgcaaatcatctcctaaatccaattcttctagctccgttttcagcgggattatcgatacttttttgagtataaagaaccaagatggttggagaggattttatagagggttgtctatcaatttgatcaggactgtgcccagtagcgctgtcaatgcttacgtgagtgcgatttttttttttgaccgaaaaagggcaataaccgtattccatcactga

SEQ ID NO: 2161 - DNA, 1305 bp, Cryptococcus neoformans
atgtctccttccgtgttcaaaatatcaccaggtatcaattcatacgactggggcaagaaaggctcagcgtccctagccgcacagcttgctactacctcaatcccagacttttccatcgatgaggacaaggcctatgctgaattatggatgggtactcaccccaacaatccatccaggttatcggacaacaccttactctctgaacacctgaaatctcatccagagcttatcggctcctccgtgtcttccaagtttgaggactgcaaggacggctctttacccttcctcttcaaggtcctgagtataggtactgctctcagtatacaggctcaccctgataagccgcttgcgaagaagctttttgacgagaaacctgatgtctacaaagaccctaaccacaagcccgagatggccattgcccttactcctttccttgccttccttaatttccttcccctttctgtgctcctcttgcaccttttgaccgtccccgaactgcaagagtttgtcgactcttctcttaccgaatccctagcctcatctctcggcctacctacatctcaaccacccgatacgtcccttttcaagcccacagaatccccagccactgctgagcagaaagacattctcaagcaaatttttgccgctcttatgtcagcagataagaaacttgttgaagaagctatctccaaacttatcaagagatatcaagcgaagcgagatataaaggagaacgagaagagtcttgtggacttagctttgaggcttaatgatcagtacccgggggatgttggtgtcctatgtgtgttcctgttgaacgtcgtggagctcaagagaggcgaagctgctttccttggggccaatgagcctcacgcctacattgagggtgatatcattgaatgtatggccacatcggacaatgtcgttcgcgctggtcttacccccaagctccgagacgttgacacccttgtctccatgctcacatacgaagctgctccaggcaacaagcaactactccaacccaccccatttcaaaaaggtgatgatactaccaaactctacgatccccctatcgctgaattctctgttttgcgtactgagctttctaaaggaatgaagacttctcaccggcctgtggaaggtcctagcttgtgtgttatcactgaaggggaaggtgttgtcagaaatggaaatgatcgatcagagtttgtcaggggtgatgttatctttgtgggagctggcaaagaagtggaatgggaggcgattaagggattagagatgtttagggcctatgttgaggcttaa

SEQ ID NO: 2162 - DNA, 1179 bp, Cryptococcus neoformans
atgaagtcgcccatcttcgccagctggcgcacgctaacaatccgcttcggcaaaagccccgcggcaaggaggtactcctactctggcggcagagctcctgaacctacacccacccccaggacaagtttgccaggcgagaatgatcactcgtatttccctcctcaatgggacgatcgaccgtccatgccgccatccgaggtctcgtacggaggtcccccatccagcacccctggtgcgccgccctcgggctatagccagtacccgcccaactgggaagctcagacaccgggaggtaactggaatggcgagagacccggtcggttagggaaaagaagggcgagagatgaagaggatgatgaatatgagcggaataagagggttgtttcaggtcccgtggcagggcaagcttatagcaaaaaggtgactgtcgttgctgagcactataattctcgaccagaagtaggcgtcgagcgccgtgaattctctcccattatcggcctcaaaaaattcaacaactggatcaaatctgtgctcattgggaaatttgcttataggcctcgaggaaaagttttagatgtagggtgtggaaaaggaggcgatctgaacaagtggaaacaagcaaggatcgcactttatgtcggactcgatgtggcagatcaatctgtacagcaagctgcagacaggtacaggcggatgccgaaacccggattcgacgcattcttctatgcgcatgattgtttctctaatccattgagtgacgttctcagccccgagcttcagatcaaagacctctacgacaatgtcaccatgcagttttgcatgcactatgcgtttgagaatgcagcaaaagcaaggatgatgattgagaatgtgtcgagataccttcgccggggaggtatctttatcggaactatccctaatgctgaattactcttgcaagtgctgccggaccgcgatgaggaacttcgatttggcaactcgtgctactctattcagtttacagagagaagacataaaggcgtgtacggccacgactatcgattctacttgacagatgcggtggaggacgtcccagagtacctcgtggactgggaaaatttcgtctcgttggcttccgagtctggacttcgattggtctacaaaaaggcgttccatgagattctccaagaagaaagatag

SEQ ID NO: 2163 - DNA, 1182 bp, Cryptococcus neoformans
atgggcatggcaaagtgggtgtgtgaaataactttctgctctccatctgtttctctcacacacccgccccactctgcaatggcttcaagacccacaagagcgagaaagcaggcgaagaagggcgtacagctcactctcatggtagtcggtcagtcaccgcctccccttcccacaccgaacaaccctctgacaccacacaggcgcatccggcacaggtcgcaccacctttgtgaacaccctcgtagacaacctatacgcatcaagcctacaaatatcgagctcgaagaagagggtgtcaggatttcactgacagtggtggacacccctggctttggagatggtatcgacaatgagtactgtttccaagagatttcaagctatcttgaacgtcaatatgacgatatcctggcggaggaatcaaggatcaagcgtaaccctcgtttcaaggacaaccgagttcacgctttactctattttatccctcctacgggccatgctctccgagaattggatattgaattgatgcgccgactgtctcctagagttaatgtcattcctgttattggcaaggccgattctcttactccgtcagagcttagggatttcaagaagcgtataatggaagatatcgagtactatggtattcccgtctacaactttccctacgacgccgaagaagatgacgaggagactattgctgacaattctgccctccgtgcccttcttccatttgcgattgtcggttccgaggaggagattttgattgacggcgagcctgtgcgaggaaggagatacccttggggtatcgtcgaagtggacaaccctgaccactctgactttacccgcctgagaagtgctctccttgcctcccacttgacggatctcaaagagattacccacgacttcctttacgaaaactaccgaacagaaaagctttcacgatctgttggcggaaacgaccccgactcttccatccaccccgaggatatggccaaccaatctgtccgactcaaggaagaacagctccgtcgagaagaagaaaagcttcgtgagattgagctcaaggtgcagagggagattcagatgaagaggcaagaattgttggccaaggaagacagtttgaaagtgcttgaagccaggctgggtacgtcttcatcttacatatctcaacggaaatgctaa

SEQ ID NO: 2164 - DNA, 1257 bp, Cryptococcus neoformans
  misc_feature (393)..(394): n=g, a, t or c
  misc_feature (45)..(45): n=g, a, t or c
atgaaagcaaaggccgctagccaagctcaactcgctcccacctcnctaggagctcttagctccaatgatcaagacatctcgaactcctctttcgatcttggaaatgttactttccatgatgtcattgacacttcgctcacgaaggactcctcatcaaaagcctttatgcgagagttgcgcaaagtcatcgaacggagcgatgtgattattcaagttcttgatgcaagggatcctgaaggtacgaggagtcgttgggtggaggatgaagtgcggaaaagggacatgcaggggaagaagctgttgggtgtgttaaacaaaatcgaccttgtaccaagagcgaatttagaggcatggcttaagcaccttaggcattcttttcccacaatgccattnnagtcctctactcaaagccaaaagcagcatttatcccaaaatgcccttcccacgacttcagcatcccttggtgctcctgctttgcttcatctcctcaaacaatatgccctttcaacaccacacagttcgctcacagttggtgttgtgggttaccctaatgttggaaagtcttctctcatcaactccctgaagagaagtcgggcctgtgcagtggctgctatgcctggcaaaacgagagtggttcaggaagttgctctggacaagggtgtgaaaattttagattgtcctggtgtagtattggaggatgtgggtagccatatggaaggggaagaaggcagaagaaggcaagcggaaatcatgctgagaaactgtgtcaaagctgaattggtgcaagatccaatctctccagtggaagtgattttgaacaaagtggaacctgctcaattacagaaactttacaacatccctgcatacgatgacgttcgcgatttcttgatcaaaatggcactcattcgagggcgactcggcaaaggtggtgtccccgaccttgaagcttccgccgttcaagtactccgagattggaatagcggcaaaatctcttattacactaccccgcctaaatttcacccatcatctgcgcctgcacctgcacctgtcgtaactcctgttctggcaccaaatgaggcagcgggagatatggaaatgggtggcgacaaggttggagatgccaagattcttaccactctaagtgaagccttcacaatcgaggggttatttgataatttgggtcgatgctgcctgggaaggagagggtgtggtcaaagaagagggaattgccgaagagtgagttacctatcccaatag

SEQ ID NO: 2165 - DNA, 1359 bp, Cryptococcus neoformans
atgtctgcaccagaagtattccagctctccttcggccctctaaccggcgtagctttcagtccagacaggactcgtatgtttctcttattgataccccttgtgcacagctcacacgcccttataatagacgttgccgtctcacccaacaacaacgaagtccatatttaccagcgacaaggtgcggaatggattcacaaggatacccttgctgaggtatgtttttctatcgtacctcgtaataatcattgtgttgacacgtggacgcgcacacctcagcacgacaagctcatcactgccatctcatgggctcccaactcgaaccgtatcgtcacctgctcccaagaccgtaacgcctacgtctggactcctactgagtctggatggaaacccgcccttgtcttgctgcgaatcaaccgcgcggcgacgtgtgttaagtggagtcccaacgaagacaagtttgctgtcggaagcggtgcgagaacaattgcggtctgttactttgatgaggagaacaattggtgggtatcaaagcatgtcaagaagcctttgaggtcgactgtcttatcgattgattggcatcccaacaatgtcttgttggccgcgggcactgctgaggccaaggcatacgttttttccgcttatatcaagggtgttgactcgaagcccgagcctacagtttggggtgagaggttgccgtttggcaccatctgtggcgagtttatttctcccgatggcggttgggttcacagcgttgcgttttcgccttccggtaatatcctcgcctatgtttcccacgactcttccctctcaatcgtctatccttccggcccaggtgctcctcccgctgctcactttgccctccgtctcccttcacttcctttcgtcgacctgacattcacctctgaatccgccctcattgccgcgggacacgattgccaacctatcgtcttcaccggctccgaatccggctgggttctttcccactctcttgatgatccttcgtccggaggttctcgtccactgaccccgaccgctaccggctctcgttccggcggggtcggtaggctgggcaacaacgaagctttcaacatgtttaaggctgccgactctaggggtcagcgaggcgtccccgctcccggcgcaactccgaccagtgcgggcttgacgcctgtaggcgctgatgggttgttgacgactgtgcaccagaacacgatcacttgggttgagccttatgagtggggacagggcggagaggttaccaaggttggtacggcgggtaaggatgggaggttggtcgtttggcccgttacagctgccaagtctggtttggcgggcaggatggccgggttgtcggtgtag

SEQ ID NO: 2166 - DNA, 1197 bp, Cryptococcus neoformans
atggcggtgtcttgcggggaagcttacgcgtctttggcgagctggcaagatggaagctggcaagagggagcaaggggaggaggacgcgcgacgcgtgggaaatatattatgcaggaggaagcaaacgaggaggaagaagaaatgaacaacgcgactcgcgacgcagctacgcgccccgcgtcgccccaccatgtggcgaatttgatcccgtactcattacgtaacctcaggtcaaaacaaaaatcctcttccccttgtgcggccaaaacatgggacacggatgatatcgaccactgggctatggaggaattcaaggcgcccaatcccgagacccacaaaccgttccttgaagaatcttcgtttgctcttctcttccccaagtaccgtgagccataccttcgatcagtttggtcctccatcacctcggctctcgaagcctacggtcttgcgtgtgagctcgatttggtgcaaggtaaaatgactgtcaagacgacgaggaagacttgggatccgtatatcatcttcaaaggaagggatctcttgaagctattggcgagaggagtgaatgcgccgcaggcaatcaagattttggaggatgggattgcgtgtgatatcatcaagattggaggtatcgtcaggaataaggagagatttgtcaagaggagacaaaggattgttggacccaatggaagcacattgaaggctattgaacttcttaccgaatgttatgttctcgtacagggcaacaccgtctccgtcatgggttcttacaagggtctcaaggaagttcgacgcatcattctcgactgcatgaacaatattcacccgatctatcgtatcaaggaactcatgatcaggcgagagttggcgaaagaccccaagctggcgaatgaaaattgggataggttcttacctagtaagcatatctttgagaagaagaagaagaaggtatatacccccttccctccacctcaacaaccctccaagctcgatcttcagcttgcttctggagagtacttcctcaaacccaaagaaaaagaggcgatcgacaagagaaagaagatggaaaagcaaaaggaagttgcccaggaaaggcgcgcggtaagggaagaagcatttgtggcgcccccagaaaagagagacgagacagtagaggagaggaggaagaagaggagaaaggcggaagagtttatgtaa

SEQ ID NO: 2167 - DNA, 1248 bp, Cryptococcus neoformans
atgcaactaggttgccgattgtattacataatcacccattgctctatatgcatttcaggctcagttcgcggattgttcttcgttcatcggtctcttcgttcgaatcctctattttcgcgttgtttactctcttgtgcgagcccatcttttcatttaccggcatccaacagcccttttccaacgcgctataccatgaacggatactacgacccccaacaacaccaatcgactaatatcgagatcccgcaaggccctacgaatcaaccacgtcttctccttcgtaacctcaatgagacggacgccactttccacctttctggcgtggagctcgcctatgcgaacagtctgagaagagttatgatggccgatgtgcctactatcgccatcgatcaagtcctctttatgcaaaatacaacgcctttagcagacgaaatgattgcccaccgtttaggtctcattccccttatctcccgtaacgtctcgaagggacttcgctacactcgagactgtgactgtgacgaaggatgttattactgtatggtaactttgagattaaaggtgactttcagtgggaatgatggagagcagttcatgagggtgacaaaagaagatcgcatcatcatcaacaatcgtgatcctgaaatgggccagcctattggaaagggaaatcccactgtacctccgatattgatcgcaaagatgggcaaggggcaggagattgatgttttatgcaaggcttataagggtatcgcgaagcaccatgccaaatggtctcccttatcaactgtagcctttgagtatgacccctataacaaacttcgtcatacaacgcattggttcgagactgatgaacgtgcggaatggcctctctcttcaaatgccgcgtttgaaacccctccaaatcccgcagaaccattcgactacaatgcggtcccgtccacattctacttctccgccgaatctgtcggttccatccccgtccgttccgttgtcgaacaaggtctcgaccttctgatagagggcctcgcaaatgtcgtgttgggcgtacagaaagagattggtggcgaagaggaagagggggaagatggagcggccgcagatggagttgttggggatgggatgggcgtgggcatgggagggggtttggtagaaccgaatatacctgcggggataggtcaagatcagatggccatggcaggtggatacggagggtacggatctcagcagggttatggaggttcatggtag

SEQ ID NO: 2168 - DNA, 1230 bp, Cryptococcus neoformans
  misc_feature (1226)..(1227): n=g, a, t or c
atgtccttctccagagcttccagcaacgccctcaagcaggccctcaagtctaccgcctctcgacaggtcgccaggaggtcctactctctcctctccggcgccgcccctagggccgccatggctacccgacttggcgccactcgaggcatcaagactctcgattttgccggtaccaaggaggttgtctacgagcgtgctgactggccccttgacaagctccaagactacttcaagaatgacactcttgccatgatcggctacggctcccagggtcacggtcagtccctcaacgcccgtgacaacggcctcaaggttattgtcggtgtgcgaaagggtggtgagtcttggaagcaggctcaggaggacggttgggttcccggagagactctcttcgacatccctgaggccatcaacaagggtaccatcatcatgaaccttctctccgacgctgctcagtctcagacctggaacgagattgcgcctcttatcaccaagggcaagactctctactttgcccacggtttctctgttgtctacaaggaggacacccacgtcattcctcccaaggatgttgatgtcatcctcgttgctcctaagggttctggccgaactgtccgaactcttttcctcgagggccgtggtatcaactcttccattgccgtttaccaggatgtgaccggtcacgccaaggagaaggctgttgcccttggtatcgccgttggttccggttacctttacgagaccaccttcgagaaggaggtctactctgacctttacggagagcgtggtgttcttatgggcggtatccaaggtatgttcctcgcccaatacgaggttctcaggaagaacggccactctccctctgaggccttcaacgagaccgtcgaggaggccacccagtctcttttccctctcatcggcaagtacggtatggactacatgtacaacgcctgctccaccaccgcccgacgtggtgctcttgactgggcccccaagttcaaggaggctaaccttcccgtcttcgaggctctttacaactccgttagggacggttctgagacccgacgatctctcgagttcaactccagaaagacctaccgagaggacctccagaaggagcttgacgagattgacaaccaggaaatctggagggctggtaagaccgtccgtggtctcaggaagtgctgcgagttacaatggatgttttgttttcccgctaatgcttnntag

SEQ ID NO: 2169 - DNA, 1335 bp, Cryptococcus neoformans
atggttctctcatatagcgccatcgcaaaacccacagcggacactcccaaggtaatctcaatgactgcctccaaacaagtcttccccgaagcttttgaggcattaccggctcctgccgctgaagagtctcaagagctagaatctcaacccgaagctcttgcacaggcgtccagttctaccatcgaggcccctatttcgagcgaagaccgaaaagtcattcagcatttgatccttgatgctggacctctgttgtctttgacgccgcttcgccatctcgctacgagcttccatacgaccccgatggttcttgcggaactgagagatcctaaagctagggagcattgggagaggcttgcgttgactggggtcaatgtcaaggtcgagtcacctactgctgaagccatggcccaggtcactgcttttgcgaagaagactggtgactttgcggtactttcacaaactgatttgtccgttgccgctttgacttatcagtatgaagtgatggtgaacggtgtcaagaggattaggactgagccccctcaagcgaagaagcctagtgccaaggggaaggagaaggagaaggacaccaagcaggcggaaaagaaagatgaggaggtccaagagaacaaaaacgaaaaggaaggaaagcccgaggaggaggatgttgaagtggaagaggcgattcagtctttgagccaaattattattgaaccttcaacgaaaagcgagctttcagtaaatgatgtttccaccaccaaccggtcccatacccagacctcagtcccagcttctgcccatgcagaggatcctgaatccgagggcgaatggatcaaccccacaaatctcagcacccatcggtctcgagatctgggtcttatcactccttctggatcaacagccaagcctccggccgttgcatgtatgaccggtgattatgctgtgcagaatatattgttgggaatgcgattgggattggttggcgaaggcggtaaaaagattggaaaggtgaagagttgggtattaagatgccatgcctgttttaaagtttgcaaggatcctagcaaacgattctgtccatcatgcggcaatgctacgcttcttcgtacttccgtttcaacatccgctaaaactggtgaacaaagagtgcatctcaagcagaacttccaataccgcactagaggtaccatctattccatcccggaccctaagatgggcagagccaagggtcagcaaaaggggggaagcggcttaattttgagagaagatcagagggaatggcaggatgcaatgaggggagatagaattaaaaaggagaaagaagaaaggggcggctaa

SEQ ID NO: 2170 - DNA, 1161 bp, Cryptococcus neoformans
atggccgtcgactccgccccgtcttcggagacggtgagtcatgagtccgtacgtaccttttatatgctcacgtctcgtattttaaggcaaattgttggatccttgaacgtcgctctcgcaacggctgctctcatccagaacatcgtcagaagcgctagatataacaccatcgacgaattactggccttaatcaaagctgttgggcggaaactcactgaggccaaccctaaggaacttgccgccgccaatatcattcgtcgaatcctccgtctcattcgggaagaataccgcgccgctgcagccgcccatgtctcatccgcccctaactccatcccttctacccctcttatgggttcttctggaatggcaacgccaagggcgagtgtggatagcgatgagtttatgaagcatagtgctaagctcaagccgttattgattcaggccattgaggaggttgttggtgagctggagaccacgcatgaggatgttgccaagggcgcaagagagcacattcactcttccgaaatcatcttgaccatgggccactcgagaacagtcgaagctttcctcaagcaagcctacaaagaccgtaaatttaccgtcgtcgtcgccgaatctgctccgtcctacctcggtcactccctcgcctcttccctttccgcctccggcatccccacccttctcatccctgattcctccatccacgcccttcttccacgtgttacaaaagtcatccttggcgctcactctgtccttgccaatggcggtttgttcgcgctgtccggatctcttgcttgtgctctcgcggcaaagacacattccaagcctgtcgtcgtgactaccggtcaatttaaattcgcgcccgcgtggaatttgtaccatgaatacggagcggtggatttccagggacctggagctgtgattggggagcaggggaagggtggaggagggggtatggaaggggttgaggttgtggatccatattacgactatattaggcccgagttggtaaatctgtttgtgacaaatgaaggcgaccacccaccatcttacatctaccgcttgatcaaagaggcgtacgatgatgaggatagagatctagtcacagtgacatctgtatatgcatttcttcgaataaggtattttctatgcttggtataa

SEQ ID NO: 2171 - DNA, 1329 bp, Cryptococcus neoformans
atgcccagcccgtctccggaggcatcctcctcaatgtctcaacctggacctccatcccgctccccttctcccgcgtcctccaaccccgacgctcctgaagcatcgcacaacaagacgttcgcagacctcggtatcagtccggagctatgccgagcatgtgcttcgatgggctttaagaaaccttcagatattcaggctgaagcaattcctcatgctttagaaggcaaggatatcattggtcttgctcagaccggttccggtaaaacggcagcatttagtttgccgattctgcagacattatgggagaatcctcaaccatttttcgctcttgtgttggcgcccactcgtgaactggcgtatcaaatctctcaacaagtaacctctcttggatctggcatcggcgttcgcacggctgtcttagtcggcggtatggatatgatgtctcaatctatcgccctctctaagcgacctcacattattgtggccacccctggtcgattaatggaccatttggaaaacaccaagggcttctctcttaaatccttaaaatatctggtaatggacgaagccgatcgtcttctcgatctcgatttcggacctatcatcgacaaaatccttaaagttatcccaaaggagcgtaacacataccttttctctgctactatgacgaccaaagttgccaagcttcaacgtgcttctttgaataagcctgtccgcgtcgaagtctcttctaagtactcgactgtctctaccctcctacaacactatctcctccttcctcttaagaacaaggacgcttatcttctttaccttgccaacgagctttcttcatcttccatgatgatttttacccgtaccgtcgccgactctcagcgattatccattatccttcgtcgtctcggtttcccagccatcccattgcatggccaaatgacccaaagcctccgactggcaagtttgaacaagtttaaatccggtggaagaagcattttggtggccaccgacgttgcttctcgtggtcttgacattcctctcgtcgatctcgtcatcaactacgacatgcctacaaattctaaagactacgtccaccgtgtcggtcgtactgcccgtgcaggtcgttccggtaaatccatcactctcgtcacgcaatacgacgttgagattcttcaacgtatcgaatcccatattggcaagaaaatgacttcttttgatgtcgacaaggaggcagttgcactcctgaccgacactgttgcgaaagcaaacagggaagcggcgttggagatgagggagagtggtactggttggaggtggcaagcgaggaagggataa

SEQ ID NO: 2172 - DNA, 1305 bp, Cryptococcus neoformans
  misc_feature (772)..(774): n=g, a, t or c
atgcacccggaaacgccaggtggaggtcggactcgtagcgcgcagtgtggaaggaagggattccgactggtggcgacagctcgtggcgggcgttgtaaggatgaacaggaaggatatgacggcagcgcgtggattgaaagcatgatggaaaaagggcgtgacgatggcgacgggatattcgagatgcgagcaatgtgtgattgcatgctaacgcttgctgacgagtggggtagcttcgacgacatgaagttgaagggcgagctcctccgtggtatctacgcttacggttttgagcgaccttctgctatccagcagcgtgctatcatgcccatcgttactggccgtgactgcattgcccaggctcagtccggtaccggtaagaccgctaccttctccgtttctatcctccagaggatcgacaccactgttaagaagacccaggctcttgtccttgctcccacccgagagctcgctcaacagattcaaaaggtcgttatcgctctcggtgactaccttaacgtcgactgccacgcctgtgtcggtggtaccgccgtccgagaggacattgccaggcttaacgagggtccccacatcgttgtcggtacccccggtcgtgtctttgacatgatcaaccgaggtgctcttaagaccgaggccgttatgatgttctgccttgacgaggccgatgagatgctttccaccggtttcaaggagtccatctacgagatcttccagcttctccccggagagacccaggtcgtcctcctttccgccaccatggcccctgaggtcctcgacgtcactaagaagttcatgagggaccccatcaggattctcgttaagaaggacgagcttacccttgaaggtatccgacagttctacattaacgtcgagaaggaggagtggaagctcgagaccctttgcgacttgtacgagaccgtcaccatcacccaggccgtcatcttctgctctacccgacgaaaggtcgactggctcactcagcagctccacgaccgtcagttcaccgtctctgccatgcacggtgacatgaagcaggaggagcgagaggtcatcatgaaggagttccgatccggttcttcccgagttcttatcaccaccgaccttttggcccgtggtatcgatgtccagcaggtttctttggtcatcaactacgacctcccctcttctaaggagaactacatccaccgaattggtcgaggtggtcgattcggccgaaagggtgttgctattaacttcgtttccaacgaggacaagaacatgcttgaggagattgagacttactag

SEQ ID NO: 2173 - DNA, 1296 bp, Cryptococcus neoformans
atgtgcgggagggcggggagcgttgtgctgtggacattgtcgacgagtatacgtacattacgtagtgtttatatttggagacgcatccggtccaccgtgggaatcgccgcttctgtatcttttctccagccgcttctccactcacttcttcgtcactttatccaaatatgtcacatcagcgcacagcccatttccaggtgccacctctccagatatcgtgggtccatacaagccccatgccagcgcaagctcacattccagccgtacagctccgtcctccacggcggtatccatcatcctactctcagaacatggcaggccaacgggcggaacctcacaaagtctatgcttatctaccccatcttcatctccgacgaccctgacgctgaacaagaagttgcaactttaccagggcagaagcgatggggtatcaacaagctcgaagcgttcttgaagcccttggtggaaaaaggcttgaagagtgtgattcttttcggtgtgcctgttactatggaaaaggcaagttgcattttggatttcggtgtgacggatcctcgtggcagcgctgccgatgacgaatcgacccctgtcattcaagcgctgaaactccttaccaacgtcttcccccaactcatgctttgtgtcgatgtttgcctttgtgaatatacgtctcacggtcactgtggcattctctcgtctctccccaatccagcccactccaacgcccccactcttgacgcggaggcttcagctcagcgtatcgctgaagttgctgtcgcctatgccaaagctggtgcgcactgtgtggcaccaagtgacatgatggatgggagaatacgagcaatcaaatatggactgatgcaagtcggattggccaacaggtgcgctttgatgagctattcggccaagtttgccagcgggttatacggacctttccgagatgccgccggaagcgccccttcgtttggcaacagaaaatgctatcaactccctccgaatgctcgtagcctcgctagaagagctatccaacgagatgctagcgagggcgctgatatcctcatggtcaagcctgctctcccttacctcgacatcatatcagactgtgcacaatatgcccctgatcatcccactgcctgctatcaagtctcgggtgaatatgccatggtcgtcgctggtgcagagaagggcatctatgatttgagggaaatggcgttcgaaactaccgaaagcatggttcgcgcaggagccagcataatcctgacatacttcactcctcagttccttgactggctttga

SEQ ID NO: 2174 - DNA, 1086 bp, Cryptococcus neoformans
  misc_feature (772)..(774): n=g, a, t or c
atggaccgcttgatggtatcacaaacaaccggccgatatcctcgccctgattcaacgcacgaccagaaaaccatgtctcttgacaactatcaaaagattgaaaaggtcggagaagggacctatggtgtagtgtacaaggccaaagacatcaacaccggccacattgtcgccctcaagaagattcgccttgaagcggaagatgaaggtgtgccaagcacatctatcagagaaatcagtttgttgaaagagttgagcaaggacgacaacattgtaaagctgttggatattgtgcattccgaagcaaagctttacctcgtattcgagttccttgatatggatttgaaaaagtatatggataccattggtgaaaaggacggtctcggtcccgacatggtcaagaaattctcttaccaactcgtcaaaggtctctactactgccacggccaccgtatcctccatcgagacctcaaacctcaaaatctgttgatcaacaagtcgggtgatctcaagattggtgatttcggtttggcgagggcgtttggtatccctctgcgtacttatactcacgaggcaagtttttctccccactcttcaagctttttgatggttgtcacactgtggtaccgagcccccgaagttcttcttggctcaaggcattactcgactgctattgatatgtggtccgttggatgtatcgtcgccgaaatggccactcgtcaacctctcttcccgggcgactctgagattgatgaaatctttcgaattttccggnnnctcggtacacctgacgaagacgtatggcccggagtcaggggcttgcccgattacaagcctacctttcctcaatggcaccccgtcgaactggcagatgtcgtcaagggatttgaggccgatgggcttgacttgattgcccagactttggtctatgatcctgctcaccgaatttcagccaaacgcgcacttcaacacccttactttgacggtcaatctctccgccgcataaatcctagaacaatttacccccttttttctaaaagtctctccggaatactcttccttgcactttttatcacacacgtcgactag

SEQ ID NO: 2175 - DNA, 1248 bp, Cryptococcus neoformans
atgccgtggaaaaggagacttcctcaaaacctcttttggctcatccttcaagttttttattcatcaaaaaactcttcgccaaacatgtctcacaggaagtacgaagagcctcgacacggttcccttgccttccttcccaagaagcgtgccgcccgacacaggggtcgatgcaaggcgttccccaaggacgaccccaagaagcccgtccacctcaccgccgtcatgggttacaaggccggtatgactcacattgtccgtgacctcgaccgacccggatccaagatgcacaagagggaggttgttgaggccgttaccgtcattgagaccccccctatggtcgttgtcggtgctgtcggttacgtcgagactcctcgaggcttgagatctttgaccactgtttgggctgagcacctcagtgacgaggttaagaggcgattctacaagaactggtaccgatcgaagaagaaggccttcaccaggtacgccaagaagcactctgagaactccggcgcttccgttgcccgagagcttgagcgaatcaagaagtactgcactgttgtccgagtcctcgcccacacccagatctccaagactggtctccaacagaagaaggcccaccttatggaaatccaggtcaacggtggttccgtcgccgacaaggttgacttcgccaggtctcacttcgaaaagaccgtcgacgtcggctctgtcttcgagcaggacgagtgcattgacatcattggtgttaccaagggtcacggttacgagggtgttaccgctcgatggggtactacccgtctccccaggaagactcaccgaggtctccgaaaagttgcctgtatcggtgcttggcatccttccaacgtcatgttctccgtggctcgtgccggtcagcgaggttaccactctcgtacttcgatgaaccacaagatctaccgtatcgccaacggtgcttctggttcttcaggctctactgagtttgacctcaccaagaaggacatcacccccatgggtggtttcgttcgatacggtgttgtcaagaacgacttcgtcatgatcaagggcacttgtgttggtcccgtcaagcgaatcgtcaccctccgaaaggctctccgaactcacacttctcgtgcccacaccgagaaggtcaccctcaagttcattgacacctcctccaacttcggccacggtcgattccaggatgccgctgagaagaacgccttcctcggtcagctcaagcaagtctga

SEQ ID NO: 2176 - DNA, 1260 bp, Cryptococcus neoformans
atggcagtggcgactcagaagatgcccaaagctccaacatctgcccctggaggtagcatcaagaacaagatcgaagctgccgagcttgacatcacccgtaaaacacaaaatcttcgccgtttggaagctcagcgtaatgcccttaacgctcgagtgagactacttcgagaagaattgcaggttttgcaagagcccggaagttatgtcggtgaggtcatcaaggtgatgggtaagaagaaggttttggtcaaggtgcagcctgagggcaagtacgtggttgatttctcccccgatatccctatctctgcccttacccccaacatccgagtttcccttcgagccgattcttacctcctccattccatccttcccaacaagatcgaccccctcgtctctctcatgatggtcgaaaaggttcctgacagtacatatgagatggttggtggtttggacaagcaaatcaaggagattaaggaagttatcgagttgcctgttaagcaccccgaactatttgagagtttaggtatcgctcagcccaaaggtgtcttgctctacggtccaccgggaacgggtaagacccttctcgctcgagcggtcgctcatcacaccgactgccgattcatccgagtatctggttcggaacttgtacaaaagtacatcggtgaaggttcccgaatggtgcgagagctgttcgtgatggctcgagaacatgcgccgagtatcattttcatggatgaaatcgactctattggaggttcgcgaggagaaggagctggtaagagtggagactcggaagtgcagaggacaatgatggaattgttgaaccagttggatggatttgaggccacgaagaacatcaaggttatcatggccactaaccgtatagacattctcgattccgctctcctgcgtccgggacgtatcgatcgtaaaatcgagttccctcctcccaaccccgaggctcgaatcaccattctcaagattcactctagaaagatgtctctccagcgtggtatcaacttcaggtcattggcagaaaagatgggcaactgttcaggtgctgaagttaggggtatctgtaccgaagcgggaatgtacgcactgcgagagagaagacaatatgtcggtcaggaagactttgagatggcgatagcaaaggttttgaagaagaatgccgacaacaacatgagcgtgaacaagctcttcttagaagtttttttgatagtcagctatgaaacgttttgcatttgtgtattttga

SEQ ID NO: 2177 - DNA, 1305 bp, Cryptococcus neoformans
atgggcggtggttttggtggtttccatatacttatacgtctacaaggggagaagctgacgaaatgcagagcatacgatgattatttcaaagcttattcaacagccgtgatgggcggaagagaacgtccagaggtgatgtatggcggcaagatcattatgcctccgtcagcgttagccagactttccgcgctggacattccaagtccctggacgttccaactccgcaaccctcgctcacccacccaacatatcacccatgccggtgtgctggagtttattgctgaagaagggattgtacatcttcccgcctggatgatgaagcgacttaatctcgaagaaggcgaccccatacggctaacgggcgccaagttaccaaaaggaaagatggttaaaattcaagcccagaatacagatttcctccaagtatccgatcccaaatctgtcctcgaatccgcccttcgtttctactctactctttcccctgacgacatcattgaaatcacgtacaactcactcacatttgaattcctcatcatgtccgtcgtcccagaaggtcctggtatctctgttatcgacaccgatcttgaggtcgactttgccacgccaaaggggtacgtcgagcctccccgaccggaaccgaagccgatccccaccatggcggataaactcaacattgacttgtcttcgaatgagcccactggctcgggggcaggtagtgtatcgggcggcagtcggcccgggacgagtatgggtacccagactccggtggaaagttttactggtgtaggtcagagtttgagtgggaaaaaggttaagggtaaagggttggcgaagaagattgaagaggtcgatccgatcccctcagcactcatccttcctgaaggaaagttcttcttcggtttcaaatacatcccttacgatccctccaaagcgcctaaaccctctctcgccgatcaacagaaagtggagctacagcctttcggaggggaagggaataccttgaagggtggaaaaagaattggaggggaagaaggaaagggaaaagagaaggctgctgaagacgagaaagaagacccatgggcaaagctgggtagcgggaatactttaaaacggacgaccaccacagccgcctcttcgtcttcaacccctgcacctgtatctgcgcctctggaggagtttaaggcccgtaaggcgacggagcaggagatcattgatgccaccatgttggatgaggatgatttcatgtttgaggacgaagaggatgacgaggatgatgtgatagagattgattccgattatgattag

SEQ ID NO: 2178 - DNA, 1230 bp, Cryptococcus neoformans
atggtcatagacgaatcggaggagagcagcgacgaagatgaagagtcattcaacaactttggctcccaatttggagatgaccgtcccttatccaccatccgtttttcaccatcctcccaatatgtcctcacgacctcttggaccggcgacacgaagctttgggatctaccgaacctcaatcccatctctacaaaaaggggacacacggaaaaggtcggaggagccgcttggcatccgtttgcgacagtaggagccagtgaagaagctgtcaactttgcgactggaggaggcgaaggcgatgtaaagctttggtctttgtccgggtacgtattttctttttcctcaatccatcccgtcttgtctttttttctaaccctgccgtgtagtgaaaaacctctatcgaccctttcaggtcacacatcgcgagttggtcgactcgcttttcatccttctggagcctacctcgcttccgcaggttttgacggtacatggcgtctctgggacgtcgagtcgagtaaagagttgatgatacaagagggtcatagtaaagaggtctacgctttgggttgtcaggatgatggggcattgattgcttctggaggattcgatgccattggtagggtatgggacttgagaactggacgaactgctatggtcttggatggccatgtcaaagaaatacttgctatggactttgctcccaatgggtaccaaatagcaacaggatcaggtgacgataccgtccgtatctgggatctgcgtgcactcaagacccaatacatcatccccgcgcacaagtctagtgtggccgacgtcaaattctttagatcttccggtgaaatgccaccggtcggcattcagggattgccgctctcgtcccgctcggcaaacgttgatggtatggacgtggataagagcaacgatacagaagacaatgaaaaggaagaaaagctgagtcgttccggcatgttcctcgtcacagccggatttgactgcaatgtccgtatctggtctgcagacgaatggaatatggtgcgcaacttgtcgacggatgcgggtaaggtgatgagtgtggatgtctcgggagatgggaaatttgtggcgagtgcaagctatagtcgatcgttccatctgtttgggagagaactctttgtaggcatgtacacttgctggaaagggagcagaccacagatggaaacagaagagacgaaaaaaacatatgcattttga

SEQ ID NO: 2179 - DNA, 1356 bp, Cryptococcus neoformans
atgcactcccgaccagtcttccttcgtgctcttcgactccgacaacagccactccccgcccgccgattcctccctccccagtcgctccgtcccctctcatctacagcccgtctcttggacgagtcgaaaaagtctgaacaacaatcacaaaagaaaaagtcaaccaacgatgagcctatcacccctcgatctccgtgggccgttttcacccaggtcttaaaggaggagattgagaagaacaaggggtggcaggacaatgtcaagcagttgcaaggtgatgttgacaagttcgccgatagtgctgctatgaagagggccaaggatgtgtatgagaagactaggctcaccaacttgatcaaaaacaatcctcgaatccaatctgcagtcggtgatcttcaaaaggctggtatctccgtgcacgacgctgtccagcacgctctcgccgattccgaagttctcaaggccatctctgccgctaccaaccgtttcgtttctgccgcctctagcgctactgcgcccattagagacacaaaggcgtacaagttgatggctgagagtctcgaagaggcctttgaagatgagagtggtgttgggagtagatatggtggttacgaggagaaggaggctaggagaaagaagagggagatgagggctaagaaagctggaagagctgccatcaaaagggtcgaggaaaatcctgaagctggtgaggctcttgttctctccgacaagcccgagtccgtctctcgtcttgcgtttatcaaggaatcccccacctatcaacgtatgatggagaattactatgagtctgactctcccttcgtttctgccatccgaaccatcggtaccaaggtcggctctttgttcgaagagaacgagaccgctcaagtcatccgtgccatgaaggctttagaccccaattttaggatggacaggtggactggggagttgagagagtacattgtacctgaagttgtcgatgcctatctgagtgcagacagggaaagcttgaaggcttggtgtggtgaagctacctttaacgtcctttgggcgaccatgggccaattcattaaacaaggccttgtttccgactcgaagatcctcgacatcaagcatgttgacattgctcacggcaaaatgcttgagaacaacatcccagtgttcgtcattacctttgccacccaagaacaactcctcttccgatcagccaagaccggaaaggttgttgttggatcagaggatgatgttgagcagtgcaggtacgcgatggtgattacgaggttggagtcagagttggagaatgagttgactggcggctggaaggttgttgaggagttctctttctctctcttctga

SEQ ID NO: 2180 - DNA, 1239 bp, Cryptococcus neoformans
atgagtgagttccttgatcagtacaaaacgctcgttatgcagctcttctacaggcggctgttcccttaccgcccgctctatctttggttgaatcaagaacagatacccagcaagttattcacccatcgtgaattcgctttcacattggcaggagacgtctaccttcgataccaatctttcaacaatgtcgatgaatttaaagcttctattgccaggcatattccatcacgttttgagattggccctcaatatagcgcaagaccgaaggacaggaagacgcttgcctctggcgctcttcaaccacagaggcgagagctggtttttgatattgatatgaccgattatgatgagatccgaacgtgttgcacggacaagactatttgtaagcgatgctggggctttattgccgccgccgtaaaagtgctggatcattctctccgagaaacattcggcttcaagcatctcttatgggtgtactctggtcgacgaggtatccattgctggatctctgatcagtcggctttggatctcaccgatgatcagcgacgagcgttggttacttttttggaagttataaagggtggcaaagaacaaagcaagaaggtcaatgtgagaggaccaactggtgatgctgccctccatcctttcttgtctgaagcactcgataccctcaaaccattattctctagtctctgtatctacgaccaggattgtttcaagggagaaaagggatgggaagcattgcttgccattttgccaactgatagagctgtcattggaccactaagggccaaatgggaaaagaactcggatagctcaagcgaagaaaaatggcgggaacttatgagcgagattgcaaaacataagaaagaggaggcaatcatgaccaaattcacaaaagcagtagaagacgtcgttttacaatacacctatccgcgtatcgatgctgaagtttccaagcatcgtaaccatttgctcaagtctccgttttgtgttcatcccggtaccggtcgagtttgtgtccctataaatccgtctctgatcgacgaatttgatcccgatacagtgcccactgtcggtcaattgctaaatgagctcgacaatgtcaaggctgaggaccctgaagctgctggccggcgtatggaagactacgagcacacttcactgggaccttacgtggagatgtttgaaaagcatgttgctgcagtcctgaaggattcggaatgcgaaaagaggtaa

SEQ ID NO: 2181 - DNA, 1164 bp, Cryptococcus neoformans
atgctcaaatcgctgtgcttcgtgatccgccccgcaattgttacggagatccttggggcctgccttcctaccacaaaaagcgaggatattccttcttcattcacaacaacaggtcatataggtcatatgaatttgcgtgaggagtggttgcctttccgatacctcatcggtcaagtagttctcgataaaaatccgggtttgagaaccattgttaacaagcttgatacaattcatgcccaattccgatattttgacatggaagtgatcgcgggcgacaatgactatattgcgaccgtcaatgagtctggatgttcttttaccttcaatttttccaatgtatactggaactctcgtcttcatcacgagcacgaacgtcttattagcctatttcctcctggctgtgtcattgcagatgtcatggctggagttggacctttcgctatccccgctgccaagaagggatgctacgtgctcggaaatgacctcaatcctgagagtgtcaagtggatgagggaaaataggcttagaaataaggcaggtcaccacctcgaatattctgagattatcactgacattctgcttcaggttgaaccgacattgcgagtatcagaaatagatggatttgagttcattcgcatcgcgccacttgaagtttggacccgtccatttgaccctgcccctccccccaaggtgtctaaccgtcaacgagatcgtgaagcgaaagaagcacgacgcaaaagggaacaggcaaaagctgctggccaaccacctcccaaactaatttcccacttcattatgaatctccctgattctgcgatcaccttccttccctcatacgtaagctgctacactcctcttctcgctgagagatcattcatcgatgaatatggtggtgaagaagaagcaaagcggaaggtcgagatgcccatggtgcactgttattgtttcactaaggaaattgaaactggcaaggcagagatagacattttgcaggtgaggccatacttcagaagcggaaactcatccacaaacttatcttttaacctcacaccgcaagtcgaaaattacaaccttcatcacgtccgctccgttgcccccaacaaagacatgtactgtctgtcatttagattaccccgggaagtggctttcaggcataacggatag

SEQ ID NO: 2182 - DNA, 1356 bp, Cryptococcus neoformans
atgtccattgcaaggatttttggtatggggctccgtaacaagcgagtatcaacgactgcttttcgctacaacgcaaatcggaattccaaagtgcagttgcgctcaatagtgcgatacagacattcatctccaagtcaagaatttgagacaaactccgcagaaattcgcgtcaacagtaccaccataactatcaaacaacccgacgaggatgatcttcagtagctgactgttagcgaccatttctatcttttcgatcactgccgctgtccgcaatgtttccaccctcgcaccaagcagagactgaagactttatcccagataccttctgatatacaccctacagccgttgcgctgagtagatcaggtttgcatatcacgtggtcgacgccgtctgcccatacgtctttttttcccgctggcttcctcaggcgagcggcatatgagactcaactttctgagcatgtagactgtcgtgacgaccgcacactatggaactctgagatatcaaaatcacctccttatgttgcgtatgatgacattatgtcacaacaggtacatcagcatgaacaagctgtactgcaggtcttgaataaagtgcatcaatttggcttctgcttcgttactggagttccaatagatgcaaaggaaactgagacacttattaaatctataggtcctatcagacagacccattacggcggcttttggtcatttaccgcagacttaagccatggtgatctggcatacagtgctcaatcattaccggctcacacggacaccacatattttacggatcctgccggccttcagatctttcatcttctatcacatccttcacctgggcaaggcggtaaaactctgctggcagacggctttcatgcagcttcgcaactttcagccgtcgatcctgcctcttattctgttctttcgcggctccctattccagctcacgcatcagggaccaaggggactctattgagaccactgattagttttccggttctgcgacatgatgaatgtggacgcctggctcaagtaagatggaacaacgaagatcgcggaattattgggcatggctggtctgctacagaagtccgccaatggtaccaggcggcgcaacgattcgaatcattggtaaaaagtgagcaaaacgagtattgggtacagcttaatcctggaacaatgttgataattgataactggagagtcatgcatggacggtcagagtttacgggatctcgcacaatgtgtggtgcttacattggcgcggatgactggcattctcggcgggcagttctgacggaacggcatggagatgtagggggaatggacgacgtatggcgcttcggttggtaa

SEQ ID NO: 2183 - DNA, 1473 bp, Cryptococcus neoformans
  misc_feature (181)..(183): n=g, a, t or c
atgtcgatcgacccagctggatcacaggcatctcgccaactccccatcaacctcttcaccaggtctccaacagatgccatcccccagtctacctattttattccctccgcctggcgtcgattccaactctcagaactcataaaccaggttctcggtaacaccgctgaaaatggaagtaaannncctgtgccatttgacttccttgtaaacggtgaagttcttaggggcagcctagaagcgtgggtgaaaaagaacaggggaggagatgaagaaagtcagattgatgttgagtatgtgaggagtgtgatgccgccagaggaggctgcgagggtcgaggtcgaggattgggtgtctggcttgagcttaagcaggaaaggatacgtgcttctttcatcctacctatctcacctgcaagtcctccctctttcagctgctgctcaatcatcctctgctctttacactcttcccctccctacttcccttggtgctacatcctgtacctgggtttctcctcaaactcaagaaaccgacattctcgtcgctgccggcggtgttgaccgtcaaacccacgtttactctattccctccctctcacccgacactgctgatgctcctcgcgaactctacacccttcacggccacaccggtcctatctcttctgttatcgctagctcctccggtaaagaaattgtaacaggttcatgggacggtaacatcaatctctacgtccttcccgacgcggagccaacagaacaccaagttcctgccgaccccgtgtcttatctccctggccaaggtaccaagaagcgtcggaagctcgagaaagaccaagaaaaggctcctatagaaggtctcactgacggtgatgctaccggcgaaggtggatggaggcgggcgcctgatgctgtcatgcgtggccataccggcagggtcggcggcctcgtttgggacaagcttgacagtggtaagatctggagtgctggctgggacggaagcgtgcgtggatgggaggtggagactggtgctgccggagcgttgaggcagggaccgtttgataagtctgcgctgtgtgtggatcagtggaagatgaatggaactttggcgaccggtaatatggacaggacgatttctacacatctaactcattttttttccttagctacctccctgatttcccttacgcttcccaccacgtcccccgtcccctctgttacatgccaccctacatccccattcaccctcgcctctgccacttactctggcgtcgtccaaatctgggatatccgatcacccaagactgcccttttcaccgtttcaaaggcgcagagcaagttggccgatcctaatagaaaggttacgaagaatggcaaggttttgggtgagaggctgttggcggttgactggaatggagaagttttggttgcgggtggtgaagacggcgaggttgggatctggcgagcgagaggagagtaa

SEQ ID NO: 2184 - DNA, 1371 bp, Cryptococcus neoformans
atggctactgaaaaggcacccatagttggatcttctgcatcgacgtctttacccaccctatccgtgcaagatggcactcttccattgactccaggtgctcaggggatgcagacaggcacaattgacgggcatcggcaacttcagagtcctgtgtctcgtagtagtagtgcaggcgaggataagatgagagaaaaggcgagggatgcccaggagcaggttggtacacatgacaatgtgccgcaagcccaggccaacctccatcacgcaacgcaacaagcgcgcgttgccgccatcaatgccgccgctactcaagctgcccttgaaacagccgcccagctgcccgcaactgctagggtcccagtttccggtgggggagttgagcagggtcaagcaagacgcaaaacagctggccgatatgctctatctgatttccttattgaaagaactttgggcaccgggtccttcggacgtgtgcatttagtgcggtcacgccacaacggtcgcttctatgccgttaaggttctgaacaaggagaaggttatcaagatgaagcaagttgaacacaccaattctgaacgagagatgttggtgcgggttcgacacccatttctcgtcaacctctggggaacctttcaggatgtgaataacctgtatatggtcatggactttgtggcaggaggtgaactctttagccttcttcgtaaaagtcaacgattcccgaattctgtcgcgaaattctacgcggccgaagttgctttagcgctcgactatcttcattcactcgatattatctaccgagatcttaagccagaaaatctacttttgggtgcagatggccatgtcaaggttaccgactttggttttgccaagtatgtacctgatatcacctggactctttgcgggacaccggattaccttgctccggaggttgttcagtccaagggttataacaaaagcgtcgattggtacgctttaggggtattaatatttgaaatgctggcgggttatcctcccttcttcaccgaagacggcaatccaatgaaattgtatgagaagatcattgctggcaaagtccgctatccgacatactttgacgcacttgcgaaagaactcttaaaaaatctactgatcggggacctcactaagcgatacggtaatttgagagcgggctcttctgatatatttgcccatgggtggttcgcagaagtcgactgggacaagctgtacaggcgcgaaatcccggctccatatgtgcccaagattgacggcgaaggagacgctagccagttcgatcgctaccaagaggcggatgttagtgcttatgggaaggttggcaacggtccatatgatcatttcttcacggagttttag

SEQ ID NO: 2185 - DNA, 1317 bp, Cryptococcus neoformans
atggaagagatcggcattgacctcaaaatggaggtgaggaagaatcctcaaatctcggagaagcaaaatctcctcaactctctgcctagtggcagtgaagaactctacagtacttggaagaggcttgaagcccatcgagagtttttacagctccaagaggagtacattcgtgacgagacccagaacctgagaagagaacttttgagggcacaggaagaagtcaagcgaattcaatctgttccattggtcattggccaattcctcgagcccgttgatgaacgacgagccattgttggaagtacaactggctccaattatgttgtccgaatcctttccactctggatcgtgaacttctcaaaccatcttcttctgtggctcttcaccgccactcaaatgctctggtagatattctcccaccagaagcagattcatctattgcgatgttgggagcggatgaaaagccggacgtgaagtactcggacattggtggcctggattcacaaaagcaggaaatcagggaggcggtcgagttgccacttgtacaacaagacctgtacaggaagatcggaatagatccacctagaggcgtgctgctctatggtcctccaggtactggtaagactatgcttgttaaggctgttgccaacgcaaccaaggccgcattcatccgtgtagttggctccgaatttgtgcagaagtatctgggtgaaggtcctcgtatggtccgagacgtttttcgattggcccgagaaaactccccatgcatcatctttatcgatgaagttgacgccattgccacaaagcgtttcgatgctcaaaccggttcggatcgtgaagtgcagcgtatcttgatcgagctacttacccaaatggacgggttcgatcaacaaaccaacgtcaaggtcattatggccaccaaccgagcggatactcttgaccctgcgttgcttcgtcctggtcgtttggacaggaagattgagatgcccaatccctctagacgtgagaggcgcttgattttccagaccgtcacttctaaaatgaatctgggtcccgacgtcgaccttgaggattacgtgtcccgaccggacctgctcagttctgctcaaattgcctccatctgtcaagccgccggtctccaagctgtgcgaaagaaccgatatgtcattttgcccattgattttgaggaagcctggggtgagtgcagagtgccacactcgcgactccgcgtcggcgctttgaaaaacgccgcgttcttgccttcatttgtcgtctttcgaaattcaaagctaactcttttgtttctcttttcatcttag

SEQ ID NO: 2186 - DNA, 1371 bp, Cryptococcus neoformans
atgtgggagccccctgtgcctactcgtatcggtaagaagaagagacgcggacccgatgcgtcgtcccgacttccagctgtatatcccaccactcgatgcaaactcaagttattgaagatggagaggatacaagactaccttctcatggaagaggaatttgtgtctaatcaggcatcgcagtctggtgaagataggacggcggcagatcgaactcgggtggacgagcttcgtggctcgcctatgggagtcggcactttggaagagatcattgatgacgatcacgccattgtgtcttccggaggtggatctgaatactatgttgggatcatgtccttcgttgataaggacctgcttgaacccggttgctcagttctccttcaccacaagacgcacgctgttgtgggagtgcttgccgatgacaccgatcccatggtctctgtcatgaaacttgataaagcccccactgaaagctatgctgatattggaggcctggaaagtcaaattcaagaaatcaaagagtcagttgaacttccacttacacaccccgaactttatgaagagatgggcatcagaccgcccaaaggtgttatcttgtatggagtacctggtactggaaagactcttcttgcaaaagccgtcgccaatcagacatctgcaacatttcttcgtatagtcggctccgaactcattcaaaagtatcttggcgatggtccaaagcttgttcgggaactattcagggtggctgaggaaaacgccccaagcatcgtcttcatcgatgagattgatgccatcgggacaaaaagatatgactcgacatccagtggcgaacgggagatacagcgtacaatgttggagctgttaaatcagctggacggttttgatacgcggggtgatgttaaagtcataatggcaaccaacaagattgaaaatctcgaccctgcgctgattcgtccaggtcgaatagacaggaaaattggcaaattctcatcagaattccctcttcctgatacaaagactaagagacacatctttaaattacacacatcgcgaatgtctttggcagatgatgtagacatcgaggaattagtcatgaccaaggatgaactatctggggcagacattaaagccgtttgcaccgaggccggtttgctggcattgagggaaaggcgaatgagggttactcgtaccgatttcaccacagcacgagaaaaagtcctgtatggaaaagacgagaatactgtaagtctatctgcctttaacaccgctgacgctgtagcccgcaggcctgtatctctaagcgtacggagactggagattttggtttatgtagtagactgcatgcacttcaatcaagccgtcaattcttggtga

SEQ ID NO: 2187 - DNA, 1371 bp, Cryptococcus neoformans
atgatcgacctcattcatctccaagccgacaaaggcggtaaccctgacatcgttcgggagtctcagaagaagcgaggcgccagcgtcgagctcgttgatgaggttatcgcaatttttgccgagcacaagaatgccaactatgaaatggagaatgccaagcgagaactcaacctcctccaaaaagaaatcggtcaaataaaaaaagcaaagggtgatgctaccgagttgcttgccaagaaagcagacatggacaagaagattgcggagatgaccactcgagtagccgatcttatcaagaagagagaccaaaaggctggacagattgggaacattgttgaccctcagaaccacgacgacaaccctgtccttcgtttatggcaccctgagcctaaccacaagggcaattctcaacttctcgaccaatctgacaagcccgagggtattatttcccaccatgaagtcctcgctcgtcttgaggcctacgacactgatcgcggtgtcaaggtcttcggccaccgtggtttctatctcaccaacgacggcgtcgaccttaaccaggctttgatcaactacggtctcgatttcttaaggaagaagggattcaaaaaggttcagcccccgttcatgatcaagaaggagattatgggtgcgactgcgcaacttgaagactttgatgaggctctttacaaggtttctggaggtgctgaggacatgtacttgattgccaccagtgagcagcctatctctgcctaccacatggacgaaaacctcgatcccaagaacttgcccctccactatgccggttactctacatgtttccgaaaggaggccggttctcacggtagggacacttggggtatcttccgagttcaccaattcgagaaggttgagcaatttgtcgtctgcgagcccgaggcttccccagccgagcttgacgccatggtcgccaactctcgcgagttctacgagtctctcggtatcccgtatcgtctggtcaacatcgtctctggtggtctcaacaatgccgccgctatcaaatatgacttggaggcttggttcccttatcagggagagtacaaggagttggtctcttgctctaactgtaccgactaccagtcaaggtctttgaacgtccgactgggtttcaaggaaaaggacaagaagaccggttttgtgcacatgcttaacggtacactttgcgccactgaacgagccctctgttgtctcgttgaaaactaccaaacccccgagggtctccgtatacccaaggttcttcaaccttacatgcaggggcgggacttcttgccctataccgccgagttgccaaagacttctaccagcaagggccccagcaccaagagtaaaaagtaa

SEQ ID NO: 2188 - DNA, 1437 bp, Cryptococcus neoformans
atgccccgcccgctgcccctccccgccctcagggccgcgctcccccgcccacaccccctccccctccgccgtctcgcctccaccgcgccgcccccgcgccgccactacctctccaccgccctcctcctcggcggcagcgtcctcctcgtcgcgtactactatgactccaggtctctcctgcacgagcacgtcgccatgccgcttatgcgcctcgtcgcagaccccgaacagggccacaagctcgccgtcagggtcctcgcatgggacaaaggtaagatttctgtaaaccgtatgcgcagcgctcaaacggacactgtgcagcttttcggcatgcatctgaaaaatcctgtcggcatcgcggccggctttgacaaggacgccgaggccatcgatggtctctttgacctcggtttcggttatgttgaagtcggaagtgtcactcccgaaccccagcccggtaaccccaaacctcggtttttccgtctcgaagaggacgatgcctgcatcaaccgatatggattcaactctcttggacacggccacgccctcgcccgacttcgtctccgtctcgccaagtttgctcaggatcatccttccctcttcccgtcccctctgcctgcaaacctcgtcccacccgcgggtttgccgaggtcattgagagccggacagctgcttgcagtcaacttgggcaagaacaaggccagtgaccctgattcaaacgacgactacattcgaggcgtcaggacgctgggaccttttgcggacgtggtcgtgatcaacgtgtcaagcccgaataccccaggcttgcgcgctctccagggcaagcagcagctcgagcgattgttgaacgatgtcgtcgaagaaaggaacaagatcgcccagggaaccggactgcccaagattgcagtcaaagtcgcgtcagacttgagcgaggacgagctggcagatgtggcgagtgcggtgagaagtagtggtgtcgaaggcgtcattgttagcaacactaccatccgaagaaaagagctcaatcttctgacggataccacaggcaaccaagaccagatcggcggtctctccggcaagcccctcttcccttacgctctcaatgctctcaagactctgcgcccgcttctccctccgtctgtccccatcatcggctgtggcggtatctcctccggctccgacgccctcaccatggccaacgccggtgcttccatcgtccaagtctacacctctttcggcttccgcggtgtaggtaccccccgtttgatcaaggatgagattacagagcacctcaagggtgaatcatggaagactcacgtaggccgcgacggcgtcttcaggtcaaccgatgggatgggacgagaaccgtctcaagcaagaaagccaagcgcttgtcgacgaggccaacgggctggcagagctcttgcgacagtctaa

SEQ ID NO: 2189 - DNA, 1467 bp, Cryptococcus neoformans
atgagccgccccctccgaatagggtttatacacccagaccttggaataggcggggcagagcgtctcgtagtggacgcggctctatctctcaaaaacaaaggccaccatgtcacgatattcacttcgaggcatgatccttctcggtgctttccagagactatagatggcactcttccagtccatgtcctcggatcgtcccttcctcgatcattccaccccaaattcccattcaccatcctcttctccatcctccgatcccttcttcttgctgtccttctcctcacgtctcttcttttacccgggttcgatatcttctttgtcgatcagcaaagtgttgctgtgccgcttctgaggtttgttagcgggacaaggatcgtattttactgtcatttccccgacaaactgcttagcggaggatgggagatcgatgtgggcaaagataaggccgtggtggagagaaaaggtgttggcatactgaagcgcatgtaccggtggcctatcgacaagctcgaggagtatacgactggtcaatcggacatcatcatctccaactctgaattctcttctcgcgtttttgccctcgctttcccttctctcgcccagaaacctcgccgagtggtctacccttgtatcgacctatcttcttacacatcaacttcttctgatgtcaaggatggaagcgtcaaccttattcaatccgatcgacctacaatcatttcttttaacaggtttgaggcgaagaagaatgtggacctagccataaggacttttgcaaaacttcgtgacgatgatctcatctcaaaggaagagtttggaaatcttcgatttgtcgttggcggggggtacgaccctgatcaacgggacaatgtccaaactcttctccacctccaaaacctctgtactaacctctccttatcacatcataccattccctcttcctctccaatctctcccaacacgcaaatcattttcctcctcaacttttcctctgcccagcgcgcccatctccttacttctccttctaccttagcgctcttgtacacacccaccaacgaacatttcggtatcgtccccatcgaagccggggcctgcggattacccgtattggcatgcgataccggcggtccggtagagaccgtcgttgatttttccatcccttccaatgctgagaacggcacgggtctcctacgaccaccccgagctgaagaatgggcaccagcgttgaccactctcctccatctctcttcttcccaacgctccattatctctcagagtgctcaaacccgtatcgccgaaaacttttccttggctacgatggggacgcagcttgagaaggcttgtcgggatgcgctagcgatgggtgatttgcatgttcaagttggggataagctgatttggggtggactgggattaatgggttttgcagcgggtgggttgggcgttatttggatggtatggggggtttga

SEQ ID NO: 2190 - DNA, 1206 bp, Cryptococcus neoformans
atggcacgtactgtactgtaccagtacaattgttctctcttaatcaccatgcctaaagacaagaaaattcagaacgctttcaaacgttcagaagtccatcggaaaacaaaacgtgaaaaagaacaagccaagctccaacgccgtcttgaggctgaaaaagacaaagtaactggggctgctctccgcgccgagcgtttgtcaaagaatatccctgtaaccctcgataatactcgtgtttacgattccagttctgaaatgtctgataaggaaatcgaagaaaagctggatggagaagatcaagaagcctccgcaatgcgagacataactactcaatcaccaccccgtatcttgatcaccacatcaccgtctccttgcaaacaaacttatcagttttgcgatgacttgaaaaatgtttttccgggtggagaattcttcaaaaggccaaagggtagaggatttgaaattggcagggtgtccagatgggccagtaaaagaggttatcgagctttgattgttgtaaatgaggatcataaaatacccaatgctatcaccttaataaacctgccttccggacccaccgcatacttcaagctttccagtataacactttcgtccaacatatacgtaacggagctcatactgaacaatttcactacccttcttggaaatagtgttgggcgactgtttgggtcccttttcccaccccagccgcaatttcgagggcgtcaagttgtcactttgcataatcaacgagatttcctctttttccgtcgccacaggtatatgttctcttctgccacttcggccaaactccaagagattggtccgcgctttaccctaaaacttcgatggcttcgaaaaggccttccatctgtcacggctcccgacggtcacgcctctattggcggggatcctgcggacgaaatatacggaactgaagttgggcccagtaaggaggaaattgcacaagatgagttggatgaagaagatgaggcactgaaagagattgggcaaccaacccagaaaaagaatgtttatgaagggaccgaagtgcctccgctcgatgaggagcaggagtatgagtggaagtggaaggttagttgctcatcgttcaacaaggcttgttacatgtcaatgcttatggtacgctttatagccgaagatggaagtatcgaggagaaccttctttttatgatgcaaaattga

SEQ ID NO: 2191 - DNA, 1395 bp, Cryptococcus neoformans
atgcctctcgatctcaactatgcaccagggtctgaagatgaagaggaggacaacatcgatgacgaggacttcccaggcccatcttcacggaggcaagctagaggagctgctggaaagggcaagggcaagaacaaggacctatccgatcagaccggaaggcaggcttgggaaggggagtaccagaagtcatgggatatcgttcaagaggatgagagcggctccctagagtctgccgtagagactctgcttgcacgaggcagacggaaaagagcgttgatgtcagatactcccgtgagacggtctattatccggcacgtgttcattatcatcgacttgtcagaatccatgttagataaggactaccggccgacaagattcgaggtcatcctaggatacctccgaacatatgtcgtcgagtggtttgatcagaatcctctaggccagatcggtgtcattgccatgcgtgatcgattatcagaagtcttgatacccatgggaggcaatcccgaagagattgttcgcgccctttcggacaagcgtaaactcgaaccgtcaggcgaaccgtccctccaaaacggtcttgtcatggccaagggcggtatggcccatttaccctctacctcttcccttgaaatcctcgtcatcttctccgctatatccaccgccgaccccgacggaccgatcactattcacaatgtgctcgatactctggcaacagggcatatacgtacatccatcctctctctctcgggagaaatcaagatttgtaaacaaattgccgagcggacgggaggtaaattcggtgtagctctggatcaagaacatttaaaagatttgttatgggaaactatccctccgcccgcgacgaccatcgcacccgtcacagccaatgtccgttcagcactcgccgctggtggccgtggtccgaaccaaacaggggagcgagcgcctgcaggcgatctcatggtgatggggttccctattcgcttaccccttggcggagaaacaatgtgtgcctgtcatgggttgttgagaaagggaggatatctctgtccgagatgtgggagtaagctttgtgatgtaccgacggattgtgaggtatgtgggttgatggtggttagcagtccccatctcgctcgaagcttctggttcttattccctgtggccaattatggtccattatctatcgaggatgtggtggaatcgagcgagacatgctttgggtgtgatagcgagttttccgatgctaccgcgatcaatgctggcgtagcccaagttgaagatggtgtgagccccacgggacggtatagatgcgccaagtgcaagcatgatttctgtgccgactgtgatctctacatccacgacacactacacacctgccctgggtgttcgtaa

SEQ ID NO: 2192 - DNA, 1245 bp, Cryptococcus neoformans
atgcgtctcaccgcgaaactggcagtattcagtttggtcgctgcagtatcagcacaactagacggtttagggagcagcagcaaagctgcttttgctctcaaacaaaagcctgatagtagagtggctctagagtcccttaaccagcaattgttcccagttttacatgagcttgtggaaacacctttcttcaaacattacaaagttgacctatataaagaatgtccgttttggtacgaaaatgggttttgtatgaacagaaactgtggagttgaagagatggatgaggtgcgtctttccagtgacggtgtgtccagctgctactttaaagaacaagatttctgttatgtcgaggacgatgcggatgccagtacgtttttgatcgattattatgagagtcgtgcatcacatctaatatccattgtagatggccagtatgtagacttaactctgaatcctgagagatttaccggttatgctggtgactctgctcacaatgtttggagagcaatctacgaagagaactgcttcggtctttcggaggcatccctttccgaaatgtctaaagcttccgcaccacttaacggggaggagatgtgtgaggaaaagaagatctactatcgagtcatctctggtcttcatgcttctatttctattcatatttgcgccgactatcttgatcaaaccaccggcaaatgggcgcctaaccttgaatgtttcatctctcgtcttgctacccatcccgaacgcctgtccaacgtatatttcaacgctgttctgctccttcgagctgtcgcgagagctgctccgtatttggaagcctacgacatcagtacatcgccagccggtctgctgaaagagggtgataagaaggcaaaggctcgtttaggagaagtcctttctttggctggtggacagagtatggagaagggctttgatgaggctgatttctttgctggtgaagactccggggagcaattcaaatctcatttccgtaatgtttcacgcattatggattgcgtaggatgcgacaaatgtcgcttatggggtaaacttcaagtctctggtatcggaacagctttgaagatcctttttgagcttgacgacagggctctcgaccctaaagttaaccctgatcttctccaacgctccgaagtcgttgctcttttcaacacccttcatcgtatcagtgaaagcttggcgtctgtggagcagttcagacaaatctattgccacccaaaaggctga

SEQ ID NO: 2193 - DNA, 1284 bp, Cryptococcus neoformans
atggtgcctttgtgtgcgatccctgagcgatccatcgcgcttcaaagtcttgatccttgttcggggctagcctctctttttcttccttccatcctccttccttcctcacagccttgccccactcgcccatacaatgaagataagtgcgcccccactgcccgctccagaaggctaacccgctccgccccacacgctctgatcctcgtcggtggtttcggtacccggcttaggcccttgaccctctcgtggcccaagcctctcgtcgagttctgcaacaagtcttcccacagcttgcaccaaatcgaggctcttgtcaaggcgggtgtcaaggacatcgtcctcgctgtcaactaccgaccagaggtcatggtctctgtactcaaaaagactgaggaggagtttggcatcaacatccacttcagcgtcgaaaccgaacctctcggcactgcgggtccccttgctcttgctcgcgaaatcttgggcaaggacgactctccgttctttgttttgaactctgatgtcacctgtgtctatccctttgaggctttccgagacttccacattgcccacaagtgcgaaggttccatcatggtcaccaaggtcgccgagccttctgcctacggtgtcgtggtcacgaagcccaactccactgtgattgatcgattcgtcgagaagcccgttgaattcgttggtaacaggatcaacgctggtatctacatattcaaccccagcgttttggacaggattgagctccgtcccacttctatcgaaaaagaaatcttccccgccatcgccgccgaccaacaactgcactcctttgatcttcaagggttctggatggatgtcggtcaaccaaaagacttccttgccggtacctgcctttacctttcccacctcacttctcaacattctcccttgttgactgatccctctcaaaacaagtgggtgtatggtggtaatgtgatggttgacccttctgcggaaatcgaccccacagccgtcatcggccccaatgtcgttattggtcccgacgcgaagattgggcctggtgtccgtctccagcgatgtgtgatcatgtccaacgctaccgtgcgagaccactcctggattgccaactccattgtcgggtggaacagcacggtggggcgatggacaagagtggagaacattacagtgttgggtgacgatgtgacgataaaggacgagctctatgtcaatggtgcatcagtgttgccccacaagagtgtaagtgaaagctcgtccaagctgctgtgttggtactaa

SEQ ID NO: 2194 - DNA, 1503 bp, Cryptococcus neoformans
  misc_feature (444)..(444): n=g, a, t or c
  misc_feature (598)..(598): n=g, a, t or c
  misc_feature (624)..(624): n=g, a, t or c
  misc_feature (629)..(629): n=g, a, t or c
  misc_feature (683)..(683): n=g, a, t or c
atgcacagctccaacccatttataaccaaaccaaattctcccaagaaatccagaggaaatagttccacctctgactctaccctagcgtcccttcgccagggtatgggccggatggacatctcttccaagggttcctcaatcccttacaccattgacgtccgagagcggaaagactccaaagatactcgccgagaacttgaccgtttcgtgcctgcccgtcctgcgtccctctcgcacaattctcattccagctctactttaccgacattagctatcgatagtgctgggcatacccctgatacctctgtcgatcattccttatcccaggaccaatcgacactctcacttcaagcatctctcggtctcaactctaaccgccgaatcctgtccttccaatccgccccaccactcgcgtcccacgctacttcccatctcgatgcccancgaaactaccttcttcaatcatccgcctcggccaaccggggcactggatcccactcgggtaaagataccaagaagcgagcaccgccgtacatgccggagagagtgcttgatgcgccaggatttgaggatgattattacttggatttgattgatnggagctgcgccaatagggtggcgatngggtngggggatatgggctatgtgtgggatgcggagacggggagtgtgagtgctttggnaagtggtgccgaagaggatacgaataaagttacatccgtatcatggtccaacgacggtgcatacctcgccattggtcttgatactggtgatatagaggtttgggatgtggaagagaataagaagatgcggacgatgaagggccatttagcaagagtaccggtcatgagttggcacgggcatgttcttacttccggttgtagggacggaagtatctaccatcacgatgtgagggtcgcgaaacacaaggttatggagttggtggggcataacgcggaagtgtgtggtcttgcgtggcgaagcgatgggcagtttttggctagtgggggtaatgacaatgtcgtcaattgaacaccccgcggtgtcgcgaaatggacaaaacgaaaccatactgcagccgtcaaagccatcgcttggtcgccctggcaatcatctctccttgctactggtggcggaactgccgacaaacacattcacttctggtccacttccaccggcgcccgaactgcttctctgcctacttccactcaagtcacatccctcattttttccccacattcgaaagaaattctcgggacacacgggtatccggataatacccttacgctgtggacttatccgacgttggagaaaatctgggaggtgccagcgcatgattcgaggattatcagttcggcattgagtccggatgggacgacggtgtgtacaggcgcgggagatgagaacctcaagttctggaaagtatgggaagtgaggcaggcaaagaaggagagggaagagggcgagagtgggagaggcaagacagccgtcaggattaggtaa

SEQ ID NO: 2195 - DNA, 1326 bp, Cryptococcus neoformans
  misc_feature (256)..(258): n=g, a, t or c
atgtccagcgcagaagaggtatgtgctatatggaggtaccgcaagcttctgaatatgcttgccaactcccgaggtgccggcacctcttgtatcaccctcatccttcctcctcgatctcaaatttctcaggcgtctaatatgttgactaccgaatacggtaccgcttccaacatcaagtctcgtgtcaatcgactttccgtcctttccgccattacttccacccaacaaaaactcaagctctacaaccgagtccccnnnaacggtctttgtgtctttgtcggtacggttttgaacgatgaaggcaaagagaagaagatttcctttgcacttgaacctttcaagcctatcaacacttctttgtacatgtgtgatagcagattccacgttgaggcgcttgaggagcttttagaaaatgactccaaatggggtttcattatcattgacggtaacggatccctcttcggtactctctccggtaacacccgtgaagtcatccacaaattcactgtcgaccttcccaagaaacacggccgaggtggtcaatccgctcttcgtttctcacgtctccgagaagaagctcgtcgaaactacgtccgaaaagttgcggaacttgctgttcagcactttatcaccgccgacaaggtcaacgttgccggtctcgtccttgctggtagcgccgagctcaagactgatttgagtggaagtgatctctttgacccccgattgctggccaaggttgtcaaggttgtcgatgtgtcttatggtggtgaaaacggtttcaaccaggctattgagcttgccgccgactcccttgccaatgtcaagtttgtacaggagaagaagcttatccaaaagtacttcgatgagattgccctggacactggcaagtactgctttggtatcaacgatacactcaaggcgcttgagatgggtgctgtggagactttgatcgtctgggaaaacttggatatgacccgaaacactttgcgtaatgccgccggtgaggaaatcatcgtcttctctacccccgccgacaaggatcgagagaagttcatggacaagtctaccggtctcgagatggaacaagccgccgaaccccaacccttgctcgaatggtttgccgaaaagtatcgcgaattcggtgctaccctcgaattcgtcaccaacaagtcgcaggaaggctcacagtttgtgaaaggatttggtggtatcggcgggttgttgagatacaaggttgatttcaatgatttgggtgatttggaagatgacgatgatgagttttacgggtctgacgaagacagtggtgcgttaattttgcctttttaa

SEQ ID NO: 2196 - DNA, 1278 bp, Cryptococcus neoformans
atgaactctgctagccctagcaagattgctgtcaagtttgaggatggtcttgctcccggcgagggcaaggaaggcgagaaaaccattgctcccaagaaaaatcgcaacatgattgagaggacgatctggacctttatcatgatcggcggcttcatcgttcttctctgtatgggtcacccctacatgatccttctcgtcatgttgtgtcaaacgcttgtctacaatgaggtcactgctcttttcgaccttcgtgaccagcaaggcgacagctggaacaagactatcaactggtatttcttcgtcgtggccaactacttcctctacggcgaatctattatctattacttcaagcacattgtctttgtggacgcttatttcatcccctttgctcgcaaccaccgatttattagcttcatgctttatgttgttggctttgttgggttcgtcgcaaatctccagaggcagtaccttcgtcagcaatttgctctcttctgttgggtccatatttcactcttgctcattgtggtgtctagccatttcatcgtgaacaacattctcgaaggtttggtgtggttcttcgttcctgcatccttggtcatctgtaacgatgttatggcatacgtttgcggtgcgtgcaagcttttcggtaagactcctctgatcaagttgagtcctaaaaagactgtcgaaggcttcgtgggcgctttcatctgcactcttttgttcggcattgcttggggtacattctggatgcgatatccttacatgatctgccccgcccgtgatcttggtaccaatgtcttctctcaggtgacttgccgacccaaccctgtctttatgtggcacagtttcgagtttaccggtgtcgccaggcaagctcttcagactatcctcggccaccccccaccttccatcccctacgctcccttccaaatccactgtctcgttatggccaccttcgcctctttggtggctccctttggcggcttttttgcttccggctttaagcgagctttcaacatcaaggactttggtcactctatccctggacatggtggtatgactgaccgaatggactgccagttcatgatgggtcttttctcttacgtttattacagctcactcatccgaatccaaaacgtgactgtcggtggaatcatgcaggctgtagtcacttccttgacccagcctgagcaaattgagcttttgtatgatttgaagaggttcttgtgggcaaggagtcaaggtctaaatacctttcttgttgagaggtggtga

SEQ ID NO: 2197 - DNA, 1431 bp, Cryptococcus neoformans
  misc_feature (820)..(822): n=g, a, t or c
atgtccttaccgaaagaatatcggtctacatcgaacttagtattcagcccaccaccccaaatttcttcgttaccgccacgctcaccgccaggtcacgcccgtccatccataggagacttcctaccctctccgggtccgggcgctttcgctcaagcaggaccgagccgcggacgtacaatgcacggtatagaaatcgaggaggaagagaatgttattgaggaggacgagtttcagttggctaggggatattttgatctgaaggaatacgaccgggtagcatgggttctgagggacgcccagggaagtcgtgcgaaattcttgagatattactcaatgtatctctctgcggatagaaaagcacaagaatcactgccacatttcctcgataccaaagaagaacgtcttgctttctaccctgccctctctgctcttttatcagagctcaaaaaagagagcgacccttacctgatctatcttcgtggactatgttatatgcgtctggatagacgccctacagcgattaaatgttttatggacagtgtaaggctcaaaccctataactggagtgcatggagccagatggcgcaactggtatcctcagcggacatggtaggttggctacggaagtttatttcgctaaaagaggagctaccctcgacaccaatgcttacctttttcgctattaattgcatgctggaccttcacactgctacggacctcgtcatgaacatgattaaggagctactggaaattttcccttccagcgtacaccttaaagctcaacgcgcactggtgtattaccatatgcgaggcgaatttnnnaccgccgaagaagaattcgatgctgttcaacatttggatccattcagaatggaagaagttgacatttactccaatatgctgtatgtgatgaacaagcaggccaagcttggaaagctggcgcatgagtacgcagagatagataggaatagagctgaagtgtgctgcttaattggtaactactattcatcaagatctgatcataccaaggcaatcacctattttaaacgctctctcatgctcaaccgagaatatctccccgcttggactctgatggggcatgaatttgttgaactcaaaaactcacacgccgctatcgaagcttaccggaaagctattgatgtcaacgcaaaagactatcgagcatggtatggtcttggccaagcatacgaattacttgatatgcctatgtacgccattgagtactataatcaagcaacatccctccgtccgtatgactgtcgaatgtggaccgctctcgcgactgtatacgaaaatctccaccgccttcctgacgccatccttgcgcacacccgcgctctcgggagccgatcgggtccaaacaatgaccatcctcctcaaattggcttctttgcacacaacgttggatga

SEQ ID NO: 2198 - DNA, 1329 bp, Cryptococcus neoformans
atgtcccgacaaccccctctcgttatcgacaatggtactggttacacgaagatgggcttcgccggtaattcggaaccctcttttgtgtttcccaccgtcatagcaacccatcaatctggcggttctggtgcgtcgtcctcgtctactggtggcgctgggcgcgccccaccacctatcgccggcaagccttcacatctcgccagtaaaagaggaatcgaggatttggatttcttcattggtgacgaagctgtcgccaactccaagacttattcactccattatcccatccggcatggaatgattgagaactgggatcacatggagcgtttatgggagcaatccatcttcaagtacctccgtgcagagcctgaagaccactatgtgctcttgactgaaccgcctcttaatccgcctgagaaccgagagaacaccgccgagatcatgttcgagtctttcaatgtgcaaggattgtacattgctgtccaggctgtccttgctctcgcagcctcttggacgtcgtccaaggtgactgagcggacactcaccggtgttgtcattgactctggagacggtgttacccacaccatcccccttgctgagggctatgttattggctcttcgataaagcacatccccattgctggccgagacatcacctactttgtgcagcaactcttgcgagaccggggtgaaagtgcacacatcccccctgaggaccagcttagagtagctgaaaagatcaaagaggactacacctatgtttgtcaagatatcgtcaaggagttcaagaagtatgattccgatccatacaagtacttcgctcgatttgctggcgagcacagcgtgactgggaggaaatacgatatcgatattggctatgagcgattcttggcgcccgagatctttttcaatcccgagatttattcctccgacttcctgactcctcttcccgaagtggtcgacacagtaatccaaacttctcccattgatgtccgacgaggtttatacaagaacatcgtcctttcaggtggatccactatgtttaaggactttggtaagaggttgcagagggatgtcaaaggcatcgtggacggcaggattgcgggcagtgaagagaagtcaggcaaaaagtcgagcggcgttgaagtcaatgtcatctcccacaagaggcagaggtatgcggtatggtacggcggcagtttgatggcgtccactcctgaattcttcaacgtcagtcacagccgcgaagactatcaggaatacggtccttcccttgtccgcaggttctcggtgtttaagtgcaacttgagtgtaggttgtcatcaatag

SEQ ID NO: 2199 - DNA, 1434 bp, Cryptococcus neoformans
atgctcgctacaatgaaccccatcagacccctttttcgctctactcccctccgcctctgccacaactccctctcttctagaatacctcgccgcacgcttgtcacccccacaaacctcgtccacgccaccgtctccaacgttaccctcaatcccgtagctaccaagactgggggcagtgccaagtctggaggccgacctatctacctcgacatgcaggccactactcctatggaccctcgtgtgctcgacaagatgcttcccctcttcaccgagcaatatggcaacccccattcacgaactcatgcatacggatgggaagcggagaaggccgtcgatgaggctcggcagcaagtcgctcaactcgtcggtgcccaaccgaaagatatcgtgtttactagtggtgcgacagaaagcaacaacatgttgatcaaggggattgcaaaattccaccaatcaaagaagaagcacatcatcactacccagactgaacacaagtgcgtgctcgactcttgccgatggctctccacccagggcttcgaagtcacttatcttcccgtcctcccgaacggtctggtctccatcaacgaacttaaggctgcccttcggcctgacacttcgctcgtgtctattatggctgtcaacaacgaaatcggcgttattcaaccccttgccgagatttctcaagccatcaagtcatgggccaaggaaaatggtgtcaccaaacccttattccataccgacgccgctcaggctgtcggcaaaatccccatagatgttgaagcgttgggtattgacgccatgtctatttctggtcacaagctctacggtccgaagggtgtcggcgccgcttatgtccgacgacgaccccgagtccgacttgagccacttatccacggtggtggtcaagagcgtggtcttcgatcagggaccgtcgctgcacctcttgtcgtcggtcttggtgaggcttgccgcattgcggagaatgaaatggctgccgaccatgcaaggatcaaggctttgagcgataggttgattgagggaatcacgtcaaaggtagagcacatcgtgaggaatggtgatgtcaatgggtatcccggttgcgtcaacttgtcattctcatatgtggaaggcgaatcgcttctcatggccctcaaggacatcgcactctcatcaggatcagcatgtacttcagcttcccttgaaccatcctatgttcttcgtgctctcggtgccgctgaagacatggcgcattcgtcccttcgattcggtattggccgattcaccaccgaggaagaaatcgaccttgtggtgcagaggattgtcagcgtggtcaacaagttgagggatatgagcccactttgggagatggtgcaggaagggattgatatcagcaaaattgagtggaacgtgagtctagtctctgtcagctattga

SEQ ID NO: 2200 - DNA, 1416 bp, Cryptococcus neoformans
atggaggaagtccatcttttacttttattatacaggggagaaacggccaacgaaggaaacgaacggcgcaccttcatgattcatgatcggacgcgcctacaacgccgcccaacgcgttcgtcgttctttctgtcagtcgtcaatttctccgtcaccattttgttgttgctcacatcacatatctctcacctttacatctcctgcttccatccgacctttcgcctctgctttcggtgcgccgctaacattatggcatccggatcgtcatcgaataataaacttatctcggccactgccaaacataccgatgctgagggttacgaaatgccctgggtcgagaaatatcgtccggtccttttggacgatatcgttggcaactcagataccgttgatcggttgaaggtcattgcagaggatggtaacgtgccgcatatcatcatctctggtatgccaggtatcggaaaaaccacttctatacattgcttggcgcatgcgcttctaggagaagcgtacaaggagggagtattggaactgaatgcgtccgatgagcgcggtatcgacgtagtcagaaacaagataaagtcgttcgctcaaagaaaagttaccctcccacctggaagacacaaaatcatcattcttgatgaagccgattcaatgacagccggtgctcaacaagcacttcgtcgaactatggaaatttactccaataccactcgattcgccctcgcctgtaacatgtccaacaagatcattgaacctatccaaagtcgatgtgcaattttaagatatagcaagctcaatgacgccgaagtattaaagcggcttaaggaaatttgcgatatggagagcatcaagcacaatgatgaaggcctcgcagcactcattttcactgctgagggcgacatgcgtcaagcaattaataatctccaatctacgtggtcaggttttggttttgtcaaccaagataacgtattcaaaatctgcgatcaaccccatcctattgtcattcgccaaatgatcaaagactgccagcatggcaaaatcgatgaggcccttgcaagagtgaacgcactctgggatcaaggatactcggcggtggatattgttgtaaccgtattcagagttgtcaagggcatggaggagttgccggagtacttgaagttggagttcatccgggagattggctggactcatatgcgtgtccttgaaggcgttggaacgctcgtccagctgggcgccatgattgctcgtctgcaagttcactcttcctccaaacgccctcaaaatatagccagtttaaaatcctttgtatgcagcacttcaagcattacaaatctgatacataaggcacagatcccaaataagttaatgagaccaaatacttttacccaatatctattcctcgaacgctcctaa

SEQ ID NO: 2201 - DNA, 1293 bp, Cryptococcus neoformans
atgaggaacgaggatatagtgagtttgttcttcagatgtcaattttgcggacatgacgccttcctgttcaattcttttgcttccagacgattttcaatgggtcacagagtactcgtaaagtccttttgtgttccccttctatacccttactttttttcacagccttaccccgcaaccatgtccaaggtattctccatcctcggtaaaaatctcaaggccaacaccaaggccgagttggaaccttatatctcccagttggaagaaatggaagatgttgaagaggttcatttcggtggcaattccttgggtgttgaagcctgtgaggctattgccagcgtgctcaagaagaaaaccaatttgaaggtgagaatcttgttctcatatatctttacgggccgactcatttctgaaattcctcaggccctctccgctttgtgcaacgcactctctgatcacacctctttggtcgagcttgatctttctgacaatgcatttggcggtcgatgcgcggatgccctcgtgccattcctacagtccaacacccatttccaaatcttcaagctcaacaacaacggtctcggaccatggggcggttctgtcgttgcaaaggccttgcttgataacgccgccaagtgtgagaaggaagggaaggagtctagcttaaaggtcgttgtctgtggccgaaaccgattggaaaacggcagcgctcctgactgggctgaggcgtttgggaaacaccgaaatttgaaagaagtcaagatgccccaaaatggtatcaggatggagggtattcaggctcttgctgagggcttgtctaactgcaaggagttggagcatctcgacttgcaagacaacacagctaccaagaccggaacccgtgcgattgtcaagcacctcggctcatggcccaatctcaagcacctcaacttgtcagactgcttgctcggttcagccggcggtattgccctcgctaccagtttgagcctcggatctaatcctaagcttgaatcccttaagctacaatatggcgagatggacaagcgtgctatcgagctattgagtgtagctatctctcagcatctcaaagaattgacggtgctcgaattgaatggaaacaggttttctgaggatgacgaatgtgtagaggagttgaaaaaagcattggagctttggggtcatgaagaagctctcgatgagttggatgacatggaagagccagagtccgaagaggaagagagcgaaaaagaggaagagcgggaggaagaggagaccggcgagccggacgactgttga

SEQ ID NO: 2202 - DNA, 1494 bp, Cryptococcus neoformans
atgaggtacgtacccattagagcgttcaaggatcgaaagagaaaacgagatgaagacgctacctcggaggatgacctagaggaagatgaagaggaggaaggggattccaatgatgattcagatgccgcgaaatctggcgacagtgaagaggacgaaatggacgttgacatgagcgaaggggatggtgacgaagaggatgagaacgaaatcgagagtcttaaacgcgaagacgagagtgatgaagaggaagaagaagaggaagatgattacgatgaggaaggtgaaaacgaggtcgtcgactctgattcagaatcggaggaagagactgctgctgagatcgctcgtaaggacgcattcttttcgtcagacccaacgacaaccgaccctacactcccttcctcattcaccgccatgaacctctcgcgacctctcctacgagccctcacttctctccaattcactgcacctacacctatccaggcacgtgccatccctcttgcccttctgggcagagatattctcggttctgctgtgacaggttccggtaagactgctgccttcatggttcccatcctcgaacgattatgctatcgagacaggggcaagggaggagctgcatgtcgtgtcctcgttttatgccccacacgagagcttgcagttcaatgtgaagcggttggaaaagctctcgccgagaagggtggcctagacgtccgtttcgcccttctggtcggtggtctttccctcaatgcccaagcacatacactccgcactctacccgatatccttattgccactcccggacgattaattgatcatcttaccaacaccccgagcttcacgctttccgctctcgatgttttggtaatcgacgaggcggaccgaatgcttgaagcgggttttaccgatgaattggaggagatcatcaaggcatgccctcgttctcgacaaaccatgttattctccgccacaatgacagattcggtggatgagcttgtaaagctttctttggataaacctatccgagtttttgttgatcccaagcgcaacactgccaggggactgacccaagaatttgtcaggatccgttcggatgattcgagatcacccagtttgttggcactgtgtaagaggacaatcagagaaaaatgtatcatatttttcaggagtaaggcccttgctcaccagatgaggatcgtatttggtttgtttgggttgaaggcggcagagcttcacggtaatctcacacaggaacaggtaagtcttcccagctaaattatgctgacatcctcacagcgtctccaagccctcaatgacttcaaagccggcacggtcgattatcttcttgcgaccgatctcgcatctcgtggtcttgatatcaagggtgttgagacagttatcaattatgacatgcctggtcaactcgctcagtatactcatcgagttggacgaactgctcgtgctggccgcaaaggtcgctctgtctctctgcggtga

SEQ ID NO: 2203 - DNA, 1503 bp, Cryptococcus neoformans
atgggaaaacgaacagcagacgcagcagaccttcccgtgtccaaggcggccgccacaggccaggcgacggcgcgggagcccgccgccgacgacgagatgggcgagtttgaggacagatgggaagacgagatcgagagcgaagaggaggtcgtcgagcacgatgcggacggcgaagcagatggcaagtcgtgctccgaagacgccgagcccgctgccgcgcccacccagacgtacctccccggcacagccatcgccgaagacgagcagctcgtgcccgacaactcggtctacctcgccctccattcgctctcctatgcgtggccctgcctgtcgttcgacgtcctgcgcgatagcctcggcacagaccgcgcgacgtacccgcacacctcgtggatcgtcaccggcacgcaggccggcgaagtccccggcgagggcaaggccaaggacgaggtcgtcatcatgcgcctcggcaacctgtccaagacccagcacgacgacgacgatgattccgacgacgggaaagacgacgacgacgacgaggcggacgacgaagatgccaccctggactttctgaccatcccgcacgtcggttcggtcaaccgtgtgcgtgcggccccggctcccgtaggcggcgccgtgcccgacccgtaccacgtcgccaccttttccgagaccggcaaggtccatatctttgacgtccgcccttatatcgacaccctcgccggtccctcgcgcccccgtcaaaagctgccagtgcacaccatctccaaccacggccgcgcagaaggttttgccgtcgagtggggagctaccggcctgctgacgggcgatatcgaccgcaaaatctacttgaccaccctcacaccctccggcttcaccacttcccccaacccttacctcagccacacctccagcgtcgaggatcttcaatggagtcctactgaacctaccgtctttgcctcggcttctgcagacaggaccgtcagggtctgggacgtgcgtgcaaagggaagaaggagtgtcgtcagcgtcgaggcgcacagcgaggacgtcaatgtcatcagctggaataaaacagtcgactacctcttggtttctggcggtgatgagggtggattgaaagtttgggatttgagaatgttcaaagacacaccatcccccgtcgctcagttccagtggcataccgcacccatcacatccgtcgaatggcacccgaccgactcttccgtctttgccgcctctggctccgacgaccaactcaccctgtgggacttgtccgtcgagcccgacgaggacgaggcgcctatcggccccgcagacgggaacatcaccgccgtcccaccccaattgctgttcgtccaccagggacaaaaggatgtcaaggagttgcactggcacccccagatcccgggcatggttatcagcacggcgtccgattcgtttaatgtcttcaagactatttctctagagttttttttttttttgcagatattccatgtgtaa

SEQ ID NO: 2204 - DNA, 1371 bp, Cryptococcus neoformans
  misc_feature (132)..(132): n=g, a, t or c
atggtggcaagcaaggtgtcagtgccgatgactgggaaaagatcaagctcgcggatgagggcggataaaatcatactgatctgttctagcgagcccgctcttcccagaacacctaccatccctgaagctgangaaattagcgctcctgcgactgtcaaggagcagaagattactccttttgatgttgaaggtggtgtcgatgcttccggaagggagctcgccatcgactatgagaaagtcacaaaacgatttggtgctaccctcatctcccaagaattgctcgagcgatttgagagactcactggtcagaagcctcatcctctcttgagacgaggtactttttactctcatcgagacttcaacttgatcctcgatcgatacgaaaagggacaacccttctacctttacactggtcgaggacccagtagtgactccatgcacatgggccaccttgtccccttcatgttcactgcttacttgcaacgggtcttcaacgttcctctcgtcatccagatcactgacgatgaaaaatacctccttgaacgagacgccaagaagcagcaggagctcatgaaaaagatcaaggccaagaagcctcttgatctcctccgatactacaagaagatgggccaggacaacatcaaagatatcattgcttgtggtgtcatccctgagaagaccttcatcttctccgacttgaacacagtcagtggtgtcttctacgagaatgtcaacctcatctccaagactatcaccctcagccaaagcagaaacattttcggctttagcgactctgacaacgtcggcatgttccactttgccgccgttcaagctaccccttcattctgcaactctttccctcaaatctttggtactcgcgacgacattcctgctttgatcccttgtgccatcgatcaggacccttacttcctcctcacccgagactctgccgaccgattgggctacaagaaacctgctctccttcacgccaaattcctcccagccctccaaggtgccggtaccaagatgtccgcctcgaaggagaacaccgccatctttatgacagacgatgctaaaaagatcgccaaaaaaatcaagtcccacgccttctccggtggtggtgcgacgaaggaagaccacgaaaagtatggcgggaaccctgatgtggatatcgcgtatcagtacttgagtttctttgaagaggatgatgccaaaatggagaagttggcgactgagtataggaagggtactttgagtactagagagatgaaggaggcttgtattgagaagctccaagaggttgttgccgagttccaaaagaaccgagccgccgtcaccgacgaagtcctccaatacttccaagacccctag

SEQ ID NO: 2205 - DNA, 1539 bp, Cryptococcus neoformans
atggctgttgccagctcatccaccctcactgacagccaggtcagcaagatccagcaagattccgacttctccatcaagagcgagtccgtcacccccaagctcggtacgcatctcccctccttttcagagaacacttctcaatggcctcttttgcttaagaactacgataagttgcttgttcgatcttctcattttactccaatcccctccggtatctcacctctcaaacgcgacctccaaacttatgtcaagtctggtgtcattaacctcgacaagccttccaacccgtcttctcacgaagttgttgcttggttgaagcgaattctgcgagtcgagaagaccggccactcaggtacccttgatcccaaggtcactggttgtttgattgtctgtatcgacagagctactcgactggtcaagtcccagcaaggtgcaggaaaggaatacgtgtgtgtggttcgattccacgacaagttgcaggacgaaaaggctttgcctcgagctttggagaccctcactggcgcccttttccaacgaccgcccctcatctccgccgtcaagcgtcagcttcgtgttcgaacaatctacgagtccaagttgattgaatacgacaatgaaagaaaccttggtgtattttgggtgtcttgtgaggctggtacttatattaggactctgtgtgtccacttgggattgctcttgggtgtcggtgcccacatgcaagaactcagacgtgtaaggagtggtatcactggcgagaatgatgacatcgtgtctatgcacgatgtattggatgcccagtggttgtacgataacactcgtgacgaatcctaccttcgtcgagtgattcgccctcttgagtctcttctcgtcaattacaagcgtatcgtcgttaaagattccgccgtcaacgccatttgctatggtgccaagctcatgattccaggtcttttgcgatacgaagcagacattgaagtcaatgaagaggttgttctcatgaccacaaagggtgaggctatcgccattggtatcgcccaaatgtccactgtcgaccttgcctcttgcgatcatggtgtggtagccaaggtgaagagatgcatcatgaacagggatctttaccctaggaagtggggacttggtcccaaggctcaagaaaagaagaagatgatcaagaagggagagttggacaagtatggcaagcctatcgaaggtgttacccctcaacaatggtcctcgggttatattgactacaatgaccctgatgctgtgcctgcttctggatccaacgatctcttgcccacccaacctcccactgcagaagatgtgaagatggagccggtcgaggtcaaggttgaggcggacgagaaaaagcgcaagcgcgaggaagaggaagttggatcaccaaaggctgaggagaagaagaaaaagaagaaggtgaagactgaggatggtgcggagcgagaggaaactgctgaggagagggcggcaaggaaagctgccaagaaggagaagaaggagaaaaagaaggcgaaggaggagtag

SEQ ID NO: 2206 - DNA, 1437 bp, Cryptococcus neoformans
atgtcaacaatgagctacggccatcccaccccagtactactcacatccactcttatccccatctctctcctgctcatcctcaaccctctgctcccacttatcctgcccgctctcccaccaccaatcgagtcaatcatctccaatgtgccattaccgaaacaaccgaccttaccggctttacaagcaaatattggatttgcgttactagcttttgtgggagctgtttggatagtgcccagagtgagtggggcatttgtggagaagggtttgagaggcagggatttgttgaaacctggagggaggacgagtggaccttggattctggggttaccatgcgcaagctggtacattgctttgatgatgttattcatcccctttcccttttcgcacctcttccaaggtggtatgctcgaggtttttccgcagcgagagttaacattatacctctcctccctcctctcccttcttacagccacattgctaggcttcattgatgacctgttcgatattcgatggcgacacaagttacccattccgatcgttgctgcggtccccacgttgttggtgtattactcggtcggaggggcgacgagtgtcgtcttaccacaaggagtggtaggttgggcgaggacgatggggatgggagaatgggttgataacggggttgttgaccttggacctctatactacatctatctcatcctactccctactttcaccaccaactcaatcaacatcctagccggcataaacggtgtggaagtcatccaagccctcctcatcgcgctttccgtcattcttaacgaccttttgttccttcctatctggcctgaacgggaagtggtagatcggcatctgatgagtttgtactttatggcgccccttgcaggtgtttgtgctgggttcttatggcataactggtatccagcaagggcctttcctggagacaccttctgttactttacaggcatggccttctccgcggtcgctatccagggacatttctccaagactttgatcctattcttcatcccgcagatattcaacttcgtgctctcatgccctcaactctttggacttgtagattgtccaagacatcgattacctgcattcgatgcggagaccgggctcttgcatccctcgcgagtaacttttgagaatccacccccaacaaagacaagaataactctccaaatactagaatttctccgcctagttcgcttggaacgtagtaaatcatcaagaggagaccaacagatccacatcaaatcgtccacaaatctcaccattctcaatttcctcctagtccatttcgggcctatgcgagaacaaacattgtgcgcgcttatagctggagtgcagattttggggagcgcagtggctttcggcattaggtatggcgttgggagctggttctatggtggggatcgacgatag

SEQ ID NO: 2207 - DNA, 1293 bp, Cryptococcus neoformans
atgtaaccttgttttggagctccaagcacagtatcccgacgagttttccatgcccgacatcatcttttgctttcccatttgatttccttggtccccacccttccaaatgtcttgcaacctcttatgatacgtcatttccccaataaaagagagccagaagtctctcaaacaacctggatacgaaactgctgcgagctcgttggctattgtccggaattagggggtagaatgtggggggagatcgtcgataggatgctgagaattgatgtacgttcttttcatataaaactgtatttttctggcttaactccttctcaggttgaaataaccaatagcttggatcaagatgatgatgaaagttcggacgatgaatatgaaccccaaatggccaccccgcaatcgataatgacaacgctcgatccgttggaccttcttatatcgcaggaaattcctcggtcccggtctgtttcccattctcccgaaatcggttcattatcatactttcaaaccctgcttaacctcttctcgcgacagattcttccgacagcttcaacccagcacatacctttccttcttttcctcacatcatccttctccccagcgcatacagagctgtttttgggattgcttgtatcgcaagctctttacgccacaacttcgactgtgccatctatcaactctcaacccgtttccatgaaccaacgtattgcggccacagtctatataggttccgtggtctgtcgtgcgcgcttcgtcaccgatgaccaagcccggacggttctcacttacctccttgcctatatggatgggaaactccatcagtcccgggtgaacaagcgccattcaacagacgagcttccgctattctacgcggtttgtcaagcggccatgttaattttctgtttccggtggcgggcatttctggcaggaaaggcggagggcaaatggatggcagacctggatgtgctgcagaacgccatcactagtgacctgaatcctttacttggctgcaatccgacggtagtctcaacttttgctaaagttgcccatcacactaatttcgcgtattgcttctccatcatcgaagctaatcaacaatcctcccatccacgatcgtcttcttcgcacgctctgcaagccaggcagctgaatgtcgatgccggtctggatagctatttcccatttgatccgtatgatcttcctaagtcgaaaagatttattgaaacgctatacagaacgtgggatgaagtagcgattgatgggggcttggattctgactcggaccagttctga

SEQ ID NO: 2208 - DNA, 1272 bp, Cryptococcus neoformans
atgtgtttgctgactttcagctttgcaggttccctcccaggtacctcatctattgtatccccgacatatccttttgtcccccaccttcgacttctttcatctattgttgagactgtagtgaaactccggacccaaggacatcgtgtcgtcttggtatcttcgggtgctatcggtgtggggttaaggaggatggatcttaaggaaagagggaaggggttgcatcagaagcaggcccttgctgctgttggtcaagggcggctgattgcgctgtgggataatctgttttctcaattggatcagcctattgcccagattcttctcacccgaatggacatttcagacagaacgcgttatctcaacgctcaaaacactttctctgaattattgcaaatgggcgttattcctatcgtcaatgagaatgatacagtctcagtatctgaaatcaaatttggcgacaatgacacattatcggcgatctcttctgctatctgccatgccgactatctcttccttttgactgacgttgactgtttatacacagacaacccccgtaccaaccccgatgcgaagcctgtgagagtcgtacgcgatattgagaaggtgaaacagcaagtatctacttctaccctcggaacatctcttggcacaggaggcatgtccacaaagctcattgcggccgagcttgctaccgctgctggcacaaccaccgttgttatgcattctatcaacgtaactgacattttcaaagtcattgaaaacggcccttcgccttgccgagaggttgcagagactccagaattgtttgagggcccactgtgtacgaggtttttaagacgagagtcagcccttaaagaccgaaaatggtggatcgcccacggtcttcacgctgccggtaccgttgtcatcgacgaaggtgcctgccgtgccattcgacgcaaagaatccggtggtcgtcttcttcctgccggtgtcgtccgcgtggttggccctttcgcaagtcaccaagccgtccgtctcgttgttcgcctggccgaaggagagagtgatgagtgggaagaggtcgaggtggcgaagggtctagctcaatacaacagtgtagaaattgacaggatgaagggacgaaagagttcggaaattgaaaaacttattggatacgtcgagagcgagcatgtggtggactgtttctactgtgatttctatatagcgtttcaagctcggctaatatggactcaatattttgctcactcagcctgtgaaacaaaagtaagctga

SEQ ID NO: 2209 - DNA, 1371 bp, Cryptococcus neoformans
atggttgagtacaagcaaatcaccaccaccacctacggccttactgaagagggagaaggtatcactcaaaatggttctcacgagtatagagtgtgggaggtgcttcctgtgaagggtcaaggagagcccatcggtattcctgaactcaagaaacgtctcggtgacgaaactaccaaggttggtcagatgcgagcgttcaagaacaagtggatagcgaaggatggtgccggtttcgtccgtgcggtgagtgcatatgcgcctgtggatgaggctgccgtacaaatgaaggaaatcaaggaaagcgggctggttgcaggaggtgaagccgttgtcaaggagctgcaaaaaagaaaattgattcaacccaaaaagtatatccactattctatctccaaaggacctcagttctctactgaagtcaagcaactggaaaccgaccttactgttgaaatgctgcaatcaggtgcttggaaagacgcttcgttcaagcagtacaacttcgccgctgctggccaacctactgatggtggcgctctccatccattgttgaaggttcgagaagagttcaggaccattttctttgacatgggtttcaccgagatgcctacgaacaggtttgtcgagtctgctttctggaacttcgatgccatgttcgttcctcagcaacatcctgctcgagagatgcaggacaccttctatgttaaggacccggccaaagccctcaagcctgatgccgactattacgagcgaattcgaaagattcacgaggaaggaggttacggatccattggttaccgagcacctttctctcaggaggagagtgagaagctcttgttacgaacacacaccactgctatcactaccgacatgctttacaggctcgccaatcagcccggagggttcaagccggcgaagatgttctctatcgaccgagttttcagaaatgaaactgccgatgctacccatttggcagagttccaccaagtggaaggccttgttgcggactacgatatcactctcggccacctgcttgcgttcatgcaagagttcttctccaagactggtaaccacaagctgaggttcaagcccgcatacaatccttacactgagcccagtatggaagttttctcataccatgaaggcttgggcaagtggattgaaattgccaactctggtatcttccgccccgagatgctcgagcccatgggtcttcccaagggtgtccgagttcttggttggggtatgtctctggaacgccctactatgatcaaatacaagatccaagatatcaggacgcttgtcggacacaaaacggatttggatcaggtaaagaagagggcggcggtcaggttggagaagggcgatgactag

SEQ ID NO: 2210 - DNA, 1266 bp, Cryptococcus neoformans
  misc_feature (535)..(537): n=g, a, t or c
atgcttcagcaactggaatggaacatcagcaaaagacgcagacatttcacacggtatatggccaagaccgagaacgtacattccttgtccttcatctccttgatgtcggcaccggcagcaaacaccttgtcaccaccggtgatgacgatagccctcacactctcatctgtctcggccttctcaagctcggcgttgagagcattgaacaagggcgtgctcaacgcgttgagggccttgggcctgttaagggtcaagatggctacgttgttcgaaggagaacgagaggggatgacgagctgttctgcagaggtggacatggcgcggatagtgagtcggtatgtagattgggaaggcttgaggagaatgccccgattctatgagaacaaatatcccgaggtcgaccaattggtcatggtccaggtccagtctattgaggacatgggtgcctacgtcaagctccttgaatacgacaacattgaaggaatgatccttctttctgagctttctcgaagacgtatccgatcagtccagaaannnattcgagtgggacgaaacgaagtcgttgttgtgatgcgtgtggaccccgacaagggctacattgatctttccaagcgacgagtttctgcggaggaggttgtcaagtgtgaggaacaatacgagaagggcaaagcggtcgactctatcattacccaggtcgctaagaagcgaggtgttactccggaatcattgtacgaaaagattgcttggcctttgcaccgacaatacggacacgcatacgaggctttcaaactctccatcagcgaacctgaggctgtctttggctccctcgaacttgatgaagaaacccttgccgatctccgatccggtattgcacgacgacttactcccaaacccgtcaaggttcgcgccgatatcgaagtcaaatgcttctcctatgccggtattgacgctatcaaacgtgctcttactgccggtgaagccgtctctacccctgacgtacctatcaaagtcagattggtcgctcctccgctttacgttatgagcacgacaagtacggacaagaatgcggcgatagagttgatggagaaggcggttgaggttattggtgagactgttaggaaagacaagggtgatatcactatcaagatgaagcccaaggttgtttccgagaccgaagatgcagagctcaaagctcttatggaacagttcgaagcagccaacatggaccaggcgggtgatgacgaatcaagcgaggaggacgagtaa

SEQ ID NO: 2211 - DNA, 1443 bp, Cryptococcus neoformans
  misc_feature (237)..(237): n=g, a, t or c
atgcgctcaaaatcgcttgtcttccgtgtcgctatatacatcatcccacttataatatctgcctatctctttcttccttatccaaacaaacactcttattccatagtcgcaatgtctctctcttccaagctcaacattaccgacgtcgacctcaagggcgagagggtcctcatccgtgtcgactttaacgtccccatggacaaggagggcaagatcaccaaccctgctcgtatcgtngcggctctccccaccatcaagtacgccattgacaacggcgccaagtctgtcatcctcatgtcccatcttggccgacctgacggttcccccaaccccaagtactctctcaagcccgttgcttccaagctctctgagcttctctccaaggacgtcaagtttcttcccgagtgtgtcggtgacgaggtcaagagcgaggttctcaagggtgagaacggccaggtcttccttttggagaacttgcgattccacatcgaggaggagggtaagggcaagaagggcgacgaaaaggtcaaggccgaccctgcggccgtcaagaagttccgagagcagctcactgaactcggtactgtctacattaacgatgcctttggtactgcccaccgagcccactcctccatggtcggtgtccagctccccaagcgagctgctggcttcctcatgaagaaggagctcgagtactttgccaaggtccttgaaaagcccgagaggcctttccttgccatcctcggtggtgccaaggtcgccgacaagatccaattgattgagaacatgctcgaccaggttaacactttgatcatctgcggtggcatgtctttcactttcaagaagacccttgacaatgtcgagattggtacctccttgttcgacgaagctggctccaagcaggtcaaggaccttgttgagaaggccaagaagaacaacgttaagcttgtcttccccgttgactatgtcaccgccgacaaatttgacaaggacgccaagaccggctctgctactgacgagtctggtatcccctctgactggatgggtctcgactgtggacccaagtcccgagaactctttgctcagaccgttgctgaggccaagaccatcctctggaacggccccgccggtgtctttgagttccctgcgtttgccagcggctccaacgccctcctcgaagcctgtatcaaggccgccaagaacggctccactgtcatcgttggtggtggtgacactgctacccttgttgctcaggccggtaaggaggatgaattgagccacgtctccactggcggcggtgcttctttggagttgttggaaggcaagactttacccggtgttgccgagttgtctgagaaggtaacttgcgcgattgtagagcggtggagtcgcccgccgcgggaccaaaagtacagagcaagtaccgtactgcgtcgaaagtga

SEQ ID NO: 2212 - DNA, 1458 bp, Cryptococcus neoformans
atgcatccggacgatgactattataccgcaggcccaaaacggttccagcaaaaaagacaaacacggatcaaagaatatttccttgttcggctgtttacttttcaggcacgggagaggcacggacctccagcggaaagatccgaacacctcaaaaccttgttcctgactagctacgaaaagggagccgaatgtatatattttcttcgaaaacacctctttttttcatttctttgcttctcctctatccacgcccaagccatggcctcctacaccccctactcttcccgcccacacacccctctgggtctctctcctagaggctcgtataccaacctcgcctctgccgcgtacgacgcgtcttcccccggaggacatggtgcgaaggatgagaaggagaggctgagggcagagcgtgaagtacaggaggcgttgttgaaagcacaggacggtgtggaaaaggccaagaaggaggaggtatgcatgcccgcgagcactactgtactgccgatcctgagctactgtgttgcatcgattatgatgaccgttgtgaacaagtttgtctatcccggaatcattgttttctctgatactgaccgctggatagtccttgctatacaatcgttcgtctgtgttgcgtgtgtatggctcgccaagcgcataggcgtcatcaacttccgtgactgggacatgaacgatgccaaagcgtggttcccagtgtcgtcccttctcgtcgccgtgatttacactggttctaaatcgctccagttcctctcaatccctgtctacacaatcttcaagaaccttaccatcatcctcatcgcctatggcgaagtcatttggtttggcgggcacgtcactcctctcactctttgttcattctttctcatggtcggttcatccgtcatcgctgcatgggccgacatctccaccaccctcgtgatggatacgatgaacgtgggttacttgtggatgtttatcaactgcttggcttcggccggctatgttctttttatgaggaaacgtatcaaggtgactggattcaaagactgggattcaatgttttacaacaacttgctttccatccctgttttgtttgtcttttctctcatcatcgaagactggggtgctgcctctttctcccgcaacttccctgaagaaggccgagccttccttctctccgctatcgccttttccggcgccgccgccgtctttatctcttactctaccgcctggtgcgtccgtatctgcggcgcgacgacatactcccttgtcggcgctctgaacaagctccccgtcgcggctagcgggatcttgttctttggggacccggttaactttgggaatgtgagcgctattctggttggaggcgtaagtgggattgtttatgcggtggccaagacgaatcaggcaaaggtggaaaagtcaaagcaggcgagagggggagaaagcaaggcgtaa

SEQ ID NO: 2213 - DNA, 1509 bp, Cryptococcus neoformans
atgtcctctgataaaaccaaccttttccctactttaggtgaggtggcggaccgcacagggaaggctgagagtactggtttggagcaggaaggagatgacagacagatgcaggagattgagagtctttgtatgagatgtcatgaaaatggcacgaccagactgctcttgaccagcatcccctatttcaaggaaatagtggtctcttctttcagatgcgatcattgtggtcaccgtgatacggagattcaaagtgccggtgaaatccagcccaaaggcgtcagctacaccgtacaccttctcacacgtgccgatctcgaccgacagattgtcaagtctaattgggctacaattaccattcccgatatccagttgactatccctcctggtcgagggcaaatcaatactgttgagggcattattcgtgacactgtacgagatcttaacatcagccaacctgtccgacgagtcatggaccccgagacgggtaaaaagattgacgagctcctcgagaagcttagggcggcaattgacatggaggaggatgatgaagacgatggagaaaaacctttcgtccccttctctatgatcgtcgatgatccgtctggcaattcttacttccagtttaaagggtctcaatcagatcctcaatggaacatgagagcttacagtcggacatttgatcagaatgtgatattgggtttggtcgctcgaccggaggatatgtctgaggagcagccggaaggcgtcccgattgtcgctgctgaccacaaactgagcagtgcggaggagtttgagtcgaaaaggaacaagaacgtgatcaatcgggatgacgggacagttgttccggacgagatttacagcttccctgctacgtgttcttcatgtggacaccagcttgagactctcatgcagcaggtcaacattccttactttcaagatatcatcattatgtcaagcaattgctacgcatgtggataccgagataatgaagtcaagtctggtggctcgatcgctcccaagggtaaaaggattactctgaaggttgaggacgaggaggatcttagtcgagacatgctcaagtctgatactgctggtctatcaattcccgaaattgacttggtgcttcaacctggtacccttggaggccgtttcaccactcttgaaggtcttctcaatgagatttacaccgaactcagtaccaaagttttccgagctggtgactctactaccgctggtatcggacaagcggattcgagcgccggtgaagatgaagcaaactttggggatttcctcaaaggcttgaaggagtgtatgtcggcccagaggcagttcactctcatccttgacgatccggtgtccaactcctatcttcaaaacctttatgcgcctgatcctgacccaaacatgcaaatcgaggtgtacgagcgaacgtttgagcagaatgaggaacttggtcttaacgatatggtcgtggaagggtataataaggaagctgagggaacggcgtaa

SEQ ID NO: 2214 - DNA, 1548 bp, Cryptococcus neoformans
  misc_feature (1468)..(1468): n=g, a, t or c
atgctgttaataattttcccccctcatgggcactctactctttccacaagttgccatacagtactttttctcaaaaacatccacaaaatgtcaatggcagcatcgtcatccacggcaacagtccagccatcgggtatcatcacccagcccccacctccatccaccctgcgcgaacagcgaattgcaactcactcccacatcaaaggcctcggtcttgctgatgatggtacagccatgtcctcgtcccagggttttatcggacagattctcgcccgtgaagccctcggattgcacttgagcttgctgaaaggtggcaagtactcgggtaggccactgctgcttgttggccctcctggaacgggaaagacggcgctcgctttggcgttgagtcaagagttgggcagcaaggtgccgttctgtgcgatggttggaagtgaagtgtactctggagaggttaagaagactgaagtcctgggaagctgcttccgaagggctatcgggttgaggattaaggagacaaaggaagtgtacgaaggtgaagtcaccgaactcactccttccgaagccgagaaccccctctctgggtatggcaagaccatttctcacgttatcgttggtctcaagaccgtcaagggtaccaaacaactccgtctcgacccctccgtgtacgaatccatccaaaaagagcgagttgttgttggagacgttatttacattgaagccaacactggcgccgtcaagcgtgttggtcggtccgacgcttatgcctcagaatatgaccttgaagccgaagagtatgtgcccttgcctaaaggagatgtgcacaagaggaaggagttggtacaggacgtgacgctgcacgatctggatatggccaatgccagacctcaaggcggacaggatatcatgagtgtgatgggtcaactggtaaaaggcggcaggacagaggtaacagacaagttgagaagggagattaacaaggttgtggaccggtatattgagcaaggtgtggcggaacttgtccctggtgtgttgttcattgacgaggtgcatatgcttgacatggaatgcttcacctacctcaaccgtgccctcgaatcccccatgtccccctacgtcgtcctcgcctctaaccgagggatctccaccatccgcggcacagaatacgacggtgtcgccggttccgcttccgaaggtatccgtgctccccacggtctgcccgtcgatttgctcgataggtgcatgattgtcaagacccagttgtacacccgagacgagattcgtcgtatcgtggagatgcgatgcaaggtggaagggattgcgatctcctcggaagcggtggacaagcttgcggatgaaggggagagaagtagtttgagatacgctttacagctcttgacgcccgcagggattgttagcaagaacaagggtaagggagaggttggtgtggcggatgtggaagagttgngagaactgttcttggatgctaaacggtcggcgggcgtgttgagaagcactgaagatttcgaagaggtattagaaagataa

SEQ ID NO: 2215 - DNA, 1461 bp, Cryptococcus neoformans
atggctacggttctcccagaaccagagggaatcccctgtatccgcccggctgcgtcctacgatcccctcacagagctctcgaaaccattcacaatcgacccggcttctcgatcatacaagcaccagtatgccaacatctactttgtgaggttggtcgagcagcgccctgctgttgagaagaaggctacggaaaagtggaaggatgttaagggcaatccaccgcttttaccgcgtatcctcaacttgacccggtcacagctttgctatatcgtcggtacagtttatatggaaatgcctctgaaacccaatattctggaagatatggctcgagacgtaggccgtttagccattttgagtacaacgaaattcttttccgctcaagattccatccaccttgaagatgagtcaggccgagtgcgactgataggcgatgccatccagagggaaagagatagggaaggaggtggtcttgtgacgggagtgatcatggccgcattggggatggaaactccttccggggatttcgaggtgatcgacatatgctttgcaggaatgcccgataagcttgttcttaaccctgcgccatccaagaatgcaaaaacttggatagctatggtgtctggtttgtcgatcggtacccaagaagcgtcgacggatctcaaggctgaaatgttggtcgaatggttgatgggagagattggaggacattcagatcagctgggtggtggacggatagcgcggttaatcatagcgggtaactctttaacacttcctgtaaaaggtgaagatgataaaaagattgtaagggtaaaacgcttcaactccacctccaaacccctcttccccaaccacccgacaaaaacccttgcaacgcttttcgccgaccttctttcctcatctctacctattcaccttatacccggaccgtccgaccctgcgggtgccactcttcctcaacaacctttgccgaaaatcttatttggaggtaaagcgaaaacagaaggactggagtgtgagacaaaccctacatggatggaagttggcggaagaagcttccttactaccggtggtcaggcaatagatgacatttttaaatacgtgcccggcaactctagactaggtatgacacaacgtacattagaatggcggcatatggcacctacagcacccgacaccctgtggatataccccttccctgacactgacccttttatcatgaattatcgaccggacgtgtatattgttggtaaccaaccagagtttgaaacgaccattattggagatgaggacgctcccacacgtcttgtactcctcccatcatttgccaagacgggcgtaattgcttttgtctgtctcgaaacgctggaatgcaggacgcttgaatttgaggcgcccatgtgggttggagaaaccatggctggtgaagcagagggcgttgataatgaagaaatggaatcatag

SEQ ID NO: 2216 - DNA, 1587 bp, Cryptococcus neoformans
atgaagccgatggtatcaaagccaaattcaccgacagaggggcctcagtcatcagtaggttcatggcatatgatcttgcctactatcgctaatggctttgcagagggtcctgacggcaagctctctgtcaaaaagacggagaagaactttgagttctttaccaagtctaaggttggccgtgttgggcttatgctcgtcggtctaggcggtaacaacggtacaaccgtcttggcgactaatcttgccaacaagcacaacatctcttggcacaccaagaatggcatccagcagcccaactacattggttctgttgttcgagcttctaccgtccgccttggtaccgatcctgcaaccggaaaggatgtctttgtgcccatctctgacatgcttcccatggttcaccccaacgactttgtcattggtggctgggacatctcttcgctctccatggacaaggctatgctccgtgccaaggttctcgaatgggatttgcaaaggcagttgattcctttgatggaggatgtcaagccccttcccagtatttactaccccgacttcattgcggccaatcaggctgacagggccgacaatcttatcccaggcggcgacaagaaggctcatctcgagcacattcgtgctgatatccgtcgcttcaaggccgataaccatcttgacagtgtcgtcgttctctggactgccaatactgagcgttatgccgacatcattccaggggtcaatgacactgccaacaaccttctcaaggccgttgagacctctcacgaggaagtctccccctctaccatttttgccatcgcttccattctcgaaggcgtgcctttcatcaacggctctccccagaacacgtttgttcccggttgtattgagcttgctgagaagcacaaggctttcattggcggtgatgatttcaagtcaggccagaccaaggtcaaatcagttcttgccgaattcctcgtcaatgccggtattaagcccttgtcgatctcttcttacaaccacttgggtaacaatgatggtaagaacttgagctctcagaggcagttcagatccaaggagatctccaagtcaagcgtcgtcgatgatatggtcgctgccaaccacatcctctacaagactgccgaagacctcagcaaagccactggagaggtcgtcaaaaagggcgagcatcctgaccacatcgtcgttatcaagcacgtcccggctgttggtgactccaagcgcgctatcgacgagtactactccgagcttctcatgggtggccgcaacgtcatgaacattttcaacgagtgtgaagactctcttcttgccacacctcttatctttgaccttgcgatcctcgccgagcttctcactcgtgtgacttaccgtgagaacgctaccggcgagtggcagccgttgtacagtgttctctcgctcttgtcttacatgctcaaggcaccactcgtcaaacccggcgaggacgtcgtcaactctctcaacaggcagagaaacgctttggagcagttcctcaaggcttgtctcggtttggagcactcgaacgacttgttattgaatactagggtctggtag

SEQ ID NO: 2217 - DNA, 1470 bp, Cryptococcus neoformans
atgcgaaacgagctcaacagaatggtcgcaaacgagcaagaccctgctaagaagaaatctcttgttaaaagaaattcgtgtaaagttgctgactatgggcttgtaaagatgtttgaagctgagatgcagtccttcttcatcctcttcaatcgtttcctcactgagcgcgctaagggcgaaaagctcgactgggacaagatcaaccctcccaagcctgagcaggtccgcccttacgaagtccttcccaatgttgacccttcaatcctcaacaagcttgctgttctcaagctcaacggtggtctcggcactactatgggctgtgtcggccccaagtcaattattgaagtcagggataacatgactttcctcgacctttctgttcgacaaattgagcacttgaacgaaaagtacaatgtgaatgtgcccttcatcctcatgaactctttcaacaccgatgaggacacagctaggatcatccaaaagtaccagaaccacaacatcaatatcctcactttcaaccaatctcgatacccccgtgttgacaaggaatctttgctcccttgtcctcgagaatcttcaagtgataagagcaactggtaccctcccggacacggtgacatctttgatgctttgaccaactcaggccttcttgacaagctcatcgctgcaggcaaggagtacatcttcatctccaacgtcgacaatcttggtgctgtcgtcgatctcaacatcttccagaccatgattgacgctcaggccgagtatgtcatggaagtcactgacaagaccaaggccgacgtcaaaggtggtaccatcattgactacgatggcaagcctaggttgctcgaggttgctcaagttcccaaggatcaccttgatgaattctgcagcactcgaaaattcaagattttcaacaccaacaacatttggtgtaacttgcgagccatcaagaggatcatggacgaggatgcgctcaacctggaaatcattgtcaacaacaaggttaccgacgatggtctagccgttatccaactcgaaactgccatcggtgctgctatcaagcacttcgactctgccatcggcatcaacgttcctcgatcacgatttttgcctgtaaagtcttgctctgatcttcttctcatcaagtccaagctctacaatcttgagcacggtgttttgaccatggacaggtcccgagaatttggaggcacccctgttgtcaagcttggtggcgagttcaagaaggttgccaactttgagaagcgattcaagtctatccccaacatcaccgagctcgaccatcttactgtttctggcgatgtctggttcggtaagagcgtgaggcttgctggtacttgtatcattgtcgccactgagggcaacaagatcatgatccccgacggtaccaacctcgagaacaagttgattactggtaacctttcaatcattgaccatagcatgaggatgtag

SEQ ID NO: 2218 - DNA, 1506 bp, Cryptococcus neoformans
  misc_feature (1285)..(1285): n=g, a, t or c
  misc_feature (1305)..(1305): n=g, a, t or c
  misc_feature (1311)..(1311): n=g, a, t or c
  misc_feature (1313)..(1313): n=g, a, t or c
atgacgacaggaacgacgacagtggtatcctcccctggcaaggtactcatcgcaggaggataccttgtcctcgacacacactactctggtctagtcatcggcacttctagcagattctactcttgtgtctcgagccgcgcaacgtcaagccgcgcaacgtccagcacgccaagcatcgatgccgataccaacaacgacattgacacagacacttgtcaaaataaagcgaccatctcggtacgcgccggccaattcccttccgacgcttcgacatgggtctactgcatctcaaaaccttctgcttctgcttctgcttccgccggtgaggacggtgaagacggtgaagaaggtggagatgggactttatatcttaaactagagcagaccaatgaagagcaggcgggtaaaaacaaattcatctttatcacgctttgcaaagtgctcgagtatgtttacgaatccatcttggcccacgttggggatgaggaaacagcattggacgagttgatgaagcggataaaaggtggtggggatggtggggacggtttggacgtggtcgtctttgcggacaatgacttttactctcaacgcgagcaggtgcgtatgatatattttcttctcacatcgctatccctcccaacccggatatcatcccttccccatctcccgccattcacccctcttccccgcccaatccccgcaaccaacaaaaccggcctcggctcctctgccgcgctagtcacttccctcgtcggatctttgctctcccacctccatatcacccattcctctccagagggcagtatcgcagatgacgacaaggctgtcattcactctgtcgctcagctggcgcactgccaagcgcagggtaaagttggatcaggtttcgacgtttcctctgccgtctacggttcccacctctacacccgtttctccccatccatcctcacgccgctcatgtcccttgccccattctcccgacctcgaccctctcccggctcaacatcgcccctcctcctcgatgcactccacccgagcaaatgggataacaaatctatccctttccgactccccaaacatttgcgtctcttactcgccgacgtttcgtgcggtactgacacgccatcctttgtctcctccgtcctcaagtggagaaataacgatagggaaaaggccgatgaagtgtgggcgaggctggataatgcgaacagggccttgggtgaggtgctgaacgatatgcttttgaacctccctacaaccccgagcccttcacgcacactccatntcctccaccgcctcgccctntccctntngtccatccgcgctctgttgcgtgaaatgtccgacctctcgggcgtacccatcgaaccaaaagaacaaacgagattgctggatgcatgcggacaagtcaagggtgttgtaggcggtggcgttccaggtgcgggcggctacgatgccctttacctccttgccatcgaccacaacccctatagcaggtgtcgataa

SEQ ID NO: 2219 - DNA, 1449 bp, Cryptococcus neoformans
  misc_feature (956)..(956): n=g, a, t or c
  misc_feature (958)..(958): n=g, a, t or c
atgtcaccactttctcaccacgtggcgggcatagcggcgttaatgccatcaccgcagagtaggtctgggagtgtggcacccggggagtcggcgacacccgcctccgcaacgacgatgacaagtcgcgaaccaacgtcgagcaccgagttcaagaacgctctcgatgagtccgatatccagatcctcaagacatatggccaaggaccttattcccttcacctcaagaagattgagaaccaaatcaaggatatccagaagcgtgtgaacgagaagattggtgttcgcgagtccgatactgggttagcacctgccaacctttgggatatacccgcggataagcagaggagtggaaggccgttgcaggtcgctaggtgtcagactattatcaaggccggcgaccagcctttgaatcctcaagatggtgcgggtgccggtaatccggaaggagatcgatatgtcatctctatcaagcaggtggcaaagtttgtggtcggtttgggcgacgaggtgtcacctaccgatgtggaggagggtatgcgagtcgggcaaccgctgacaatccaaaacagagtggaccaagtaacctacaagattatgctccccttaccgcccaagatcgatccttcagtaaccatgatgcaggtcgaggaacgaccatcaattacttatgccgatgttggtggatgcaaggaacagattgaaaagttgcgagaggtcgtcgagttacccttattagagcctgagcgatttgtcagcctcggtattgaaccccccaagggtgtccttctctatggtcctcccggtaccggtaaaacgctttgcgctcgagccgtcgccaaccgaaccgactctacctttatacgtgtcatcggttccgaacttgtgcaaaagtacattggtgaaggtgcccggatggtgcgagaactgtttgagatggcccgatcgaagaaggcgtntntcatcttctttgatgaagtcgacgcaattggtggtgcgagatttgatgatggtgctggtggagacaatgaggtgcagcgaaccatgttggagctgattaaccaactggatggtttcgatccgagaggtaacatcaaggtcatcatggccactaacagacccgacacccttgaccctgctcttctccgtccgggccgtctggaccgaaaagtcgaattctccctccctgacaatgaaggtcgaacacacattctcaaaatccacggtaaatcaatgtctgtcgagcgcgatatccgatacgacctcattgcccgtctatgccccaatgcgaccggtgctgaactcaaggctgtggccacagaagccggcatgttcgctatcagggcgagaagaaaggtggcgacagagagagactttttggatgctgttgagaaggttatcaggcagggcagcaagttctccagtacagcgttgtatgcgcagtataactag

SEQ ID NO: 2220 - DNA, 1602 bp, Cryptococcus neoformans
atgagtacaaaggagagtactgatatgggccgagtagttcaaggcagatgtataaaatctgatgtcggtcatagcaaagaatcatttgcctaccatctccttcgtcaaatcaacctcactgcggccgcgtctgtcgctgacccctctaatcacactctcgcctacggtaccaccactgaaggcgccggcaagcatctcgttgtcgacttctcctctcccaacattgccaaaccattccacgctggtcacttgcgaagtactattattggtgccgttatttgcaacctccacgaggctaacggctggaaggttacaaggttgaattacctcggtgactggggaactcagtacggtctcttatccgttggttttgacaaatacggaaacgaggaggagttagtaaaggaccctatccaccacttgttccaggtctacgtcaagatcaacaacgcgagggatgaacagaagaagaagtttgaggcaggcgagactattccagatgaggagaacatccacttgttggctaagaaggtcttcaaggacatggaggacggcgagcccaaggcaattgcccagtgggcccgattccgagatctctctatcgagaagctcaagggcacctacaagaagctcaacgttcattttgatgtctactggggtgaatcccaagtttctgaggaatccatggagcgggctgtcaggatcgttcaggagaagaacttgacttgtgaggaccgaggagctttgttggtcgatttgaccaagttcaagatggacaaagccatcgtcaggaagggtgatggtacttctatctaccttacccgagatcttggtggtgcctacgacaagtaccagaagtacaaattcgacaagcacatctacgtcgtccaggccgctcagaccttacacttcaaccagcttttcaagactcttgaactcatgggcgaaccttacgctgacaaacttgagcacgttactttcggtcttgtcaagggtatgtctaccaggaagggcaccgttgtcttcttggaagacatcatcgccgaggctaccgatgtcatgcacgagcagatgaagagcaacgaggccaagtacgctcaagtcgaggaccccgagggcactagtgccatcattggtaccactgccgtcaagatccaagacatggctggtaggaggattaacgattatgactttgacatcaagcgatgtacctcttttgaaggcgatttcggacccttcatccaatactctcacgttcgtctttgttccgttcagcgaaagaaccccaatgttctcgttccgcaatctatcaatgaaattgatctttccatcctcaatgagcccaaggtcaacgacatcatcatgcatctcgccctttatcccacccacgtccgaaacgctttcctccaaagtgaacctagccaacttgttacgtggtgtttcaagttgggtcacttggtcggtgctgcttgggagactgtcaaagtcactggtcaggaggaagaaattgccaaggcgaggttattcttctacgtcactaccagggaggttttggcgagcgcgatgaggatgttgagtttgactccaatcgagaggatgtaa

SEQ ID NO: 2221 - DNA, 1575 bp, Cryptococcus neoformans
atggcaactcaactccccccgccaaaacggcagaagtcggcctattcgcagtcccaaatgcccaaggtcgaagaaccggcgaaagacgtcccctcaattgtggtccagttcaaatcggcagaagatggatccagtcttggtcctgcgattaacttgcctgctgataccgccagggatgctttacagatgcttgtaaacaaacttaggggagaggatgaggatcctctgccgtacgcttttcatctcgttcctaaagaaccttcaacttcaacgactccggcatctgctcgagtgcaaatcaataactctattcaatccgatgctcttgaagctaaaaaaagtactttctctccggaagacgtgtttgaactatggtgtgagccgcaagcggtttttagggttagaagtgttgggaggtgcagtgctacattgactggccattcatcgccaatcctttgctgtgctcagtctcctactggtcggtatgctgccacaggttcgggggacgccaactgtcgagtgtgggacatggagactgagacccccaagtggactctctcgggccacaagggttgggttctgtgtgtggaatgggattctcgggagaagatccttgctacaggtggacatgacggacaagtcaggctctggaatccagccaccggccaaccttatggtgcgccccttttgggccataccaaatgggttactgcgctggctttcgagcctctccatctcgtccctaagagctcatctgggccacgtattgcatctgcttcaaaagatggcactgttcgagtttggaatacgtctaccagaaagttggagtttgtacttaccggccatgccgctagtgtcaactgcttaagatggggaggtgaaaatgtcatatacacaggaagcagtgacagaactgtcaaggtttggagcggcgttgatggcaagcttattaggacactctcagaacatgcccattgggttaatactatggcactcagcacagattttgtcctgaggactggtccattcgatcacactggcaagacccctaccaatgacgaagaagtcaagaaacgggcggaggagcggtacaaatccgttatcaccaaccagcccgagactctcattactggttctgacgaccacaccctttacctttggcctgaccaggcttcctcgtccttctcatccacttccacacccaagaaacctctcgctcggctgacaggtcatcaaaaacaagttaatcatgttgcattctctcctgacggccgaatgattgccagtgcaggttttgataatgccgtcaaactttgggaaggaaggacagggaagtttattgcaagtcttagaggacatgtggcagcggtatacagggttgcttggtcggcggactcgaggatgttggttagtgcaagcaaggacacaacgctcaaattgtggaacctcaaaacttacaagatccgcgtcgaccttcccggccatactgacgaagtgtactgtgtggactttgttgcagacaaggtcgtcagtggtggcagagataagaccgtgaagatgttagttcgccagtag

SEQ ID NO: 2222 - DNA, 1620 bp, Cryptococcus neoformans
atgattcctcggtcagcgcgtctaaggcttccatcgtcttccctctccgcccatgccagacggcggctctacacccccgtccgtccccctctcaaactcgcaattattggcgctggcccctcaggtttctataccgcctctcgtatcctctctttgattccccctacatccccagaaggtcaaaaacttgaggttcatatgtatgaaaggcttccgacgccttatgggctggtaagatatggtgtcgctccagatcatccagaggtcaagaattgccaacacaaattcgatgagctggcccatgattctagattcaaatattttggaaacaccctcgttacatctcatccttcttcgactttttcaccttcgccaaccgaaaaagcaccatcatacacttaccctcatgccctccgcttgtcatttagcgacatcatgccgtattattctaccctcattctgacctacggtgcctcactttcaaatcctctcaatgctgtcccggggagtagctccaacagcgacccattgacaggtgtttacccagccttggccctcgtaagctggtacaactcccatccagcttacgctgacttaccggtcaacttggaaaaagtcaagcaagtcagtgttgtcgggcaggggaacgttgcattggacgtagcgagaatgttgctcaagcctgtatcttctttggcagagactgatttgtctgaagaggtactcgacgttctttcggaatctagtgtcgagaaagtgcgggtggtggggaggcgaggtccaggccaagtagctttcacaacgaaagagtttagggaaatgctctctatccccgatgttggatacgcaggtatcgaccctgctttaatggaatacgcaaaggagaatattgaaaagggtaacggagagagaatgaagaagaggttattacagttgatggacaagacgaagcaacaagatggtagaaagatatttgagctcgatttcctcaagggtcctaaatctttcctcccctctacagagaacgcaagtcaagtaggcgaggtggaatggaatcttaaccaattagaaatgagacccgcaaccgagtcccagccagcgagtatagtcgcaaaatcaacaggcgagactatcaggaccccagcagacatggtggtcgagtctgtagggtacagatccgagcctcttactggacctggccatgagtgggatctaccgtttgacattgctcggggtagagtgagcaatcttaatgggcgtgtgatcgcagaagaaggtggtttcgtacctggagtatacgctgctggctgggccgcccgcggtcctgtcggtgtcatcgccaccactatgaacgatgcctacgctctcgcttccactatccttgacgatatatacgcacccaccacatcttcccccgctgcttgcatgctcaactctcggccttatgctggtatccccgaaaaagtccagaacgcggccatggaaggaaagattgtggttgatttggaaggatgggcgaagattgataaggctgaggttgagagggccaagcggatggggagtgggaaggaaagagaaaagtttaggagggttgaagatatgttggcggttttgcagtag

SEQ ID NO: 2223 - DNA, 1563 bp, Cryptococcus neoformans
atgaacgcggcgaagggtatcctcggattatttgacggccccgttgcggacgccgtgcgaactagtttgggacccaagggaatggacaagatgatccaaaccagtaatggagaagtcgtcatcaccaacgacggcgctaccatcctcaagcacatggcggtactccaccctgctgcacgaatgcttgttgagctctcacaagctcaggatatcgaggccggagatggtaccaccagtgttgtcgttcttgccggaagtctgctatccgccgccgaacagttacttgctcaaggtatccatcccacaacggtagcccagtctttccagaacgccgcttccaaggctgtcgagttcctcgagggtataagcatgcctgttgatctgaacgaccgagagagcttgttgcgtgctgcccgaacaagtctgaattccaagatcgtttcccaatactcctcaacccttgcacccatcgccgtatccgccgtcacccgactcgtcacctccgcctcttccaatgtcgacttgagagatatcagaatagtgaagaaagtcggcgggacgattgaagacactgagctggttgagggtttggcgctgaaccaaatcgcgatgactaacgccggaggacctacaaggatggagaaggctaagattggtttgattcaattccagcttagtagtcctaagcccgacatggacaatcagatcgtagttaacgactaccgtcagatggacaagatcttgaaggaagagcgacaatatctcctcaacctctgcaagcgtatcaagaagactggctgtaacgttctcctcattcaaaaatctatcctccgtgacgccgtcaccgatctttctcttcacttccttgccaagctcaagatcctcgtcatcaaggatatcgagagagacgaaatcgactttattgccaagtccaccggtgccaagcccgtggccgacattgaggcctttaccgaggacaagctcggttctgcagagttggtggaggaaactaaccagtccggcgccaaggtcgttaaggtcactggtgttaagaacgcgggtaagaccgtgagtgttgtttgcacgggtgcgaatgagcttgtgcttgaggagagtgaaaggagtttgcacgatgctttgtgtgttgtaagatgtcttgtgaagaagcgtgcgttgattgccggcggtggtgctcctgaaatccatgtctctcgtcttctgacagattattcccacactctcaagggtaaagaggcttattgcttccaagcattcgccgaagctctcgaagtcatccctaccacccttgctgaaaacgccggtcttaaccccattgccatcgtcacggagctgagaaacaagcacgctcttggtgaccggaatgcaggtattaatgtgaagaagggaattatcagtaacattttggaggagaacgtggttcaacctttgctggtgtctacgagtgctttggagttggcgactgagacggtggcgttgattttgaggattgacgatattcaggtgcgtattttactccttggcagcccgccattgctgacatag

SEQ ID NO: 2224 - DNA, 1584 bp, Cryptococcus neoformans
atgcacaggccagcccgcggcgccctccgcatctccacacgcctggccactcggcctcctcttcccgcccttatacactcccgcccgtactcactctccgccacagagcccccgccaaacctacagccacatcagtatccagccttcgaacgcctgtcaaccgcactctctctgaagcagccatgtttcggtgccagaggagacgaagtagagcttctgaccgggccagaagtcttctacagccggctcttggacatgatcaaaggggcgaagaggagaatattgatcagcagtctgtatatcggagccgaggagggggagctcgttgaggccatacaagccgctctgacgaacaatccacagctgcgtgtagtctttattctcgattaccatcgcgcgactcgtctagctacttcgaccaacttacccccttctaccgcccatcttttattacctcttgtggaacgtttttctgaccgatgcgaagtgtggttgtttagaagtccaaagttgaaaggattaatggagaagatcgtacctgccagatatgacgagggatggggcacatggcatggcaagtggtatggtgcagacgatgaagtgattataagtggagccaacctcggtcgctcgtattttacgaatagacaagatagatatatccatttccgatccaatcccagcctgttatcttatctctcatcattaactcgacttttcacacaatactcttatcttctgcatcattcaccaccacctcacatccccccctacaataccgtcccgctcccttcaccagagaatccggacaattcgaaactccctagctcttcagtttcaatccgcccgccctttcaaaactcttggcgtgcctccaattctgccaggtcgcgtcgagtagatgttgatacttggttttggcctgtccttcaagctggagtgttgggtatcaaagaagaggagagggccatggcagaagtttggaaggctgtaagggaaagtcacgagggagagcagaacgaatccagaaaggtagaagtagatttgacaagtggatattttggtctgtacaagaagtacaagcaattggtggtggaatcaccggcatccgttaagatcattgcagcgtcaccaaaggcgaacggattttacggatccaaaggattctccaggctcatcccagaaggctacactttgctggaaaccaggtttcatcgagatactgtcagggctggtagaacttggaacgttgagaagggcaccggcgtgagattaaaagagtgggagagagaaggatggacatatcattcaaaagggctttgggtttcaccgcccgactcaaaaccattcctcacatttgtcggctcgtcgaatctttccacacgatcactcacactcgacactgagctgtccatggtgatgatgacttcttcccctactttgcggcgggctcttgataccgagctgaagcacttggacgagtatgcgacgcaggtaggggaagagacttggaagctggaggagcggcaggtcagttggttggcttggcttttggtggcacttggagtcgaggggatgttataa

SEQ ID NO: 2225 - DNA, 1476 bp, Cryptococcus neoformans
  misc_feature (394)..(396): n=g, a, t or c
atgtctcggttcaagatttcaggtgcactgtgggacagtatccaccactactcgtctttcccacagactggagtttccctccaacaaatgattcatttcggccataaccccacacctggtacactcctcaaagcttctcagtttctttctgaagaactgcctatcagattatcacatagggtggtagaactcaacgctttaccagatggactcgccaagatgcctagtatcaacaaggtgaaggagtggtatgctcagagctttgaggagcttgtgacatttccaaaacctagattcaaaccagaacttgaaggtatacttaatagtgagcccagcaatttccgcttcccacttatctccctgacagttctacctgaaacagccgaacaaaacnnngctttccccagctccactcctaacccttctctggacccacttatggacgaaggcccagtcggttccggtcttctggtcgagagacataaccagggaaacgggaacgggaatgggaatgggaatataagcgggaatggaaatggcaacggaaacggcaacgggcagaggttacggatacccatggaacgtcggtactattcaccgccacctgcaactctcgtctacccaccggaagtacatgagtacaacgaaaggtttactcatttacttgagaatatcaagaaaagacacgacccaactgtcactaccgttgctcaaggtgtattggagtggaagaggaagcgaaagaccgggaggataggagtaccgattcaggagtggttggataggttctacatgagccgaattggtattcgatttttgatagggcagcgtgagtctatgacaatgcctcgagaaaaacgtgatcgactgatcttggaacctatagacgttgcgctcaacactttacaacctcatcctgattatgtagggataatttgcactcgagccaacgtgcatgatatatgtcatgaagcaattgaaaacgcccgatatgtctgtgaagagcattacggcctcttcaaaggcccgcctatccagcttctttgccctaaagacctcacatttccatatgtgcccgggcacctctcccacatctgctttgaactcttgaaaaactcccttcgtgcggttgtagagcgttttggagtggagaacgaggaagctttccccccgatcaaggtagttgtagttgagggtagggaggatatcaccatcaagatttcggatgaaggtggggggattcccaggagtgcgattcccatgatctggacgtacctctatactacaatgagtgacgaaggtttagaagcgaccattgaacagtcagatttcaaagcccccatggctggtttcggctacgggcttcccctcgcaaggctgtacgctagattctttggtggcgatctcagattgatctctatggacgggtacgggacggacgtgtatatttctctcaacaagttgtcctctaggtaa

SEQ ID NO: 2226 - DNA, 1551 bp, Cryptococcus neoformans
atgactctggatgaagaacgaatagtcggtgaattggctcgagtaaacggagaagcgggggtggaggcagggggtgatgaaataggcatgggagaagtgaggtcccgcgccttaccgcctaaaagcatttacgcgtgcctagaggagtttacagagtcgcgtaggacgacgcgaggggcgtgcgcggtgctgttgaccgttggacactacactgtccttcgcagtgctctctttatctttctcctttgcttcctgctctcccctcctccaccttccaccctttgcatttgtgcaaacgactctaatcaccttcatcatgtcagatggtatcggtatcgcaaagtacgtcaatctctgctcaatctacgcccatcaacgcttcgcttcattactgacaacttcgcaaggcataagatcacaagccagagaggcgcgcatttcactatcatggttgttgggcaatctggcttgggaaaaacgacgcttataaacaccctctttgcgactgaaatttgctcgccgaggaattatcgccaacggtgggtttcatttgaactggataaaaccacagaggttgaaattttaaaggctgaccttgaggaacgcggtttcaatattaaattaacagtcattgacactcccggatttggcgactatgtcaataatcgcgactcatggggccctattgttgactttattgacgaccagcacgaatcttatatgcgccaggagcaacagcctttcagaaaagagaagcaggacttgcggatccatgcgtgtctgtatttcatcaaaccgactggtaccacgttgaaaccacttgatgtggagatcatgaagaagcttggtacacgagtaaacctgatcccagtcatcgccaaggcagatactatgtctccagaagatctccacaacttcaaaaccattgtccgtgaaacgatcattgcacaaaatatctctgtctacactccacctgtagacctcgacgacgaagctgcggctgagcatgcgcgagcaatgcaagctgttatgcctttctcaatcattggtagtactcaggatgtcactacgcctgacggaagggtggtcaagggtagagagtatttgtggggtgtagccgaagttgagaatgaagaccactgcgactttaaaaagctccgatcccttcttatccgcacatatatgcttgacttgattacctccacggaagaaaagcactatgaagcctaccgcctcgcacaaatggaaactcgcaaatttggcgaaccaaaggttaaaaagttggataacccaaagtaccgcgaggaagaggaaacattgaggaagaggtttactgaacaggtcaagttggaggaggccagattcagacaatgggagcaacatcttattgccgagagagatcgtttgaacaaggatctcgagcaagcccacagcgctatcaaagctcttgaggtaggtgtaatttcgccctctctctgcggaaaaatggctgacatgttcaggctgaactggaccaggtggctgcctaccatcgtcaaggggggactgtag

SEQ ID NO: 2227 - DNA, 1491 bp, Cryptococcus neoformans
  misc_feature (1081)..(1083): n=g, a, t or c
atgtacaaaaccaccactgccaccatccttacccttatcctctctcttcttgtcctcgaacagctcgtctacagggccaagaaagcacacttgcccggtgccaaatggaccattcccgtcattggcaagtttgccgactctttgaaccccaccttggccaactacaaggcccagtggaactctggacctttgagcgctgtttccgtgttcaacattttcatcgtcatcggttcctccaacgaaatggccaggaagatcctcaactcccccaaccacgctgaaccctgtctcgtcgcttctgccaagaaggtcttgttgcctgagaactgggtctttttgcacggcaaagtccatgccgactacaggaaggcattgaacgttctcttcaccaagcaggctctcagtatctacctccccattcaggagaagatctaccgaagctatttcaacaagtggatgtctgatcccgcccctgctcagcagtacatgatgaagatgcgagacctcaacatggacacttctctttccgtgttcatcggcccttatctcactgaggcccagaagcaagagatcaacgacaagtactggcttatcaccatctctctcgagctcgtcaacttccccctcgctatccctggtaccaaagtttacaacgctatccaggctagaaagattgtcatgaagtatctctccgctgccagtgctgccagtaagatcaggatggaggacgacgacgccgagcccgagtgtcttttggaccactgggtgcgagccatgatccttgcccgtcgtgccaaggatgacggtgagcagaccagactcctttctcgagagtacagcgaccacgaaattgccatggttctcttgtcgttccttttcgcctctcaggacgccatgtcttccgctctcgtctacacattccagcttactgccgaccaccccgaagttcttgagaaggttagggaggagcagtacagggttaggggtaacgacctcgagaggcccttgactttggacatgcttgacgacatggtttacacccgagctactatcaaggaagttttgaggtttaggcctcccnnnatcatggttccctacatgaccaccaagcccttccccgtctcccccgaatacaccgcgcccaagaactctatgatcatccctgccttttggaactctttacacgacgagacctgttaccctgagcccgatcgattccttcccgaacgatggctcccccaggccgacggttcagcccctatcgccgactccaagccccaaaactacctcgtctggggtagcggtccgcacaagtgtatcggtggccagtacgcttctatgcatttggcggccactttgggtacggcgagtgttttgatggattggaagcacgagaggaccgagttgagtgatgaagtacaggtcattgcggctatcttccccaaggaccactgtctccttaaattcacccctcgagctcccccttcataa

SEQ ID NO: 2228 - DNA, 1506 bp, Cryptococcus neoformans
atggagtccaggaacctcgaccacaggcgtaacaacttcaagggaaagacccagttctcagcacaagagctccgtcgccgaagggaggaacagcaggttgaaatccgtcgtcaaaagcgagaagaaaaccttgccaagcgacgaaaccttcaatctgtcattaccgacgaaggcatcgaatccgacgatgaggcttccatggattctacagcccttggtgatgtccttcctggaatgcttcaagctgtttacagcgaggatgccaatgcccagctggatgctaccatgaagttcagaaaacttctttcaaaggaaaaaaatccaccgattgacaaagtcattcaatgcggcgtcgtgccccgattcgtcgagtttttatccagcactaactcaatgctccaatttgaggctgcttgggctttgaccaacatcgcctctggaacttctgaacacactcaagtagttattggtgcaggcgctgtaccgcacttcatcgccctcctttcttccagtgttctcgatgtgagggagcaagcggtttgggctcttggtaacattgcgggtgactctcctaaatgtcgagattacgttcttggggagggtgctcttcagcctttgcttggcctcctcaacgagaaccacaagctgtcgatgattaggaacgccacttggactctgagtaatttctgtcgaggcaagaatccccagcccgaatgggagctcatttcgcctgccctcactgttcttaccaagctcatctactctctcgatgatgaggttctaattgatgcttgttgggccatttcgtatctttcagacggctccaacgataagatacaggctgttatcgaaagcggcgtttgcaggcgattagtggacctcctcatgcatccttctaccgcggtccaaactcctgctctccgatctgtcggcaacattgtcactggtgacgacctccaaactcaggtcgtcatctcttccggtgcgcttcccgctcttttgagcttgttatcttctcccaaagaaggcatcaggaaagaggcttgttggacaatctccaacatcaccgcgggttctcccatgcagatccaagccatcatcgatgctaacattgtccctcccctcatcaacatcctcgccaacgctgatttcaaaaccaagaaggaagcatgttgggccatctccaatgccacttctggtggtctccaggaacctaaccaaatccgatacctcgtctctcagggttgcatcaagcccatgtgtgaccttcttacttctatggacaacaaaataattcaagttgcccttgacggtcttgagaacatcctcaaggttggagaggttgataaggatgcggcgggtcccggtggcgtgaacaagtatgcgcagtacattgaagaggctggcggtatggttgctattcacaacttgcaacatcatgagaacttggaaatctacaaaaaatgcttctacatcatggacagtacgtttaaacatcagtcttaa

SEQ ID NO: 2229 - DNA, 1590 bp, Cryptococcus neoformans
atggataaaggagggaacggactgttggtaccttccagtcctctgagcccatctggagtgtcgccctcttcatctccccagcccagccagtcattcacgaaacaagccaactccaacactgttgtcgagaccttgaacattcacctgccccagttacccccttcccatacccgattaacgtcgaaaccaagagtcgaattgtcctcgacaattacagctgcagactacaactaccgttacatgtttgagaaactttccgagcgtagtgaggccctagacgactcgatcgatgaatatgccgatgctattaaggatgcctacggtctttcggaacttggcgatccccatttcgtctctgatgagagcatctacaccgtcgggagggtattatccaacacaacgtcttccaaaagcgataagactgctttgaaaaactctttccaccttcagtcatctcgactaatcggtgcaggaaagcgaatagctctcgaacttcccgaggagaaactcaaggttagaggaggagcgcctggcgtcaagggcttttcgttgtatagcggttgtttggtttgtgtcaagggaaggaatggaggcgggtcaaaattcgttgtcgaagaggttctcttgttaccacctagtcttcttccccagacacccgcctctgaacttatcgatttccagtatggagataaactcaaaggggagcctttgtctttaatggtagccgcaggaccttacactctcaatgaaaatctcctcttcgaaccgtttgaaactcttgtggataaagtgctggaagaccggccggatgttcttattcttcttggaccattcgtcgactcgcaacacccgattatcaaatcctgcgctgtgaccgaaacgccgcaggaaatcttccgcaaacagatttccagccgtctccaaaaggttgtcactcagagcccgtccactgtcatcatcctcataccgagtgtgcgtgacgtcgtatcacatcacatggctttcccccaatcgatgttggagaaggaataccttgggttgcccaagaaagtcaaagctctccctaatccttgcacattctcagtcaacgaggtcaccatctctctatcctctgtcgacatcctcttccacctaggtcaagcccatgcacctataagagctcaagaggccgatgcagatccaggcatgagcggcagccccgcccctgaccctctagcgaaccatatccgacaggtgcttggccagcgtagcttctatcctctattccctccacaagaagatgtcgctggtgaagtaaatttagatgtcacgcactaccctttgctcaagatggaccaagcacctgatatcctcatattgccaagtaggctcaacaaatttgttaaaattgttgattctactctcgtcatcaatccctcccatatcgcgcgcgctcgagctaccggacactatgctaaggttatcattcatcctacagcccgagaagttttggaagaatctatggaagttgacggagaggaatcattatgcgaacatcaggtttacgaaagagcacgatcagagatttgggatatgataccatgcatttga

SEQ ID NO: 2230 - DNA, 1521 bp, Cryptococcus neoformans
atgtcaggctccctcacccacgtcctcttcgaggggccttctggctatggcctcttcactgtcaacttgcaggaggaagttgctgccaagtcaaaacaacttcaagactccatcgccgacctcggcatcttctctcgaatggtccagctcgcttccttcgccccttttacttcggccgcccaagctctcgagaacgcgaacgatgtctccgaaggcgtcctcaaccctcaccttcaggctcttctaaatttgatcgtccccgacgctgctggcaagggcaacaagaagcaatccggtgttcttctcggtgtggccgagagaggtttggctggtgccattcaaggcgagatgggtatcccctgtgacacttccgaacgagccttggaactcatccgaggtgttcgattacatcaggaaaagattttgatcaagggagggatgcaaaagggagatgtaaccgttgcccagcttggtttgggtcactcttactctcgaggcaaggtgaagttcaacgtcaaccgatccgacaacatgattatccaagccatttctctctccgaccaactcgacaaagatctcaacactttcttcatgcgagtgcgagaatggtacggctggcacttccctgagctttacaagctcgttcccgacgcccaccaatatgcccttcttgctgtccttatcggtgatcgcacagctctttccgaggactctcttgaggaaatgcaggaaattcttgacgacgacgagactcgtgcgaagaatgtcctcgatgccgcgagggccagtatgggtagtgacatcagcgaagttgacttgatcaacatcagcaacttcgcggagagggttgtcaagcttgctgagtataggaagagcttgaggagatacctcactgagaagatgaatgtcgttgcccccaacttgtcagctttgatcggtgagaccatcgctgccagactcatcagccatgccggttccctcaccaacttggccaagtaccccgcttctactgtccaaatcctcggcgccgaaaaggctcttttccgagctctcaagaccaagggtaacacccccaaatacggtctcatctaccactctacttttatcggccgtgccggtgctaagcacaagggtcggatttctcgattccttgccaacaaatgttctatcgcttgtcgtattgactgtttcaccgacgttcctaccaacaaattcggagaggctttacgtgcacaggtcgaggaacgtttgaacttcttcgaaactggtgctcccgtcggcaaaaactctgacgccatccagaaggccttggccgctaaggaggaaaagaagaagcgcaagtccgaagccatggacgtggatgtgaaggaggatgaggaggagaagaaggagaagaagagcaagaaggagaaggaggaaaagaaggagaagaaggaaaagaaggagaagaaagagaagaaggagaaagagggaagggaagagaaggagggaaagaaggagaagaagaagaaggaagtctga

SEQ ID NO: 2231 - DNA, 1557 bp, Cryptococcus neoformans
atggcggcgatttcgatttcggcgcgttggatgttggtgggtcgggtgaagaggacgaggaggaggatgatggagattgggatgtggacgatgaggattgggagctggccaatggaggtatattttaccaagcaatacaatcgagttcgacagcaacacgctgctacatccggctctgccccgttacctgcgcgaaacctctcccagcaaacaaaatcaaaattgtccaaatccaacccgacggccgggtctggcgtggtgacaaatccgaaagcagcgcaggataaacatgataaagataaaagcgatagggctactcaggagcaagtgcttgatagccgtactcgactggttttggcgggactagtcaatcggggggttatcggtatgattgaaaggtgtatcagtacaggtaaagaggcaaacgtctactattcatccccaggccgtgccgtcaaaatctaccgaacctccatcctcgtcttccgtgctcgacaaaactacattgtcggcgaacaacgtttccggggggaatacacttcctctcgaaatccgcgaaagatgattcgtgtctgggccgaaaaggagttgcgaaacctgagacggttggttcaaggaggtgtgcgtgcaccggtggtacatgaatgtaaggagaatgtgctcgtcatggatttcttgggcaagggcgaggtagcgtcgcctcgtttgaaagacgcagagattcccgaggacaggttacccgatctgtacgcagaaatggttatcgcgacccgaagaatgtaccagcactgccacctcgtccacgccgatttgagtgaatacaacattctgctacacgacaaccacctatacatcatcgacgtctcccaatctgtcgaacacgaccacccccgcgcattcgatttcctccgttccgacatctccaacattgaagaattcttctcccgccgtggggtcgccacgctcggaatccggaaatcatgggaattcatcgtcaccgagaacattggtctttcccccactggctccgcctcgtcatcattggagatggagaagggcgacgacggcgaaaggcgcttggtgggtgttttggaagaatggttaaaggaaccgtcagacaagacggacgatgcggtctttatggagtcgtatatcccgagaacgttggcggaggtgtatgatcccgagagggatgtggatgtgctcaagagtgggggaggggacgagttgatttatgcgggtgtgacgggtttaaagttggctcatgagagtgcgaatgccaaggtgaaggaaaaggaaaaggagaaacagagtgcgagtgcgggtgcgggtgcgggtgcggatgatgcgaacaagcgtgaagaggtggatgcggatgagaatgtagaaaagggtgaaagagtaaaaggtaaatgtaaggatgagggcaaaaacgacaagacatcgaaaagcgagcggaaaaaggcagtcaaggaagaacagagggagaaacgaaagaccaagatgccaaaagctgaaaagcaaaagttgataaaaaagtctgcttctcggcactag

SEQ ID NO: 2232 - DNA, 1623 bp, Cryptococcus neoformans
atggtgatcctcccaccaccacaaacaagcggaagcgcacctcaaacgcccacgacgaagccccccgcaaagcgtgtcccagaggcctcctcttcaaaagtcactctcgacgactcgcagcccgcccctgccacttcctcagatgctgtactcggcgcctggtccgctcctggtactgactacgagcgggtccccttctccaccctcaacctttctccacctaccactgctgccatcgagcgtatgggtttcgagactatgacagaagtccaggccaggactatccctcctctgttggccggtaaggatgtgttgggagcagcaaggactggcagcggaaaaaccatggcattcctgattcccagcgtggagcttttgagcactttaagattcaagcccggaactggtgtcattattatctctcctacgagagaactcgctcttcaaatcttcggtgttgccaaggagctcatgcagggccattcacaaacattcggtgttcttatgggtggtgcgaaccgtaaggcagaggccgacaagctggtcaagggcgtcaacctcatcgttgctactcccggtagactccttgatcatttgcagaacacaaaaggatttgttttcaagaatctcaaggctcttgtaattgacgaggctgatcgaatcttggaaatcggtttcgaagaagaaatgaaacagattatcaaactccttccttccgaaaaccgtcaatcaatgcttttctccgctactcagaccaccaaagtcactgatctcgcccgtatctcgcttcgcccaggtcctctctacatcaatgtagatgaaaccaaggaagcctctactgcagacatgcttgaacagggctacgtcgtatgcgaatccgatcagagattcatgctccttttcacattcctcaagaagaatttaaagaagaaggttattgtcttcttctccagctgtaactctgtcaagtaccatgccgaacttttaaattacattgatgttcctgtcttggaccttcatggtaaacaaaaacaacagaagcgtacaaacactttctttgaattcatcaatgcccctgctggaattctcctctgtaccgacgtcgctgcacgtggtctcgacattcccaaggttgactggatcatccagtttgatccgcctgatgatccccgagattacatccaccgtgtcggccgtactgcccgtgcaggcaaatccggaaagtctctccttttccttttgcctagcgagcttggcttccttcgtttcctcaaggttgccaaagttcctctcaacgaataccaattccctcagaaaaaggttgcagatgtgcagaagcagctggagagcctgatttctaagaaccattacctcaatacctcggcgagggatggatacaggtcttaccttcaagcctatgcgtcttactctctcaaaaagatctttgacgtcaacaagctcgacctcgccaaggttggcaaggcatttggtttcgctgtgcctccaaaggtcaacatctccgtcggatccgtcaaggcgaagaagagcagagatgaggatgaaagtagtgatgatgatggtcaacccaaaaaggcctactatagaaacaggggcagaaaataa

SEQ ID NO: 2233 - DNA, 1605 bp, Cryptococcus neoformans
atgaacgtattcgcggacgaggtgagtaaggctactgaagaaaggggcgaaaacgctcgtctctcatccttcgttggtgccatggccttgggtgacttggtcaaatcaactttgggacctaaaggcatgaacaaaatcttacaatccgcttctaacagtaccatcaccgtcaccaacgatggtgccacaattctcaaatcgatccatcttgacaatcccgccgccaaaatccttgtcaacatttccaaagttcaagatgatgaagtcggcgacggcaccacctctgtctgtgtacttgcttctgaactcttgcgtgaagcggaaaagctggtcactgttcaaaaaattcaccctcaaacagttgccgaaggctaccgaattgccagtagggcggccctccaagcgctcgaggcgtctgctgtagacaacaagaacgacaacgccaagttcagggaggatctgttcaacattgctagaacaactttgagtagtaaggtactggcacaggacaaagattactttgcaaatctcgccgtggatgctgtgttgaggttgaagggatctacagatttggagcatatccaaattatcaagaaagtcggagggaagttgacagactcttatttggatgagggattcatcctagacaagactatcgctaccaattctcctaagcgaatagaaaatgccaagattttgatcgccaacacctctatggacactgataagatcaaaatttttggtgcgagagtgcgagtagacggtactgggaagcttgccgagctcgagcgtgccgaaaaggagaagatgaaagccaaggtccaggccattgcatcccatggtatcacctgtttcgttaatcgacagcttatctacaactaccctgaatctcttcttgctgaggccggtatcatgtccattgagcacgcggactttgaaggtgtcgagagattggcccttgtcactggaggtgacattgcctccacttttgatgcccccgaaaaggtcaaaattggtcgatgtgacgttatcgaggagattatgattggtgaggacaaactcatcaaattctctggtgttgccgccggtgaggcctgtactgtcgtccttcgtggcgccacctcgcaaatggtcgaggaagccgagcgatctttgcatgatgccctttctgtcctttctcaaactgtcaaggagactcgtgtcacccttggtggtggttgtgctgagatgctcatgtcttgccaggttgaagaggctgctcggactgtcaagggtaagaaagcccttgcagtcgaagggttcgccagggctctcaggcagatgcctaccattattgccgacaacggtggttatgactcaagtgatttggtgaccaagttaagagccgcgcactatgagggacagtctgatgctggcttggatatggacaagggcgaaattgggtctatgagacaattgggaatcacagaatctttcaagttgaagaagcaggttgtagtcagtgcgagcgaggcagcggagatgattttgcgtgtggataacatcctgcgcagtgccccaagagcgagaggctcactagagtggataggaaattgtgcacaatag

SEQ ID NO: 2234 - DNA, 1638 bp, Cryptococcus neoformans
atgtctggaacacttatttcttccctcgtatgggttcccagaggccgtgcggcggaaaaacccaaaaagtatcagctcgatgaagacgagatcgaacgtgtaggcaagctcggcgggcctggtgttctcgaacagctcaagagtgagatagcggctgtggaggatggtgaagagatggaaggcggtgatgaggaagaggactgggaggacgaggatgacgaagagggtaatgaggaggcagacaatgacgatgacgacgagaagatggatgaagacaaggagcccgagaagccatttgaccctaatgacctatcagctttcaagatggacgaatacgatgaagaggagtccaaaggcgttggtaagtatttatcgtatgatgaagaagaaaacgaggacgaggagcttgttctcctccccacagattctatgattatctctgcccgaacgacctccgacctctcatccctcgatttccatgtctacgccgatgtcgacgagaacctttatgcgcaccatgaccttatgcttcctgccttccccttgtgtgtggaatggctagacttctctcctggtcctgatgccaacggtgctgctcccgaaggcgctaagcccggtaactacgtcgctgttggctctttcgaccccagtattgaaatatgggatgccgacctcgttgatggtctttatccccgggctatcctcggcccatcaccttcgcttgaaaagccagaggccaaaccccttggtaccggtaagaagaagcgaaaacaaatggtacagcctgctgccaacgccgactaccatgtccagcccgtgctttctctttcctggacacccaatcaccgaaacctgctcctttccggttctgccgacggtactatcaaactttgggatttgactcgtgaatcacccatgggtgctatgcgcagctgggacaaggtccatggtggtgaaaaggttcaggctgtggagtggaacaggagcaccgtcggcggtttggacaaggtctgcctgagtgcaggttatgacaggacggtcaaggtttgggatgggcgagcggtggacgaagctatcggattgcaagtcgctagtgacattgagtgtgtcagatgggacccatgggagccttactctttctacgtttctttggagaatggtctcattctctcttacgactctcgatcctctggcttccttactaccgctcaacctaaattcaccctctctgcgcacgatggtcctgcttctgctcttgacatcaatccccacatccgcgggtgtatccttactgcgggcatggacaaaactgtcaaaatttggaacgtccaagacgaggaatctgaaggtattccccgccgcaagagggaaatcaatcttgccacctcacgagaccttggccttggtagggtcttcgccgcccgatggtcacctgatcccgagacaccacttacagttgcggcagccggtagcaaagcgactttgcaagtgtgggacgtggcctccaaccccggagcaagaaaagcgttcggtgagaggctgagaagacatgggcgggagttaggtgagatcaagaagggtggcggtattgtggctgttgacggaggtgaagaggaagaatctgagggagaagagtag

SEQ ID NO: 2235 - DNA, 1629 bp, Cryptococcus neoformans
atggtggcaatggagtacaccccagatgcagcggggcaggagagctacattctatgtgccgactgtgggacagtcatctcaagtgccaacggcgctggactttgtaagaaattatctgcttgcgactggtacagtgttggttgtttgagaaatactgtggatattaccgagggcatccccaaagaagccacactcaacttttgtcgaggatgtgaaaagtttttgtcgccacccaatacctggattgccgttcagccggaatctcgagagttgcttgctatctgtcttaaaaaaatcgcccggcctttgatgaaggttcgactcatcgacgcatctttcatctggaccgaaccccactcccgacgtatcaaactcaagattacaattcaaaaagaagttctcgcccatactgtcttgcaacaaactttcgagcttactctcgttgttcacaccgggcaatgtccttcgtgtacaaggttagcagcaaaaaatacctggaaagccagtgtacaagttcgacagaaggtcacgcacaagagaacctttttgtggttggaacagttgatcttgaagcacaatgcccataaggacacaatcaatattgcggagaagagggacggcttggatttcttctattccgagaggaacaatgccatcaagatgtgtgaattccttgctggtgtcgtccctgttagagtcaaatcgtctgagcagcttatttcatccgatactcattccaacacttccaactacaagtttacttattccgtcgagattgtccctgtctgtaaggatgatttggtctgcttacccaagtcacttgctcgtgcttggggcaacatttctccgcttactatttgctcccgtgtgggcaacactatccacttgcttgacccaatgactcttcagcaaactgatgtagctgcccctgtctattggcgccagcctttcgactccctcaccaccgttgcggaccttgttgaattcattgtgcttgacgttgagccttcagggccagtccgaggcaaatatgtgcttgccgatgcacaggttacccggtccagttcgacaggtaataatgccgatgacgatggaatgggcgacgatggtatctaccacactaggactcatttgggcggtatcctgcaacccggagacactgtcctcggttatcaccttaccaacgccaatttcaactctgattcctttgaagcgcttgaaagcggtagaatccctgatgttatactcgtcaagaagacttaccccaacaggcgcaagaaatccaggcccagaaattggaagcttcgttccatcgcgaaggaagcggaggatgtgcaggatggtaccgtcggtcgaggtgccctgggaaggcgaggaggtgtggaccaaaagaacgtcgaaagagactacgaactattcttgcgagacctggaagaggacaaagagatgcgtgccgtcatcaatctttacaaggcagatgcgccagaggaaggagaagacgaggctatggccgccgtgggagaagaggatgaagatgacgaggaagaggatttccctgaaatcgatatggacgagttgttggagaactttgaagagcttgacatggatgacggtgcagaggttctgtaa

SEQ ID NO: 2236 - DNA, 1569 bp, Cryptococcus neoformans
atggtagtggaaaaaaaaaaaaaaagttctagtgggtgcctggcggacgcactgatcgatcgtccgacttttgttcttttccccaaaacaactgagcgcgcaggaatttgtcaaaaacattccttgtttcttcttcttttccgcatcctgctctatagcactttacactccttacccgctcccataatccccattccaccgaaaatgtccaactttgacatccccgctaggcccagcaacgtcggtatcctcggcatggagatgtacttccccaagaggtgcatttctgaggaacagctcgaggagtttgacggcgttgccaagggaaagtacactattggtctgggtatgggccacatggctttcactgacgacaaggaggacatcaactctgtcgccttgaccgtcgtttcttctcttcttaaaaaatacaatgtcgaccccaggtctatcggtcgcttggacgttggtaccgagacccttatcgacaagtccaagtctaccaagactcttctcatgaacctcttcgccgagtctggtaacactgacattgagggtattgattccaagaacgcgtgctacggctctaccgccgcccttttcaacgctgtcaactggattcagtctgaaagctgggacggaaggaatgctattgtcatgtgtggcgacattgccatttacaaggagggaagtgctaggcctgtgggtggcatgggtgcttgtgccatgttgatcggtcccgatgcgcctttggtggttgagcccgtccacggtacttacatggccaacacctgggacttttacaagcccgacctttccgcggaataccccaccgttgacgggcccttaaccattgcggcatacctcggtgcccttgacaacgcctactctacttacgtccagaaggctgaggcttcccaggctcacggtatcgccaagtttgactatgtctgcttgcacagcccttacggcaagcttgtccagaagggtcacgcccgtatgttctacaacgactacctccgaaacccctctcatcccgctttcgccaacgtccctgaggacgtcaagtcccttgacaagactaagacctataccgacaaggtcattgagaagacttttattggtatcgctggcgaccattataagtctgctgttatccctggcaaggactgtgtctctcgatgcggtaacatgtacactgcttctctttacggtgccctcgcctctgtcgtctcttccgctcctgaaggtatcgagattggcaagcgaatcggcatgtacgcctttggttctggttgtgccgcttctttctacgttctcaaggtcaacggttctaccaaggaaattgcggacaagttgaacttgaaggcgagattggctgctatggacgtcaggccttgtcaggaatatgttgatgctctcaagctccgagaggagaaccacaacgctgtcaagtacgctcctcaaggctctcttgacaacatctggcctggtgcctactacctcgagggtgttgacgatctctaccgacgaacttaccttcaaaagcctgaatctgcccaagtatag

SEQ ID NO: 2237 - DNA, 1731 bp, Cryptococcus neoformans
atggacgctcaagaggtcgatgaagatgatgaagagtacaagaagtttttgctggaatttggtggcggtgaagaggaagtaaggaagatccttggtatgggtgatcagcctgccatcctcaaggtcttggagagtgaaggaggagaagatgaggaggagaaggctgcggtaagcaagatcgagaaggaggaattggaaaggcagaagcaagaaaaggaggcgaagaaggccaaggacgatgatgatttcctgatgaactacatcctcaaccgtggctggattgaccgatccgaaaaacatgtccctacgtacgacgaagtcgtcggaccgtccaccgaagttgctgaagaagctgctgcccagaccaagtctaccaaactcaaatctagccatccttggggagagcttgatgaagaatccgattttgaagatcgtgccgaggagtttgagactgaatacaatttccgattcgaagagcccggatcctcgactattgccactcaccctcgtgacattccttctcttgttcgtagggccgacgatactcgaaagtccaagcgagctagacgagcagagaggaaggccgctgagaaggctgccaaggaggaggagattaagagagaaaagggcaagaagagaagagagatggagaagagaatgaatattttgaaacatgacctggagaaggaaggcttcaaggatctggaatggggcaagctcgaaaaggtgttagatggagagtgggacgaaaatgtctgggaaaagattgttggtggtatgttgagcaagggtgatgagcaggagaagcccacatgggatgacgaactcggggatgccgagtacgacgaagaggagggagagggagatttccagtacgagtttgctgaaggcgagggtgagggtgaagatatggatgtcgacgaggacgaaggacctatcaacatggatgccgattttatcgacgaagaaccctccaagaaatccaaaaagaaagacaagaagaagaagaacaagaacaaggaacgctctccctctcctttgtctgaagatgaagagaaccagctctctattcccgagaaagctcatgctctcaaagaagctgtcgaatcttacaatgcgctcgcccacgaagacatcatcgaggacatgccgactcgtttcaaatacactccatcagcacctgcttcctttggtctcacgcctgtggagattctattggccaccgatgacgagctcaacaagttggttactatgaagggtattgcgccttacagaaaaggtggtatcggaattcagggtaaaggcttgggcaagagggtgagggaattgaaggacaagctgcgagagaggagatggggggaggaaccgtctcagactaagagcagagaagagaagaaggaaaagaagagaaagagggacgatggcgaggaacgcggacaagacgaaaggcgcgggaagaagagtgagggtgaggccacggagaagagcgaaaaggtgagaaacgggaagcgactgggaaagaaggaacgtatgagacttcaaaaggccgccgaggctgctggtgccgctcctgctgctgctggcgagcctgagagtgcacctgcggagaagaagagaacagtcgaatcaggtgaaatgccagctgatgccccggctgcgaatggagaggagggagctgataaaaagaagcgccgaaagaagaagaagagtaaggcggacggtgaagcttga

SEQ ID NO: 2238 - DNA, 1683 bp, Cryptococcus neoformans
  misc_feature (940)..(942): n=g, a, t or c
atggcaaagatgtcttgtccgtacgtacgtacgggcaactggcgcaacttttgggtggaggcacgaggtaattacgtaaacaaattgccgtttgcggagtcaggtgccacgcaacgccccccgcccgctctttgctctcttgactctccacccgcttccatccacttcatcttccacatcccttttccctcggtctctatcttctcttgcaccttccacgatgggctgtaccacatccccttgacagtccgtttccttgagctcgtccgacctttcatgagcatcctcccagaggtcactgctccggaaaagaaggtcgttttcaaccacaagatcgcctggacagccgtcaccctcctcatcttcctcgtctgctcacaagttccgctctacggcatcatgtcctccgactcctccgatcctctttactggctccgtgctatcctcgcttccaacaggggtaccttgatggagctcggtatcactcctattgttacttctggcatgatcatgcagctcctcgcgggtgctcagttgattgatgtcgactttagcctcaaggacgaccgtgccttgttcggtgctgcccaaaagttgttcgccatgattatctcccttggacaagctaccgtttacgtcttgactggtctttacggctccccctcctctctcggcgcgggtgtctgtcttctccttatccttcagctcgtttctgcctccctcatcgtcatcctcctcgatgagctcctcaccaagggctacggtcttggttccggtatctctcttttcatcgctaccaacatttgcgagtctatcgtttggaaggccttttctcccaacactgtcaacaccggtcgtggaccggaattcgaaggtgccatcatcgccctcatccatcttttgttcacttggaacgacaagactcgcgccctcaaggaannnttctaccgcgatcgtcttccgaacattatgaatctcctcgcgaccgtcgctgtctttgctgccgtgatttaccttcaaggtttccgaatcgagatccccatcaagagctccaagatgaggggccagaggggcacttatcccgtcaagcttttctacacttccaacatgcctatcatgctccagagcgctttgaccagcaatgtcttcctcgttagtcagatgcttgccggtcgattccctgacaacttgcttgtccgtcttttgggcgtttgggagcccatggagaacaaccctactcaactgggcgccgtctccggtatcgcctactacatgtccgctcctcactctctcacctctgcccttaaggaccccttccacaccgtcatctacatcgccttcatcgtcaccgcgtgcgccctcttctctaagacctggatcgaagtctccggctccggccctcgagatgtggccaagcagttgaaggaccagaatatgactcttgcaggacacagagatgcgtctatttacaaggagttgaagaggattatcccgactgctgcggcgtttggaggtgcgactcttggcttgttgagtgtggtggcggatatgatgggtgctttgggaagtggaactggtattttgatggccactactattatctacggatgtgagtctttgattttttcacatcgcttactttctttgtgttgctggcttgctgaccagacgttttctacgtag

SEQ ID NO: 2239 - DNA, 1476 bp, Cryptococcus neoformans
atgtccacctcacaccttcctcaccacgcacaggagcaaaagattcgccacgaagatgagtctgaattcgcccttccagcgcgccgctcctcttctatccgcgatcaattagcagcatggcacgccaacagaggggacaggtcctttttgagatgagtgtcccagttgatctgtccgcaggggtggctcgcatggacaattgatggttacgactttttctgtgtttccctcacccttgactccttagcagagcaattcgatgtctctcccagctccattactactgccatcactcttacccttctatttcgttcattgggtgccgttatcattggtctttgtgccgaccgttatggacgaaagtggaccttggttttcaactgccttttgatcatggtattcgagcttggatctgggtttgtcaacacgtaccagcaattcttggccgtcaggagtttgttcggtattgctatgggcggtatctgggggtgtgctgcagccactggtcttgagaatgtgcctcctattgccagaggcttgtgcagtggtattctccagcagggttactcctgtggctaccttctcgctgcaggtatgttcatcaatctgactgtcgttcagcagagcaagtacggttggcgagcgatctatttcttcggtgccggtttctctctgctagccgctattgtcagggcttgtctcccggaatcccgacaattcattgtcgctcgagaagaagccaaggcgaagggtatttccagcaaacaggcctctaagaattttatccgagaattgggcaacatgttcagaactaactgtaagattttccaagaaaactggagggaaggatctgataatcagaacttcttctcccacggtagtcaggacctttacccgacttaccttaagaccactaaaggtctttccagttctctcgcctccaaggctactatcatctctaactgtggcgctatcgtcggtggtactattgctggtcacgtctctcaatttgtaggcaggcggttcgcaatcttggtgtgttgtatttacacggtaagtgcacacttgcttcatttactgttcgctaatacagaccgtctggtctcgcagatcatggcggctgacagtatctccttccccagcttcattcaaagtgcttggggtgttgtccctgtttacctcggcgaaattgctcctccagctttccgtgctctcttcggtggtctctgctaccaacttggtaacatggcctctgcaggttctgctcaaatcgaagccgatgctggtaaatccctcaagctggccggtaccgacatcccagactacgctgctatcaacggtatcctcatcggtgctgtcattgcctttggtatcattgtcgttttcctcggtcccgagggacggatcccatttcgaaaaggccaaggtcgctatcgagcgaggcgggggcgaagttgctcctaccgagttgtttga

SEQ ID NO: 2240 - DNA, 1533 bp, Cryptococcus neoformans
atgattcccatgatattatacgcttcagaaactggcaatgctcaagatacagcggagcgcgtggcccgcgctttcagagcaaacggcagagctgtgacctgtctcccaatggaccagttccccatttcagcccttccacatacctatcttctgatactcctcacctcgacccacggaagaggagatccacccccggctatgctccctctttggacagctttgttgcggtcatcattaccggaggacattctggaggatgtacacttcgctctttttggacttggggatagcagttacgagcgcttctgttacgctgggaagatgttgctgcgaaggatggagcaattgggggctacaaagatgggtgaaccagcttggggggatgagagatcaccaaatggtattgaggacgcctttttgccatggctccagcaaactttagacctctatttgccttatctgccgttaatatctccaactcccaaaattattgaatccactgttttacctccgccaatatacaagatttctcccgcttccacttcgaaatccgtggaacacgatctatcagataaagcttcaacatctagaaccaagccagatgattgggtctgggctacgctcaaaaagaatattagattaacgagcaaagattggtggcaagatgtaagggagatagagctggagtttgacgaccctgatacgaaaccttacactgccggatcaatatgctccctacaaccccagtccagggaggatgatgtcaacatgtttttggagatgatggagcttacctcacaagcggatgaagtcgtcactatcgagtctcttcttgatgctggcactccgacgactttacgttcgttgctgacaaatcatctcgacatacggtattctccccgtaaaagctttttcgagtggctacgacgtcttagcacgaacgaaatggagagggagcgtctcgatgaatttatatccgatccagatgagatacatacatacgcgactaggccgtcacgcacgatagttgagacactagcagactttaggttcactcgaatacccatgtcgcatatcttggaaatactccctcctcttcgaagacggcaattctcaattgcaagctcatgggaagtgatacagctgctcgtcgctttgatcgagtacaaaaccaatctaaaaatcccaaggaaaggtctttgctcatcatggctcaacggactccctgtgggtacgcgcatcccaatacacatcgcttcaccaactttgttccttcctcaagaccctgaagtacctatcatccttgtcggtccggggacgggtgttgcgcctatgagggctttcgtagagatccgagtcagacaaggtgctgccaaaaatacgtccctttactttggctgtcgatcgtccaccacagattattttttcgaatccgaatgggatgtgcaccgcgaaaagggtgtcaaaatccaagtcgcggcgagtagagaccaggaagaaagaattcgtgcagcatttgataaaaagggataa

SEQ ID NO: 2241 - DNA, 1614 bp, Cryptococcus neoformans
atgtcggcaatcatcccccaggtccagcaactgctgggacaagtggcccaatttttcccaccgtggttcgctgccctccccacctccttgaaagtcgcgatcgccgtcgtcggtatccccgctctcatcattggcttgaacgtttttcagcaactttgtcttccccgtagaaaagatcttcctcctgttgtctttcactacattccctggtttggctcagccgcttactatggtgaagatccctacaagttcttgttcgaatgccgtgacaaatatggagacttattcactttcatccttatgggtcgaaggattaccgtcgcgcttggtcctaagggtaacaacctttctttgggtggaaagatttctcaagtctctgccgaggaagcctacactcacttgactactcccgtctttggcaaaggtgttgtttacgactgccctaacgagatgctcatgcagcagaagaagtttatcaagtccggtcttactaccgagtcccttcaatcgtatcctcctatgatcaccagcgaatgcgaagatttcttcaccaaagaagtcgggatttctccccagaagccttctgctaccctcgacctcctcaaagccatgtccgagctcatcattcttactgcgtctcgtactctccagggaaaggaagttcgtgaatctcttaatggtcagttcgccaagtactacgaggatctcgacggcggtttcactcctctcaactttatgttccccaacttgccccttcccagttacaaaaggcgagatgaggctcagaaggctatgagcgacttttacttgaagatcatggagaacaggaggaagggtgaaagtgaccatgagcacgacatgattgaaaacctccagagctgcaagtaccgaaacggtgtccctctctctgaccgtgacattgcccacatcatgattgctcttcttatggctggccagcacacttcctccgctacttcttcttggactcttctccatcttgctgaccgacccgacgttgtagaggctctttatcaggagcagaaacaaaagctcggtaaccctgacggtactttccgagactacagatacgaggacctcaaggagttgcccatcatggactctatcatccgagaaactctccgaatggtaagtcatcccgacttctccatctatcgaaaagtcctttccgacatccccgtccctcccagtctttccgccccttctgagaacggccagtacatcatccccaagggccactacattatggccgcccctggcgtctcccaaatggaccctcgtatctggcaagacgccaaggtctggaaccctgcccgatggcacgatgaaaagggatttgccgccgccgccatggtccaatacactaaggcggaacaagtcgactatggtttcggttctgtcagcaagggtaccgaatctccttaccagccttttggcgccggtaggcacagatgtgtcggtgaacaatttgcgtacactcagctttcaaccatcttcacctatgttgtgaggaatttcactttgaagcttgctgttcccaagttccccgaaaccaattaccgtgtaagtctttgtgttccactatcattgggatga

SEQ ID NO: 2242 - DNA, 1635 bp, Cryptococcus neoformans
atgacagaaaagcaacagaacagtcagcagccatcccagttggactcaactgcaagtatctcagcactcccgccacaattacagcaacctgccgccgggatcactggagctccaggaaatgcagaagctacaacatctgaaccaccttcaaccaagcgacctcgcaaagccatagagtcctcagagcccttaacagaggtgattcttcgtcggttgacgacgatcaaagagggtgatacagtccttttgcgattgccaagtgaccttgttaaatccgtcgttgtccaaggggacaatcttgttcagctcggtaaatatggagcgtttcccgcctcccaactcattggtttgcattacgacatcacgtatgaaattgtttctagcagtggctctggagccagcactcctcaacctcaatctcttgacttttccacagaagaaactcaaagcaaaaagggcaacaagaagaataaaaacaagggcaaggacactgcagcagatctttcagaaactgaaaagacgacattgtctcatgacgagattgcggaacttcgagcccagggatgcacgccagaagaaattatccaggcgcagatcgcacgacatgagaaatttgggctcaaaacagatttcagcaaagaaaaatggagaagacggaaagaaaaaaagtatctcctttttctattttaccagacagtccaacctctcgctccttctattcctaatgtcctttaccattacaatcttcggtctcctcagtctatccttcatctccgagatgacaccctttcccagttgctcactatggccaatgtccgacctgggggccgttatcttgtcgttgacgacactggcggtttgattactgccgccgtgctggaaagaatgggatccgaaggaagtattctgttattcaatgagagcgacagcccgcctgcctggggcatattgcaaactatgaatttctctgacagggagctggaaccgattaaatggttaaactggttggaagcagaggaagaatatcagaagcctgcccctcctgtccaagccgagcctcccacaaaccctattaaagccgctgccaagcagcgaaaatatgctgctcaggtagccgaactcaataatactcgaaatgagctgcatctaggtggctgggacggcttgatccttgcaacgactcttaatcccatttcggttgtcgcccgactcacaccgtatcttctcggttccgctccaattgtagtctactcaccttactaccaagtcctggctgagctgctcagttggtctaaaaaagatccgaattatcttaatgacaccctcactgagagctgggagaggacatatcaggtattacctggcagaacgcatcctatgatgacaacgagtgccactggcggttacctttggaatgccaccagagtgagtatcgtcataagatatgctgatgacatgctgacaaagactagtcacccttcacagttccaaccagaatcccatcagaggttcaaaagaagaaaaacaggcaaggctccagggaaagagcagctaagcagtgtggctaaagacgaggaagctgtcaatgaaagcttggaaatagatcccgaggagcttgcaaatgaaggagaatag

SEQ ID NO: 2243 - DNA, 1728 bp, Cryptococcus neoformans
atggtgtaatgcaagcgatcatgtcccgtagtcaagatgggcaagctctgtatcgaagtcaatccaaatgacaagaaggcgttcatctctgaagagctctgcataggttgtggtatctgtgtcaagaagtgtcccttcgacgccattcagattcttaaccttcccaccaaccttgaatcccacgtaacccaccgatacgccgccaacgcttttaaactccaccgactccccactcctcgtcccggccaagttctcggtctcgtcggtaccaacggtatcggtaaatctaccgctctcaaaatcatgtctggcaagctcaagcctaacctcggacgatatgacgaccctcccgagtggcaagagatcctaaaacacttccgtggttccgagctccaaaacttcttcactaaggttctcgaggacgatatcaaggctgttaccaagcctcaatatgtcgaccaaatccctagaagtatcaaggtgcccaacatgaccgttggcaagatgtttgaccgacagtccgagttgcctaaccgtgatgggctcgagaaggaccttgaattgaagcacttacagtctcgagaagtctctcaattgtctggtggagagttgcagaggttcgccattggtattgcgagtgtcaggaaggccgatgtctacatgtttgacgagccttcatcctatcttgatatccgacagcgtttggccgccgcccgagtgattcgtggtttggtcaacgctaccaactatgtcattgtcgttgagcacgatttggccactttggactacctttccgacttcatttgcgtgctctacggtgtccccggtacctatggtgtcgttaccatgccttactctgttcgagaaggtattaacatcttccttgacggtatgatccccaccgaaaaccttcgattccgagacgaatctcttactttcaaaatttccgagactgtcgatgagttacaagcacccaagacccgacgataccagtaccccagcatgaccaagactcttggcaacttcaagcttcacgtcgacgagggagagtactctgactctgagatcttggtcatgcttggtgagaatggtatgggtaagacaacgttggtgcagttgttgggtggcaagatggagcctgatgagagtaaggacaaggtctcattgagagtttccatgaaacctcaaactatctcccccaagttccctggttctgtgcgaatgttgttattgaagaggatcaagggagctttcatgcaccctcaatttaactctgacgttatgaagcctatgaaccttgagcccatcatggaccaggacgtccagacattgtctggtggtgagcttcaacgagttgccatctgtctcgtgctcggtgtccctgccgatgtcctccttatcgacgaaccttcggcttacctcgactctgaacaacgtattgtcgcgagcaaggtcatcaagaagtttgtcatgtcttccaagcgaacggctttcattgtcgaacacgatttcatcatggctacttatcttgcggaccgagtcattgtctttgatggtcaacctggtaaagagtcctgggctagaaaacctgagggtctcttgaccggtatgaacaagttcctcaaatctcttgacatcacattccgaagagatcctaccaacttccgaccacgtattaacaagatggactctttgaaggacaaggagcaaaagggtaagtcttgttga

SEQ ID NO: 2244 - DNA, 1551 bp, Cryptococcus neoformans
atggtgttagcagacctcggaacacggctgcacggcgcttggaaccagctttcaaaggcctcagtaattgatgacaaggtcatcgatggtgtccttaaggagctatgtgcagccttgttggaatcagatgtcaatgtcaaactcgtagcctcactgcgaaccaaggttaagaccaagaaaagcctggaagaaagtgaaaaggcaggaggaagggaagccaacaagaagaatgttgtacaaaaagccgtatttgacgagctcgtcgctttggtggatccgggaactgagccttacaaaccggtgaagggaaagaccaatgtcttgatggctgtcggtatccaaggtgctggtaaaactacaacctgtacgaaacttgccgttcactaccaacgaagaggattccgcacttgtcttgtttgtgccgatactttccgtgctggtgcttttgaccagttaaaacaaaatgcaaccaaagccaagatccccttctatggtagctataccgaaacagaccctgtggccattgcctctttgggtgtggagaagtttaggaaagaaaggttcgatgtgatcatcgtcgatacttctggtcgtcacaagcaagagtccgagctgttcgaggagatggtggccattggtgctgccgtcaagccagacatgacattaatggtccttgatgcgtccataggtcaagctgccgaaggccaatctcgtgctttcaaggattctgccgactttggagctatcattgtgactaaactggatggacatgccaagggtggtggtgccatctctgctgtggcggccaccaagacacccattattttccttggtactggtgaacatctcaatgaccttgaacgattcgcgcctcagccatttatttccaagcttttgggcatgggtgatatgcaaggacttgtagagcatatgcaagacatggcccgagcaaaccccgatagacaaaaggatctcgccaaaaagcttgagcaaggcaagttcaccattcgtgactggcgagaacaattgtcaaatatcatgaacatgggttctatctccaagatcgcttccatgattcctggtttgccggcgggtataatggacggtaacgaggaagaggcttctgccaagctcaagcgtctgattttcatcaccgatgccatgcgtgccgacgaattggattctgatggtagcatctttgtgtcctatgataaacaagggaaccccgtcggcctcaacaaacgggcaaagagggtggctaagggaagtggtacaagtctgagggagttggaggacttgctggtgcaggcgagaatgatggctggaatggccaagcaagccggtgatatgatgggtggcatgggcggaatgcctggtatgggaggtgccggcggacctggcggtatggatttgggcaatatgatgaggatgttgggaggaggaggaggaggtggtggtggtggtggcgggatgcccgacatgagccagatgcaggagatgatgaagcatgggcatgggaggtggcggcggtatgggtggtatgcctggtga

SEQ ID NO: 2245 - DNA, 1689 bp, Cryptococcus neoformans
atgcagggaagacttcctcaaatggtgactgacagtcttcgctcttcttcaatagagggcactgatacctcccagggtaccccacaacttctctctaacatttctgcttgcttggctgtcgcccagactattgctacaacgctaggaccgcgaggaatggacaagctcatcgtagacgacagaggtctggctactatctctaatgacggtgcaactattttgaagcttttggatgttgtccatcccgcggcgaggacattggtagacatagcaagagctcaggatgccgaggtgggagacggtaccacaagtgttaccctacttgctgcggagatcttgaaagaagtacgacctttcatcgaggaaggagtctctcctcatgtgatcattaaaggacttcgagaggctaaaactttggctatacaaaagatcaacgagattgctgtgacaatagacaaatctgacccggctgaattccgcgaccttctcatgcaatgtgcggctacttctatgtcttccaaactcatccactcccaaactccctttttctccaacatggttgtcgacgccgttctttctcttgatcaaaatgatctcgacgagtctcttatcggtatcaaaaaggttcctggtggcggtatgcaagattccaaactcatcaagggtgtcgctttcaaaaagacgttttcttacgctggtttcgaacaacagcccaagagtttcaaggaccccaaagttctttgtctgaatgtagagcttgagctcaaagccgagaaggacaacgctgaagtacgagtgaatgaagtctctgagtatcaggctattgtcgatgccgagtggagcatcattttccgcaaactcgaagctatcgtcgctacgggggccaaggtcgtactctccaagcttcctatcggagacttggccactcagtactttgccgaccgtgacattttctgtgccggtcgagttgcggatggtgatctcaagcgtgtcgtccaggccgtcggtggatccatccagtctacatgctctgatattgaacctcatcacttgggtcaatgtggcagttttgaggagaaacagattggtggtgaaaggttcaacttgttcgaaggttgcccccaggccaagacatgtactttgattttaaggggcggtgcggagcaattcattgctgaagtggaaagaagtctgcatgactctattatgattgttaagagagcaatcaagaacaattccgtcgtggccggtggtggtgcttgcgagatggagacatcaaaatatcttcgagctcattctcgaaccatcatgggtaaagcccagctaatcgtgggtgctgtcgccaaggccctggaaatcatccctcgccaaatctgcgacaatgccggtcttgatgctacggatatcctcaataagcttcgtatgcgccatgctcaaggagaaacttgggccggtatcgacgtcgatggtgagggtgtgcaggataacatgaagagttttgtatgggaacctgctttggtcaaaacaaatgccttgagtagtgcaatcgatgcggcttgcttgatactgagtgtcgatgagacggttagaaacccccagagcgaacagcctcaggcggggcctcctatgccgagaggagctgcccagcaggcaatgaggggcaggggtaggggtatgcctcgaagataa

SEQ ID NO: 2246 - DNA, 1620 bp, Cryptococcus neoformans
atgagcttttcaagaattctcgaccatcaccgtattcccaccgcatgccacctggttccggtgagtgaatgtcgtcaacacgccttactgattgccatctttagagtcgcccgtcattttcagcttcgactgggtatgcgaaactctgaaaagcctcggatctcgtttgacggtttcaagagagatgacttggataagatcaagcggactctccaggaatatttcaacatcacgcttgagactagagatacgagtttgaagggatggaactggggtgaggcgcaagtgaaagggagtgatctagtcttccaagttcaaggcaaaaccgcattcgacgttcctctctctcaagtcgccaactccaacattgccggcaagtacgaagtcgcgctcgaattcaaccctccttccaattacaaatttgatcccaaagacctcaataagcgtcctcctgacgaaatggttgagatgcgtttctacattcccggaaagagtatgaaaaaggctggtagcgatgctggtagtggtggcgaggagacggaattggatgaggagggtaatgaagtcagtgccgcggatgcgttccacagtttgatcaaggaaaaggcggacattggagctgtcgtcggggatagcattgtggtgtttgaagactgtctaatcttgacacccaggcaagttctttcacttgctatctcaggccgattctctatcgaagtttacgccgactccatccgactagttggtaaatccaccgaccaccgagtcccatttacttctattcaccggatctttcttcttcccaagcttgacgatttgcacgttcagctcgttcttggtctcgaccctcctattcgacaaggcgctactcgataccccttccttgtcgcacagtggcccaaggatgaggtcgtcaatgcggaactcaatctcacagatgaggagctcgcacaataccctgacttggagaagacttatgaagcgaccaccttccaggtcgtctctcgtgtgctcaaagcattgactggaaagaaggtgaccccccccggaagcttgagaaacgctcaaggcctcaacggtatcagagctaacgtgaaggccgtccaaggagaactctacttcctcgaaaaaggcctgattttcatctccaaacaacccattcttatcgatttctccaaaaccgatagtatttcattttcccgtgtcggcggcggtgtcgcttccgcccgaacattcgacatgcgcgtcgtatccaagaccggaggcgctgaccatgtgttcagcgctatcaacaagcaagaagtcggaccgatcagctcgtttttgcagtcgaagaatatccgactcaagaatgagatggaggaggcgattgttgatatcgatgagccgtttagcgacgacgatgaggagatggaaaatgaatcttctgacggcggctcaccaagtgaatctgactctgacgacgattctggcatggcttcagatgcaagcgaccctatgatggaagaactgcggaagaagactcaagcgaagcgaacaaaggcaaaggagacaagtgggagtggaagtgaggatgagaagccgaagaagaagaaggcgaagaaggatgacgatgaatag

SEQ ID NO: 2247 - DNA, 1611 bp, Cryptococcus neoformans
atgaggcatgtaaatatgcaatcacacacatatctcttgtccgtgtacgatcgagtatcactgcccagaaaccaaatgccttaccggggtttcgggactatcttcgcgtggcggattgttatgacgctgtcgcgtcttcggtcaagatggaacgcaggcgtccatattcctggctctcatctccagtcttacttcctcttgcagcacgaacttgcgttcaacatgtctctcaacactagaaagcaggaaagagatttcacggccgaggtggaagcgctccaggctgaggcggagcagctagcaaagaatggcaagcttgaagaagccattgagaagattacagttttagaaaagcagacccgtaatgcgtccgacatgtcctccacctctactctcctcgttcttatcgcccgtttatgctgggaagccaacaatctggaccagctgaataatcaactggccctcatgtctaagaaacacggacaactgaaagaacctgtcgtgagaatggtagatgaagcaatggcgtggttgcctgcgttaaaggagcagaaagaacagggcaattttcggagtggaaaggatagatggttggagctggttaagacattgagagatatcacggagggcaagatcttcttggaacttcaaagggcaaggttgactgacaaatccaaggccgagcctgttactgctaaagaacatcttgacgtcgcggcggacctcctgtctgacttacaagttgagacctattcaactatggataagcgtgaaaaaaccgagttcatcctggaacaaatgagattagagagtatgagaggcaattgggtgcgagtcagagttggatcgaggaagatcaaccggtattctcatcacagtttagagaatatccatttaacaattgctcaggatattaagttgcgatattatgatttgatggtgcaattggctttgcaagacgacgaatatcttgaagcttgtcaagcttatcaagaagtatgggatacagaagaagttaagaatgactcagcgaaagaactcagtgtcatcgagaatatcatgatttacgttgttcttgcatcctataacaacgagcaatccgacatgctccataagttgtatgccaacactgctctacaaaaagctcctcttcatttgtacgtttttctcgatctcctaaaatgctttgttacgaaggaactgatgcgctggtccggaattgaaggcatctatggccctgctcttcgtcagtctcctatttttgcacccgggtcaacactaggcaagaagattggcttgcacaagcggattatcgaacataacattcgggttatagcttcatattacacccgcataaccatacagcggctcacagaacttctcgacctccccttactcaccaccgaacggacactctgcaagctcgtgactgacaagagtgtttatgcccgaattgatcgcccggcgggtattgtcgatttcagaaagaagagaaatgtgaacgatgtactgaatgcatggagcggagatgtcagcaaggtgcttgacttggtggagaagactagtcatctggtctccaaggagtacgcaatgcatggcagtcaagggtaa

SEQ ID NO: 2248 - DNA, 1767 bp, Cryptococcus neoformans
atggcctccacaatgtaccagcgcgaccccagggcggtgagtcattctccatgggactctttcatgaaagctgacaatcgtgctagggcctttttttgggaggtaccagaacaagtggtgccgaaacagtacaaggaaggatcagggtgtaatagagagctggaactgatgaggtggatagtgatggcctgtcaaactgtttccaacatcctcaagtcatctttgggacctgtcggtcttgacaagatgcttgttgacaatgtcggagatgtcactatcaccaacgatggtgctaccattctctcgctcttggaagttgcccaccctgctgcccgggtacttgtttctcttgcaactcagcaagataaagaagtcggtgacggtaccacctctgtcgttctcctcgcttctgagcttttgagaagggccaatgagcttgtgcggaataagatccatcccaccactgtgatcaccggttacagacttgcgtgcaaggaggcgtgcagatacatggccgaacagctttcaaccaaggttgacaagctcggcaaggactctttgatcaacgttgccaagacttctatgagctctaagatcctcggtgccgacgatgactttttcgcacctcttgctgtcgacgctatgcttgccgtcaagaccatcaacgccaagggtgaaaagaagtaccctgtcaaggctgtcaacgttctcaaggcccacggaaagtctgccagggaaagtttcatggttaagggttacgctttgaactgtactgtcgcttctcacgctatgaagacccgtatcactggcgcaaaaattgcctgtctcgacatgaacctcgccaagcaacgtatgcaccttggtgttcacattacaattgacgaccccgatcagcttgaagccattcgagcgcgtgaatccgagatcaccctcgaacgagtccgcaagattctcgctgctggcgcgaacgttgttctcactaccaaaggtatcgacgacctcgtgttaaaggagtttgttgaggctggtgcgatggctgttaggcgatgcaggaaggaggacttgagaaggattgccaaggccactggcgccactctcatctcatctcttgccaatcttgaaggcgatgagacctttgaagcttcaagcttgggttacgccgaagaggttgttcaggagaggattagcgacgatgagttgattcttgtcaagggtacaaagatcgtcaattctagttccgttatcttgcgaggtgccaacgactttatgcttgacgagatggagaggtctctgcacgatgcgttgtccattgtcaagagaacgttggagagtggaagtgtggttccgggtggtggtgctgttgagactgccttgtccatctatctcgaaaatttcgccactactttgggctctcgagaacaacttgccatcgccgaattcgccgctgccctcctcaccatccctaagactctttccatcaatgccgccaaggactctaccgacctcgtcgccaagctccgtgcataccataacgctgcccagaacgcccctctgaacgatcccaagagagggctcatgtattatggtctcgaccttatcaacggtgaagtgattgacaacaggcaagccggcgttttggagcccacgatgagtaagattaagagtttgaagtccgcgttggaggcggcgacgagtttgttgaggatagacgatagtatacaggttgcgccggagcagaaggaggaggttgaccctcacgggcattag

SEQ ID NO: 2249 - DNA, 1686 bp, Cryptococcus neoformans
atgtccagcatagaactcataaacccaaaagctgagagtttgaggaggacgcaggctctccaggtcaacactgcgggcgccgttggtcttgcgaatgtcgtcaagtccaatctcggtcctagaggaacgatcaaaatgttggtggacggctctggacaaattaagatgaccaaggacggtaaagtccttctgtccgagatgcagatccagaaccccactgccgctatgattgctcgaaccgctgtggcgcaggatgagcaatgcggcgatggcacaacgtcggttgttcttctcgtcggagaacttttgaagcaggcggacagatacatccaggaaggtgttcacccacgagtgattggagatggtttcgacattgctaagaaggaagcgttgaacttccttgacactttcaagcaaacccctaaactcgaccgtgccaacctcatttctgttgcccacacctcccttgctacgaagctccacgccaaactcgctcaaaaactctccgcggatgttgtcgatgctgtccttgccatccagcctcctgaagtcaccgaacctggagcttatcgagaacccattgacctgcatatgattgaagtgatgaagatgcaacacaagaccgacacagacacccagttgattaggggattggttatggaccatggtgctagacatcccgacatgcccaagcgggtggagaacgcctacatcttgacgctcaatgtttcccttgagtacgagaagaccgaggtcaactcaggcttcttctattcctcagcggagcaaagggaaaagctcgttgagtctgaaagacgattcgttgactctaagcttaagaaaattgttgagctcaagaacgctgtgtgtgacgtggctgttggatcaaatgagaaacccaagaatttcgttgtgatcaaccaaaagggtatcgatccgatgagcttggatgtcctcgctaagaacggtattctcgctttaaggcgtgcgaagagaaggaacatggagcgattacaatttgcatgtggcggtgtcgctcaaaattccgtcgaggatttgaccccagatgtccttggttgggccggtcttgtctacgagcacactctaggtgaagaaaagtatacttttgtggaggatgtgaaggaaccaaagtccgtcaccatgctcattaaaggtcccaacgcgcataccatgactcagattcaagatgctcttcgagacggtttccgttccatcaagaatgccatcgaagacaactctgttattccaggtgcgggtgcgttcgagctcgcctgctcagcgcatctcaattcttccttaaagactctcgccaagggccgagccaagctgggtgtccaggctttcgctgaggctatgcttgtaatccctaagactcttgccgcgaacggaggatacgacgtgcaggatgccatcgtgggtttgcaacaagagttggaggaggccggtgaggatggtgtcgtgggtttggatttgaagagtggagagccaatggaccctgttgtcgaaggtgtatgggataactacagagtgaagaggcaaatgttgcacggagcggcgactattgctgtgaacttgttgaatgtcgacgaagtgcttagggcaggaagatcatcgggttgcattgttcttcgttacattccactctcactgaccattcgtatgtag

SEQ ID NO: 2250 - DNA, 1860 bp, Cryptococcus neoformans
atggctgctaccgataaacctcagaaacctgcctacgttcctcctcacttgaggaaccgtgccgctccccccgccgctgtccctcctgcggcccccgctgcctacaggccatctcccaccggtctccccactcccgccaccacccctcctaccaggcatattgtgcctgccgccgttgccgaggacgatgtcggtggatggggtgcacaacctcgtgttaggaaaacttttgagcatggtgcccctcccggatttggtagctggaagaatggccagcacgtcgtcggtgctaggaacacgaggatggagaaggaaatgtatggtgaagtgggagacggattgcaccaggccaccggtatcaactttgataagtacgccgatatccccgtcgaagtcagcggtaagggcgtccccgaacctgtgactgaatttaccaacccccctatcaaccccgtccttctcgagaacgtcaagtacgctcgatacgcaacccctacccctgttcaaaagtactccatccctatcgttgccgatggccgtgatcttatggcttgtgcccaaaccggttccggtaaaactggtggtttccttttccccatcctttcagctctcttcacctacggtccttccactcctcccgttgagcaggacactggctacggctacaggaggacaaaaaaggtctaccccaccgcccttgttcttgcccctacccgagaacttgtctctcagattcacgaagaagctcgtaaattcgcctaccgatcttgggttcgacctgctgtcgtttacggtggtgccgacattggctcccaaatgcgtgccctcgaccgaggatgtgaccttctttccgctacccctggtcgtcttgtcgacttgattgagcgaggcaagatcagtcttgctaacgtcaagtacctcgttcttgacgaagccgaccgaatgctcgacatgggtttcgagcctcagattagaagaatcgttgatgaggaagacatgcccggcgtccttgagcgtcagacgctcatgttctccgccaccttccctcgagagatccagaaccttgctcgatctttcctcaaggagtacatcttcttgaccgtcggtcgagtcggttctacttccgaaaacattacccagcgtgttgagtatgtcgatgaccaggacaagcgctctctgcttctcgacttgctccttgccgaacaatctggcggtttgatacttgtctttgtcgagacgaagcgcatggccgacactctctgtgacttcctctgttctcgtcgacacaatgccacctctatccacggtgaccgtacccagcgcgaacgtgaagctgctctctacgcattcaaatccggtcgagcccccattctcgttgctaccgccgtcgcggctcgaggtctcgatattcccaatgtcactcacgtcatcctttacgatcttcccaacgatgttgccgagtacactcaccgtatcggccgaactggtcgtgcaggaaacgtcggaacttcgactgccttcttcaaccgtggaaacaccaacattggtaaagatttgattgagctcctcaaagaggcgaaccaggaagtacctcagtggcttgttgaaatctcctctgagaggagttatggtggtggtggtggtggtgggtacaaaggaagtcgaggacgaagcactggtggcggcggcggtgcgaggttgggcggacgagatatgcgtcaaggtggcggtgggtacggcggtggtggaaggacttctgggtatggtgggggttacggtggtggtggcggtggtgccggatggggtagtggcggtgggttcccacccgcgggtggcgactctggcgcgagctggtggtaa

SEQ ID NO: 2251 - DNA, 1674 bp, Cryptococcus neoformans
atgcctcgcccatcgttcggctcacgtcaattcattgcaacagcaacacgtatatcctcacgcaaaatgaccactcagccacgatacaccgtccctctcaaggaaccccatccagacaaccacagcctgcacacggaatcaacaacgaccatctttctcccaaatgaaggcgctttcctcaacccagtccagcattacaaccgagatatgagtgtggcggtaatcagagcatggaatgaaatgaggaaagaagaacttgaagaaaacaaattccgggcgccttccatcaacattcttgaagctcttgctgccaccggtcttcggtccatccgatacgccaaagaaattcccaatgttaagtatgtccttgccaacgacctttcaccttctgcttgtgaagctatgaggagaaacgtagaatttaacggttgtagaggacgagtcaagattaacgagggcgatgcttgtgctttcatgtataaccaccgttccgccgttggaccctctgcccgtgttgacgttgtcgacctcgacccctatggtactgctgctcccttcctcgatgccgccattggctgtatttccgatggtggtctcctcgccatcacatgtaccgacctcgccgtgcttgctggtcaacagtaccccgaaaagtgttactccaactatggaggcacaaacgttcacgccgagtacactcatgaagctgcgttgaggcttgtgatgcactctctggcgagcgttgcggcacgatacgggagatacatcacacctcttttgtcattttcaatcgatttctatgtgagattgtttgtaaggatcgacaccaggccggaacaggtcaaacaccttgctagccaaactggtgtagttttcacttgccaatactgtcaaacagctgtcaaccaaccgttcggcaaggtcatctctaaagaaaccgccaagggcaaggagatgaccgcatttaagactgttgcagggcccacggccggtaacgggtctgcttgtgaggaatgcggagggactatgcaccttggtggacctctttggcttggtcccttgcaagataacgagttcgccaagcgtgtcatcaaggaaattgagagcacagaaaaggaatacaagacgtacaacaggatgttgggaatgttgacgttggcttctcaagaattgccccatccttggttcttcactgccaaccgaatcgccaaatctgtacacgccccttccttacctatgaacaagattctctccgccttgcttaacgcaggttataaaatctcccgttcccactgttcccctggtgccgtcaagactgatgcgcctcgttcattcatctacgacatcatgcgagaagaagcaaaggaaaatcctgtgaggatggataaaattgcagagggatcgcccgctaggaagatcttggcaaagcctatcactcacacgatcgacttcactccccaccctgacgcttctctggaacgacaaggtaaagaaacattttaccaagtcaaccccttaccgaattggggtcccgcgccgagggcaaagagccttggtgagaagaggaaggcggaagtggatgctgagaatggtgaaggggatgccgtagtaggaggggagggtgtgaagagaataaaagttgtggtggaagaggaggaaatgatgaatgcttag

SEQ ID NO: 2252 - DNA, 1821 bp, Cryptococcus neoformans
atgcccccggatacgataaccatctcatctctcacacttcacctgccacacggcctaggtccgtccgcctttcacctcaccccgtcccctccctgtccagcccttctctccctcacaattcacctcgtccccaactctgtctctgccaccgccgcaggggactccatggcaggccttggagtaaattactcttcagtatccaaagcggtatatgcccttgcgaatgatgccgaaaaggtatggagcggaccatgggagctgatgcgcgctgtcagtgccatcccgctagggtttgacgatgtccagagcgtagatatccgtctaggccttccaaaggcactgctacatgctctagaagctgtgtacaaggcgtcctatgccaaaaatggcgaagaaaccggcaggagttgtacaatccgggacttgaaggtagtgtgtattgtgggactacatgagcatgagagaaaagagaaacagaggctggagttggatgtcaaggtcagaggaggcgactggaatgtttggggacacaagggatttgcagatgaaatatacgactttgtgagcaactcggcttacggaactatcgaatcgctgaaccacgaactgggacaacatcttctgaagagtcgctatctgggggatcccactcaatctcatctagaaattacaatcaggaaaccatcggcaatacctttcgctactccaagcatcacgattcatcgctcacaggccgactatgcgccaagtctaccatctggcaccgcttgcaatgcaccacgcgaagcccttgagagggtattcgtggctgtcggttccaatatcggtgacagagtagccaacatcacaagagccgtaagccttttagaggaggctggatgtaaattgctaggtactagtagactgtacgagagtgaaccgatgtatgtggaagatcaggaccggttcatcaatggtgtcattgaggtaagttactgcggacctacaccacttgagcccttggaagttcttcgattgctcaaacacatagagaaagctgtcgggcgtacaaagacattcacgaatggtcctcgagtcatcgatctagatttggtcttttatggtcaccgagtggttaaaattggcaacgaaactgatgaggaagatgaacatgggatcaaatggttagaatgccctcacaaaagactacgtgagcgagagtttgttttgaggccgctggccgacattgatccagagttcacgcaccctgcgcttcgccgatccgtcggccagcttctcgccagtcttccaaccacgtttccgccatctctttcacctataatccccttacactctcacgcttctccccttaggctttccatccctgcctccccatacatcatggccatcttcaatacaacaccagattcattttctgatggcgatcccgccaggacgaatgtcgaatatgcgctcgccgcttgcgaaaagctgttaaaaggacctgagcctccggctattctcgacattgggggaatgtccacgcgcccaggttctgaaccctgttcagaggaagacgagctcagtcgcgttatcccacttgtcaaagccatccgatcatcaagtgatcccatcgttgcatcgattccgatatcaattgatacttatcgaccgtcagttgccaaggctgctgttgaagctggtgcgtccatcattaacgacgtccgtggtggacaagagccaggaatgttgcgggtcatggcagaagcagacgttcctgttgttctgatgcattctaggggtgattcaaaaaccatgtgcagcggatgtccaggattatga

SEQ ID NO: 2253 - DNA, 1824 bp, Cryptococcus neoformans
  misc_feature (568)..(570): n=g, a, t or c
atgctaaccacagctgcaggggcccggctcttttcgaccaccatccccaagcgagcagatgtcaccctcactatcgacggcaaggaggtttctgtccccgccggcaccgcattgatccaggcgtgtgagaaagccggtgctaccgttcccagattctgttaccacgaccgattagcaattgctggtaactgccgaatgtgcttggtcgaggttgagagatcaccaaaacccgtcgcttcgtgtgctatgcccgtcatgcccggctccaaagttttcaccaacactccccttgtccacaaagcccgtgaaggtgtcatggaattcctccttgccaaccacccgctcgactgccctatctgtgaccaaggtggcgagtgtgatcttcaggatcagtctatgcgatatggctccgaccgtgggcgtttccacgaaattaccggaaagagggcggtggagaacaaggacctcggaccaattgtcaagacctcgatgaacaggtgtattcagtgtacccgatgtgttaggttcgccaacgacgttgctggtgttgaggactttggtactaccnnngccgaggaaacgatctccaaattggcatgtacattgagaagactatggattctgaaatgtccggtaacattatcgacctttgtcccgtcggcgcccacttccaagccttatgccttccaggctcgaccttgggaattgaagaagacggagagtgttgacgttttggacgctgtcggtgccaacattcgaattgactctcgtggtatcgaggtcatgcgaattcaacccaagatcaacgacgagatcaacgaggagtggatcagtgacaagactcgatacgcctacgatggtttgaagtaccagcgattgaccactccccttgtcagggagggtaaccgatttgttcccgcgggctgggagcaggctttggagactatccgacatggtcttatcaactctggtgcgaagggtgacgagatcaaggctgtggccggtcacctggccgataccgaagcccttgtcgctctcaaggacttgatgaacagattaggctccgagaaccttgccctcgaccagaagcttggtgatcttccttctgtcgccaacgttgacattcgatccaactacctcttcaacactggaattgagaacgttgaggatgccgacgctgtccttttcatcggtaccaaccctcgacatgaggctgccaccatcaactctaggttccgaaagtcattcctttaccgaggtgctgactttgccgtcattggtgagaagtttgactcaattttcgagtacgaccatcttggtacctctgccaaggacgtcgctgccttctttggcggcaaggatgctgggtctttcagcaagatgtggaaggacgccaagaagcctttgattgtcgttggtagcgctgttttggagaccaaggatggtgccgctgtcttggctgaagtcagcaagcacgtcttggccaactctgacaagtttttgactcctgaatggaccggttactccgttctccagcgagtgagtctgctttttaaatccacgtcaaatgcaaaagcaagggaaaagaaactaacgaacctcaggctgtttcccgagccgctgcctatgacattggtttcaccccttccgcctctgcttcctctacaaagcctaaattcgtctacctccttaatgccgacgagatcgaccctgcttctatccctgaagacgcgttcgttgtctaccaaggccaccacggtgactttggtgctcaattcgccgatgtctgcttgccagctgccgcttacacagagaagagtatga

SEQ ID NO: 2254 - DNA, 1794 bp, Cryptococcus neoformans
atggctcgtggtgtcggcggcaggagccgccagccgcgtttgttcgcgcggtctgcacggcggtggtggtcgagcgacattttgggcaagaaacaccataaccttccaacgtcttcctacccttttatatctcgtacactgaagaacaggatgtctctaaaagtacccaaggcctcaggccccgacctttttaagtctggctacaagcacttgtctggactggaggaggccgtcttgaggaacatagcggctgttggagagctcagcgagatagtgaggacctcattcggacccaatggtcggaacaaacttattatcaaccacctgggacgactttttgtcacttctgatgctgccaccattatccgagaaattgaggttgcccatcctgctgcgaagcttctggtcatggctagtactgctcaggaggccgagatgggggacgcgaccaatctagtgctcatctttgccggagagctgctcaaacgatcggaacatcttttgactatgggtttgcacccgtcagacgtcattcaggggtacgagatggccttggcaaagggacgagaagagctcgaaactctggtggccgcacagatcacatcttctcccttgccaactgtcgacaaccttgcagctgcagtttcttcttcccttgcctccaagcaacctggatgtgaagtactgctctcaaaacttgtcgccgaggctgccttggcagtcatgcctaaaaaccctaaggatttcaacgtcgattcagtgcgagtagtcaaggttctgggcggcggtcttgaggcgagcagagtcgttcggggcatggtgttcggtagagaacctgaaggtattgtgaagaatgctaccagggctaaggtagcagtatatacttgtggtctggatatctcccagactgagactaagggtactgttctgctcaaaaaggcggaagatctgttgaacttctcacgcggtgaagagaaacaactcgagggctacttcaaagaaattgccgactccggtgtcaagctcatcattgctggttccggtattggtgaccttgccttacattatctcaatcgaatgggcattgcggtcatcaaggttctttccaaattcgaccttcgacgattatgtcgggttgttggtgccactcctcttgcccggctcggtgctcccacccccgaggaagctggtatggttgatgtatttgagaccatcgagatcggtggggaccgtgtcactgtccttcgacaggaagaaggggagaagactcgaactgccactatcgttcttcgtggtgccactgccaactaccttgatgacctcgaacgatctcttgacgacggtattaataccatccgcatccttttccgcgacggccggcttgtgcctggggccggtgccagcgaaattgaactcgctcgacgtatttccgcctacggtggcaaaactgccggcctcgctcaacattctatcaagcgatgggccgaagcatgtgaagttgttcctcgtacattggctgagaacgcgggcctcaactcggaagatgtcgtcagttctctctacaaagcgcatgccgacggacaggtcgatgcgggtgtggacattgagagcgagaaggagggtgtcagatctactaaggacatgggggttttcgacccatatgctgctaaagactgggcattgaagctggcgaccgaggcagctatcagtgttctcagagtggacagtatcattgtggccaagcaagcaggaatagctccccctaagcagcagggacactgggatgatgattag

SEQ ID NO: 2255 - DNA, 1848 bp, Cryptococcus neoformans
atgtccgactgctacaaggaccctcgagttgaggttcacattggtgacggtttcaagttccttcccgagcacaagaacgaatacgacgttattatcaccgactcctctgaccctgtcggtcccgccgaggcgcttttccagcctccttacttccaactcctcaaggaagctcttaaggagggtggttccgtctctacccaggctgagtgcttgtggattcaccttcccctcatcaagaccctcaaggaaacttgctccaagctcttccctgtcgtcaagtacggcttcaccaccatccccacctaccccgctggtcagattggtatcatggtctgcaccaaggactctacccgagacctgaccgtcccccttcgtgccgttcccgacaccaggtactacaactctgaggtccaccgagctgcttttaccatccccgagttcggtcgtgccatgctcgaggacggcgtcaacgtcttgcccaagttcagcggtgctcgacccactacgaccaagaagaaggtgctcctccttggttccggtctcgttgctggccctgctgccaactacattgcgcgacacaaccacgagctcaccatcgcttgccgaactctcgctagtgcagaggagctcgcttccggcctccccaacgccacccccatgtctgttgatgtctcttctgctgacgctctccgacaggctatcaagggtcacgacgttgttgtcagcttgatcccttacacccaccacgcccaggtcatggaggctgctcttgaggagaaggtccacgtcgtcactacctcctacgtcaacccccagatgcgtgccctcgagcagaagttcaaggatgctggtctgatttgtttcaacgagatcggtgtcgaccccggagttgaccacttgtgggctgtcaaggtctttgacgaagtcaagaaggctggtggtaagatcaaaagcttctacagcttctgtggtggtcttgttgaacctgctgccgccgacaatgccctcgggtacaagttctcttggtcccctgtcggtgtcctcatggccctcaacaacgacggcaagtacctcaaggacggcaaggtcgttgaggttgccggcaaggacctcatgagcacagccaagccttattatttcactcccgcgtacaacctcgtcgcctatcccaaccgagactctaccgtcttcagggagttctacggtctggaaggtgttcaaaacctttgccgaggtactatgaggtacgctggcttctgcgaagtcatcaccgcctggaaggaaattggtttgatgtccgatgctcaagtcgactacctcgcccagggtgctgctcccatcacttggatcaaggtcatctctcagttgctcggcgttgaggccaaggaggctgccattattgagaagctcaagactctcaagtctttcgagaccgagtctagagtcctcatctccaaattccgagacctcggtctcttctccgaggagcaggtcgctcagcgaggttccgttatgcgagctctgtccgctcttctcgaggagaagtgtgccttcaaggagggtgaggtcgaccttgtcttgttgcaacacactttcgagatcatcaacgccgacggttccgagcaaaccatcacttcctcccttgaggcttacggtgacaggaacggtgggccctctgccatggccaaactcgtcggtgttccttgcggtatggctgtgcagttcatccttgagggtgtcctcaacaagcccggtgtcttcgctccctacgacgaggagacctgcaagttattccgagaacgacttgagaaggaggagggcatcaccatggttgagaaacttgtttaa

SEQ ID NO: 2256 - DNA, 1692 bp, Cryptococcus neoformans
atgtccgccgacaacgccccagtcaacgctgcaaaccccgaggtcgctcccgtccagtcttctgccgacgccccgacccaagaaggcgcccctgcgcccgccggcccctccaagtctgagctcaagaagcgcgcaaaggaggctgaaaaggccaagaaggctgcagaacgcgcagcgagggaggaggaggatagaaagaagcgcgaggccaaggagtctgaggaccatgcgaaacagaactatggcaagctgcccttgcaccagagccaggagaggaacggtgagtcctgccagaaacgactcaagttccacgaactcaacaaggaccttgtaggccagagggtcatcttccgagccaggctgcacaacatgcgagccaagattgtctttctcactttccgtcaacaaacacacaccctccaaggtgtccttgtcgtttccaaagagagtgacgagcaccaggtgtccaagcagatgctcaagtacgctacccttatcccttctgaggctatcgttcttgttgagggtgtagtgaaagaggccgaggtcaagagctgtactatccagaactatgaagttggaatccaaaagatcttcaccgccgtcgaggttaatgagcttccattctctatcgatgacgctgcccgtcctgaatctgacttccagcgagacgttcagtttgcgagggttgctttgcctacgaggcttgataaccgagtgatggatttgcgaacccctaccaaccaagccatcttccgcatccaatccgccatctgccaactcttccgtgaatacctcaactctgaagggttcatcgagatccactcgcccaaactccaaggtgccgcgaccgaatcgggcgcttcagtcttcaaggtcaagtactttgacagggaggcgtttttggcgcagtcgccccagttggcgaagcagatggctattgcgggtgatatggagagggtttatgagattgctcctgtattccgagccgaagactccaacacccaccgtcacatgactgaattcatgggtctcgatctcgaaatggccatcgaagagcactaccacgaagctgtcgatgttctcgacaatatgctcctccacatcttccgtggcttgcaaaccaaattcaagcatgagattgagacggtgaagaagcagttcccatgtgaggatttcttgtttttggagaagacgttgaggttgccgttcaaggaagggatgcggatgttgagggaggcgggggcgacggatggggaggggaagccgattggcgagttggacgatatgagcaccgaaaacgaaaagctcctcggtcgacttgttcgtgaaaaatataataccgattacttcatcctcgacaaattccctatcgccatccgtcccttttacaccatgcccgacccctctgaccccacgctctccaactcgtacgatttcttcatgcgcggtgaagaaatcctttctggcgcgcaacgtatccacgacccgacctttttggtggagaggatgaaggatgtggggattgacccggcctcgatggcgggttacctcgatgctttcaaattgggtgccccgccccatgcgggaggagggattgggttggagagggtggtgatgttgttcttgaagttggggaacattaggagggcgagtttgttccccagggacccgaagaggttggctccttaa

SEQ ID NO: 2257 - DNA, 1806 bp, Cryptococcus neoformans
atgattccaagacgacaccacttcaagccggctccccaaccaacagtacaagttctccaacctccggacgaagatgccccctcgctcacaatcactatgctcggcgcaggccaggaagtgggcaggtcctgttgtgtcatagagcacagaggaaagaagattgtatgcgatgccggcctgcatccagcacagcctggtataggagctctaccattcatcgatgaacttgattggtcgactgtggatgcgatgttgatcactcattttcatgtcgatcatgcagccgctttgccgtatatcatggagaagaccaatttcaaagacggtaacggcaaagtgtacatgacgcacgctacaaaagctatctatggattgaccatgatggacactgtgcgattgaacgatcaaaatccagacacttccggtcgcctatacgacgaagccgacgtccaatcatcctggcaatccaccatagcagtcgactatcatcaagatattgttatcgctggtggtctacgtttcaccccctaccatgccggccatgtccttggagcgtccatgttcctcatcgagattgctgggttgaagatcctgtatacaggagactattcaagggaggaggaccgacatctggtgatggcggagattccacccgtgaaacctgatgtgatgatttgcgagagcacgtttggcgtgcatacattaccagacaggaaggagaaggaggaacaattcacaacgttggtcgccaacattgtccgaagaggtggccgatgcctcatgcccatcccctccttcggaaacggccaagaactcgcccttctcctcgacgaatactggaacgaccaccccgaacttcaaaacatccctgtctactttgcatcctctcttttccaacgcggcatgcgtgtctacaaaacctacgtccacactatgaatgccaatatccgatcacggttcgccaggagagataacccctttgactttaggtttgtcaagtggttgaaagatccgcagaagcttagagagaataagggtccttgtgtgatcatgtcttcacctcagtttatgagttttggactcagtcgtgatctgttggaagagtgggcgccggattctaagaacggggtgattgtcactgggtactccatcgaaggtactatggccaggactctcttgagcgaaccggaccacatcgaatccctcaaaggaggcaacgtcccccgccgcttaacagttaaagaaatctctttcggcgctcacgtcgattatgctcaaaattcaaaattcatccaagaaatcggtgctcagcacgttgtcctcgtgcatggagaggcttcgcagatgggaagattgagagcggcgttgagagatacatatgcggccaaggggcaggagattaatatccatacgccaaaaaattgtgaacctctgactcttacttttagacaagagcggatggtcaaagtgagtattctctttccccttccttttgaaacacttcccccctcatcagataattcgttaatcactcaaattctccgccaggctattggctccttagcagctactcgccctgaacacggtacctccgtcaaaggtcttctcgtttccaaagatttctcttacactctcctttccccggccgatttacatgatttcactggcctctcaacgagcacgatcatccaaaaacagggagtggcgataagtgtagattgggcggtggtgaggtggtatctggaggggatgtatggggaagtgggaaaggtgttgaggaagaggggaaagctgcttttattgtga

SEQ ID NO: 2258 - DNA, 1794 bp, Cryptococcus neoformans
atgttccagaaaaaaccccgcaaagtcgagaaggtgctggaaatattaattaattattcccgcggtatttacgaaatagttaagcatcggcgaaacgctgctgtccagaagaggggcttcgcctccaaggacgtcgtcttcggcaacgacgccaggcagggcatgctcaagggtgttgacgtcctcgcaaaggccgtcgctgccaccctcggccccaagggcaggaccgtcatcatcggccagagcttcggtgggcccaagatcaccaaggacggtgtctctgtcgccaaggctatcactctcaaggaccccgttgagaacctcggtgctcgtctcgtccaggatgttgcttccaagaccaacgacactgccggtgacggtaccaccaccgccactgtcctcgcccgagccatctactctgagggtgtgaagaacgtcgctgccggctgcaaccccatggacctccgtcgaggtgcccagaaggctgtcgacaaggtcctcgaggttcttgctgccaacaaaaaggttatcaccacctctgaggagattgcccaggtcgccaccatctccgccaacggcgatacccacgtcggtgccatcattgcccaagccatggagcaggtcggcaaggagggtgtcatcactgtgaaggagggccgaaccattgacgacgagattgagattaccgagggtatgcgattcgaccgaggcttcatctccccttacctcatcaccgacaccaagaaccagcgtgtcgagctcgagaagcccttcatcctcctctccgagaagaagatctctgctcttcaggacatccttccttctctcgagattgccgcccagacccgtcgacctttgttgatcatcgccgaagacattgacggtgaggctctcgccgccgtcatcctcaacaagctccgaggtcagctctccgtcgccgccgtcaaggcccccggttttggtgacaaccgaaagtctatcctcggtgacattgccatcctcaccggcggtactgtcttcactgacgagctggatgtcaagcttgagaaggctacccccgacatgtttggtaccactggctccgttaccattactaaggaggacaccatcatcctcaacggcgagggtgacaagagcctcattcagtctcgatgcgagcagatccgagctttgatcaacgactctagcacttccgactacgacaggactaagctccaggagcgattggccaagctcggtggcggtgtcgccgtcatcaaggttggtggctctagcgaggttgaggtcggagagaagaaggacaggtatgacgatgctctcaacgctacccgtgccgccgtcgaggagggtatcgtccccggtggaggtaccgctcttctcaaagcttctaccgctcttgaggacattgccgtcgacaacttcgaccagaagctcggtatctctatgatccgacaggctatccgacgacctgtccgaaccatcgtcgagaacgccggtgaggagggttccgtcgtcgtcggtcgactcctttccgaggagtttgccgctcctgaaaagttcaactggggttacgacgcccagacttctcagtaccgagacatgatcgctgccggtatcctcgaccccttgaaggtcgtcaggaccgccctcgtcgacgcttccggtgttgctagcttgttgacaactagcgaggcctgtgttgttgacgccgaggagaagactcctccttctggtatgggcatgggtggtatgggcggtatgggcggtatgcggtatgatgtaagaagggtgtga

SEQ ID NO: 2259 - DNA, 1860 bp, Cryptococcus neoformans
atggctttctcaggtgctcttaccgagattcatatcgactccaacaacaattactacgaggtatccacatatccatcggttggtcacgacgatgacattggaaattccaagaaggcgctcgagaaggcagaaattaatttgaacgactgtttggcttgcagcgggtgtatcacctccactgaatcgctcttgatcactatgcagtctcagaacgagatcctcgagtttatcaaaacaaaccccacagtggtagatcctgaatccccctgccacaagccccgtttacctatcctttccatatcgcctcagaccctcgcttctttatcggctgcttatgcaacagcatcctctcgacctcccattcctctcttggtgcttttacggcgtatccgtgcattcctctcccagccggagaagggatcttggagagtatgggacaccacttttgcccggcatatgagcctgagagaatctgtggtggagttccatgagcgaaaggacaagaaggaaaagggtaaggctgcggagatgccaatgttggcgagtgcttgtcccggatgggtttgttacgcagagaaggcacagggtgatatgttgcccttgttgagcgcggcaaggagtagccaaggcattattggagctttagcaaagtcttggtatggtcacaaattgcagcacaaacccgatgagatttatcatgttactgctatgccttgttatgacaagaagctcgaagcctcacgatccgacttttattcttccctctattctacgcgcgacgtcgactgcgttctcaccactggcgaacttgaccttctccttcaagaacttggattcgacccccacgttcccatcgccaacgagtctaccccgtcttactcggctactgaagactcgccattccctgaactcctaactcacgaaggttcaagctccggctcctatctccagaccatcattcacgatgttcaacgctctcatcccaatcctactcgaatcattactcgtgaaatccgaggttcaacagacaatattgaataccttattcaggatactatcactggccaagtcgttttcaagggtgccaaggtttatggattccgtaatcttcaaaacctggtccgaaaagtggcaaaggagacgggtatcggtcgttccggtcgaggtgcaggtgccggtaagttaagtgctgccgtcgcagcccgtcggcgaaaagccaagacggcagcaccagcagcaacttctgctacaacttctgccgaagggacagatgtagagagcattgcatctctcagtctagttagcggagaggataagaagctcgatttcgtagaggttatggcttgtcctggaggatgcgtgaacggaggtggtcagatgaagccaactgtgcctacaccctcggctccggaagcgatggaagtagatgaagaagggtaccagcgacctcttcctgacgatggtgtagccgtcgctgtcaacgggggaagtaataatgtaggtactgggacggttgcagggatggaggaagggatgcggtggtcaacgaaagaatgggttgccaaggtagaagatatctattggacaggtctacctacccctccggcgtcacccccacttactgcttcaaacgtcaatggctttgcgcctcaagtcaagacaaatggcacaaccaatggccaagtcaataacggcgtagatcgtaatcttcaatctgaccagcttgccgaggaaatcatccatgaagtctgtggggacgatgcgtctaagcgatgggattttatgaggacgaggtttagaaaggtggagagcgatgttttgtcatcaggaggggttacccacgaggcggtcaaatggtag

SEQ ID NO: 2260 - DNA, 1842 bp, Cryptococcus neoformans
atgctcagagccgtaatccgcactgcaacctctaccagacaggccaccacctacgcccctaaattcaaaccccaaataccgctcagaagaacgttcataatgtctgcccctgccgctgaggccaacttgcacaaggacgaagttaccggagaaatgatctccaagtctgagctgaagcgaaggcaaaaagaacgacagagggccgctcagaaggctgagaaggctgctgctgctcctgccgcagctcagcctaagaagcaatctaaagccgacgccgaggctgagatggacgccactgctttccacgagatgcgatacaaggagattgccaagcttcgagagaccaagcagcccaacccttaccctcacaagttcaacgtcactcacgctgtccccaagtttgtcgaggagtggggcaaggaaggcaagttggaaaagggtgaaactgcccagcttaatgagcctgtaagcatttccctcgctggtcgagtctacactatccgcgaatcctcttccaagttgaggttctacgacctcaaggccgacggtgttaaggttcagattatggctcaggcccaaaacgctgcttctctcgaagagtacctcgacactcacgaccggattcgacgcggtgacatcattggcgtcactggtattccctctcgaaccaagatgggagagctttccctttccatctcttctattcagctcctttccccctgtcttcacctcctgcccggtagggaaggtgttgtcgacctcgagacaagatacaggaagaggtatcttgacttgattatgaaccccagcacccgagacatctttgtcacacgttccaaggtcatcaactacatccgaaagtaccttgacgcccaaggtttcctcgaagttgagactcctatgatgtccatgattgctggcggtgccaccgccaagcccttcgtcacccatcacaacgacctcaagctcgacttgttcatgcgtatcgcccccgagctttacctcaaggagctcgtcgtcggtggtcttgaccgggtcttcgaaatcggccgtgtcttccgaaatgagcagatcgatatgacacataaccccgagttctccatctgtgaattctacatggcctacgctgacatgtacgacatcatggacatgaccgaggaattgattgagggcatggtcaagtccctcacaggtggtaccaaattgactttccaccctcaaggtaaaggtgaaggcaagaaggtttacgaggttgacttcgccaggccttggaagaggtttgacatgattggggagttggagaagcaattgaacgttaagttccccccgggagaaaccttgcacgatgacaataccaacaagttcctccgtgaactctgtgagaagcacaacgttgattgcgccgagcccaagaccaactctcgtctccttgacaagctcgttggtgagtatatcgaaaatcaatgtgtcaacccttccttcattgtcggccacccccaggtcatgtcccccttggccaagtacgaccgatctcgccctggactttgtgagcgattcgaggcgttcttatgtactaaggagatttgcaatgcctacactgagttgaacgaccccttcgatcaaagagagagattcatggagcaggtcaggcagaaggagcagggtgacgaggaagcccagggtgttgacgagactttcctcgatgctctcgagtacggtctcccacctacaggtggctggggtcttggtatcgaccgtcttgtcatgttcctcaccgactgctccaacatcaaggaagtccttcttttccccgctatgcgacctcgttgccaactctgttga

SEQ ID NO: 2261 - DNA, 1794 bp, Cryptococcus neoformans
atgttattctgcacttacaagaactcgagtctccattgcatctgcacactctctccgctgtctacaatgggtaacgtgagtaccacggccccacctttcctgcacgctctgtcgattatatctgacttaaagcttcctcaatgtacaacgaactccattttttcttcatctaacccagcccaaccctccgcttccggcacctcactgtttggaaacacttcgtctcaacctgcttctggtagcggcttattcggctcgtcatccactacaaacaactcctctgctacccctgccgcctcggggggcggcttatttggcggtggggcacagacttctggcggtttgttcggaaataacaccaccggcgctgctaccggcacaagcacaggtggtggcttgtttggtgctaaacctgcagaaggcactggagcacctggcgcagcgtcaacaacgggtggatttacagggtttggagcaaagcctgccggcaccacatctgcgcctgcaacaggtggactttttggttcaaagcctgcagaatctacccctgctgcttcttcttctcctgcgccctcatccggtggtggcctcttttcattcggtgctaaacccgcctccactactacacctgctgctccttcacttttcggctctgctcctgccaaggatgcttcttcatcaactcctacatctggcacaccacccaccacttctggaggcggaccctttgggggtggggggctttttggtgccaagcccgctgctcctgctacagaggctcctaaagctgacaccgccaccactgccccggctgccccaaccagtggtttgtttgggggagtaggtgcctcaaaacccgctgaagcacctaagcctgctgctggagggttctccttcggtaacttgggagccaaacctgctactccttctaccactgaagctcccaaaacgggaggcttcagctttggagcttctgccccaagcgctgataagaaggacgagatgccggctgaagcgcccaagacgggaggcttcagttttggcgcccccgctgctgccgcttccaacgaagaaaaaaagactgataagcctgcagaggctcccaaaccgggtggattcagctttggtaacattggtacatccgcaacaacggcctctggagacgataaaggcaaggcgcctgaagctcctaaggctggcgggttcagttttggcggtcttggtgcaaagacagatggtgacaaggataaggctccagctgcgcctacgcctgctgcgcctgctgctggtggcttgtttggagccaagcctgccgatgctggtcaaagcagtaccgccgccccttcagctagcggtggtctctttggtgccaatcccaacactaccgcggcggcttctaccactacacctgctgtaccaaccgcccccattgcttccgccccagccaatgtggagaagcccagcgaacccgttcccaaccttcttcgtggcaaagccttggatgatatagtggaaggatggaataaggatttagaggagcaagtgaaggagtttgagaggcaggctggtgaggtgagggagtgggataagattttggtcaggaatggtaaccaaattacagctcttagaagacaagtgttggaggctcagcagacccaagctgctgttgatgaaccgttgaactactttgaggctcagcaaaatcagctggaaagtatgttggatgtgtatgagaaggagtgcaaaaatgtcaaacgacagcaccaggccgttggcggcgaaaatgccggctga

SEQ ID NO: 2262 - DNA, 1761 bp, Cryptococcus neoformans
atggcattcttatccacacctctaccatcgagcgactataaaatgcccaggtcaacatacactgaagcccttctcggcccagaggtgtataaaaaggttagagagacaaaggttctcgtcgttggtgctggtggtattggctgtgaactcctcaagaaccttgttttggttgggttcgccaatattgaaataatcgaccttgataccattgacctctcaaacttgaaccgccagttcctcttccgaaaacccgacatatctaaatccaaagcccttgttgccgctgcgacagctcaccacttcaaccccaactctggcatcaacatcaacgctaggcacgggaatgtcaaggatagtgtgaatgacctcgagtggatcaaggggttcggcttggtcatgaacgcattggataatatggatgcacgacggcatgtgaataggctttgtcaggctgctggtgtccctcttatcgagtctggtactgccggttacctcggtcaggttactcccatgatcaaggacgtcactgaatgctttgactgtgtacccaagcctgcccccaaagcgttcccagtctgcactatccgttcaacacctagtgaacctattcactgtatcgtctgggcaaagacgtacctttttggaaagttgtttggtgaagatgatgaggacatggacactgaagagctggacaaggctaaatctagtggggagaatgcggaggaaattgaaaacctgaaaaaggaagccgctgccttccgacaagtaaggaaatcccttagcgaagaggacggccctcggcgagtattccacaaaattttcaacgaagatatccgccgtctcttggctatggaggatatgtggaaaaaggaaggccgtgtaaagcctgtacctcttgattgtgatgccattcttgacgagactgacagggcggctgaaagggacaagggtaaatccgcggcgctgttgaaggaccagaaagagttgaatttgaaggagaatttggaattgttcctggacagctgcaagaggctttccgctcgagcactcgcctttcccgacacacctctgtcctttgacaaggatgatgacgatactcttgactttgtacttgcgacagctaaccttcgagctaccgcttacggtatccccaataagactcgggaaaaaaaatcaatactcatacccgctatagaaatggccggtaatatcattcccgctattgctaccaccaacgccatcatcgccggtcttatcgtgatgcaatccctcaacatcctctctcgaatccactccacctccaatggcggcccatccaccgactccagcagcatccctgtccgcaacgtgttcctccgaacagaccctaccaaacccctcggctcatttttaccccaacatccagacccaacatgcagcgtctgtcgagacgtatacatcccgttcaaagctgatgtcgggaaatgcacgttgggtgagtttgtcgaggatgcagtaaaagactggcttgggtcagcagagtttgaagggcaaggagaaggggaggatgtggaatggacagtgtttgaaggaggaaggcttttggctgatccagactttgacgataaccttggaaggactttggatgaccttggggttggacggggtaagattctgacggtgagggatgaatacaaagtacagacctgtacacttttgtgtctgccaaccgtgggtctcaaatatatattatcgtgtttgccaaaaaggcttgatcattaa

SEQ ID NO: 2263 - DNA, 1866 bp, Cryptococcus neoformans
  misc_feature (1252)..(1254): n=g, a, t or c
atgcagtacggcagccaatcgcccactctaggccgtgaacccctgctcgcgtccgcccagaatcctggcatgtcccagcgtctctctgaatcatcctttacttcatacgataaccagtctagcatgtctcaccgtgtcggcgcaaattctcccactggcgcgtcctatgcgagtttctcttctggcaacagatttggtcccacagcgcatctcaaccctggccccgttgctggtgtcagcgaggcaggtgcgttgcctgcgggctcatatgcccaggggccgatagatgacgatgatgatatggacgaccatctgcatacctttaccgccgctgagaaaaaggatcttagcacgccgtttaatatcagttcctggcgaggatgggccaacgcattgactttggctgttttggcaggcggcggtgtaatgcttttcgcgggttaccctatcatatcgttctactacggcgataatagctctagcgggtctaacacatccgggtacaacctcggtggtatcaatgccagtggacaatacccttctatcactggcttgcccagtctgatcgacccagatacacctgagtacctgtacacaagaactgggttcgatgggaatgagtggacattggtattttcggacgagtttgaaaaagatggaagaacattctttgagggtgatgatccattctggacaggtgttaatttcaattattggccaactggtgacctggaatggtacgatccttctgccatcactacggccgatggaaacctactcattaccatcactcaagaacccatcaacgatctcaacttcaagtctggtatgctccagtcttggaacaagttttgtttcaacaaaaatgcctatattgaattctctgcttctttgcctggcacgagcggtattggtggtttctggcctggtgtctggactatgggtaacttgggacgacccgggtatggtgcttctactgaaggaatgtggccatacacttacaactcttgtgacgtcggtattcttgcgaaccaaacttggctcaatggtacaggccctgaagccgcactcaccagtggttccaacggcggtcagctctctcaacttcccggtatgcgtaccccgtcatgtacgtgtgagggcgaagaccatcctggtccagccgttaccgtcggtcgatcggctcctgaaatcgatatcattgaagcgcagatcatcatttccgaaaaccgaggggaagtctcccagtcannncaaaccgcgccctttgacgactcctaccaatgggacaacacttcatcaagtcactacaagcagtacgacactgacttgacatactggaacacatacctcggtggtacataccaacaatctgtctcttctcttacccgtgtacccagagatatctattacagccagcccggaggtggtggcgaatttgccatgtttggtatggaatacgattctgctcccggtcataaggaggatggatacgtaacttggtacagcgacaacaaaaccagttggaccatgtatgcggacgcccttgctgcgaatgaaaaggccggtattggaagacgaaccattcccgaagaacctatgaccctgatcgtcaaccttggtctttctttcaacttccaacctgtcgacttcgatcatctcactttccccaactaccttcgcattgattacttccgtgtgtatcaacaatcggacagtatctctatcggatgtgaccccgatgactaccccactgcagattatatctccaaacacgccgaggtatactccaatgcgaatttgacgacttgggctcaggcaggtaacaccttcccaaagaatgagttgaccgggtgtaacagatga

SEQ ID NO: 2264 - DNA, 1803 bp, Cryptococcus neoformans
atggtaaacgaaacgaggagacgatccgctgtaaaagtatgggaggaaaaagagctgcgttgtgactgggacgaagagatcagccacgcagagcagcacatctcattttcagggaacaccgtgttgattacgtacattttgggaagccccccgagactggctggggttggttggcttgcgcgtcgtgatgccatctctttcctccatgggtactccttgctccattttatctctacatctatacagtctgtcaccgccatggctaatcaaccagaaaagctcgcagacgcccagaacaaagacgctggcgagaaggtccaggagacagaagagaagactgtcgtggaagctgtcccaaccgtcgaagagggtatgtcttaaatcctcaacaacatcgctttgatcggtcgggccgtcaccactatcgagcctcgattcactatccgtgttttgcgaaccttgacgtctttgaggaagaagttgacaaagaacgctttgaagactgtcttggacgatgctttccctaaaggatgaactaccgcccccacccctaagaagaagtttgttccccccatatattctgccactggtgaccttttacctgaggggattgtgtatttgaggctgcttttgattctcgccaacctcgatgcagggcgcgttgtcgaggtatgagactttgcaatggagactgcagacctaattagctcttggaacagacggacaatggaccagcttgctggcaagatttggttctacgtcgcccgcgcttatgagcttcaaggccgtttggctgaactccaacctcaattcatggctattcgacagaccgccgctctgaggaaagatgagacccttgaggttactgtcctcaaccttctcttgcgatcttacctcgccaactctcaatacgaacaagccgaaaagctcgtttccaagactcaatttcacggtgccgccaaccaggctcagactgtccgatggttattctacactgggcgacttcgagccattcagctcaactatgctgaagcccgaaattaccttcagacagcgatcaggagagcgccgaaagacgaagttgcccccggatttgtccagcttatccacaagtactttatcatcgttgtgttgttgactggtgtcattcccgaccgagccttgttccgcaagccagtcctcaaacaagctcttgccccttacttccaaattgttcaagccgtacgtatcggtgacgttgccggtttccaaaaagctttccaaacccatgaagccacctttttcgccgactctacccatttcctcatctctcgtttgcgacactttgtcatcaagaccgctttgcgtaccatcactcttgcttactcccgcatttcccttgccgatgtctgtatcaagctccacctcgactcggaggaggacacagaatacattgtcgccaaggcgattaaggatggagtgattgatgcgacgattgacccgcaaggtggatggatgcagagcaaggtcgcgaaagacctctatgagacggatgagccggcgaagcagttccagaagagggtgcaatactgcactcaggtgtataacgagagtgttagggcgatgcgatatcctccagacgctcaccgtaaagaactagactctgcggccgagtcgcgtgaacgagaccgagaaatcgcgcagcttattcaggagagtgacgagcctgatgacatggatcatgggagatttgtagagaggaaagatggaaatagaacaattgcccagacagctcttttgtgtgaaggattcagcatgaattaa

SEQ ID NO: 2265 - DNA, 2013 bp, Cryptococcus neoformans
  misc_feature (397)..(399): n=g, a, t or c
atggctggctatcttgtcagatctgcgccaagttgtcccgatctcagtccgttcccatatctcgcttatggtacacacagaattaatataattacacacacaacaattttcccacggccgcctttgtacatttcagaaaagttgaagacctttttgcatacgtacaaaaccaaaacagtcaatcatacatccacaaacaatccccattttcccaacatggacgccctcttagcagctgctggtcctcttccccagaagaaggggagaccaggcaaggtccatcagcgtactcctcatccgacctcccacaagactgtcgctcgtggagatggcaaggacaatattgattcctcgacgcaatccatcttgagcagcacacggttaccacactctttccaccgctccaacctcgctacaggatcgtcttcagcacctatccgacctgatggaactctcggaagaataggggacaagaaattgcgggcgaaaatcgcctcgcaagatgtgggcaacaagcgggccaaagttgagagggatgacgtgaacgagtggataaacaaggctatcggaggtgagagaggtgggattgaggtggatgaagatctaggggagaagacttggagagtcaaacaggaggaaattgtgaaagaagtggcaatgaacgtcagggggaaaaagtttgatttgaaaatggaggacatgggaagctacaaagtggattacactcggaacggcagacaccttgctatcgcttcatctcgcggtcatgttgctactttcgactggcaagccggtaaactccattccgaaattcacctgaaggagactgttcgggacatcaagtttctccattctgaggcgtactatgctgtggctcagaagaaatatgtctttatctacgaccaaaatggcgtggaattacataaactgaaacaacatatcgaccctacgcatatggaatttttgcctttccactacctcttgtctactgtcggtaacgccggttatctcaaatatcacgacacctccaccggtgtcatgttaactcaaatccccacccgtcttggttctcctcatagcatgacccaaaaccctcattctgctatcatccacctcggtcacgccaacggtaccatgacgttatggtctcccaacatgactactcctcatgtcaaacttttggctcatcgcggacctgtcaacggtgttgctgttgatccaagtgagcacagtgctgggaggtacgttgcgacgagcgggatggacggtactgtcaagctttgggatgggcgtatgtggggtaaggaagtgcgagaatggaaaacgaggaaccaaatcacatcgcttgccttttccggcatgggtatgctcagtgttggtggaaagagcggtgtgacagtttaccaggacctttacaaaaacactcatcgcccgccatctccctacctcacccttcctcttcctagcttgacagcttctgccacccgtttctgcccctttgacgatctcctctgtgtcgggcatgaaagaggaatatcatccctcatagtacctggttccggtgaacccaactttgacagtgcagaagccgacttgttcgagactcgtacaagaaggagggaacgagaagtccgtggtgtcctcgaaaaggtccgaccggagcttatcacaatggatgccaactttttgggcaagattagtgaaggacggggtggggagactcatgaggagagggagggaaggagctttaggcagttgggaaggttggaaagattgcgccttaccggtaaggcggatgagcccgagcaagagggtgttgacgatgaggacgctgggctggaagatggtgaggctgaccctaacggcggagagaggtcaataagagaaaagaaggaaaggaggaagatgaagggcaagggcggtagtaccaagaggtacttgaggaagaaggcgaagaaaaacattgtagacaactccttggtaagtctccccaagtttttggtgcgatcataa

SEQ ID NO: 2266 - DNA, 1929 bp, Cryptococcus neoformans
atgtcttccgtcgcaggtcttcagcgcatcacgccggtgcccacatcggccgactttatcgatgtcgtcctcaacgcaaccatgaggaagacccccactgtcatccacaagaacttcaaaatctctcgtattaggaacttctacatgcgaaaggtcaagttcacccaggataccttcgatgagaaacttggcaagatcatctccgagttccccgtgctcgacaaccttcaccctttcctctcttctctcctcaacgttctgtacgacaagaaccattacaaactcgccttgggtcaaatcaacactgctcgacacctcatctctcaagttgccaaggattacgtccgtctcctcaagtttggtgactccctctaccgatgtaagcagttgaagaaggccgctttgggtagaatggcgactataatgaggaggcagaaggaccccttggcgtacttggagcaggttaggcagcacatttctaggttgcctgctatcgatcccaacaccaggactctcttgatctgcggttatcccaacgttggaaagtccagtttcgtcaacaaggtcaccagagccgatgtagatgttcaaccttacgctttcaccaccaaatccttgttcgtcggtcatatggactacaagtacctccgatggcaagtcattgatacccctggtgttcttgaccaccctctcgaggagatgaacaccattgaaatgcaatccatcactgctcttgcgcacctgcgaagtgctgtcctctatttcatggacctttccgaacagtgtggttacactattgaggctcagtgcaagctcttccagtctatcaaaccccttttccagaataagcccaccatcctcgtcattaacaagatcgacatcgtccgacttgccgacctctctgaggaaaaccgatcttatgtcgacactattcttgccgacaagagcgtcaccgttgttgaagcctctacttacaccgaagaaggtattatgaacgtccgaaacactgcctgtgatgctcttctcgcccatcgagtcgagcagaagctccagggttctaggattgaaatggtcgccaataagatccacgtcgctattcctcaaaagcgagatgatgttgagcgaaagccctttatccccgataccgttgcccacaaagtcaagtacgacaaggacgaccccagcaggcccaagactgagagggatatggagcaagagttggaccattctggcatgggtgtctactctgtcgacatgaagagtgactacatgctcgcagacgactcctggaaatacgatgttatccccgaattcctcaatggcaagaacgtcgccgactttatcgaccccgatattctcgagaagctcgacgctcttgagcgcgaggaggaggcccttgaggcccaagggttctacgcttctgacgaggaggaaatgcttgactctgaggaggaagagttccgtgatgctgcccgacaaatccgagccaagaaggcagctatcaagaagatatctcaggagaaaaacactcttcaaaaccgtcccatcatccccaagaacaagaagaagctctatctcagcgacctcacttccaacatgcgtaaagctggtcacgatcctcgcgagctcgagaagcgagcggccaggttggccaaggagaatgacaaaattaacgctgagaggaagaaggctatggccgctcagcaggctgctgaggaggaggctggtggtatggacgttgacatggatgagggtgacgggtcttccaaaaacaagaagcgtgaaaaggccaacgagctccgtatgtttgctcagcgtctgcctaataggttggccaaggcctctgaaagtgacagacacgtgcccatcactaggccgaagtggatgttgtctggtaagagaaagggtggtacgactgacaggcgatag

SEQ ID NO: 2267 - DNA, 1977 bp, Cryptococcus neoformans
atggtcagtaattattatgttgtggttcaatctttgcgctggccacctgatatccacgtgcatcccacatggcggccacgtgggagatcgggacaccacacaacaccgattgccgtttatgaccgccacaccggagaacgggccggacagcgatgccacggctctgggcgttccgtcatccgttacttatttacgctgtcttttcttccgtcttctattccaactcttcttctctcccaacttctcgtactactacaacaatggacggcaagccagctactcgtgcgtacgcagctccgcgcccgcacacaatgctcacgtccagcagaataccaggcctggaagaagctccagtctctccacgcctccaaggccgacaagctcgtcttgaaggaccttttcaaagctgaccccaagcgtttctccaacctctcaaagaccttttcttcttcttctcccaacgtctctctccttctcgactactccaagaaccttgtcgatgacgaggtcctctccaccctctttgacctcgcccgtgaggccaaggtcgagactttccgtgacgagatgtttgctggcaagcacatcaacacctctgaggaccgttccgtcttgcacatcgctctccgaaacccccctgctgacaagggcggcttcaagatctctgaggccggtgttgacgaggtccacgccgtcctcgcccacatgaaggagttctccgactctgtccgctctggcgcctggaagggttacactggcaaggccattgacaccatcgtgaacattggtattggtggttccgaccttggtcctgttatggtctgcgaggccctcaagcactacagcaagagggacttgaagacccactttgtctccaacattgacggtactgacatggccgaggtcctcaaggcttgcaaccgtgagaccaccttgttcattgtcgcttccaagacctttaccacccaggagaccattaccaacgccgagagtgccaaggaatggttccttgagcaggccaaggagaaagcccacgttgccaaacacttcgttgccctttccaccaacaccaagggtgtgacggagtttggtattgccgaatccaacatgttccagttctgggactgggttggtggccgatactctctttggtccgcgatcggtctctccatctgcttgtctatcggctttgacaacttccaggagttgctcaatggtgcccacgagatggacaagcacttcaagaccgccaagctcgaggataatttgcccgtcatccttgctttggttggtatctggtacaacgacttttacggtgcccaaactcaagccctcttgccttacgaccagtatctcaagaagtttgccgactacttccaacagggtgacatggagtccaacggtaagagcgttaccaaggacggctcccgagtcgactacgagactggacctattatctggggtcagagcggtaccaacggtcagcacgctttctaccagttgatccaccagggtaccaagctcatcccttgtgacttcctcgcccctgttgagactcttaatcccatctctggcggcaagcaccacgaaatcctcctctccaacttctttgctcagcccgaagctcttgcctttggcaagactgaggaggaagtcatcaaggagctcggccccgagcaatccaagaactctgccctcgtcaagtccaagatctttgaaggcaacaagcccaccaactctatcatgttccaaaagctcacccccggtactcttggtgccctcatcgccctctatgagcacaagatccacgttcagggtgctatctggggtatcaactcttacgaccagatgggtgtcgaactcggcaaggtcttggccaaggctatcttgaagcagttgggtagcgaaaacgatgtccagggtcacgactcttctactaccggtctcatccacttttaccagaagaacagaaaataa

SEQ ID NO: 2268 - DNA, 2049 bp, Cryptococcus neoformans
atggtcctccgctccacgctcatcgccctggtgacgcttttgtcactttcctcggcagctgcattctaccttccagggtctgccccacgcgattaccttgaaggggagaagatcgatgtttttgtgaacacgcttactcctatgctcaactctaagctcaagtcactcatatcatacgattactatgacagccgcttccacttctgttcacctgaaggaggtgctaagagacaacctgaaagccttggttcgattctctttggcgatcgaattctctcatctccttacgagattcgaatgttggagaactcaacttgtcagaagttgtgccaagctagtgtgccaaaagatgacgcggcatttatcaaccagaggatcaaggaagattacgggttgaacttgcttattgacgggctgccgagcagtgagatgaggagggatagcaagaccggagagacgttcttggatgcgcagggtttcagtttgggtaacgatgagatgaacccggacaagcctgctttgaacaaccattacgacatctacatccagtatcacatgcgtgatgagaaccactttagggtggttggcgttctcgtctatcccagcactgtcaattccatggttgccgggtcgaccgagcccgactgtttcaacaagcaaccattctacctttccgaagaaaacagcaacgagttcttctacacctattctgtatctttccttgaaagtgatatcccatggggccttcgatgggacgcttatcttcacgtctttgatcccaggatccactggttcagtttgatcaactcccttatcattgcgggcttcctcgttttcatggtcggcatgatccttttgcgatctatttcacgtgacattcaccgctacaatgccgttgacctgtctgacgaggttcaagaagactatggatggaagctcgttcacggcgaggtcttccgacttcctcagcgacccatgttgctttccgtcatggtcggcaacggtatccacctcatcatgatgtgcatcgtcactcttgtctttgcgctctttgggtttctctctccatccaaccgaggctcccttgctaccgtgctcctcatctgctggacactctttggttgtgtctctggttattcttctgcccgaacatacaccactctcggcggggaacaatggaaaactaacctcatcctcactgccgtgctctttcctaccgttgttttcaccatcatcggcatgctcaactttttcctcatcttcgcttccgcttcaggtgctgtgccattcggtaccatcctcgccgtcttgttcttatggttcctcatctctgcgcccttgtcgattgggggctacttctatggtatgaagcacggcgcctttatcaaccccgttcgagtcgcttccattccacgacaaatcccccccaagccatggtacctgtcaacttggcccgccgccattctcggaggtatccttcccttcggcgctgcatttgtggagctctacttcgttctttcctctctgttcggtaaccgagcctattacgcttttggctttctcttcctcacttttgtcatcgtcgctttaactactgccactgtcactgtcctctttgtctacttcttactctgcgcagaggagtacagatggcactggagggcgtttctgattggaggcggttcagcattttggctgttcgcttacggtgtgtggtactgggtttcgagactgtatttgaatgggttcacaagtgtggtgctctactttggctacctgttcttagtctcccttcttgacttccttgttggaggttcaataggttatgtggccacatacttcatgttgagaaggctctatacgtcaattagagtggataagaggtttaaggggagctatgtcttggcaagatcagaaagccgagcagtcaataattgtcggaatgaagggataggacgaaggaagatttgcgagcaaggagatttaccgcaaagtttacgactcaatgattactgtcccaaacttagagtaatagtcttgcaaaagtag

SEQ ID NO: 2269 - DNA, 2034 bp, Cryptococcus neoformans
atgggccgcaccaccagacgctcagcaaggccccaatcgggtacatctactccccccaacatctcctctccgccttcgcgccctttgtttcccagcatctcccttcgctcttcatcgcctactccacctacccacgaaaacctctcagcccggtcctctctcctcagcgtgctcacacgaccagcccattcagtcgcagcgacgccagattcgccagaggaagagctctcggatttgtcgacagtaagcagctatgcctcgagtgttatctctggtacacattcaaaggacatgaccgaagaggagattgcaaaggtatatgagaattatttggagaagccattcatccaaataaagactacaataaagcatagcgagtttggacattgtaacaatcccaattggcggtggaccagtcaggtaagtaccgccgagcgcgtagcacgactttggaatcccaacgaagtgattcatgccgacgatgccagaccatcctacactgtgttactaagtacatacttgagttacatcctgcttatcattatcggtcacattcgagacttcttcggtaaaaagtttacaccagcctcatacgctcatttgatgccccagaacggctacgccgcgctcaactccgacttcgactctttctacacccgtcgattaaagaaacgtctcgacgactgtttcgcgcgacctaccaccggtgtccccggtcgaaccattgtctgctacgatcgttcctccaccgaccagaacaacacttttcaattgactggtactacaacgcgcgctttgaacgtttcctcttataactatctcggtttcgcctcttctacaggtggctgcgccgatgctgtcgaaatggccattaagcgatacggtgttgccagtgccggtgccagacatgaagcttctactaccgaccttcacttacaatgtgagaaactcgtcgccaagtttctcggtgttgaagcgtccatggtcgtttcgatgggttatgccaccaactcgactacgatccctgcgttggttggtaaaggctgtcttgtgatttccgacgaattcaaccacgcttctatccgtgccggtgtgagaatgagtggggcttcgatgagatggtacaagcacaacaatatggatgtgcttgagaacttgttgagggaagtcatttcacaaggccaacccaggactcacaggccgtggaagaagatattggttattgtcgaaggattattctcaatggagggtagtttggttgatcttcccagattgattgagctcaagaagcgttacaagttctatttgtatgtcgatgaagctcactctatcggtgcgatgggccccaacggtcgaggtgtttgtgactatttcggtatcgacccccgtgaagtcgacgtcttgatgggtaccgtcacaaaatcgttcggtgctgccggtggttacatcgcgggtagcaaggaactcgtcgaccgtctccgtgtccgatcacacgctaccgcgtacgctgaatccgtatctcctgccgttctcacccagatcatcgcttctatggtgtacggccccgccccatcttccctcctccccccttggctcaccctccctcctcacttactcaacggaaccgagggccgcgaacgtctccgccgtatcgctttcaactcccggtacctcgcttctggtcttcgcaaactgggcttcatcgtctacggtaatcgggattcacccatcattcctcttcttatcttccagcccggtaagatgggttacttttctcgtatgatgctcgagcgtatcggccccgacaagacacccatcgtcgtcgtggtcgtggcctatcccgcgaccccactcatcacttccagagtcagattctgtctctcggcgagtcacacgaaaaatgatatggacatggtcctcagggcatgtgatgaagttggagatgtgttgaatttgaaatataataagcaggaaatgagtgtggaggaagtcattgccaatgctgaggagctggttgctgcttctcatgtttaa

SEQ ID NO: 2270 - DNA, 1665 bp, Cryptococcus neoformans
  misc_feature (652)..(654): n=g, a, t or c
  misc_feature (997)..(999): n=g, a, t or c
atgtctttttattcgaaacgacgtaatggtaacggacgaccgttcattattgtacgggaacaaggaaggaaagttaggacgcacggcctggaagctatcaggagccacattcttgctgcccgatcagtaaccaacatcattaaaacctctcttggtcctcgtggtttggacaagatcctcatttccccagatggagagataactgtcaccaatgacggtgcgaccattttgggacagatggaagtggaacaccagattgcaaaactcctggtagaggtgtcgaagagtcaagatgatgagattggagacggtacaacaggtgttgttgtacttgctggtgcacttctttcttctgcgctgtctctccttgacagaggtatacatcctatccgaattgccgatggttatgagaaggcttgtgaaatcgctgtcgccgagttggaccgcgttgcggacactgtgagtttcacatcgtgtgatttaatcgatgatgtttcaaatttgatgaagaccgccaagacctctttgggtagcaagattgtttctatcgcgcacgacaaattcgcttccatcgctgttgaagcggtcctctctgttgctgacctcgagcgccgcgatgtcgattttgagctcatcaaggtcgacggcaggnnnggaggttctctcgaagacacttccctcgtcaagggtgtcgtcatcgacaaggacatgtcccatccccaaatgccttctgttgttcgagacgccaagattgctattttgacttgtccctttgaacctcctaggccaaagacgaagcacaagttggacattgagagcgtggaggagtacaaaaagttgagagagtacgagaaggagaagtttttggacatgatcaagaaggtgaaggacactggcgccaatttggttatctgtcaatggggtttcgatgacgaggcgaaccacttgcttatgcaaaatgagctccctgccgttcgatgggttggtggtcccgaannnaggcttatcgccattgccaccaacggccgaattgtcccccgattcgaagaccttaccgccgacaagctcggtcacgccggtgtcgtccgagaacttacctttggtaccactagggataagatgcttgttatcgaggagtgtgccaactctagggcggtgactgtgtttgtcaggggtagtaacaagatgatcattgacgaggctaagcgagcattgcacgatgccatctgtgttgctcgtaaccttgtgagagataaccgggtggtctacggtggtggtgctgccgagatttgtgcttctgttgccgtctccaagcgggccgacgagatccccacaattgagcaatacgctatgcgcgcattcgccaacgctctcgatgccattcctcttgcgctcgccgaaaactctggtttgtcccctatcgacactttggccgacgtgaagagtagacaggtgacagaaggtaacccaagactgggtattgactgtttgggcagggcagaaaatgacatgaaaaagcaacacgtctacgatcctctaatctcaaagaggcagcagttcttgctcgcgacccaagtggtaaggatgatcttgcgagtggacgatgtgatatgcctctgcatttggggacgagtaggaagtgatacagacacgatgtatgcatga

SEQ ID NO: 2271 - DNA, 1956 bp, Cryptococcus neoformans
atgtacctcgaaatcttcctcgcattgcagaagttacgggtgctgagaatgaagttgtgcgtgaattctgactctcggacgcttctagcaaccagccttccgacgcgctccttgagtgagttcgcttcacttctttcggaccatttgctaattcacggaaatgacagcgccgacttctccttttcccaaccccctttttcgacactcattgactctcgagtcctcgtggcccttgccgaccaaaaatttgcgcatccgactttagtacaggctaaggccatccctcttttgctcgaaggaaaagatgttcttgcccgagctaggacaggaagcggtaagactgctgcttatatagtcccagcagtacagaaaatcttggaggccaaggcttatcaagctactcgagcgatcattcttgtgcccaccaaggaattggccttgcaagtctcttctttcaccaagaacgttactaagtactgcgatggtcttgtgcaatgcgtagatgttgctgcaggtggggctagtatccaacgagtgcttctcaatgacaagcccgacatcgtcatctccactcctaccaaacttctgtcccttttgcagtctaaatccctttctctctcgcaactttcgttccttgctatcgatgaggcggatcttttgctttcgtacggtttcaaagacgatcttactaggattatggaccctacctctggatggatccctaagcttggtgtgcaaggctgcctcatgagtgctactttgagtgacgacgtcgaaggcatcaagggtcttgtccttcgtaaccccgccattctcaccctttctgaacccgcctccgcctcgtctctcctcagtcaacactacacccacacctccgaacgagacaagtttctccttatttacgtccttcttaagctcaaacttattcgcggtaaatcaattatcttcgtcaacgacgtcgaacgtggttatcgtgtcaaactcttcctcgaacaattcggtgtcaagtgttgtgttgtcaacagtgaattgcccttggcgagtagatatcacgtggtcgaggagttcaacaggggtgtgtatgatgtcgttgtggcaactgatgaggatgaagatgacgacaaggaagcggaggataaagagaaggaggccaaggaagaagcaaaacccgcccctggtccttccaaacgccgggcaacctctcctccttccaagcccaacaaacgagcccggcgcgcagaccctacctcttcgctcgctcgtggcatcgactttacctccgcatcttccgtcatcaactttgaccttcccctcacctctacctcctacatgcaccgagtcggtcgtactgcacgagctggtcaatcaggcctcgccctttcgttcgtcgtccctagagaaaattggggtaaagacaaggctgtatcaatcaagtcagcagagaaggatgagaaggtgtttgagaggatcaaggagagggtgaaaaaggaaagcgacagtgagatcaaggaatgggattggaaaggcaggaagggcgagattgaaggattcagatatcgaatggaggatgcgttgaaagctgtcactggcaagagggtcgccgaagcgagaagagaagaagtcaggcgagagttgttgaacagcgaaaaactcaaatctcactttgctgccaatcctctcgatttgtcttacctccgacatgatgctcctcttcatcccgcccgacaacaaacccatctcaaacatgtccccaactatcttatgccgaagattgcggccctcccaacaggtggggatgtaactgatcatgcaggcgttggattctctagacgaggaaggggaggtcatagagggcgaggaggcaggggatcaaagagtggtaggggcaagaaggttgatcccttgaaacaagtagtggttctcgtgttcttcaaaactcgtcatgtatgcatatga

SEQ ID NO: 2272 - DNA, 1836 bp, Cryptococcus neoformans
atggggaaaattacaatcggtatcgacttgggcaccacctactcttgtgttgccgtctggcaaaacgaccgggtagaaattattgccaacgatcagggcaatcgaacaacaccatcatatgttgctttcaatgactctgagcgacttatcggtgatgccgcgaagaatcaggttgcaatgaatccttacaacactgttttcgatgctaagcggttgatcggccgtaagtttaacgatgccgaagttcaggccgacatgaagcattggcctttcaaggtcgtcgaaaagggaggcaagcctgtcatcaaggtggagtacaagggagaagagaaaacttttactcctgaggagatttcctccatggttctcactaaaatgaaggagactgctgaggcttatctcggtggcactgtctctaaagccgtggttaccgtccccgcctacttcaacgactctcagcgtcaggctactaaggacgccggtgccattgccggtcttgatgtcctccgtattatcaacgagcctactgccgctgctatcgcgtacggtcttgacaagaagtctgagggcgagaagaatgttttgatcttcgacctcggtggtggtactttcgatgtctctctcttgactattgaggagggtatcttcgaggtcaaggctaccgctggtgacactcaccttggtggtgaggactttgacaaccgacttgtcaaccactttgtccaggagttcaagaggaagaacaagaaggacctttcttctaacgcccgagctctccgacgacttcgaaccgcctgtgagcgagctaagcgaactctttcttccgctgctcagaccacgattgagatcgactctctcttcgatggtatcgacttctacacttccatcactcgtgcccgattcgaagagctctgtcaggacctcttccgatccaccatggaccccgtcgagaaggttctccgagactccaagattgacaagtcctccgttaacgagattgtccttgtcggtggttccacccgtatccccaagatccagaagcttgtttccgacatgttctctggtcgagagcccaacaggtccatcaaccctgacgaggccgttgcctacggtgccgccgtccaggctgctatcctcactggtgacacttctgaggccactcaggacttgctcttgctcgatgttgcccctctttccatgggtatcgagactgccggtggtatcatgacccccttgatcaagaggaacaccactgtccccaccaagaagtctgaggtcttctctacctactctgacaaccagcctggtgtcttgatccaggtctttgagggtgagcgagccaagactaaggattgcaacttgctcggcaagtttgaattatccggtattcctccggccccccgaggtgtccctcaaatcgaagtgtcctttgacattgacgccaacggcatcctgaatgtaaacgccgccgacaaatctaccggtaagaccagcaagatcaccatcaccaatgacaagggtagactgtccaaagaggaaattgaacggatgcttgctgaagctgagagattcaaggccgaagatgaggccgctgcagctactgttcaagccaagaatggtcttgaatcttatgcctactctcttaagacaaccttgtctgacaacaaggacaagttcgactccgccgatcacgaaacgctctcgaagaaggtcgaggaggtgattaacgctctcgacactatgcagtctgcttctaaagaagagttcgagagtttgcagaaggagctggagggtattgccaacccaatcatgaccgtgagtgttccgaatttctga

SEQ ID NO: 2273 - DNA, 2037 bp, Cryptococcus neoformans
atgttcattagaagtatcttggcccgcgttcttcgactttctcattctttttttcacctgaaaaactcttttttacttataaaaatggccccctccgcatccaaacagaagcgactagcagaaaaggccgccaaggccgcgagcaagactggctcctccaagtcctccgtcactggtgccagcacccccctcacgagcgtttccgacgaccctactgatgccgcggagcagatgaagaagctcaacttggctaccgacaggagtgctgtatgtcgaatgctgttttctggtggtgttttggtttccgatcccaagggacgagacatcaagatcgatcagtatatgctttctttccacggtcgactgttgattgagggtgcggagattgctcttaactacggccagcggtacggtcttttaggtgagaacggttccggaaagtccactttcctccaatccattgccgaccgagacattgagattcccgaccacatcgacatctatctcgtctcaggcgccgtcgacccttccgatgttaatgccctcgattacattgtttcctccgctagagagaaggtcgagaggctcgagaagcttgcagaggacatgtctaccgccgacgacgttgacgagcttgctctcgacgccatctatgaggagctcgaggaaatggacccttcgacgttcgaggccaaggccggtgcaatcttgaacggtctcggtttctctcaacaaatgatggccaagcctaccaaggacatgtctggtggttggcgaatgcgggtcgctcttgcccgtgctttgttcattaagcctcacgtcttgttgttggacgaacctacgtcccacttggatttgggtgctgtcgtctggctcgaagcgtacctttccacttacaaccacatcttgattttgacctcccactctgccgactttatggacactgtctgtaccaacatcatggacttgaccaccaagaagaagcttgtctactacggtggtaactacaccacttacgttcgaaccaagagcgaaaacgaggttaaccagatgaaggcttacgccaagcaacaggaggaaatcgcacacattaagaagtttattgctagtgctggtacttatgccaacttggtcaagcaggccaagtccaagcaaaagattatcgacaagatggaggctgctggtttgattgagaaggtcgagcagcctcgtcagcttagattcaactttgaggacgtcaagaagcttcctcctcctatcatcgccttctcagacgttgctttctcttactctggtaagaaggaggactacttgtatcaggatttgtctttcggtatcgacatggactctagaatcgccattgtcggtgacaatggtaccggtaaatccacccttcttaatcttatcaccggcgccctccaacctgtcgagggtaccatcaacaagcacactcaactcaagctcgccaagtactctcagcactctgccgatcaactcccttacgacaagtctcccgtcgagcacattgcttctctctacagcgaaaagttccccgacaaggacattcagttctggaggcagcagattggtcgattcggtatcactggtgctcaccagaccagccccatcaaccagttgtctgatggtttgaggaaccgagtagtgtttgctatccttgccatggagcacccccacatcatcttgctcgatgagcctactaaccatttggatatggcttctattgacgctctcgccgctgctatcaaggagttcgagggcggtgttgtgatcgtctcccacgacttccgacttatctctcaagttgccgaagatctttgggaagtcaaagacaagaaggtcatcaaccttaccaagcaggacatctccatcgttgactacaagaaggctcttgccaagcgatacgtcccattttctatgcagcctaatcagccatcgattaacaataccctcacaggtcaagcccagattgagaaggctagactcatttccaagagtgctaccaagggtgttgcgtaa

SEQ ID NO: 2274 - DNA, 1926 bp, Cryptococcus neoformans
atgggcctgcggactgtcaaaggagctcgaggtgcggagaacttacccttccaggtggagcgtctaagagcgagggctgtggggtgcattgtgggcgtgaagcgtgtgggaggacaggcgcaagtaaccaagtttttgagtcttttcactgcaagaggagaacgctacattgctgctgctgctgtgatgagcggcgctcggcgcgggatgatgttggcggaaagaatgacgtggaattactatcaccagacgcgctctctccataggcctgtacaaggccgctgcttactgttcacagacaccggcccagagcgccagtcggggagaaaagctcaaaccgccaacattgtcgctgccaagaccgttgcagatgttatcagaacatgtctgggtcctaaagcgatgctcaagatgattctcgaccctatgggtggtatccttttgacaaatgacggtcatgcaatcttgagggagatcgatgttgctcatccagctgcaaagtccatgatcgaactgtcaagaacacaagatgaagaagttggtgatggaaccaccagtgttattattcttgctggtgagatccttgcctattctttaccccttcttgagcgccatatccaccctgttgtcatcattcgagctttcaaagccgccctcaatgatgctctcgaaactattcagcgtgtttctatccctgtcgatatcacctctgagaccgagatgctcgctttgatcaagacgtctatcggtacaaaattctcttcccgatggtctgatttgatgtgcaagcttgctctggaggctgttaggaccgttgctgttaccgccgaggctgagaatggtttggtgggtagcggcgaaggtggggataaggtgaacatcaagaccgtcgacctgaagcgttatgcccgagttgagaaggtccccggtggtgaaatcgaggactccagagtactttctggtgtaatgatcaacaaggatgtcactcaccccaagatgcgacgacgaatcgataacccccgtgtgattttgctcgactgccctctggagtacaagaagggcgaaagtcaaaccaacattgagatctccaaggaagaggactggaacagagtcttgcaaatcgaggaagagcagatcaaggctatgtgtggcaagattatagagttcaaacctgatctcgtgttcacagaaaaggatctcgcccaacattatcttctcaaagccaacatcactgcccttcgacgggttcgcaaatcggacaacaaccgtatcgctcgagcagtgggagctaccattgtcaaccgtgtggaagacctgcgcgagtctgacgtcggtacgcaatgtggtttgttccacatcgagaagatgggagacgagtactttaccttcctcgatcaatgccaaaatcctaaagcttgtactattctcctccgtggtccttccaaggatatcctcaacgaaatcgaccgtaaccttgcagacgcgatgtccgttgcccgcaatgtcgtcttcaaccctaccctcacccctggaggtggtgccattgaaatggccatctcagtgtctctgggagaaaaggcaaagcttttgcctggagttgctggcgccccttacaaggccatcgctgacgcgttggaggtcattcctcggacattggtgcaaaactgtggtggtaatgcgatcagaacgctgacagagctgcgagccaaacatgcagagggacaacacctgtatggtgtcgatggcgagactggaaaggtgacgaacatgaaggagtacgggcttcttgaatctgcgagcgtgaagatccaaacattgaagacggcaattgagtctgccacgctccttctgcgagtcgatgatatcgtcagcgcgaggagacctggagagaggtggtgccggtgcaggagtgcagacaatgggtga

SEQ ID NO: 2275 - DNA, 2016 bp, Cryptococcus neoformans
  misc_feature (1449)..(1449): n=g, a, t or c
atgggcaagacagaagttgcacccggcgtccaccacgttcaccctctccccgactccgtccccgagtctgaggacctcttcgctccccctcctcgtatgcagggcaaggaaggccgcccgaagcctcaccttggtcccaattacgaggcctacgtcaatgaatgggccaagactgttggtcccaataatgatgagtggtgggccgcaaaggccagggagactcttgattggtatgaggacttcaagactgtcagggccggtggctttgagcacggagacattcagtggttccccgaaggtaccttgaacgctgcttacaactgtcttgaccgacacttctacaagaacccgaaaaagaccgccatcatctacgaggccgacgagccctctgagtcccgtgagatttcttacgaggagctcatgcaggagacttgccgagttgccaatgtcctcaagagctacggtgtcaagaagggtgacgctgtgtccatctatcttcccatgacttggcaagccgctgctgcgttccttgcttgtgccaggatcggtgccattcactctgctgtctttgccggttttagcgccgagagtttgagggatagagtcaatgactgtgaatgcaaggttttgatcaccaccgacgagggtcgacgaggtggtaagagtattgctactaagcaaatcgtcgatgccgctctccagcagtgcccccttgttgagaacgttctcgtccttcgacgaaccggcaacaaggtccccatgactgaaggtcgtgacaaatggtgggacgaagagtgtgccaagatgcccgcttactgcccttgcgagaggatggcttccgaggaccctcttttcatcctctacacctctggttccaccggtaagcccaagggtgtcgtccactgcaccggtggttacctcctcggcgccgcccttaccctcaagtacgtctttgacgctcacccggatgaccgattcgcctgtatggccgatatcggatggattaccggacatagttacattatctacggccctctcgccaacggcatcaccaccgccgtctttgaatccactcccgtctaccccacaccatccagatactgggactttgtcgacaaatggaaggctactcagctctacactgcgcctactgcgatccgattgttaagacgtatgggcgaggaccacgtcaagaaccacgatctcagctctctccgagtgttgggctctgttggtgagcccatcaaccccgaggcttggcattggtacaatgactttgcgggcaagaaccaatgtgccattgttgatacttactggatgaccgaaactggttccatctctattgctcctctccctggagccatctccaccaagcctggttccgccaccttccccttcttcggtatggatgttgacatcattgaccctcaaactggtcaggtcttgganggtaacgatgtggagggtgttctcgttgccaggaagccatggcctagtattgccaggaccgtctacagggaccacaagaggtaccttgagacttacatgaagccttaccccggctacttcttctttggtgacggtgctgcccgagactatgacggttacatgtggatcaagggacgagttgatgatgttatcaacgtgtctggccaccgactctccaccgccgaggttgagtctgcccttatcctccacaagggtgtcgccgagactgccgttgttggatgcgctgatgaccttaccggtcaggctgtgtacgctttcgttacgatgaagcccgagttcgatttaaagagtaccaaggaggcggatcttagcaaggagttggctatccaggttaggaaagttattggtcctttcgctgctcccaagaagatttaccttgtttccgatctccccaagacccgatcagggaaaatcatgcgtcgaattctccgaaagattgtcgctggcgagggtgaccaactgggagatctttcttccattgctgacccccaaattgtcgacaggtga

SEQ ID NO: 2276 - DNA, 2202 bp, Cryptococcus neoformans
  misc_feature (820)..(822): n=g, a, t or c
atgggatcagatgttgacttaggctcggaagacgatcaaagtctggagtctgatgatgaggacgagttttcagggagcgaggacgacgtggatgtcactgctgcctttgatgacttcagctctgacgaggaaaaagacgagcccgagcgtagaaagcgcaagaagaaggaggaagaagccgagtatgagctggctggacgatcaagatgggctgctaagccggaggagcctgaggaagattctgttgaagtcggtcgtttgcctatcaaacttcctactggtgaaatccagatggtccaaggttcaacccgtatcgctgtccctcagcccaagaaaccagtaactaaggctgaaagtgaggacgaagaaacagatgaggttgatgaagaagaggaaaacagtgatgatggggcacaggcaatgaggatggcaagtcagaaagggaaatttggaaggatgggtattgcagagattgtaggcaggaagggttggaagaatgttcagagactggaagctgcaaaggagcaagtggcgcaactgggttctgaaatcctggcggggggagaacttgttgacatcgtatcgcttgaagaagggcaaccacctctttccgtcccagcctctattcgaggtctagttttcctctctcaactggccgtttacaaagatcttattccaggctataggattcgtgagctgacagcacttgaagaagccgagaaggttagggatgaagtgaaaagattgagagaaggagaaaagatgttggtgaaaagctacaagggttatttgaagatgctcgaggcagagatcaagagtnnnttcaatggttgcatgttggcaggtattaatggtcttttaaaaggcaaaacgaatctcgctactatcagtttaaggtgtatgtgcgagctcttgacatctgtcacccacttcaactttagcgagaacattatgggtgtccttgtcggtcgactcggcaggcgtagctgggacggtgactctgatctggtgcttcaaactttcattcgtgtgttccgcgatgacatctcggggcagcattctcaaacgcttgtccggttgattgcgcgaatgatcaaggaacgccatttccaagttcatcctaatgttcttttctgtcttcttcaccttcgtctcaaggatgaacttgaccagatgcggcgaggtaagaacgcaaagggcagcaacaaggaaaagggagggaaggacgagatcaagggaaagaagttcaaatcagagaaaaggaagaagtgggcgacgaagaatcagaaaaaacgggaaagggagatgaaggaagttcagaaggaaatggcagaagcagaggctgaggttgacaaggaagaaagggcccgagtacagactgaaactctcaaaaacctctttgtcttgtatttctccatcctcaagaacccaaaacgtacacctcttttgccggcagctttggagggtatctcaacttactcccatttcatcaacattgacttcttccgcgacctgcttgttgttcttcgcaagatcatcgcagatcagcagttatccgatgccactaacaagcaagaagaagagagcgaagatgaatcttcccagcaattggatgtcgttggcgccagccagcgtatccgaaacaggttactagctatcgctactgcctttgaccttctttcaggtcagggagaggcgctcaacattgacctttccgacttcatcaaccagcttttctctcttcttcgaccgttgtgccttgacactggtattgaggaccctcctttccttccagcttccacaaaatcctcttctggtgctgtccacaccctatccacgtccgcactcctcttccgatgcttaaatgcttcgttcttctctcgtcactctcgatcgccagctaatcgatctgcggcgtttgccaagagacttactgagtgtgctctgcatttccctccccgtaccggcaagcaagcgatagcatttgctcgatcccttctcagcaaggaacctaagatcgagggcttgttagatactgaggagaggatggcggatggagcgtacagaccagagttagatgatcctcaattggtcaatcctttcacaacaagttggtgggaggctggtgttttgggtagcaagcattgggaccgagaggttagacttgagatgagcaagttgagagatggcaaggttgtctag

SEQ ID NO: 2277 - DNA, 2187 bp, Cryptococcus neoformans
atggtcgcaatcccacgactcgcaaggctctcagtcccagcatgggctcttagtgcaagaggcaggttctacgcaacagtctccaccccccagacgctcgtcgaaaagatcgtccaaaagtacgcggtcggtctctcagagggtgtcaaagttcgtgccggggactatgtcatgatcaagccagagcatgtgatgacccatgacaacactggtcctgtcatttccaagtttctctctctctcctgttccaagctcgacaaccctagacaacccgtttttgcccttgatcacgacgtgcaaaaccagtctgaaaccaaccagaagaagtacaagaagattcaggcttttgccaaggagcatggtgttgacttttaccctgctggtcgaggtattggtcaccagatcatcgtcgaggagggttacgcctggccagggaagatggtggttgcaagtgatagtcattctaaccactacggtggtgtcggatgtttgggtactgcgattgtcagaactgatgccgctggcatctgggctacaggcaagttctggtggcaaatccctcgaattgtctccgtttctctcgacggccgattgtctcctggtgtgactggcaaggacgttatcgttgctctcgctggtcttttcaacaaggacgaagtcctcaatgccgctatcgaatttaccggttctggtgtcgagcacttgtccattgacgaacgtctcactattgccaacatgactaccgaatggggagctgttgctggtgtattccctgttgacgacaagctcaaagagtggtaccaaggcatcctccgaaaggcggaattacggaagttcatcagccccaccgtcccttccacagtcggcgctaaggtccaccctcgtctcaatgccgcccgtctcgacgacgctatgaccaacagggtcgttgctgaccctggagcccactatgcagctcgcctttccctcgacctttccactctcgttcctcatgtctcaggtcccaactctgttaaggttgccaccgctctccctaagcttctcgaccctcccatccctatcaacaaggcgtatcttgtctcatgtaccaactctcgagcgtctgacattgcctctgccgctcaagttctgcgaggaaagaaggttgctcctggcgttgaattttacatcgccgccgcctctagccgagtccaggaagatgccgaagctgccggtgattggcagactttgattgacgcaggtgccaaaactctccctgcaggttgcggcccttgtatcggtcttggtgtcggtctccttgagaagggtgaagtgggtatcagtgccaccaacagaaactataaaggtcgtatgggtagccccgatgctatcgcctaccttgcctcccctgctgtcgtcgctgcctctgctgccaagggtgtcatttgcggccccgagtctatggacctcagccaacttccccagtatgaacagccaaagttttctatcatcaaggaaggtgctgctggtgaggagaagcctgttgaggttgacgaggcttcccttgagcccttgctcgaaggtttccctgcctactttgagggtccacttctttttgcccctcaagataacttgacaaccgatggaatgtatcctggaaagtacacataccaggatgacatcacccctgagcgacaagccgaagttgtcatggaaaactatgaccccacttttgctgctaccgcccgcgaactccgtaccgccctccccactgcttcttccccctccactcttcccggcgccatccttctttctggttacaactttggtaccggttcatcccgtgaacaagctgctactgccatcaagaacgccggtatccctctcgttatctgcggttctttcggtgacattttcaagagaaactccatcaacaacggtctaattcttatcgaatctcctagcttgatcaaggacatgacggagagattcgccaaggacggagtaaggaacaagggtggcaaggatggcaagttgactgtcgtccctgagggctggagaatcaaggtggactctcaaagagggctggtgaccgttaacatgggtgaggaagaggagaagacctatcctgcggccaaggttggtaggagtgtgcaagaattatgggtcaacggcggtttggagggtttcattagggcttcattatag

SEQ ID NO: 2278 - DNA, 2226 bp, Cryptococcus neoformans
atgaacaatgatgaacgtctcgagtatctctttcgactttgctacacatatccgccggtaacatgccacctaaaaagcaccaacaaaagaacgaaccaaaacaggttagtcattttcacagccatgaacaccactgacatcttgtttttacagaaggcggacaatgtggacgaagcccctctacaagccgtagtcctcgcagactcctacaaccgtcgctttgaggttctttgtacagaccaacctcgagttcttttgccgttatgttcaacaccacttttggcttggactttggagagcttgagtttgagtaaggtcaaacaagtgttcatcttctgtggtgtgcatgcggataagattaggacttttgtcgagtcttcgccttatagagcgatgctggacattcattgcttgtcttctcaaacagctcgatcagcaggtgatgctttgcgtgagctggatgacatgcacgtcttgaatcctgataatccatttatcctcgtacattctcctcttatctccaactacgacctctccaaaattatagatgcccacaggaagcgccgtgacgtcgacaaaaactttatcatgaccatgggcgtcagtcgtggcggtcgtcctcaccccgagtcacccatcatgctcgtccacccaccttcttccagattattgcactatgctccccacccactttcacctactcaaccacgtatcagcttcccctcatctctcttcctcgatccattcccagctaccatcgacacttatgaaatatggtctggtacttcgccgtcatcgtccaaccaagggggataccgcgaccttggtgttgacatttgcgaggccgatgtacctgctctttgtactgaaaactttgactaccatgacctccgacgacattttgtcaatggtgtccttacatccgagcttctcggtaagaagattgctgttcatgttgtaggccaagaggaggaaagtctggatgctcgagctggtggcggcagatacgtggagagtgtacgagatacaagaacctttggtgaagtcactagggatgttttaaggagatgggcattcccgctcgctcctgatttgaacgaaccgggaggctcgcaatatgaattgagagctggaaatgtgtatattgccaaggaatcagtcgttctttcccgaacaacgacattgagtggtcctcttcttattggtcctagatcggccctcgcccacaacacacttgtccgtcaatcgactctgggagcagactgtaaaattggggcaggaagtataatcaggaagagctatgttttcgacgatgtcaagatcggggaaggatgtgtagtggaggagtgtatgattggcgaaggtgtcgtcatcggacacggttgcaagattggcaagggcgtattgctcggaaacggtgttaggcttggcaagggggtagttgttccggacttctcaagaattggaaggcagccttacagaggtgacgattgggattctgatgaggaaagggacgagttcgagaaagaggagattctttcattcctcggtgaagactctattggctacctctggcccaatgaggaggaggaacctccttcggattccgaggatgagggtgaagatccttacgagcatcctcgaaacaaaaagctcttgcaactcggccgccgcctgtccaacctttcttccccgagcacgtccatttccactctttctgccgcatcctcttctgccccctcgtctcctctctcagacgcatcttctacgtctctccctgacattccctccctttcactcgatgccgggccggacaaggcgttctatagtgaagccgccgcttcccttcaacgagcttacgaggaggatcacaagatcgaaaatgccttgctcgagttacgtacattggtcatgggttacaacgccggtcttgaacgtgctcgagaagaagtcgtcaagttttttgtgtcgaagatcgatgtacgcggccccgctacctccatcctctcttctgctgtcaagatcttctcacgatggggccctctaatggctaaccttacatcggaccctacgctcctcatccttgacgctcaacagtactgcgtctctaccgtcccttttgcttacattccttggtttggtatcattcttcgtgcaatgtatgagacagatttggttggtgaagacgagcttgtggaatggggagatgagcagctcgcaaggtga

SEQ ID NO: 2279 - DNA, 2235 bp, Cryptococcus neoformans
atgggcgggctgaacgttcaaggcgctggaaggacaaagttcaagtatttgaggatgttgagagaggttgccaacagaagacgagaggatattgtcattgatctaaaggatctcaagagggtaggtaaacgtgatgacctacttaatgacctctcactccttcacaacatccaaaacaacacgcgtcgctacattcagctcttctcggacgtgatcgacaaaatcatgcctccgccggacaacgaggtcgactataccgatgatgtgctcgacttgattatgcagcaacgaagggaaatgaacgctcaagttgaggcgggagaaaggaatgcagacgccggaatgttcccaccagagctgatgagaagatacaatgtatacttccgcccgcttcgatctgacgacgtccttgctgttcgagcagttcgaggtgcccatctcggcaagctcatcaccgtgcgaggtatcgttacccgtgtttctgaagtcaagcccctcctcatcgtcaacgcctacacctgtgactcgtgtggtaacgaaatcttccaagagatcacccaaaaacatttcgcccctctcactgtttgcccctctgacgtctgtgtcaggaatcaaaccaacggtcaattgcacatgcaaactcgagctagtcgattcaggcccttccaagaggtcaaaatccaagaaatggccgaccaggttcctgtgggtcacatccctcggtcgatgactatccatctgtacggtgctcttactcgatctgtcaaccctggagacgtcgtgcacattggaggtatcttcatcccaactccttacaccggtatgcgagctctccgagcaggtcttttgcaagacactttcctcgaagcaatgcatgttcaccagctcaaaaagcaataccatgccatggagtctacccccgaaatccaggaggctatcgctgacctcaagtccgatcctgccctctacgcgcgacttgccaactctatcgcgcccgagatttacggtcacgaagacgttaaaaaagcattgttgcttttgcttgtcggtggtgttacaaactcgaggaaggacggcatgaagatcagaggtgatattaatgtttgtctgatgggtgaccctggtgttgccaaatctcaattactcaaatatatcacaaaggtggcccctagaggtgtttacactaccggtaggggttccagtggcgtcggtttgacagccgcggttatgagggatcctgttactgacgagatggtgttggagggaggtgctcttgttctcgccgacaacggtatctgctgtatcgatgaatttgacaagatggaggaatctgaccgtaccgccattcacgaagtcatggaacaacaaaccatctccatttccaaggctggtatcaccaccacccttaacgcgcgtacttccatccttgccgccgcgaaccccctttacggacgatacaatcccaaaatctctccggttgagaacattaatcttcctgcagctctcttgtctcgtttcgacgttctcttccttatccttgattctcctacaagggaagatgatgagcgattagcccaacacgtatgctttgtccacatgcacaacacccaccctgaactcgactttgagcccgtcgagcctacattgatgagacactacattgccgagtgccgaaagattgaacctcgtgttcctcaggccttgtcagaatacattgtttccagctacgtacagatgcgcaaacaacaacaagaagatgaagcagaggagaagtctcactcttatgtttctgcccgtacccttcttgccgtcttacgtctgtcacaggcgcttgctcgtctgcgacatgacgatattgtccagcaaggcgatgtggacgaagctctccgattgatggatgtctccaaggcgagcttgtacgaacactctcaacagaggaatggcgaagatcagacaagcacaagtaagatcttcaggattatcaaggacatggcacagagggctgcggatgaggacgatgacgaagaaatgggagaattggcgatgatggatgtgaggaacagggttattgccaagggtttcacggagatgcagttaatggagactatcctcgaagtaagtttctatcgatgctttttcagttctatcaagctgacgccggttgtacagtacgagaacatggacgtgttgatgcgtaccgccaacggctccagattgcaatttgttactgtctaa

SEQ ID NO: 2280 - DNA, 2088 bp, Cryptococcus neoformans
  misc_feature (454)..(456): n=g, a, t or c
atgccacctcgacgacatacagatgcgcatggcagccctggcttctctcatctccaccccgcgatgacccgcccctcgctgctgaacgcacagacgcacgcgctcctcacgctgctcaacctcaacaacccgcccccggcaaacccggcggcggccggcccgttcccccgcccgtcctcccccggcgccccgttcgacgacgccgcccagccgcccctcgtgtggaaggtgctgatcctcgacgacgccagccaggacgtgctcgccaccacgctgcgcgtccaggacctccgggagcagggcgtcactctccacatgcagctgcactcggcgcggccgccactcgccgatgtgcctgccgtctactttgtctcgccgacgctctccaacatccgccgcatcgccgaagacctcaacccgcccttatacgcctcctactacctcgccttcaccnnntccctgccccgctcgttgctcgaggagctcgcatctctcatcttgtccaacgacccttccggacagaccggccagctcatcgccagcgtcacggaccagtttttggactttgtcgtcccctcaccgaatatgttctccctcttgccaaggagagagctcaggcaggatgccgacggcgcggcagggaaaggaaagaaggggaaggatgttggacgtattgccaacggactgttcagtgtgatcaccaccatgaacatgacgcctatcatcaggtgtccgcgaggtaatgcggcagagatggtcgctcgtcgtttagatgccaagctgcgtgaccatatcgcatcaacctcttcccgcaatacacgcgatgcatacactgtcgatgctctccagcgtcccctcctcgcgattatggaccgaaacattgacctcatccccatgctctcccactcttggacataccaagctctcgtgtccgacgtgctcgacatgaaactcaacagagtcaccgtctcttcccccgaaaacggtcgtctcacaaaaaaatcttacgatatcgattccaaagatttcttctgggccaaaaacgcgggcaaccctttcccagccgtggcggaagatatcgacaccgatctgagcaagtacaagacggatgcggctgaaatcacgaggtcaacagggataagcgatgtcaatgacgtttcccaaatcgactttacatccaacactgcaaacttgaaaaccgccattaccgctttacccgaactcaccgcgcgcaaacagattctcgatacgcacatgaacattgccaccgcattgttacaatccatcaaagaacgtggactggacaacttgttccaagtcgaggaaacagcgagcaaacagacaaaagctaccatcctctccgtcctgaacggcgctaccgacgagccggggcaaactgcctccccttccccgctcgaccaactccgcttggtcatcatctactttctctccacccaagatggggcgctttcaaaggaggatatgaaggagctcgagggcgtgttaaaggagcacggggcggatacgcgcgcattggaatatgtgaagaaagtgagggatattcatcgcatgtccacgttggcggtccagccggccgtggcggcccagagtcagtcgggaggtggaggtgaatggacaagagggttcagtgcgcttggtaaccgtgtaaaaggcggtatcccaaccgtagggctcgacaacctcatctctggcgtcaaatccttcctccccgcacggaaagacctcaccctaacccggctggtggaagcgctcatggatccggcatcggcgtctagtcaagcattgcaggatacggatgattacctgttcttcgatccgaaaacgtctcgcgcgagacccggtcatgcaggtgggggaggaagaagtcagtttagtgaagggctggtgttcgtagtaggaggaggaggttatgtcgagtatggcaatctgatggattgggcgaataggtcgggaggcggaggaaggaaagtgacgtatggcagtacggagattttgaatcccgaaaagtttttaaagagtctggaagagctggggagtctagctgtaggatttttatggagttcttag

SEQ ID NO: 2281 - DNA, 2250 bp, Cryptococcus neoformans
atgggcaagtctacgaaagccttcaagaagtttgcctcttcgggcaaactcaaggataccattcaaaaacgtcgccaacatcagcaagccaagcgcaagtctgacgacatcaaaacccaacgcgctaagcagcgaggtgccgctcacgacccggaggacgagtctgaaggtgaaggttccgaaggggaggacgaagaggatgaaaaggaagccaagagaattggtaaacctaatgccggagggaaagctggtggtgtcgccaagactgttgaagatctgtttggcgccggtggacttgacgttgaggacgatgaagaatcggagctggaagagctgggatcagaggacgaggatgaggaagatgacggagacgacgaagaagacgagggagaaggagatcttctggatgaagaggccatgaagaaggccatgaaggatttggcgaagaacgatcctgaattcttcaagtatcttaaagaaaacgacgaagatttgcttgattttggccagtcaagcaaagcaaacaagggaaaaggaaagcaagatgaggatgatgaggatgacgaggatgaggaaatggaaagcgatgaggacctgcttgaagaagacgaggaggaagaggaagccgaaaggaagaggatcacggtgactttgaagatgcttcgacagtggcaagaaggcatgctcagacaacactccattagatcacttcggaaaactttgatcgcctttagagcagcagcccacatgaacgaagacgacggtgatcaagggagtggtttggacactaaatacattattgacagtgctcaagtcttcaacaaaatcgtggttactgcccttaaattcactcctgtcgtcatctctcaccacttcccatataaaactctgcctagcggtaaagtcaagctccagccccccaagaaaaccaaccaaaccctcaaccgacttatcctctctcacttctcgactctgctgcacctcatcaaatcactccccacgactccgtctagcgttgcttctaagaaggacgaaggtgccagtggattgctgttgacggctgttggcgagagtacaaagttgatcccctgggtccttagtgcgagaaaacatttgagggcatacctcaaggtactcttggatctctggagctcggctggtgatgatgttaggatcgcttcgttcctggcggtaaggaaattgttcgtcgctggagatgatgcggtcaaggatctttgtttacgaaacatttaccgatcgctcccttcccctctccgtaataccactccgcataaccttccttctctcaacctcatgaaaaacactgcctctgagctttatcaactcgctccctctctttcttaccagcatgccttcggtttcatccgtatgcttgctgtgcatttgcgtaatgttgtgcggtcaagcaccaccggcaaggcaggtgacaaccagcaagccttcaagactgtttacaactggcaatatgtccactgtatcgatttctggagtcaggtattggctggtgcggctagcgtggagaaccagaaggcgaacgcgggattggaaagtcctttgaagccattggtctatccccttgttcagattgctttgggtgcttatagactccttccttcctcgcgatacttccctctccgattccacatccttcattctctcctccgtatcatcagtcgcaccggcacttacattcccctcgcccccttccttctcgagatcctcgattctaccgagttcagacgcgccaaccccaagaagggtactatcaagcctcttgactttgagtacatcatccgtgcccctgcggcttatcccaagactcgagtcttccaggaaggcttgggtgaagagctggtgttccttttgggagaataccatgccgctgtctcaacgcaaattgccttccccgaaatggttttgcctgttatcttgaccatcaagaagcacatcaagaaggggtctgctggttcccccaaggttgtctcttccctcaaggtcctcgttgagaaactcgaggctacccgaacgttcatcgagaacaagcgtcggaacgtctcttttgctcctagggatagggcggaggtcgacaggtttttggagggacaagggcctgaagtgactcccgttggaaactggatgagattgcagaggaagatcagggatcagaagaggtcagaagtagagaaggctttgcgtgaggagcaggacgaggatgaggacagcgagtag

SEQ ID NO: 2282 - DNA, 2100 bp, Cryptococcus neoformans
  misc_feature (643)..(645): n=g, a, t or c
  misc_feature (670)..(672): n=g, a, t or c
atgcccgacgttgtactacctctcgtgcagactcccccctttgttatcattgctctcgccgctttacagggtattcccgtcacctgggatgctcagtctggagaacagggtcagactacttacggtgatattgttggtgccgaaaacgttcgagctgagctcgaaaagggtgtcgacggcaaggaggtaagcaagaaaagagttcataacccattgaactctttccaagacgtctccgcggtcctggacgctttcgatgactacctcgcctatcgtacctactttgccggccccaagtttggtttcggcgatgctaccatttggggcaccattcgaggcaacaactctgccattggttccatcaagaagcccggacgaccccatttgcagcgatggttcaaccacgttgagactctcgatgtgcccaaggctgcgctcgagtctcacagacaggccaagagcgagatggagaagggcaagaagaccaagagattggaaagtattgatgttgttttgcctaacgctatcaagggcaaggttgtcgttaggttcgcccctgagccttcaggatacttgcacattggtcacctcaaggctgctatccttaacagatacctggcagaccagtaccaggggcaagttnnnctccgtttcgatgacaccaaccccnnnagggaggagggtgagttcgaagaggctatccaggaagacctcaaaatgattgaaatctccttcgacaagatagttcacacttccgaccacttcgacaaaatccaggcctacgctgagcaactcatcaagcaaggcgacgctttcatggacgacactgagggcgaaaccgtcaaggagcagcgtcgagcgatgatcccttctaaaaaccgagacctctctattgaagagaacttggttaagttcaaggagatgtgtgagggtacggaggaaggcaagaggtggagtttgagagctaagattgattatcaacacaagaacggtactttgcgtgaccctgtcatctaccgatatgttgagggctcgcaccatgttactggtaccaagtacaagtcttaccccatgtacgatctcgcctgtcctatcatcgaccacctcgatggcgtcactcacgctctccgcgccaatgagtactgggcccgtcatgagcaataccaatggttccttaagactcttggtttcgccaatattgagatctttgacttcagcagggtcgactttgtttacactgttttgagcaagaggaaattgaagtatcttgtcgagaagaatgttgtcaaaggctgggatgacccccgattccctaccgtccgaggtatacgatcccgcggtatgacggttcaaggtctcaagaactatattctcggtcagggtgcttctcagcaagccgttcagcttgagtgggatggtatctggactgttaacaagaaggttatagaccccgttgcccctcgatactgggccattgcggaggacaggatggtcagtgtcaatgttattggccgtgagactgaagagcctgaggttgtcagcaggcccttacacaagaagaaccctgaggttggagagaagaagttggtttttgctagcaagttgatcatggagcaggaggacgccaagacctttggtgagaatgaagagatcacggccatggactggggaaatgctttcgttacttccaagattaccaccccttccggcgacgtttcttctctcactatcacacttcacctcgccggagacttcaagaagacttctaagaaagtcacctggctcgctgcgccgactgatgccaaccctcttatccccgttgtcctcattgaatacgattacctcatcaccaagaagaagctcgaagaggacgactccctccctgaggtcctcaacccgaagaccgagtaccgcacctacgcgcttgcttctaaggaagttgaaggccttaaaaagtgggatatcatacagttcgagaggaagggattctacatctgccagggtactagagataaccagggcaggatggagtttggtttcatccctgatggacgggctgcgactggcgttgaaagccgagcccgcaaaggaaaaaactaa

SEQ ID NO: 2283 - DNA, 2064 bp, Cryptococcus neoformans
atgccaggcccgacaccgtcagcgcaccaggtgctcgtgtactcgggccccggggtgtcgccgctctccctctcgcacaccctcctcaccctccgcctcctcctgctcccccactacaccgtccagcccgcagccccagacctcctcgcactccagccatgggaaccgtcctgcgcactcctcgtcgtcccaggcggcagggaccttccctacgtcgacgagctcacgcacaagcggcccgtcacaaacaggatcagagagtatgtccagcaaggcggccgcttcttgggcatatgtgccggagcgtactttgccagcgccgaggtgaggtttgatgtcggaggcggtatggaagttgccgggaagagagatttggcctttttccctgggcctagcagaggacccgtattccaaggttttcaatatgcgtctgaatccggatccagggctgtcgtcctcaacctcgaatcttccaagctcgagacactcaaccacatctattataacggcggcggccaattcattctcccttcgcctccccctccaaacgtccaaatcctcgctcgcttccaagaaacttgttccgacccatcaggacaacaacaacaacaactcgtcgccgccgtcttcacccaaaacggcaagggctgcaccgttctctcctctgtccatccagaataccctctctccgaccctccggcgagtaacgccattgctaaactggacgtgcggccgtcccaggtggaggttgagatgagcgacaaggctcgtttgtcgtgggtcgaggagttactcatcaagctcggtttgacccctcccgaacgtcttaccgccgcaaaccgggccaaatcctcagccgactcggagcacgaggatgaagacccggctctcctccttcaccccactcacccttcacccatctttttcttggatgcgaacgatgagattcgttttggtacgacggaagctacctcgcctgaacgagcagcctctgaagatggtatcacgcaatggcttgcgcaagccctcgaatactcttccagatggactccattgttcaacttttctacttactgggatgagcttgatcaggcaaggaagaggagcggtagacgttcaggcgtgatgcggcagggatcggatggacagggcgagcggtgttcattgggtgactgtgtcttgtacggtgaaacagtgacgagtactcagacgatgcttgacggcaacccccttctcctcaccaatctccctacaccgctcgtcttcctcgcgtctttccaactttccggccgaggtcgaggctccaacatgtggttatccccacctggctgtctccaattctcactgcttctcgacctccccgcttccctttcatccaaaatggttttcatccaatacatcatggctcttgccgtctgtgaagctatcgatgaggatgggagattaggtgttagaatcaagtggccgaacgatatctatgccgaggttgaaggcgtgggtgggacggagatcggtagtggaaaaaagggcaaggccaagttgggtgggatcttggtgaacactagttttgtcggcgggaaatggagaattgttgttggatgtggtatcaacattctcaacgctcttcccacatcatccgtctcccaactacatgctttactcgccgccaaactttcttccacatcatctaataaacctcttccgcctgcacctaccatggagggtacctttgctcgcatcatgagttcctttgatgcgaaatgggagcaattcatcgaggagaagggtttcaaagggttcatggatgaataccacggaaggtggttgcattcagggcaagacgttctcctcactaccaccgaaccccacactcgcgtccgtatcctcagtatcaccccagaccacggtcttctccgctcccaaacgcagaaccactcaccgtttgtcgacctccagccagatgggaacagttttgatttgatgagcgggttgatcaagcggaaaataaggggttctgtgtattgtaggtataaaaagctcgacattgacatcctgtctttatga

SEQ ID NO: 2284 - DNA, 2163 bp, Cryptococcus neoformans
atggattattgcaacacatctcttcctttctcacttgtttttctccttattcttgcgcaaaagatgtccggacagcagccccccagcttcaacccaggcgcattcgagttccgtccaggacaggcacctttcgcccccaggcagcagcagcccttcgacccgtacggccagcagcagggcggatatccccagtacggacagtatggccagcaacagggataccctcaatacggacagtatggcggttaccctcagcagcaaggctaccctgttcccggtgctcccggtgccggacctagggcttaccagcctccacaagccaggaatgtccaaggtttccagcctcccagcttctcttcatcgcctgcgccccctccggacaccaaagctcctgctggaaaacctgtctctttatccattggaggtggtggtgcacccaaagccgctcctagcttgtctatcgagaaggaggcttcctcaaagtcttctcccaaacctgccgctcctacaccaaaacccgccgatgcccctgctgccaagtctgaggccgcctctgcccctgtctctgctgccgagaagaaggctgaaaaggctgttccccttaccagtgacgctcaaggcaaggttgttgctgctgagacttctgctgccagccccgccaagtctggcgctagtactcccgtcgccactgtcagcaccagcaccaccaacttctccaaggtctctgccaagaacgatgctgaagctatctaccgcgagcaaaaccttgctggtgacgctgctttgcgagacctgtacggtgagaacgtcaaggacaccaacatcaagtctcacctaaacatcattttcactggtcacgtcgatgcgggcaagtctactatgggtggtcagttactctacttgactggtgctgttgacaagcgaaccatggaaaagtatgagcaggaggccaaagctgccggtagggagacctggtacctgtcgtgggctttggacagtggtaaggaggagcgagcgaagggtaagaccgttgaggtcggcagggcgtattttgagagtgaaaaacgaaggtataccatcttggacgctcccggtcacaaaacctatgtgcccagtatgatctccggtgccgcccaggccgacgttgctttgcttgtgttgtccgcgcgaaagggcgagtttgagaccggtttcgaacgtgagggtcagaccagagagcacgctatgcttatcaagaacaacggtatcaacaagcttatcgtcgtcgtcaataagatggatgacactactgtgcaatgggacaagggacggtacgatgagattaccactaaaatcactcctttcctcaaggcggttggtttcaaccccaagaccgacatcacttttattcccgtttccgcccagattggtgagaacatgaaggaccgagttgacaaaaagattgctccttggtgggacggcccttcgcttttggagcatcttgacaacatggaaattatggaccgaaacattaatgctcccttcatgcttcccatctctgaaaaatacaacgagttgggtaccatggttatgggcaagattgaatccggccacgtcaagaagggcgacactttgcttatgatgcccaacaagcacactgttgaagtcactggtatcttctctgaacaatcagaggacatggacatggcattctgtggtgacaatatccgaatgcgaatctctggtgtttctgaccgagacattacccccggtttcgtccttacctctgttcaaaagcccgtcaaggctgtcactgccttcaaggcagacattagtttcattgacaccaagaacattatctgtcccggttacagctgtgtcttgcacgtccacacccttgctgaggaagtttccgttacttcattcctccattactacgagaaaaagactaggagaaagtccaagaagccccctcagttcgctaaggctggtatgctggtctctgccctcattgagacttctgcccctatctgtattgaacgattcgaggactataagatgcttggtcgattcactttgcgtgacgaaggtaaaactgttgctattggcaaggtaaccaaacttattgaaaggagcgaggatatgcccgatgttgctgcgctttccttgaaggcggcgtcgtaa

SEQ ID NO: 2285 - DNA, 2154 bp, Cryptococcus neoformans
  misc_feature (544)..(546): n=g, a, t or c
  misc_feature (1354)..(1356): n=g, a, t or c
  misc_feature (1584)..(1584): n=g, a, t or c
atggcaggaagagatccgagagaccgtgctccaagagtgcgcaacagagcacccgctgccgtacaggtctcggagcagcttttgagagaggcgcaagaacgacaagaacctgctatccaggcacccaaacagcgtgttcaggatttggaggagctttcagagtttcaggcgaggaaaagaacggagttcgagtcaaggatcagatactcaagggacagcattctcgcatggaccaaatatgcacaatgggaagccagccagaatgagtatgagcgatcaagatcagtgtttgagcgagcgttggatgttgatcccagatcagtggacctctgggcaatgcagattaagtataccgacatggagctgaaagctcgaaacatcaaccacgctaggaatctttttgacagagctatcaccctccttccccgtgttgacgcactttggtacaaatatgtctatcttgaagaattgcttctcaatgtttcaggtgctcgtcaaatctttgagaggtggatgcaatgggaacccaacgacaaagcttggnnnagttacatcaagctcgaagaacgttataatgagctggatcgggcttccgccatttacgagcgctggattgcttgccgcccgattcccaagaactgggtgacatgggccaagtttgaagaggacaggggtcagccggacaaggctcgggaggttttccagacagctttagagttcttcggtgatgaagaggagcaggtggaaaaagcccaatcggtatttgctgcgttcgcaaggatggagactagattgaaggaatttgaaagggcgagagtgatttacaaatttgccttagcaagattgcctagatcaaaatctgctagcttatatgcccagtataccaaattcgagaagcaacatggtgaccgtgctggtgttgagctcactgttcttggcaaacggcgcattcagtacgaggaagaattggcctatgatcctacgaattatgatgcgtggttttctcttgccaggttagaggaagatgcctatcgcgcggacagagaagatgtgtacgagagagctgtggccaatgtccctcctgcgctggaaaaaagatattggagaagatacatttatctgtggttgcaatatgctgcatttgaggagattgacaccaaggactacgacagggcgcgggatgtctataaagcagctgttaaacttgtgccacataaaacgttcacttttgctaagctctggctggcttacgcttactttgaaattcgtcgacttgacgtctctgcggcccgtaaagttcttggtgctggtatcggcatgtgccccaaaccgaagctctttactggttatatcnnnctggagatgcggctgcgagagtttgatagggttcgaacattgtaccgagaagttcttgactgtgagttgtcttcactttctgcctggatccaatggactcaagttgaatctgccgtcgaagatttcgaacgtgttcgagcaattttcgaactcgccgtgcaacaatctctggatatgcccgagatcgtctggaaagcgtacattgacttcgaagccggcgagggcgancgcgaacgtgcgcgtaatttgtacgaacgcttgctcgaacgtacttctcacgtcaaagtctggatttcatacgcactcatggagatcgcgacgcttggtgggggagaggatgaagatggcaatgagattgaaggcgaggctggggacgctgatttggcgaggcaagtgttcgaaagaggttataaggacttgcgagcgaagggtgaaaaggaagatagagccgtgttactcgaatcttggaagagtttcgagcaggagcatggcgacgaggagacgttggccaaggtagaggatatgttgcccacaactcgaaagaggtggaggaaggcagaggacgggagtggagagttggaagaatactgggacttggtattccccgacgatgaaagggaagcgaacccgactagtttcaaattcttccaggctgcccaagcttgggctcaacagcgtgctgggcagggagaagaaggcggtttatcctacgatttgccgtcagattcagaggacgaaaacgaggacggagacgaggacggggacggtagggaagaagagggaatggaccaggattag

SEQ ID NO: 2286 - DNA, 2061 bp, Cryptococcus neoformans
atgggcaagattcttgccggtgactctgaatcttaccagtaccttatcgagtccattgagcgatttccttctcagcccgagttcgccaagctcgcctttgtcacctttttgacagctggtttccctacccgcgatgccacagtgcctctcatgctcgccctagaggcaggcggtgctgacattatcgaactcggtgtcccattcagtgacccagtcgccgacggtccggtcatccaaaaggccaacaacgttgccattgaaaacaatgtccactactctgactgtatcgagtacgtccgacaggctcgtgcccaaggtctcaaggctcccgtcttgttcatgggctactacaaccccatcatcgcttatggcgaggaaagagctgtcaaggacgctcgagaggccggtgccaacggctacatcgtcgtcgacttgccccccaccgaagccgtcgactttagaaacacttgtaccaaggccggcatgtcgtacattcccctcgtcgccccttctacgagcatcgatcgagtcaagttcttgacttctatcgccgattctttcatatatgtcgtctccaagatgggcgtcaccggttcctcttcttccgaaaacatctcagcctccctccccgaacttgtcaagcgtatccagacgttcaccacgatccccctcgctgtcggttttggtatcgacaaccgtacccactttgactatgtcacatcttccggtgcggatgctgttgtcgttggatccaaaatcatcaagctcatctttgagcacgccgacgacggtcttgcacccaaggtcgtcgaagactattgccgagaaatcacactcaagggccagaaccctccccctcttggccgaaagaatgctgctgccccgcctcctgccaatggagtcaaggtcaccgccgccggtaaactcccttctcgattcggtcttttcggtggcgcctatgtcgccgaatcccttgtcgactgtttgaacgagcttgaagctgcgtatgccgaggccaaggaggatcctgcgttctggaaagagtttgaggatatgtttgggtacatcaaccgacctagtgaactttaccttgccgagaggttgaccgaggagatgggcggtgcgaggatctggctcaagagggaagatctcaaccatactggttctcacaagattaacaatgccgttggccaaattctcctcgccaagcgattgggtaagcgaagaattatcgccgagacgggtgccggtcagcacggtgtcgctaccgccaccgtctgcgccaagtttggcatggagtgtgacattttcatgggtgctgaggatgtgaggaggcaagagctgaacgtcttcaggatcaagatgcttggtggtcgagttatccccgttaccgccggttcccagaccttgaaggacgctgtcaacgaggctatgagagattgggtcactcgattggactctactcattatcttatcggctccgctatcggtccccacccgttccccaccatcgtccgtgacttccagagggttatcggtcgagagatcaagtctcagatgcacgaaaagatgggcaagttgcctgatgctgtcgttgcctgtgtcggtggtggctctaatgcgatcggtactttttacgactttatcgaggatccgagtgtaagactggtcggtgtcgaagctggtggtattgacaccgaggcacactctgctacgctgaccaagggtgtcatgggtgtcgtccacggcgccgcttcttacattatccaatcaaaggaaggccagctcacccccacgcactccatctctgccggtctcgactacaactctgtcggtcccgaacactctcacctcaagtatagcggtcgagcggaatatgtcgtggcggacgatttgcagtgtctcaaggcgttcaagatgtgtaccgaattggagggtattattcccgctttggagagcagtcatggtttgtggggcggtatgcagttggccaagagtttgcccaaggataaggatatcgtcatgagtgcttttttgcaatttgcacttttgcacttgtaa

SEQ ID NO: 2287 - DNA, 2163 bp, Cryptococcus neoformans
  misc_feature (572)..(572): n=g, a, t or c
  misc_feature (1464)..(1464): n=g, a, t or c
  misc_feature (1504)..(1504): n=g, a, t or c
atgtctgtccggaatatcagagaagccgaaggtctcctcatggaggtccatgacccctctaagggcccagacggacaaagaaacgtccttatcacttctgcgttaccttatgtgaacaacgtaccacaccttggcaacatcatcggctctactctttccgcggacgtttttgcgagatacaatcggacactcaacgtaccgaccctttatatttgcggaaccgacgagtatggaaccgctacggagacgaaggccttagaagaaggtgtcaccccatacgaactctgtaccaaattccacaaattgcatacagagatttacgagtggttccagatcagcttcgacaaatgggggcgtacttcgtctccggaacatactgagatcacccagggaatttacagacgtctccatgataacggccttttccgtctggaaaccaccgaccagacttattgtgtagatgacaagctctttttggctgatcgctttgtggaaggcatctgtcccaactgcggctatgatgatgcccgaggtgaccagtgtgacaagtgctcgctcaccttttcatcccntactcaactccttaaccctcgctgcaaacgcaacaaggcacacaccctctctgttcgaccctctactcatgcctgctatcgtttagacctgctccagcctcggctggttgagtggatgcaaaaagcccgtgtcaagggaaagtggggaacaaatgcggtcatcactgaaaagggtgagattgtggagccgaggatgctaggagaaggtttaaggcctagtgccgtgacgagagatctgaaatggggtgttgaagttccgaaagtcggagacgaagaggaggataaggccatggaaggcaaggtaatctacgtttggttcgatgctcctatcggctatccttcgatcacagcaacctataccgaagaatgggaaaaatggtggaagaatcctgacaatgtagagctctatcaattcatgggcaaagacaacgtctacttccataccgttctctttccggctatgctgcttggtaccgaagaacgctggaccatgcttcataacatctccagcactcagtatctgaattatgaggatacaaagttcagcaagagtaggaacgttggtgtgttcggcaacaatgctcgagagacaggacagcctcctgagatttggaggtattatctcatctctcaacgaccggagaacagcgactcctcctttttgtggtccaaattcattgccgctaacaacaatgagcttttggccaatctgggcaactttgtcaaccgagtggtcaaattcatcaacgcgaaactcgattctaaggtacccggtccggaagatttcgccggtggcgaagttgctccccctgctgattctctagacgttgattttgtgactgatgtcaacacccgcctcaaagagtaccgcgagcaaatggatgacactaancttcgcggtggtcttgcaacggcaatggctctttctgctngtggtaaccaataccttcaagaaaattctttggacaatgcccttctcgcaagcaaccccaagcgatgtgccgaggttttgctcaatgctgtaaacctcatttatgtcctgagcgtggtgttccacccctttatgccaaacacatctgaaggtatcttgcggcaactcaacgctcctgcccgatccctgcccactaaattctctattgatattcttcccggacatgttttgggtaaagccgaatatttatttaagaagatcgataacgtcaatggagagcaggagaagaaatggcaaaggcaatacggaggagatgctgtggtagcagatcacgttgcgccaccaggtccaggcggtcaccccgaaggcgggaaagttccgaaagtcaaggataccgacgcagagtccaaaaaggctgcgcacgaagctcgcagagcccaacttgcgaaagaaaaaaaggctgctcaggctgctgctgatgcgaagaagactcctgaggagaaggagttggaggcaaaggtggaggctcaaggcaagaggctagcagcgatcaagaagggattagaagaaggtgacgctgagaaagagatgagcgtcgcgaagagcttgaaaactgagttggctgatttacgaaagaggctgaaaggaactaccatttaa

SEQ ID NO: 2288 - DNA, 2244 bp, Cryptococcus neoformans
  misc_feature (1690)..(1692): n=g, a, t or c
atgggtcctgctcctgctctcttgacatttcgtttgtcccgtctcacgcgacgcgttgtttacgtaagcgacgatggcggtggaggggtggatgttgaaaagttgttcttgtggaaacgcaagcgacgagccggccagcgcagagacacgatgagcgggcttccctccctcaatgcgggcatcaccgccgcctggaacacgagcgccccgccccagaagaagcggacacggcgggcgatccccctcaacgacctgcccgccccggcgtcccccctcgacgactcccccgccccagcgacccccgccgcccccccgaggaggaagagaccgcgggccgccccgtctgtgatcgccgcaaagtacgcgccgcccgacctcgacctcggcgcactcggcgggctccagccgcagatcacccagctgctcgaaatcgccgccctcgccctcttccaccccgagatctacctccacaccggcgtcccccggccgaagggcgtcctgctccacggcgtgcccggcggcggcaagacgcagctcgtgagatgcctagcgggcgagctgaagctgcccttcatctccgtgtccgcaccctccatagtgtccggcatgtcgggcgagtcggaaaagactctgcgagacacctttgacgaagccaagaaagtcgcgccatgtatcctcttcctggacgaagtcgacgccatcacgcccaaacgtgaaaacgcccaacgggaaatggagcgccgtatcgtggctcagctcctgacatgtatggacgatctcgcggcgagcgaagagcccgtcatcatcatcggcgcgacgaaccggcctgattctctggatcccgcgctgcgacgagcgggcaggtttgaccacgagattgagatgggtgtgccctcgcaagaggtactctgctccaagctgcgtctctcgggcgacgtcgatttccgccaactcgcaaaggccaccccaggctacattggcgcagatctgaccgcgctcaccaccgaagcaggtatcattgccgtcaagcgcatctttgatagcggtttcggtatcggtagtggtaccgatacccctcatgacagcgaacaagggaccgtccccgaacccgatggtgcaggtatggaagccatggcgattgacgaccgctatacaccttttgccaacctgcccgacgacgtcaaggagacgcccatcgccaaattcctcatgtcccatccaaccgccttgacttccgaccagctgtccaccatctccctcacccccgccgactttcttgccgcattaaagatcgtccagccttcggccaagcgtgaaggtttcgccaccatccccgacgtcacctggtctgatatcggcgcgctcagtcagacccgagatgaactgcacatggccattgtgcagcctatacggcacccggaactgtttagcgtcgtgggtatcgatgcgccaagtggtgtcctgctttggggaccccctggctgtggtaagacacttttagccaaggcagtcgcgaatgagagtcgagcaaactttatctccgtcaagggcccagagttgctcaacaagtatgttggcgagagtgaaagggcggtgaggcaagtatttgctcgggcacgatcatcttccccctgtgtcatcttctttgacgagctggacgctctcgtgccccgtcgagacgattctatgnnntctgaatcctcggcaagagtagtcaacacgctccttaccgaactcgacggtcttgatgctcgtaaagccgtctatgtcatcggcgccactaaccgtccggacatgatcgaccccgccatggtccgacccggtcgtctcgacaaactcctctacgtcgacctgccttcaccttccgaacgtttcgaaatcctcaagacccacaccaagaagacgccgatcaacgaggattcatggcaagcgatcaaggaaatcgtcgcttccgacaagtgcgatggcttttccggtgcggacattgcggcgctcgtgagggaagctgccacgctcgcactccgagccgctttggagagtataggcgcattcgaaacaccggcagaggccgagccggaagggatcgagcgaaagacggattccgtcagggtcacagctgaacattttgcccatgcagcacaaaagacgttaccgagtgtctccagggagcagagattaaagtatgagaggatgagggacaagtgcgggtgtgcctaccagagggagaaggcagcgagaggctga

SEQ ID NO: 2289 - DNA, 2259 bp, Cryptococcus neoformans
atgctctttggctcggtatctacccggtccatcacctctcacttcaagttcgcccctcgcctcctttcaaaaacctctttcactgtttctgcccagtcatcatcaaagaaaatgggtgtcaacgataagcctaccattcccactaccgcccctcacgcttggccttcccctgaggattggcctgctgccaaagtgaggcagacgtttatcgattattttgtcaaccaacctggattcgagcacactttctggccctccagtggtgtcgttccttttgacgatgacacgcttcttttcgccaatgctggtatgaaccagtacaagcctctcttcctggggaccgcagaccccaagtctgaactttccaaactcatccgtgccgctaacagtcagaaatgtatccgtgcgggtggaaaacacaacgaccttgacgacgtaggaaaggacacttaccaccatactttctttgaaatgcttggaaactggtcattcggcgattatttcaaggttggagctttgaccatggcctgggaccttcttactcgagtctacggattgcctaaggacaggctctatgtgacctacttcgagggcgatgccaagcaaggccttgaacccgactctgaggcccagcaaatttggagagatcttggcgtgccagagagccacattcttcctggcaacgcaaaggacaacttctgggaaatgggcgctactggtccttgcggcccttgcagtgaaatccattttgaccgaatcggtggccgagacgccgctcaccttgtcaacgccgatgaccccaatgtccttgagatctggaacaacgttttcatccagtacaaccgtgagccctcgggtgaattgcgaacacttcctgccaagcacgtagacactggaatgggtttcgaacgacttgtttccgtactccacaacgtctctttcaactacgatacagacgttttcactcccatattttccaagattcaggagcttactggcgcacgaccttatgaaggcaaacttggtgacgaagataaagacggtatcgacactgcctatagagtcatcgcggatcacatcagaactttgactattgccatctccgatggcggtattcctgataaggacggcagaggatatgtccttcgacgcgtgttgcgaagaggtgtgcgttatgccagcaacaaatttggtgtcaagattggtactttcttctcctctctcgtacccactgttgtcgaatctcttggtcccatcttccctgaagttactaagaagattcccgagctcaccgagatcctcaatgaagaggaagcctctttcgctcgcacgctcaacagaggtgaagctcttttcaataagtacgccaccactgccattgacgagaagcgaactgttctttctggaaaggacatctggcgactgtacgacacctacggattccctgtcgatcttacgcagatcatggccgaagagaggggattgaagattgaccaggaagcctttgagaaagccaggctcgaatctctggaagcgagcaaggccggtggcaaggaaaaggctggtgccctagtcaagctcgatgtgcacgacttggccgctttggaggctaacgacgcggtgcccaagactgatgattctttcaaatatcatttggatgacatcaaggctaatgtcaagagcatttaccatggctccaagttcctcaactccacttctgagcttcctcccaatactacattcggtatcctgctcgaccgaaccaatttctatgctgagtcaggtggtcaagagtatgacactggtgtgattgctatcgatggcaaggccgagttcaaggtggaggatgttcaagtttacaatggttatgtgttgcacattggacggatggaggagggtgatatcgagatcggagacgaagtaatctgcacgtacgacgagcttcgtcgatggcctatccggaataaccacacaggcacccatatcctcaactttgcccttcgagaagtccttggcgaccacattgaccagaagggctccctcgttgctcctaccaaacttcgatttgacttttctcacggcaaatctattgcggtcccggaattgatcaaaattgagggcatctgcaatgactggatcaagagaggtgtcccagtatatgctaaggatatgcctctggccgaagcttacaaaatccctggtcttagagtagtaaaacctttttcctcactatttgaagtaacaacgcagcatatgtag

SEQ ID NO: 2290 - DNA, 2160 bp, Cryptococcus neoformans
  misc_feature (583)..(585): n=g, a, t or c
atgccaacaataaccaacacattcatttctttcccacctttcaccgatacattcatggcccagtacacacccccagcaactgacctcacagcatggaggctcaaggtatccgaagactcgcatggccaacagaagtgggtgtacctctctgatcctgcgcagaggaaggaatggccccagatgaacattgaaaagtactggcttggcttggatgaggtgcccgagttagaagaaccaaagacaccccttgacgcggcacgtaacggctacaggttctacaaggagcttcaaagcgaggatggtcatttctctacagagtatggaggtccactattcctcatacctgggttgatcatcgccctctacgttactggccagtcattgcgccacgaacaagccattgagatgcgccgctatttatttaacaaaaggagaaaggaaggtggctggggattgcatactgctgcaccgcccaccgtatatggaaccgtgatgaactatgtcgcgctgcgaatgctgggtatgggccctgatgaaggaccgatgacggagatccgatcgttaatacataagatgggcgagnnnggggcaaccggcattcctacgtggggcaaggtctggttgagtattttgggagcgtacgagtgggacggcgtggggtcggtgcctcccgagttatggttgctgcctgattgggcaccattcgctccttggagatggtggattcatgttcgacaggttttcacccctatgagcttcctgtatggtactcggtttgttggtccctttactcctcttgttttcagtcttcgtcaggaactctatgtcgagccgtatgagaccatcaactggccatctcaacgatccaacatatcatcttatgatatttactctcctcatcaccccatccttgacatggctcatcagctcctggcggtttatgaaaaactaccacatgtacccattctctcttctaggctccccctacgcaaagtcgctctggacaaggtttatcgaatgatcacttatgaagacgagaacacaacctaccagactgttggtccggtctcaaaagcctttcacatcgtttgtcgctttgcccgtgaaggtcccaacagtgaggcgtttaaatcccacctttccaggattgacgactttttgtggctaagcaagagtggtctgatgatgatgggcaccaatggttcacagatgtgggatacgggatttatggctcaggccgccgtggaaactgggttagcagaggagtccgagttcaaagaaagtgtaaaggggatgctggactggttggacaaggcgcagatgagagagaatccaaagtggtacaaagagggttatcgacaccgcaccaagggtgcttggccattctccactcccgagcaaagttatacagtcagcgactgtacagctgagggactcaaggctgtgctggcccttcagcacctggattatacgccaaagcctgtcgggctggataggatgcgtgacgcggttgacactctgttatcgatgcagaacaaaagcggtggttttgcaagctatgagttgaccagaggcagtaccaagttggagtggttaaatgcagctgaagtcttcggagacatcatgatagattatacgtacccggagtgcacgacctctgtattatcggccttgaaatacttttctaaagttgatacagagtatcgagcagcggatattgaacttacgatacgcagagccattcaatacattcacgatatccaacgtcccgacggttcgtggtatggttcatggggtatttgtttcacctatgccactatgtttgcacttgaatcccttggcatagcgggtgagacctgcgccaactcggacaaggtgagacgagcttgtgactttttggttggacaccagatggaagatggtggatggggtgaaacttacatgtcgtgcgtaactggcaaatacgcccaacatgaccagtcccaggtggtccaaacggcatgggccattcttgctctcatctatggacaatatcgcgacaaaactgttattgaacgcgctgcgaaacttataatgagccgacaattgaaggatggtagatgggaacaggaggataccgagggtatattcaacaagaactgtgccatagattatccttga

SEQ ID NO: 2291 - DNA, 2286 bp, Cryptococcus neoformans
atgcccaagccgaagacagcgaggggtatcctcctcacttccaacttgccacagttgcagaaccttatcaagcgtgatcctgagggttataaggaagagtttcttacccaatacaatcactacctttccctccttcgtcttcattccgtcgcatcttctactccttcttcctcgaatgacaaatccaatgagctcttcgcagacttgatcacattcatttctcaagtggcgcagtgttatccggaggcgaccaaagatctgcccatgcaattgagcggcttgttgctgggtggggaaagtggtacctctaatgttgttacgggcgatctgcgaaagacagcggtcaaaaacttggtgatgttgaggaataaggaaatcatcgattctatccaacttcttcagactctcctcccccttcttcccacagtcccatcgactctccgttccatcatccgccacaccatcctcactgacattaaaacctccaacgctaagacgaagaaccaccgtctgaaccgcgttgttcagtccctcttgtttggcatggtcgaaagcgagaagggtggtgaggccatgtgggctgtcatgatggtcaaggagttatggaggaagggcgtctggacagatgccaagacagtatcgatcgtctcccttgctgcgttccaccccaacaccaaggttcagtccgccgctcttcatttcttcctcgggtcagagaatgaggacgaggatgattcagaagatgaggatgaagtgggagaggccagaagggatgtgagaaagatggagcacaggatggaggtttcgcgaggaaagagaaagaaggagaagcaggttaagcagttgaaaagagaggcttccaagaaacgtaagaagagggctgaaggtgcgggtgtcactcccaacttccccgctctggagcttttgcaggaccctcaaacctttggcgaaaagctctatgacaacctccacagacatgataaaatctattctctcgaccacaaagttctcatcatgcagctcctctcccgtgtcatgggtgtccacaagctctgtgttcttggcttttacagctacattatcaagtacctcacctatcatcagcttcaagtcactcttattctcgtctccctcgctcaatctgtacacgatcttaccccacccgacgtcctcacgcctgttatccgcaaactagcgcaagaatttgttcaccccggtgtcggcgctgaagtcatcgctgctggtttaaacgcgatcagagaagtctgtcgaaggcagccgtggtgtatggaggaagacttattgggtgatttaattgagtacaggaagagtaaagataagggagttgtgactgcctcaagaggtttgttgcagctcttcagggaagtgaatcccggtatgctcaagaggcgagaaaggggtaaagccgccagcatgggtctcattggttcccaagtccttgcctacggtcattctgccgatgccgccgagggtatcgaaggtctcgagttgctcgaagaacactacgccaaactccgtaaggaagccaatggcgatgtcggtgacggatccgatgttgagatggatgtcggcgaggatgatgatgaagggtgggaaggctgggaggccgagtctgattccgaagctgattcaaatggatgggaaagcgttagtagtggaggagaagatttggagatcagtgatagtgaagatgagtcagacaagaggagggataagaaagataagcgggagaagaagaggttggctaggggtaaagggaaggccaaggctgaggatggagaaactgatgaggatgaagagatggacgatgcggtctctgtggcggccaccgaagctaccgaggcgtctcaaaccaccaaaaagctgtccttactcgctcagcaaaggattcttacacctgcagactttgagcttcttaacgaactccgtctcaaggcggccaaagagctcgctgctgccggcgcggaccgattccttaccgaggctgagattctgggaccgagaaagaaggccaaggcgacttgggaggagaggatggagagtattcaaaagggacgagaaggcagagagaagtttggtagtatgaagggcaagaagaagaaggcggcccctagcagttctacaaacaaggaaaaagccaagaacaagcctatcatgatggctttgcactccaacagggttgtttccaagaagaaagcttccttgcgagacaagcaaatcaggcttcgtgcggctatcgaaaagcgcaagaaacaaaagcattag

SEQ ID NO: 2292 - DNA, 2415 bp, Cryptococcus neoformans
  misc_feature (187)..(189): n=g, a, t or c
atggtcaaatcagccccaaaaaccgctggaaagtcaaagaagcgagcagtagagcaggtgtcagaagagagcgacgaagaatttggggaccaagggagtggaattgatatgagtgatgatgaggaagaggttgatggagacgatgaggaggatgaagatgaagcttttcctgaattcgacagcgagnnngaggataatgatcaagaagaagccagtgatgaggagcaagatgaacaggatactgactctgagtcaggttacaacacgtctgacatcgagcgaatgtacgcttctgatgatgatctctcgtccgaagagaacaaagacctccctgtcgacgagaagctctcgagacttatcgccaagaacactgtcaagcccgacgactctattggcacagatgacaaaatcagtcgtgcaaaggaaggggtagggagattggtgcccagcaaacacgtgaagggatcatttgtgcgagagtacgacgaatatgaggccggatatggcagtgaaagtagcaccgaggataaccccaatactgtcggtaacattccgatggagtggtacgatgaccttcctcatatcggttacgatgtcaacggtcgcaagatcttccggcctttgcaaggcgacgaacttgacaagttccttgccaatgtcgaggatccgtccgcttggacctctgccgaagacaaacttcttcaacaaaatgttcagttgtcagacaaggagctcgatatcattaggcgattggagagggccgaaaaccctgatgccgactttgacccctatcaacctactattgaatggtttaccggcgaaggcaaggagagagtcatgccgcttagtgcggcgcctgagcccaagaggagattcgtgccttccaaatgggagcataagaagattatgaagatcgtcaaggctatcagagagggccgaatcatccccaacaaaccttccgccgaaaaacctcgcttctatcctatctggtctgacgccgaccagcacaaccctcacgtcatgtatatgcccgcccctcaacttccccctccgaagacggccgaatcctacaatcctcctgaagagtaccttcctaccgaggaagagaaggctgagtgggaggcgatggacaaggaagaccgaaagaccgatttcttgcccgagaagtatgatgcccttagaaaagttcctggctacaagaacttggtgcaagagaagttcgagagatgtcttgatttgtacctcgcccctcgaactcgacgagtcaagctcaacattgacccagactctcttattcctaaacttcccgctcccaaggagctcaaacccttccctatcgcttctactgtccagtaccgtcatcccggagacactcgtgtccgatccgtttccaccagccctgatggtcagtggattgcttctggctcagaagatggtgtggtgcgagtctgggacctgggtaacggtcgtgaagtctggagatgggatttacacgctggtcctattcagtacgttgagtggtcaccttctcgtgaggagtctttgcttgtggctcttgtcgccggtaagatcgctgtgctctctcctcttgctctcgtcgctcctcatattgccgcccaaaccctcacccactccaataccgcttttgctactagttctgcgacgacaaagcaaggtgccggtaacgaagttaaaggaattgagtctgtcaaatggacgagaccgagtgagagggaaagagaaaggggtgtcttggtgtatgtggaagttcctggtactcctaaacaagttacatggcacaggaagggggactactttgccacggttgcatccgacgccgctaacaaatccgtccttatccaccaactctcccgccacggcagtcaatcccccttccgtaagactcccggcacaatccagcgcgttgcattccatccttctaagcctcatttctttgctgccactcaacgttacatccgtctttacgaccttgctgctcaaaagctcattagaactttacagtctggtgtcaaatggatttcatccatggatgtgcactccggaggtgacaatttaattatcggtagttacgataagaaattagcttggttcgacatggatttgagcgcaaagccttataaaaccttaagataccacaaccgtgctcttcgatccgttgcctatcaccctactctccctctcttcgcctctgcctcagacgatggcacagtccacattttccactgcaccgtttacactgatctcatgcaaaacccgctcattgttcctctgaagatcttgagggggcataaagtaatcgatggtatcggagttttggatttgagatgggtgcctggaaaaccgtggttggtcagctccggtgcggatggagaggttaggctttggtgttcgtag

SEQ ID NO: 2293 - DNA, 2169 bp, Cryptococcus neoformans
atgatgcaaaatgagctgacctgggttttagctggtattcaactccgacaatggtccctggacttcgagggcaattgcgaacgtatccttcgttccattgccatcgccaagtctcgtggagcaacacttcgagtgggaccagagctggaagttcccggatacggatgtttggatcatttccttgaaggcgaccaaactgtaggtgataccatgctccactcttgggaagtccttgcgaaaatcttgcagagtgaagaggcaaagggcattgtttgtgatatcggaatgcctctcgaacacaagaacaacaattataactgccgagtcatcatctttaatggcaagattcttttgatcaggccgaagatgtggatggccaacgacgggaactatcgagagctaaggcacttcacaccttggcacaagcataggcaggtcgaaaagcattccttgcctcatatgatcaggattgtcaccggacagacctatgtaccttttggagatgcggtaattgccacagaagatacagtaatcggtgtcgaactctgtgaggagctcttcacccctgcctcgccccacattcttatgggccttgacggtgttgaaatctttaccaattcctccggtagtcatcacgagcttagaaagctcaaccgccgtgtggagcttatcaaggaagctaccatgaagctcggtggtatttacctctatgcaaaccagcaaggctgtgacggtgatcgtctctactatgacggagcttgtctcattgccatgaacggccagatccttgcccaaggccctcaattctctctttccgaagtcgaagttgtctccgccactgttgatcttcgcgctgttcgagctcacaggacaacaagtagcaggaggatgcagagtgcacaggccgaggcgtatgagagagtcgtggctgataccagactcgatggtggtgagcagatcaaggtgggattacgggagactaagggtagcatggatgtgaggtatcacacccccgaggaggagattgctcttggtcccgcatgctggctctgggactatcttcgtcgatcccgtactcaaggttacttcctccctctcagtgggggtatcgacagttgcgcaacagccattatcgtacactccatgtgccgtttggtcgtggaggctgctgcaaagggcgatgagcaggttattactgatgctcgacgaattacaaatgagcctgaagacagcacctacattcccgaggatcctcgtgaattcgccggcagaatcttccacacttgttatatgggtacggagaactctagtagcgagactagggaaagagccaagaacctcgctgacgctatcggcgcataccacgttgatttgaacatggacaccgctgtgagtgccgtcaagggtatcttcagcttcgtcaccggcaagactcctcaattcaaggcgcacggtggcaccaatgccgagaacttggcgctgcagaacattcaggcacgactgcgaatggttgttagctacatgtttgctcaacttcttccgtgggttaggggtaagaatggcggtctcttggtcttgggcagtgccaacgtcgacgagagtctgcgaggctatttcaccaaatacgattgctcaagtgccgatgttaaccccatcggtggtatcagtaaggtcgacctcaaaaggttcatcgcctgggcccaagtcaagtttgacctcccgatcctctacaacttccttcacgctgtccccactgcggagcttatcccgatcggccctgacaacatcatccagtctgacgaaatcgaaatgggcatgacttatgacgagctttcggtatacggtcgtttgcgaaaagtggagaagtgtggaccgttcagcatgtttggcaagttagtgcaggagtggggcagtttcttgtccccgaaagagattgcagagaaggtcaagcacttcttcttcatgtatgccatcaacaggcataagatgacgaccatcactccttcagtgcacatggagtcatacagtcccgacgacaaccgctttgaccttcgaccgttcttgtatccctcccaattcactcatcaattcaggaagattgatgaacttgctggaaagttgcctgacatggcacagaagcccaaggttgacacgaatgaagttgattaa

SEQ ID NO: 2294 - DNA, 2385 bp, Cryptococcus neoformans
atgatgagagacaggtgcgttgtcgccgttgcaaataaattcttgaacgacgcagcctccagtgacgaggaaagcgaagaggaggacaagatcattgttttgagtgccaaggacaaaaggttcgccgaaatggaagccgctatccacagcatccaaaacgcggtcaagaacactgactgggtccttgcctcttctgaacttgacaagctcttccggtttatcgctcgacacctcgtcaccattgtcgcctcccctatccctgctgaaggccacattcctccccgattcctcgagaccctcgtctctcttgaagctgatgtcgccaagactcttgccgcggaaaagtctgcacccaagaagatggctcccgctaaggccaaggctgtcaatggtatcagacagactctgagaaagaggagcaaggaatttgacggtgttttgaagacttacaatgaggaccccgaagcgtacaccgctgcttatgaaaaggctaacgccgcccctgctgcccctaagcctaagaaggccgctgttactacccctggtgagggtgaggacgacgagttcatgaccatcggcaagggaggaaagactcttaaccttaccgctgacggtgtcttcaagactttgagggaaatcttcgaggctcgaggccgaaagaacaccgatcgtgccgagactatcaagattctcaccaagctccttgaagtttctgaaactacctaccagaagattcgagtccttctcgcgcttgtccctgctcgactggactactctcagcacctcgtttcaatccctcaagaatcttgggttaccgctttgcaagagtttgaccagttgatttctatcttgatcgctgagcccgactacttggtccaggagaccgttggcgagtatgatgatctggtggagaggactcctgaggttgtggacggtaagaagcaaaaggtcttgattgccggcagcttaatcagtcttttggagagcttagacagcgagctcaccaagactcttcaacacactgatgcgcacgagaagggtgatgagtacattgatcgactcaagcacgaggctcctctttacaccactattgtcaaggctcagaccctttttgagcgcgaacagctttccgacaacattgcccgtaccgtcatccgacgtctcgaacacatctacgccaagcccgacatcatcatcgagcacttcgaaagcaaggctacccaggccgctgctggtttgaagtccgagatcactcctttcgatgtcaagcgtgacgccagcggtgtcatccacgacctcgccgtgttcatctaccagtccgatgcccccgttctccgtgcccgagctatcctttaccacatctttaaccaggctctccacggccgataccaccaggcgcgtgaccttctcctcatgtcacacctccaagacaccatttctcacgccgacgtcaccactcaaatcctctacaaccgtgcggttatgcaggtcggtctcgctgctttccgactcggctttatccccgagtgccagactattttgtccgagatgttctctaccctgcgacagaaggagttgcttgcccagagtgtgcagaggtataacattcaactttctcccgagcaggaacttctcgaaaaacgaagacttttacccttccacatgcacctcaacgttgagcttttggaagccgcttacctcacttcttgcatgcttgttgagattcctttgcttgctagcgttgatactgaggagcagagaaggcgagtgactagcaagaccttcaagaggttgttggatatggccgacaggcaagccttcatgggtcctcctgagaacactcgagaccacattatcaaggcgagccaggccttgcaggctggcgaatgggagaaagctagggacttgattgtttccatcaaggtctggagcttgttggacaacgctgccgaggttaaggacattcttgccaagaagatccaggaagaaggtcttcgaacatcccttttcacctacgctgcttactacgactccctttctctttctcatctcgcctccacattcaatctccccgtcggccgaatcacttctatcatctctcgaatgatctacaccgacgaactcgccgcctctttggaccagattgacggtgtcgtcatcttccaccgagtcgaacaatctgaggtgcagcgactcgcccagcaactcgccgagcgaactgcctctatgcttgagcaaaatgaaaagacgcttgacgtcaagttgggtaaccagggacaaggacaagatagggacacgagggcagtaggtggggagggaggtaggcaacaaggagagagggggcggcaggggaacataccggggacgaggtggaagaggaggtag

SEQ ID NO: 2295 - DNA, 2424 bp, Cryptococcus neoformans
  misc_feature (1159)..(1161): n=g, a, t or c
  misc_feature (1487)..(1487): n=g, a, t or c
atgaataactcacttctccatcatccatctatctcctctttcatcccgcgtactctcaccatggcagaccagcaactttcccaggggaatctgcctgtctttatcgatgacctcatcgctgacaggactcgacagttcgtagaattcctcgacgatgaggtgacagcgtacaattatcgtgaatctatcaaacgcatgctggacgatgagcaggtccgattgattgtcgacatcaaccacattcgctcttacgagcgttcatatgccgacggattgttgctgcagcccatggagtacgtgccagcactggatgcggcgttgatgcagctcgtccagagtttacacaatcccacgaagcataagattgaggacaagcaatgtgagtatcatagactgttctacgtcgggttgattggttccttcggtcaacaacactgcaaccccagaacacttagaagtcaccagatcggcaaaatggtcagcttggagggtattgtcacccgatgttctcttgtgcgaccaaagatgctccggtccgtgcactggtcaccacgaacccaaaagttccacgctagaacgtacaacgactccaccatcatcgccccttcagccaaccttaccggcacaaccactgtcattcccaaggacgacggtgatggccaccccttgcttatggaatacggactttccacttttagagattaccagacaattggtatacaagaaatgcctgagcgcgcacctgctggtcagctgcctagaagcattgaggttgttcttgcggacgatttggtcgattgctgtaagcctggtgaccgaatccaacttgtcggcgtgtacaagagctctggtggtggagctggtgccagaggtttcataacctccattattgccaacaacatcatccttctctcttccaaacaaggcggcggtattgcccaaaccccgttgaccgatactgatattcgaaacattaatactcaagctcgacggaagaatgtcttccagctcctttcacaatccctcgcgccttcaatcttcggtcacgactacatcaagaaagctgtattgcttttacttctcggtggtgaagagaagaatctcgacaacggtggtcacattcgaggtgacatcaacattctcatggttggtgaccccnnnactgccaaatcccaaatgctccgattcgtcctcaatactgccccccttgctatcgccaccaccggtcgagggagttccggtgttggtctcaccgctgccgttaccactgacaaggacacgggtgaacgtcgactcgaagcgggtgcgatggtccttgctgatcgtggtgtagtctgtatcgatgagtttgacaagatgtccgagattgatcgagtcgccattcacgaagtaatggaacagcagacggttaccattgccaaggctggtatccacacttcgctgaatgcgcgatgcagtgttgtcgccgccgctaaccctatttatgnccaatatgatgtgcacaaggatccccacaggaacattgctcttccagactctttgctctcccgtttcgatttgctctttgttgtaaccgacgacaccgacgaacaacgagatcgtatgatttccgagcacgttttgaggatgcaccgatacattcagcctggtgcggaggaaggtgcgcctcccattgagaacctcgagcaaaacctcgatgtcggcggcgacgctgttgaatcgcgtatttccgaaactcccgtatttgagaagttcaaccctcttctccactctggtgtgacgaccacttccggtcgaggtgccaacaagaagaaagaggttttgagtatcgcctttgtgaagaagtacatccagtatgcgaagagcaggattcatcccgttttgaccaagggtgcggccgactggatcgtcaacgtttacagctctttgcgtaatgacgatatggcagcgaaccaaaaacgtacttcgcctcttaccgcgcgtacccttgaaaccctcattcgtctctctactgcccacgccaaatcccgtctctccacccgagttgacgagcgggacgccatggccgccgaagagatcctccgatttgctctcttcaaagaagttgtccgtcccgagcgccgaaaacgtcgaaagattaatcacgccggccagtctgtcgaggtagattccgatgaagatgaagagggagaagaggaattgcaggggtgtggagagaatgtcaatgaatggggatgttggtgtgacagagtctcagagagaaagagcgagagaaaagaacagacgggtggaaagacaagcagcaggccccgtgccagaggacgacgaagatttcgagatgcgagaagccgaggaatcacttgctttgcaagaagcccctcgttcaccacccacggcgcccgaagttgctgtcgaactttctaa

SEQ ID NO: 2296 - DNA, 2274 bp, Cryptococcus neoformans
atgatggaagtgtcgaaatatgaaccttctctcgaaacaaacaaggggcgaaaaggtagcttttcacgaatctcaacaatggaagaaggccgtatctggtccgttggcgtcctcgaaggtgcagagcagcaaaacgccccctctgaaattgaacgactcttctacgactttcttcatgggttccgtattgaagaccaatggacgtaccgcgacgctctccgatccgccttgcttttgaaacaccacactttggaagttgatttgagagatcttgtggcatggaatgaagagttggcgcagaaagtgcaggagaaacccggagaaatgattcctctagtgattcgtccgaccagtgaagcagacagggaacgagaacgcgagcgagctcagaatggtcagcccagtttggccgctgaggaggtgcctgatatgcaggtggccatcaagtctggcatgaacctcttacaattccgacaactcaatgcgaacaccctgaccaccctcgtcaggttaccagggattgtaatcaacgcttctcaactcacatcccgagcgaccgaactcgctctccaatgtaaaggctgtcgaagtgtcaagcacgtcaaagtctctggcgctatcggtggtgaacgtgccgctcttcctcgacgatgtgatgccgaacccgtagaaggccaacgcaaagattgtccccttgacccctatgtcatcctccatgaccggtgccgctttgttgaccagcagaacatcaagctccaagaagcacccgatatggtccctgttggtgaattgccccgccacatgatgcttcatgccgagaggaacttgaccggtaaggttgttccaggatctagaatcattgcaaccggtatctactcaacttttgctcccaaccacaagagtgtaagcgattcatttacatcaggcgcacctgcacttcgtcaaccttaccttcgagtgcttggtatcgagcttgacagttctgctgccagctctggaacccgtgtcttcactcccgaagaagaggaggaattccagcaactcgctaggagcgatgacttgtatgaacggttcgcgaacagtgtcgcccctagtatctacggaaaccttgacatcaaaaaagccgtgacttgtcttttaatgggtggaagcaaaaagattttaccggacggtatgcgtcttcgaggtgacatcaacgtcctcctcctcggtgaccccggtactgccaaatcccaactcttgaaattcgtcgaaaaagtctcccctatcagcgtctatacatcaggcaaaggttcctccgctgccggtctgaccgcttccgtccaacgtgatcccgttactagggaattctttctcgaaggcggtgccatggttctcgccgacggaggagtggtatgtatcgacgagtttgacaagatgcgggatgaagatcgagtggctatccatgaagccatggagcaacaaaccatttctatcgccaaagctggtatcaccacgattctcaactctcgaacctcggttctggcggctgccaatcccgtgtttgggcggtatgatgatatgaaatcccccggtgagaatattgatttccaaacaaccatcctttctcgattcgatatgattttcatcattaaagatgagcacaacgaacagagagataggacgattgccaagcatgtgatgaatatccatatgaacaggcagacggagaatgaggcagtaggagagattgatatcgaaaagatgaagagatatattggatactgcaagtcgcgatgcgcaccgaatttgagcggagaagcagcggagatgctcagctctcactttgtcagtctgcgaaaggaagttgcccaagttgagcgagataacgacgagcgaagctctatccccatgactgtccgtcaactcgaagccattatccgaatctccgaatcccttgccaaaatcacgctctcccctcgcgtgcttcctcaccacgttgaagaagctatccgcctattcaaattctccaccatgcacgccgtttctgtcggttcgggcgtcgagggtctctcccgtacagagctcaacgaggagattgacaggatcgaaaaggaattgaagaggagattaccgattgggtactctacgagttatcaaagtttagtgagagagtttgtttccggccaagggtactcgcaacatgcgttggagaggtgtctgtacatcctggagaagagggaagttgtcaagtatactggcatgaggagggttgtgcagaggataggtgtctag

SEQ ID NO: 2297 - DNA, 2331 bp, Cryptococcus neoformans
atggctgctcttgacgacgaagatacatctgaccgcaaacttcagaagctcgatctacctgattttgatcctgaagtccagtcaggagacgcggctcaggtgggctccattggtgcagacttggcagtggcggatggagatgaagatgatgatacggtggtgaaaaaggaggaggagaaggaggagaagatggatatagacaagaaagcggaagaagatgaggaagaggacccgttggatgcgttcatgagagacaacgtgcagcaggtcgtagaggtgaacaaggcggacgccaagcgaatggggttgcgggttgctgaggatggcagcgacgacgaaaatcagggacaagtcgtggagaaggataagcttgccgaagcggaggcgttgttgcaacaagctgcggctaaatcacgcaagaaagatcttcctcctcctgaccattccaagatcgactatgaacctttccgcaaggctttctacgtaccgcctgttgaagtattggagatggatgaggaagaggctgagttagtgcgtttggaaatggacggcatcaaaattcgaggacaggatgctccaaagccagttaggaactggggcgcctttggcctgcctcagggcctcgatgtaatcaagcaccaaggttgggaaacacccacgtccattcaagctcaggctatcccagctataatgtccggccgagacgtcatcggtattgctaaaaccggttccggtaagactgttgctttcctcttgccaatgctccgtcacgttcgcgaccaaaggcctgtgtccggtagtgaagggcctattgcggttgtcatgtcacctaccagggagttggcctctcagatttacaaagaatgccagccctttcttaaggtgctcaacattagggcttcctgctgcgtcggcggttcgtcaattagtgaggatatcgctgccatgaagaaaggtgccgaagtggttatttgcactcctggccgaatgattgaccttctcaccgccaataacggccgagtcacaaacgtccgacgcaccacttacatcgttatggatgaggccgaccgaatgtttgatatgggctttgaacctcaagtcatgaaaattatcaataatgttagaccgagcgcccagaaggttctattctcagcaacattccccaagacaatggaatcacttgcgaggagaattttggtgaagcctttggagatcacagtcggaggcagaagtgttgttgcacccgaaattgaccagcgtgtcgaagtgcgtgatggtgatacgaagttcacacgtttgcttgaaattcttggtgagatgggcgaggagcacaaggacgaagatgatttccgcacccttatctttgtagaccgtcaagaaagtgcggatgatctatttagagaactgctacagagaggttatgtctgtgcttcactgcacggcggtaaagagcaggtcgatcgagatgaagcgatcaaaaacttcaagaatggtgatgtgcctataattgtggcgacttcagtagcggcaaggggtttggatgtaaaagagttgaagcttgtcattaattatgacgcacctaaccatatggaagactatgttcatcgtgctggccgaacaggtcgtgcggggaacaaaggcacttgcataacatttatcacgccggagcaggaaaggttctccgtcgacatcgtacgagctttggaagcgagtaaggcattcatccccgatgacctgaaaaagatgtcggattcattcctcggtaagatcaagtctggcaaagcccgagcagctggtagtggatacagtggtaaaggtctcgagcgaatcgaacgccgtcgggaggagaaagaccgagctgaaaagaccacctacggcgatacgtctgaagccctgtcactctcctcgcgtgagggtgctgtcatcccctacaaagccaagacgaatgagttcaagcctccagagacctctcacaaggatcccgacgctaccgactggcatgctattttccccatcaatgattaccctcaaaaggctcgttggaaggctaccaataaggagcaaatgactttgctgcaagaagtttcaggagcaagtatcacaatgcgaggcagattttacccgcctggggaggaacctgcgttgggtggtgaacccaagttgagtctgttgatagagagcaacgacgaaatgagagtgagggctgctgtagaagaaattcgaagggtgctggtcgaaggatcagtacaagcacttaatgcggtcgatagagcgggtgcgagtggcgggaggtacgctgtggaaaaagtgcttttatcgagctttccatga

SEQ ID NO: 2298 - DNA, 2412 bp, Cryptococcus neoformans
atggaaagtttcatcctgttcttggaaaatacttacacaaatatctttgttagctatacagaaagcatcgctttcccagaaactcctgggtctgtcgtaccaccacctacaggggatgagtcaaaatactatgttgagcaggttcatctgatgaagatagatgagaggaccactctttacgtcgactttggccatcttctcgaacgtgaagaaattctcgctcgagctatccaatcccagtattaccgattccttccttatcttcggcgggcggttcagtttcttgtgcgtcgttatgagcccacttggctttatatgtcaacatctgtcaatgcaagcgagaccattcctagctcttcccttactattcgagaattcaacgttgctttctacaacctccctctcacatcgggtatccgtgacttgaggatggacaagatcggtcagttgatgagcatcagtggtactgtcaccaggacatcagaggtcagaccagaactggttagcggtacattcgtatgtgataactgcaagacagctatccatgatgtggaacagcagttcaagtacaccgagcctatcatgtgtcaaaactcaacctgcagtaaccgtaaccaatggcaacttaacattgaacaatcaaaattttccgactggcaaaaagtccgtattcaagaaaacgccaacgaaattcccaccggtagtatgcctcgatcactcgacgttattctccgttcagaaattgtcgagcgagccaaggctggtgacaaatgtacctttactggtaccttcattgttgttcccgatgtttcgcagcttggtcttcctggggtgaatgcggagatgatgcgagaagcgaaaggtggccgaggcgatggtggaccggcgagccagggtgtaacaggtttgaaggcgttgggtgtaagggacttacagtataagactgcgttcttggcttgcatggttcaaaatgctgactccagagctggtgttacagacgtgcgaggtgaagttgaagacggccaagaagaccgagaatcgttccttcgttcacttacttcccaggaactcgacgagttgcgaggcatgctcaactctgataacatctaccaaagtcttgtccagagtattgcacctaccgtctatggtcatgagattgtcaagaagggtatccttctccaacttatgggcggtgtgcacaagcaaacacaagaaggcatccatctccgtggagatatcaacgtgtgcatcgtcggtgatccctctaccagtaaatctcagttcctcaaatacgtttgcggtttcctccctcgtgcggtctacacatccggtaaagcctcctcagctgctggtcttacggccgccgtcgtccgagatgaagagtctggcgagtttaccatcgaggctggtgcgctcatgttggccgacaatggtatctgcgctatcgatgaattcgacaagatggacattgccgaccaagtcgctattcacgaagccatggaacaacaaaccatctctatcgccaaggctggtattcaagccaccctcaacgcccgtacctccatcctcgccgctgccaaccctgttggcggacgatacaaccgtaaaatgagcctgcgtcagaacgttgccatgtcagcgcctatcatgtctaggttcgacttgttctttgtcgtattggacgagtgtaacgaaaatgtcgatttgcacatcgctcagcacatcgtgaatgtgcatagattcagggatgatgccattgctccagaattcagcaccgaagcgctccagaggtatattcgatacgccaggacttttagtccaaagttgactcctgctgccagcgctgttctagtcgaaaagtaccgctccttacgtcaggatgaaggtggtcccggcaagtcgtctttccgaatcactgtccgtcagctagaaagcatgatccgtctatccgaagctatcgcccgagcaaactgtcaacacgaaatcaccccagccatcgtgcgcgaagcctattctcttttgagacaatctatcattcacgttgagcaggacgacatttctttcgatgatgaggatgagggcaatggacttaatggacctgatggacctggtggtgatgatggtatggatgaggaccctcaactgagttcggcggaccttgcggcgttggatgaggcagaatcaaataaccaatacatggaaataatgaacctctgtgttctttatctctccgaggttgaacgggatagcggtactggggttgatcgagaggagttgatacaatggtatctcgaacagaaggagaatgacttcgaatcagaggaggatatggagtatgagagggaagtgatagggaaggccttaactaagctcgccaaggtgcgtttgatggttatgagactgtgccagtag

SEQ ID NO: 2299 - DNA, 2310 bp, Cryptococcus neoformans
  misc_feature (1916)..(1916): n=g, a, t or c
  misc_feature (1918)..(1918): n=g, a, t or c
atgactcgtgcatgccacaaacgccacctcgcatcatttttatcgtgtacccattccctgtgtggcatttcttggatcggcttgcttgcttcatcccctcgtcaatccgtcaacgcgccacgaatcttctcttattgctctttcctttgcgaaaggaaccgcaagtacgtctgcgatgttctgtgcaacggtctcgcgaggcttgaatatcgtggatacgacagtgccggtatgtcatcatcgcttctcagtatcggaattgatggcgacagcaaaggttcctctatgattctcttcaaggaagtcggtaaagttgctgcgctgaggaagcacatcgacgaaggcatcccctgtcccttgcccggtcaagcgccctcgaaggagaaggttgatatgtccaaggttttcctcagccagacctcgatggcacatacccgctgggctactcacggtgttcccagtcctggtaactgtcaccctcacgtcagcgacgtgcaaaccgagttcagcttggtccataatggtatcattaccaactataaggagctcaagcttgttcttctcaagcgcggctatactttccacagtgacaccgacaccgaagtcgttgctgtgctttgtaaatatgtctgggatagtcagcccaacaagcggctcaacttcacggagcttatcaagactgtcgtgaaggagcttgaagggtccttcgcattcgtgttcaaatctactcatttccccgatgagattgttgctgcacgacgcggctctcctcttttgatcggtgttaagacagacaggaagcttaaagttgattttgttgatgttgagttgcccactgctgaggaacgagcagtgaatgacgtggatgccagtggtctccttgctgtaccggctgctgttgccgagggccctggtcccaaacttcgccgatcccagtctcgcgctttcctctctgaagatggcatgccccagcccattgagtttttcgtagcgtccgatgctagtgctgtcatcgagcacactaagcgtgtattgtatcttgaagatgacgacatcgcccacatcgccgaaggcgagcttcacatccaccgcctccgtcgcgacgataccgtttcttctgtacgtgccatcgagcatctagagatcgaacttgcggccattatgaagggtcagtatgaccacttcatgcagaaggagatttacgaacagcccgagtcggttgtgaacactatgcgcgggcgagtcaacttcgacactcggtccatcatgcttggcggtctcaaagcatacctgcctgtcatccgaagaggcaggaggttgatctttgtcgcctgtggtactagctaccactcttgtatcgctgttcgacctgtctttgaggagctgaccgatattcccgtcgctgtcgaacttgcctctgacttccttgatcgcagaactcctgtattccgagacgatgttgccatctttgtttctcaatcaggtgaaacagccgacaccattctcgctatgcgatactgtctcgaacgtggtgctctttgtcttggtgttgtaaatgccgtgggctccactctctcccgtgaaacacactctggtgttcacatcaacgctggccccgaaattggtgtggcttccaccaaagcatacacctcgcagtatgttgcacttgtcatgattgcggtgcaattgtcagatgactccatcaccaagacagcaaggaggcagcaaatcatcgatgggttacacgacattcctgcccagattcgaaaggttttggccatggacaaagtgctgcaacagatggctaaggatatgttgtccaaagagaagagtttgctgatcatgggtcgtggttatcaatacgctacctgcttggagggtgcacttaaaatcaaagaggtttcttatatgcattntnaaggcattttagccggtgaactcaagcatggacctcttgcactggttgatgagcaccttcctgtcattttcatcatgactcgagactctttgtatcccaaggttcagtctgcgcttgcccaagttacagctcgaaagggtcgacccattatcatctgcaacgaggacgatgacactgtcaacgacaacgccaaggtcatccgggttcctcagactgtcgattgtcttcaaggcttaatcaatgtcattcctctccagcttttatcttaccaccttgccgtgatgaacggcgtcgatgtcgatttcccccgaaatctcgcgaagtcggtgactaccgagacatggactgttcataggacttttttccttccgtttttattaatcccacattaa

SEQ ID NO: 2300 - DNA, 2298 bp, Cryptococcus neoformans
  misc_feature (121)..(123): n=g, a, t or c
atggaagagccagagaagaaggaagaaaaaaagtttgagtgtgtcttctcggcagcgcgtgctgctggtcctaaagccccaggatccaaggaaatccctgagggtgcgcctgactgtcttnnnggcctcacgtttgttttcacaggagagatggagagcctgggaagggaggatgcgcaggagctcgtcagacggtattctggaaaagttaccacggccccttctggaaaaacttcttacgtcgtagtgggcgaaaacgctggtgtctcaaaactcaacaaggtcaaagagaagaaaattcctatgatcaacgaagatgaattccttgaacttattcgtcaaagatcttctggcaaaggacccgatggaacggtagataaggcggctgtggaaaaagcgactaaggcaagggagaaggaggagaagaaaatcttggagcaggctaaagagatggaagagagggaaaagaaagaggaaaaggagagaataaggaagcagaaagctctggaaggacaaggtatggctgtcaaaaaaatgggtcctgcatcagcccagctgtggacgaccaagtatgctcctactagtttgaaggagatttgcggtaacaaagctcctgttgaacgcctgggtcaatggctgcaagactggcaaaagaattacaaggcaaatttcaagaaacccggcaaagatggtatgggcatttatcgcgctgttctcatttccggtcctcctggtataggcaaaacaacttcggctcatctaatggcaaaagaagccgggtacactccattagaactgaatgcgagtgacactcgaagcaagaagctaatcgagaatgaaacaaatgtcgacaacaagagtttggatgggttcttcaagggtcaaggcgatataaatgccgcggggttgaagattgactctagaacctgcttgattatggacgaagtagatggaatgtccgcgggtgacagaggtggtgtcggcgctctgaacacattgatcaagaagactaagatcccaatgattttgatctgtaacgatcgcacattacaaaaaatgaagcccctacagagcacgactttcaacatgacttttaggaggcaagtcccaaacgagattcgctcaaggattatgtctatcttgcacaaggaaaagctcaagattccacccaacgtcgttgacgagcttgtgaagggagttaattctgatatccgtcaagttttgaacatgctctccacgtttaagcttggtaagagtgaaatgaattttgacgaaggaaagcaattggtcaaggtcaatgagaagaacacaatcatgacgccttttactatcatcgatagattgacaggcccatatgctttctccaaaaatagcaaagaaacgttgggtgatagaatagagctatacttccacgatttcagttttgtgcctcttttcatgcaggagcactacctcaaaacgaaccctactgtcttaaacaacctcgacggtcccgagaagaacctcaagcaccttgaattagtatccaaggctgcggactctatatccgacggtgatttaattgatcgcatgattcacggctctgagcaacattggtctcttttaccgctgcatgctgtagcttccacggtaaagcctgccatgcacgtgtatggtgcaatgaggagtcagggtggtggttggggcagctggggtcctgctttccctcaatggctggggcaaaattcgaagcagaacaaacttcaaagacaacttacggatattcagattcgtatgcgtttgcgggtgtcaggaagcagagaggagattagagagcagtacatgcctctcttggccagcaagattgtatctcctctcattgatcgtggtgctgcggctgtggaagagacgattgagtacatggacgaatattatcttggaaaagacgattgggatgcatttgtcgaacttggtgtggatacgatgcgggatgaggacatcctgaaaaaaatcccaagcgccacgaaggcctctttcaccagacagtacaacaagactgatcaccccatcgcgttccacaagggtgacatgtttgcgggggcaaagaagaagattgatgctggaccagtgccggacaatgaggatgtttttgaagaagacgagcctgtgccggatgagccggaggaggatacggacgaagaggaggatccgttacaggataaattggtcaaagctgtaaagccgaaaggtaaagccgcggccaaatctgcatcaaaaccgacggcagccaagggagtaaagtcaaaagctaagaagtaa

SEQ ID NO: 2301 - DNA, 2469 bp, Cryptococcus neoformans
  misc_feature (988)..(990): n=g, a, t or c
atgtcaggccacagccatcgtcccactctcaaacagggcttcaagtcaaagcatgcttcaaagggctctttgaaagctgctgccaaaggttcttatctttctagttcggcccattctcatggtaccaaaaatgccctcggcaactccaaaaaggcaaggctcaatgccaatgctcagaagaggaccgcgaagagacaggcagtcattcaggatcaaaagtttttctcaactagcagcggaggaggccacgttcctcgaatcgtgtctgttgtccctcttctgccttcgatttctcctcgaactttcattgcgaaccttttgccttccttgggtcttgacgaatctgaactgcaagagatttctgccgcactagctgactatggaagctaccttcttcgagcgccccgctacaagacttccctccaaatcaaccttttgccgcctctttcagtctaccctacactcgatgctgcttttgtcagtgactacattgtgcttctgatgagtagtgtggatgaggttcagctgcagggtgaaaccattttaaggtcattgcagggtcaggttggaggcgcagagattgttgcttgtgttcaggcacctgaatcaaaccctctccgtcctgatactcgacaactcatccataaatcactcctgtcgttcactcgatactttttcccatctgttggcaaaatatattcatccgacacacctcaagaatctttgttacttgcacgagcgttgtgtgaggcagctcccaagggtatgaggggtgatgatgggcgcgcctacatcgttgcggagaaccccaattccatcagatggacaggcagtggaatactgacagaagatggtcaagaaaaggggcaattggaaatcattggcactgtcagaggaggaggcactctgaacgctgatagattagtacatataccaggaagtggtgattatcaagtggcggcggtatgtacatcgggtgtacgtggannngcaaccttatctgaccttcccgaacagattctttcagcgccgttaccttcaaaaagacaacagactcaaatcgctacaaacgacactctctctgtaccaactgaagatgctgatgacctcactgccaccaacattcctgatctccttgcgaacgaacaaacatggcctaccgaggaagaaatggggggcagtatggagcacacagttgaagaaccagttgtgaagaaaagggtaaagagagtgcccaagggaactagtgcttatcaggctgcttggatcgtggatgatgatgaagaggtcgatgcggaggatctgagcgacgatgagagcatggccgcatcaggcgacgaggctgcatccgctggagagagaagcgctgcggaagacgaggaagaatttgaggatgtcgaggttgattctagacaagaggttgcccacaaggatcttgatccggaacaagaggaagcagactatgaagcttacttgaaggaacgttctaaggccgatagagaagacgccatgttcccggacgaagttgacactcctcgtcatattcctgccagaacaagatttcagcgttatcgagggctgaaaagcttccgaacaagcccctgggacccctacgaggatctaccgattgactatgctaagattttccagtttgaaaattttgcggctacaagcaagagaattcaactggagggagcacgagaaggtgtcaaaactggaaccagggtcatccttgttcttcgtgatgtgcctcgttcagtcattgaggaccgggaaactggtattcccttcatcgtgcatggtcttttgaggcacgagcacaagcaatcagtcctgcatttcgttgtccaaaggaacactgagtacgcggaacctgtgaaggctaaggaacccttggttttatgcgtcggtcccagaagatacattgtgcggcctttgtactcgcagcatgttagaggaggtggaaaaggtgccaacaatgtgcacaagtcagagaagttcttgaggccaggtactgccaccgtcatgtctgtctttggaccgatctgcttcggcaagagcccctgtttgttgatgaaggatcgaggtatcaaaactggcaagttcattctatctcatatagacgcctattctgacctgcacccgttgtcagttcctgatctggtagctatgggaagcttcctctcgtccgatccaacgcgcatcatcgccaagagaatcattctcactggtcaccctgtcaagatccacaagaagactgctaccattcgatacatgttcttcaaccgcgaagatattgaatacttcaagtctgttcaacttcacacaaaatacggaaagatcggtaacattaaagaacctctcggcacacacggatactttaaagcccactttgacggacctattcagcagatggatactatctgcatgagtttgtacaaaaggcagtatcccaaagtgagtgaatga

SEQ ID NO: 2302 - DNA, 2541 bp, Cryptococcus neoformans
  misc_feature (1666)..(1666): n=g, a, t or c
atgaagtccaacttcgtctttcaaaatctctgcggtaccgtttacagacaagggaatgttgtctttacgcccgatgggaactctgtgttgagtccggtgggaaacagggtgtctgtgtttgacttggtgaataacaagtcaaggacattgccctttgagaacagaaaaaatatcgcttcaattgctctttctccagatggcaatgtactaatttccatcgacgaagatggaagagcactgtttgtgcacttccgtaaagggacagttcttcaccacatctccttcaagcgcaaagtccaccacgtttcattttctcccgacggcaaatatattgcgataacgcacggtcacatggtgcaaatatggaacactcccagccatttggtccgagagtttgcaccttttaccctccatagggagtatactggtcatcacgacgaagttgttagtgtctgctggtccaaaacctccaggtattttatcactacctcgagagatatgactgcgaggctatataccattaacccacttgaaggtttccaacctaagcaatttgggggacatagagatgttgtgttgggagcgttcttttctcaagatgagaagactatttacaccgtttctcgagacggtgcagtgtttgtatggaaagcaaaaaagggcgtctctgaggcggactccgatgttgagatggacattctcgatgctcccaccacttccacctctgccgccaaccttgcccttgagcacgccgtcgcctacactcgatggggggttcacgctcgccacttcttcaaccaacctggtacgaaagtgatttgcgctaccttccaccccaaaacatctctcctcatcgtcggcttttcctctggtgtcttcggcttgtgggagatgcccgaatttacccccgtacatacgttgtcgatctccaacgagaagatctctagtgtggcagtctccgcgtcgggagagtggttggcatttggggcggccaagctcggacagttattggtttgggaatggcagagtgagagttacgttcttaaacagcaaggtcactactacgacatgaacaccctggcgtttagtcccgatgggcagaacatcgctactggcggtgaagatggtaaggtcaagttatggaatgcttcaagtggcttctgctttgtgaccttccctgaacacactgccgctatctccactgtcgaatttgctaagcagggacaagttttattcacagcgtcccttgacggtactgtccgcgcatacgacctcatccgataccgtaacttccggacattcacctctcccacccctgtccagttctctgccctcgccgtcgatccttcaggcgatgtggtctgtgctggatctcaagattccttcgagatctacatgtggtcagtccaaaccggtaaactgcttgacatcctcactggccataccgctcctatatcaggcctcgccttctctcccaccggtaatcagttggcatcttcctcttgggatcgttctatccgtttatggtcagtcttcgggcgatcaagagccaccgaaccgattgagctttcgggcgaagcgactgcgttggcgttcaggcctgacggaaatgagatctgcgcttctactttgaacggggaattgatctttatcgatgtggaagaangacagattaagtctgttattgaaggccgaagagatatttctggagggagaaaggtggatgaccgacttacagctgccaataacgccgcaagcaagtatttcaacagtgtcatctacactgccgacggtgcttgtgtcttggctggtggaagcagcaagtatgttgtgttgtatgatcggacggaaggcgtgatggtgaagaagttccagatcagcgaaaatctcagcttggacggtacgcaagagatgttggactcgaggaagatgacggaggcagggaccatcgactcgtttgatagacaaggcgaggaggaggacttggaagataggttggactcgacgttgcccggtgccagcaagggtgatctttccaagagacggtatagacgggaggccaggaccaattgtgtacgtttttctgccactggtcgaagctgggcggcggcgagtacagaaggtcttttgatatattctctcgatgagagcaccacttttgacccctttgacctctccctcgatcttacccccgaatcagtgatgcagaccgtcgtcagtggtgaccaccttatcgctctcattatggctcttcgtctttcagaaaagcctcttatccagagggtatatgaatctatacctccttcatcaatccgactcatcgcccgccagttgcctagggtgtacattacccagtttatgaaattcatcagcgaccatatcgagaacactcctcacgtggagttcgatttggtgtggacagctgccatgttgactagtcatggaaagtttttgaaggagaggaagggagagatggcttcgacgttgagaggattggtaagagggttgatgggtttagagatgagtgttgccaagatgtga

SEQ ID NO: 2303 - DNA, 2433 bp, Cryptococcus neoformans
atggtgatgtggatctacaagcgcgatgggcgcaaggagcctgtggcttttgacaaggtatgtctcataatcaacaaactttcatatggtcttgatcccaacttcgtcgagccggccgaaatcacccagaaggtcgtccaaggtatccacgctggtattaccactgttgaactcgacaatctcgcagctgaaactgccgcttaccttaccaccaaacacccagattatgctattcttgctgcccgaatcgccatttccaaccttcacaaggagaccaagaaggttttctctgccgtcgtgcatgacctacatgcatgggtcaaccccaagaccggcaagcattctcccatgattgatgatgacgtctataagattgtcatggacaacaaggatattctcgactctgccattatctatgacagagactttgcctacaactactttggtttcaagactcttgagagatcataccttctcaggatcaatggcaagattgtcgagcgccctcagcacatgatcatgcgagtcgccgtgggtatccacggttccaacattgacaaagtgatcgagacctataaccttatgtctgaaaggtatttcacccatgcttcccccactcttttcaatgccggaactccccgaccccaaatgtcatcatgcttcctcgtggccatgaaagatgattccattgatggtatctacgatactctcaagacctgtgctcagatctccaagactgccggtggtattggtcttcacattcacaatatccgtgcgaagggctcctacattgccggaaccaatggttactccaacggtatcattcctatgctccgagcttacgatgccaccgcacgatacgttgaccaaggtggtaataagcgccctggtgccttcgccatctatcttgagccttggcacgctgatgtgtttgacttcattgacttaaggaagaatcatggtaaggaggaggtacgagctcgtgatcttttctacgccctctggatccccgaccttttcatgaagcgtgtcgaatccgatggagactggactcttatgtgtcccgccgagtgccctggacttgccgacgtatacggagaagaatttgagaagctctatgagagctacgagaggaaaggcaaggggagaaaaactatcaaggcccagaagctttggttcgccatcctcgaggctcagaccgagaccggtgtcccttacatctgctacaaggatgccgccaactccaaatccaaccaaaagcagcttggtaccatcaaatccagtaacctctgtactgaaatcatggaatattcttctcctgatgaggttgctgtctgtaatcttgcttcccttgctcttcctgccttcgtggaccttgaacgtcgcgtttacgatttcaaaaagctgcatgagattaccaaggttgttaccaagaacctcgacactgtcatcacccgtaactattatccagtgcctgaggcccgtaactccaacatgcgtcatcgacctgttggccttggtgtgcagggtctcgccgacgctttcatggcacttcgcatgccgttcgactctcctgaggctagagagctcaatatccagatcttcgagaccatttaccacgcagcgcttgaggcctcatgcgaactcgccgaggagtttggtacctatgagtcttacgaaggttctcccatttctaaaggtatccttcagtacgacatgtggggtcgtgttcccaccgacctttgggactggactgagttgaaggcaaagatcgcacaacacggtgtgaggaactctctgctcgtcgcccctatgcctactgcctcaacttctcaaatcttgggttggaacgaatgctttgaaccttacacttcgatgctttacgctcgacgggtactttctggcgatttccaagtggtctgcccttggttgttgcgagacctcatcaaccttgacctttgggacgacaacatgaagcagcttatcattgccgccggcggttccattcagtccatccccaacatccccgatgatctcaagaagatttatcgaacagtctgggagatttcgcagaaggctgtcatcgaccttgcggctgaccgaggagctttcattgaccagtcccagtcccttaacatccatctctccaatccctcgttccctcagctcacttccatgcacttctatggatggaagcgaggcctcaagacgggttgctattaccttcgaacccgtccttccgccaacgccatccagtttactgttgatgcttccactctcaagactgcggagcctcaactccagtgccaaaccctctccgaccccttctcctgctcccggtgcaagtcgtgccactgcagacagtctcgtgcaacccatgaggaaggtcaccattgccaccactgcttcccatcacccccctcagcccgatga

SEQ ID NO: 2304 - DNA, 2226 bp, Cryptococcus neoformans
atgtccgcatcggcttccggatcatcttggacagagcccacaaaggctcaggctcctcctaagtacgtcttgcttagctttggaatgtcttactcttactacatcctcctatataccgccatctacaactactgtactcagccaggcaagactggtctcccttcattttcaccccaacggggcggagctagtcttcaaggcgccgacctccacagaagcttgcacaattggttatctgctcactgcaagtccatgcgagagaaacttcctgaccaagaacttctcaagtattatgctcgtcaatgggacaggtacacccgaggcgccttgtacgtcaacaagcttttcaactatttgaacaagcactgggtcaagcgagagaaggacgagggtcgaaaggacgtttatcaagtgtacactcttgcattggtatcttggaagaataacttcttcgatcatttcactgacaataaggggaccagccgattaactcaagctttgttacggcagatccagcagcaacgtaacggcgaggaagtcgattctggtcttctcaagaaggtcatcgacagttatggcaagttctcccttggtcttgacgaggccgatgctcaacgacaaaatctggatacctataggaaacatttccagactcaattcctcgaagccaccgacacctactaccgtgctgaatcttctgcatttgttggttccaactctgttgcggactatatgaagaaggcagaggcgaggttacaggaggaggcggacagggtgaacttgtatttgcatgataatactaggaacgatttgaagacaagatgtgaaaaggtactcattgaagagcaccaagccattatgtgggatgagttccaaactcttcttgatagcgaccgggttgacgacttggcaaggatgtacggacttctttctcgcgtgctcaacgggcttgaccctttacgagaaaagtttggtcaacacgtcaggcgtgctggtagagcagctgtggaaaaggtccttcctgccccaggagctgtcaatgaagctggaaaggctgagtctctcgatcctaaggcgtacgttgaggcccttctcgaagtacacggcaagtatacctccatggttgaagggcccttccgaggcgaaatgggtttcaaccgtgctctcgatcaggcctgtggcgacttctgcaactccaatgctgcttgtactgtctctacaaagtctcccgagttgttggctagctactgtgatttattgttaagaaaaagcaataaggactctgatgctgaatctttggaagcttctttgagcaaagctatgatcattttcaacttcattgatgacaaggatgtcttccacaagttctatcagaagaagctcgctcagcgacttgtcggttctctttccgcgtcagacgatgcagagagcagcatgatcaccaagctcaaggagttatctggtttcgaatacaccaacaagttgtctaaaatgtttaccggtgagtctgtctttgtgttgtatcgagactttgtactgatcaggaacagattcgatttccaacccttggtccttggctctaacagttggcctttgcaccctcaacaaaccgactttgccattcctcgtgaaatccaggccctctatgatcggttcaacgccttccacggcgaagttcatcaaggccgaactctcaactggttatggcacatatccaagaacgaactccgcaccacctacctcaaccaaaagtacattttgatgacctccgcctaccaaatggctatcctcacacaattcaacgtttccgacaccctttcttacaaggatattgaggccggtaccaagctttcccccactgtgctcaagccccagctcggcttactcgtcaaactgaagattctcttgaacactaatgaagaatattctttgaatacgggcttcaagagcaagaagattagggtcaatttgaaccagactatcaagtctgaggctagggctgagcagaaggaggttatcgctgctgttgatgaggacagaaagtttgtttaccaggcgactattgtaaggttgatgaaggggcgaaagactatgcaacatcaagctcttattcaagaagtcaccgctcagatctcctccaagttcactcctaaaattccagagatcaagaaagcgattgaatacttgatcgacaaggagtacctggagcgagctcccgatcaataa

SEQ ID NO: 2305 - DNA, 2466 bp, Cryptococcus neoformans
atggcacccaagccagccaagacatcttccaagactgcgaagttgccgactcctgcagccactcctacccgtcaaccttcggtcgataccctctcaaaaccgacggtggttgacacgcctccgacgccggcatctcctgcccaggtcagcgctccagttcctcccaagaagtttgcatatcccatcccatcacgcctctctccgtcgactatcaacaacacggaaagcttgttgcgcttcatcatcctggcgttaatatgcggtgctgcgattggaagtcgattgtttgcggtgatcagattcgaatctgtcatccacgaatttgacccctggttcaactaccgagcctcgaaagttcttgttaacaagggtttctacgagttctggaactggtttgacccctccgcttggtaccctctcggcagaactgtcggtaccacgctctatcctggcttgatggtcacgtctggactgatttggcatgctcttcgggcaatcaatatgcccgtggacattcgcaatgtctgtgtcctccttgcacctggattttctggattgactgcctgggcgacttatcttttcaccactgaaatgtctacaccatcagctggtctattggcggccgctttcattggcattgtacccggatacatctctcgatctgtcgccggttcttatgacaacgaagccattgccatcttcctcttgatgagctccttctactcttggattaaggccgtcaaaaccggtagctcattttggggtatgatcactgccttgttctacgggtggatggttgctgcatggggtggttacgttttcatcaccaacatgattccattgcacgcctttgttctcattgtcatgggcaggttcaacaaccggctttataccgcttactcttcctggtatgtcattggaactatcgcctccatgcaggtcccctttgtggagttcctccccatccgaacctctgagcacatggcggccttgggtgttttcggtcttgtacagctgatcggattcgtcgaagtcgtccgacgactcgtgcctggcaagcaattccagctccttctcaaagcttttgtcgtggccgtattctgcctcagttttgctgccctcgtcactttgactttctctggatggatcgcccccttcgctggaagattttattctctttgggatactggctatgcgaaggtccacatgcccattattgcctccgtctccgaacaccagcccaccgcttggccctcattctactttgacctcgaaatgcttatcttctttttccctgccggtgtcttctggtgtttcaaggagcttcgcgatgagcagatcttcatcatcatttatgccgttctcagtgcctattttgccggtgtcatggttcgacttatgcttgtcatcacgcctgttgtctgtgtttcctccgccattgcgttctccaaacttctcgaggcgtatattgaccccgtcatccccgaaagcgacgaggaagctggcgagtctcagacgcaggttgtctccaagtccaaggcgaagaagatggccgctgccaacgccaataagagcgggttctctttcacaggtattttgagcggcaagtctgtctccggcatctttggtctcgacactcgatttgctgtggtttccattctctctgtcttcctcttcatctttgtccttcactgcacatatgtgacttcaacagcgtattcttcgccttcagtggtacttgcatcgcgaaacccggatggtagccaaaatatcattgatgatttccgagaggcttactactggattcgccaaaacaccgccgaagacagcgtcatcatgtcctggtgggattacggctaccagatcgctggtatggctgatcgccccacccttgttgataacaatacctggaataacacccacattgccacagttggtaaggccatggcttccaacgaagatgtcgcatatcctatcttgaggaagcatgatgtcgattacgttcttgtgatctttgggggcttattgggctactctggtgacgatatcaacaagtttttgtggatggttaggatctcacaaggtgaatggcctgacgaggtgcaggaagtcaactactttactcaaagaggggagtatgctgtcgatgacagggccacccctactatgaagaactctctcatgtacaaaatgtcttactaccgcttccccgagctttatggtggacacccggctcaagacagggttcgaggccaaattatccctcctaacagtgttactcttgatactcttgacgaagcgttcacatccgaaaattggatcgtcaggatctacaaggtcaagaaggaagatcccattggacgagaccacaaggccgttactgcctggaacgggggtaagaagttgaagaagagtcctagtgccagtgagggcgtgaagcggggcagcgggagacctagcatgtga

SEQ ID NO: 2306 - DNA, 2559 bp, Cryptococcus neoformans
atgaagaatgaagatattatgatgatccaaatggccaagcaaatggctgatgaacatcaggtccaggcggtcaatggcgcgctctcagtacgtacacccatacatcctcctgctcctccatcaccacgagctcacactcgcacagatgttggacccgacctcatccgctccttgttgatacgcaaattcaagaccccaacgcctatccaaagagcagctatccctcccgctctctccactccaccgagggatatccttggtatggccaggaccggttctggtaaaactttggcgtaccttattcctcttcttcaaagaactggatcgacacaccatggacagggcccaagagctttaattctctgtccgagtcgagagttggcggtgcagatctatactgaagatgaggaaggcaagggtaaagagggactgagatgggccctcatcattggtggtgaaggaatggacgctcagtttgaaaagatgtcctccaaccctgatattgtgattgcaactccgggtcgattcctccatcttatcgttgaaatgcacatggaccttcgacacctccaaacggtcatctatgatgaagccgacagactttttgaaatgggtttcgatgtccaacttcaagaaatccttcatcgtctcccttcgacccgtcaaaacctgttgttctctgctactctcccctcatccgtggccgaattcgcaaaggccggtctcgtgaaccctctccttgttcgtcttgatgccgagcaaaagatctcacctgatctcgccctcaaattcttctctgtcaaacccggagaaaaggaagcgtctttacttgttcttttgagagaagtcattggcaaacccaatcaacctgagcctgccgatccctcttctgcccctcaggctatcgtctttgtagctaccaagcaccacgtcgactatgtcgccgagcttttacgtacgaccgggtaccgcacctctctcatttacagttccctcgaccaagttgcccgtcagcagcaacttgccggtttccgtagtcatcaatccgatgtcctcgtcgtcacagacgtggctgcccgtggtctcgatatccccatcatggaccatgtcatcaactatgatttccctgctggtcctcgtatctttgttcatcgtgtcggtcgtacggcacgagccggtcgaaaaggtaccgcgtactccctcatcgtcaaggaagatttcccttacctctgcgacctccataccttcctcggcacggagcgtatgggcgaacccgcagacgttctgcgttcactccctattgagcagcttagtgagaatgtcgagtacgttttccataaccttgacgaaactgcaccccatattactgctttgcgtaacgtcatgcgcaaaggtcaaggcatgtttgaacgttctcgtactaaagccaatcccacgtcttatcgtcaagcgaaatctctcgcttccgctctcagtaataatcctccccgaattgatgacatgtttgaggatgcgatggaggttgaggtgaatgaagaaaaggctagattactcgccaaagtggcagcgttcgcaccgtctgaagctgtgttcgaagtcggaaaacgcgagagtgagagcgcgattatcatgaagaagaggagaaagacagtcgacgagaggcagaaacgagtctcaaaggctgaagcagagaagagtacagcgagcggtatggagaaggcccccgtgaaagagcttcccgcacctcaacttcctagcaagaattttaaagacccttccttctacctcgaccatacccaacgcggagcggaagctgaaaagggttactctctcaaatctggcgtcgaatctctttctggcgcgatcactgatatgactgccgatgaaggtacaggaccgaaagcccaaaaggccagtcaactcagttgggacaggaagaaacacaagtttatcaagaaaaatggtagtgctgatggagaaaagatgatcaaaagcgaaagtggtgcattgttgcctgctagttatagtagtggcaagtatcaggaatggaaatcgaagagaaggcatatgcctgatgggccggtggaggctctggctttgggaggtggcaggaggggaagacatggaccaccgggacagaagagaaaggcagaagatggagatgggggagaggatgctggtggaaagggtaggaaggatcaaggaaagagcaagggcacgggtaagggcaaggacgatttcaagcagaagtctcctggaaagcctggcaagaaggggatcaagcagtcctctgggctcaaatctgcaatggatatcaggaaacagagggaaatcgcgcaaaaggttcgttgtactgcgacttgcgatattttgaactttgctaacgggtcattgtaccacagagaaaagagaagaacgctcgaaaaccccaaaagttcagaaagtaatttctcatccatatatctatgtagaaccggtgttcgattgtggactcatgtatacattattcacttgggtgtcaggaatacaggactcgtaatgtctcctatcgtactataa

SEQ ID NO: 2307 - DNA, 2445 bp, Cryptococcus neoformans
atggctgtactccacagtaagcgccctcgtatgccagccaactctcaaggcatccatcaacaaacatgcatcaacgacgacgcagcagaaaaggcaaagcggcgcaaatcggcgcatttccatactgtcccagaccataccagtatcagcaacgagaacgagaacccaaagaaccaagccgggaagagggtaatatctgggcttgctatccagcaacaaggattgatccaaaagcgcgggaagaggttgtctgcggtggaacccaatatgccggaagttcgaatcgaggtcaaggagaacaagtacgaggaatggatgaagcttgcaactgataataaaataactgccaacaatacgtggagttttgcccttatcgactactttgccgatctcacccttctccgaaatggccctgatgatcagagtattaactttcagaaagcgagttgcacattggatgggtgtgtgaagatatggacatccagagtggatagtgtggccacagaaacggggaagttgttgagcggtttggcgggaggcagtgctgagacaggggaggatgatggttcagaaggcgaggaggatgaggccggagagccaaaaacaactagaaaggtaaatttcttcaatcctgctgcagaaaacccaacaataacgcattccagaccgtcccttcaaattaaaaagttcgatctcgaattcaccgtcgatccgctcttcaaaaagacttccgcggattttgacgaaggtggtgcgatgggcttgctgatgaaccatttaagtgtggataacaaattgagggaagtgtttgatgccggtgatgcggtggcagatgaacaggatctggatgaggaagaagaagaggggggtggagggatgattgatgaggttgtgcagctggaaaaattacgaagtgagccgcctctcttttttctatatgctccttcagcttctatcaaacgagagctgacgagggttactgaagattacattcctatcaccaaattcctcgccgactactctatcaacccctctctcgcctcgttccactttagttctgactcttcaaccggaaacgacaatgaccccgccatcattcttgggctcaaagactctttccccgttgacgaatatgatcattatgatatcccaatggcgacagcggatgactacaatccgatggacccggcatccaaccgaaggagtggggaggggtatgatttctttggaagtgaggattatgatgctgtaccagcctatggggatggcggtttcgatgaagatggtgcgagtatgatggaagggggtgatatcgggtcaggagggatgtttgaatactttgataaaggattcgggaagagttgggctggcgcagaacattggagattaaggaaggtctctagaaaggatatggctactgccgggacaattaccactacaaactcaaaaaccaaggttgacaagacccccttcgcaatcgatttccacactcctatggttacttcccttacctcctctacacaagcgctcttcacccccgcgtctaataaatcgtctatcaccctcccgtcgacttttgcccccactagaacaaagaacggcaaggcagtgtcgggccagcgtcagcttagggaagagcgccttttaccggacgacatgcattttagcagtcaccagcttttgaggctgtttttgaagccccaattctccttgaagatgcggccaggtggtagaaacgtgggaggaatgggggggatgataggtgcagatggggagattgatgagaatttctgggcggccgctgcaaaagagagagagggaggtgaataatttggttctgctcctgcaccatttgaatcccagttcttccaagacgacgatgattacggtgacatggataatgacgtcgactttgggcctatccaacctaatgttcctgtcctctgcggccccggtgaagaggaagacgatctctgggcaggcacgcaaatggaattgaaaaaggctcgtccggagaacgtcaattttacgaagaaggcgaaaagagtggatgtgaagaggttgaaggatgacatctggacgggtttgaaagatcttgtaccttattccgataaagctggtgatacagataccgacgatgaggattccaccccttccacacctcctgaaccttccgattccgaaccggtcaagacattctcctccattatccaatctcttcgctcaacttacccacctcagaaaatgtctgaaatctcgacatcattttgtttcatttgtctgttacatctggcgaatgaggaagggttgcgaatcgagagtgagaggggacggaaaggaaggggaagatgtgggctgcgtgggaatagcgccagtgggagaagacggggaggttgttttgggcgagggattaaatgctttgctggggatgttgggcgctggtag

SEQ ID NO: 2308 - DNA, 2562 bp, Cryptococcus neoformans
atgcacatacttcgcaaattgcacacaaactcacacaaaaacagcgctcagaggagctcctggctctcggcacaccccaatctcagcagcaagcctttgacaacctcgtcgaggtcttccagtcgtaagcagccgccaattctcagccgcaaggctcatgccaaatccggtctcctcgttttcaagtctgctgcccagaccaccaatgtcggtgccatcgaaagggtattgaaccactttattgccaaggccgaggcccgtcttgctgcggccgtcgagcaggccaagaaagaggttgctgctttgcccgatgttcccgttgtggacgacgacctgccccttcaaccggcttcccttatgcttgactgctttgttgacagtgctggcgacagggaaaggattgagcgaagattgattgcccccgcccaaaagttctgctgggattcttacgacatttgtctcgatattgccaaaagcaacgacaggctcgaggttatctaccaatctatcgcccaccgtgctttccatttctgcaagattcaccagcgcaaggccgatttccgccgtttgtgtgagcagcgattgcgaaaggatcttgccaacgctgccaagtacagccaccagcaacacgccattaacctttccgaccccgagactctcggccgtttccttgacacccgtttccttcaacttgaaactgctgttgagctcgagctttggcaggaggctttccgttccattgaggatgtccatggtttgattgcgggcaggaagggtactaagccttccatgatggccaactactatgagaagttgactcagattttcaaggccgagggcggtaagcagactgctgtcttccacgctgctgcttgggctagatacttccagcacgccgagagggccggcattgtcaatgacaaagcttctggctgtgtcttgctctctgcccttgccgtgcctcttggtgaagtcgaagtcaagcagaggcttgttgcccttctcaaccttcccaagacgcctactcgcgaggctcttgttcaagatgctgctgccaagcaccttaagcgcgtgcccgccgatatccgacaaatctacaagattcttgaagttgattttgagcccaccaccgcttccaaggttcttgctcctctcatcaccagcctctctcccgagtaccaaccttacctccccgctcttcgcgatgttgttctctctcgtttgctccaagctctcgcccaagtgtacgactctgtgaccctttcccacattcttgatctcgtcaagcccctcgataacaccccctgggccaccgacatgtcatcccttgaaaagttccttgtcacagcttgccgacgaggtgacattcgtgcttccgttgaccacgttgcgcagaccatcaccttcgtctctacccctcctgacgccaacggccttcagacccttgccgtctgcctctacaacactatccagtacctcaacccctctcgtcttgctccggtttctcgatccgacgctttcgccgctgctattgctcaggccgaggaagagcgcaaggctgctagtcacaagcggcagatcgtcattcgacgacgtgagcttttggaggaggcgaagcttcgtcgagagaaggaggcttctactgcccttgctgagcgtctcaagatcaaggccgaagaggatgctcgtcgagctaaggaggaggccaaacaggctgaaattgaccgagttcgcaagcagatccatgagaccaaacaggccgaggctaagcagctcgcagcttccctcgctgcccaaggtgccctcaaggtcgatatctccagcattgaagacctcgactcttccaagcttgttgccatgcaggtcgagcagcttgccaaagagaaaaaggagctttctgagaggttgcgtatcgtcggcaagagggttgaccacctcgagcgtgcgatgaggaaggaggagagaccgttgttggctcaggactacgaacgtcagaaagccgaggaccgagcggctcacgatagggctaaccaaattgctcgagagcaggccattgagcagcagagggctgctagggagttgaagcagagattgggtagaatgttggaggactacgaggctgtcaaggaacgcattgagtctcagatgcaggaggaattgaaggcggctaaagaagaggctaggagaaagattgaggaagaaaaggctcagtttacagaggaggctgcccagaaggctgaagaagaagctcgcgctgctgctgctcttgaggctgaagctgctgccgctgaacaacgccgagccgagcgtgaagctcaacgtcaatcagacctcgaacgtatccgcgctcagcaagaacgagaagaagaagctcttcgtcgacgacaagccgaaaaggccgcggctactagcggtggcagcgcctacagaccgcctgcgtgctggtactactccccccacggcttctccagctccttcaagtggtggtccttcatggttagctcgacgaaaggccatggaggctcaaagcgccggtggtgcccctgtggccagttcacctaa

SEQ ID NO: 2309 - DNA, 2547 bp, Cryptococcus neoformans
atggcaccctcacagctcgcacagctcaaggcggctctcaataccgcaggcctgtcgaggaagacacattctaaaaaggacaagaaagcatacaagaaaggcggcgcccgcgagactgacagagcaaagaaggtcgaaaaactggaggagattagaaaaaatctcaacaaattcgatgagagggaaacacgagtaaagcatgatgttggagggaggaatctcaagggtgttgtagttcctgtcaactcgcctccgatcacatctgatagcgttggtttgcagcgaaagaagacgcttttgcctgaacatcagcttcgcgaccaccgcggtacctttagagacaggcgattcggtgaaaatgacccttccatgtccatcgaagaccgtatgcttgagcgatacacccgggagcgtcaacgtggtcaaggcaaaaaaggaatgttcaacctggaagatgaagatgaagatgagcctttcggtgaattggatgacggatttgccttgggtggtttgacacacggtggaaggagtgtgatggatcttcctggtgacgactttgtcgcccaaggtctggccgacgaagacgaggatgaagaagagaacagagccgggagaatcgacaaacgtcccgaaaagaagaaatccaagcaggaagttatggccgagattattgctaaatccaaggagcacaaatacgagcgccagcagcagcgagagatggacgccgagcttcgtgaagaactcgacggcgacattgcagacttgcagatgcttctcgctgaaaatgctccaactacccctgctgctaccctcttccctaccacatcgaaacttcaccctgaccccatgcccgtaccaggaggggaagtgattggagatggagagtatgatcaaatcgttcgttctcttgctttcgacgcacgagccaagcccaagaacagaaccaagacggaagaggagattgctcttgaagagaaggaaaatcttgaaaaggcagaggcgaagcgattgcgtcgaatgagagctgggtctgacgacgagcaagatgacgaggatggtagggaagaggaagaaagctttgacgaagacgcggaagaagaaaatgagagtgatgccgagtctgctatggaagacttgactgaaaatgaagagctgtcggtgtctgaaagtgaagaagtcgaacctgttgtcaagagaaccaaagggaagaagactgcgaggacagaaaaggtcaaggaaataccctacacattcccctgtcctgcgaacattgaagaattcgaagaaatagttgatcctttggaggacagtgcgttacctactgtcgttcagcgtatcagagcactgcatcaccccagtctggcgcaaggcaacaaggaaaaacttcaggaattccttggcgtactgatcgattacgtcctcattctttcctctcgtccttctcctccattttctctcatccaaacacttgttccgcatctcacagctctcgtcaagttaaaccccatcactgctgctgcacattttgtcgaaaaaatcaagctcatgcaaaaaaatctttctcgtggactggctcgaggtgccgccagacccgattccaaaacgtttcctggtgcgcccgagctggctctactgaggctggtcggtttgttctggtctaccagtgactattcgcatccagtggtcgtacccgcggtcttgctgatggggcagtatttatctcaaagtcgcgtccgatcgctgcgtgatctggcatctggtttgttcctgtgttctcttttagcccaatacgaatcactttcgaagcggattttgccagaggccgtcaactttgtagcttcgtcaatcctcatcctccttcctcgccgcaagggtgcagaggtcaacaggacataccctgatttaaaagcaccatctacatccctttacttgaatcttccctcgtccgtcgttccttcacaaccactggaccttgggtctgctattactgccgtcggagatcaggacgaggaagaggcggagcaactcaagggcggactgctagttgttgcttgcaagctcgttgacaaatttgctggcttgtatctcgactcagaggctttcgtcgagctgatgagtcctgtaaaacaggttctggaacaatcaagggctaaaaagttatccagcgagctcaacatggtattaacatctactttgaccgccctgtccaagcgcctcagcaacactctcagtactcgtcgccctcttactctccaatctcacaaacccattcctatcgcttcctatgcccctcgattcgaggagaactttgcgcctggcaagcactacgatcctgataccgaacgcaatgcttcggccaagctcaaagctctttacaagaaggagagaaagggtgccatgcgcgagctcagaaaagacaaccgattcttggccggcgaaaaggcgagggaacaaggcgaaaaggacaaggaatacaacgcgaggatgcgcaaggcggagggcagtattacagtggagcgtgcagaagaaaaggccatggaaaggtaa

SEQ ID NO: 2310 - DNA, 2601 bp, Cryptococcus neoformans
  misc_feature (2437)..(2439): n=g, a, t or c
atgggtaagcacgacaagaagacaggtaagggtcgtctcgacaagttctaccgtcttgccaaggagcaaggctacagagcccgttctgctttcaaacttgtccacctcaatcgcaagtatgacctcctctccaaagctcgatgctgtatcgatctgtgtgctgctcctggtggttggcttcaggtagctgaaaagtacatgcctaaaggctcgctcatcatcggtgtcgaccttaacgccatcaagccccttcctcatgtcacaacctttgtcgccgacatcaccacccctcactgtcgacagactttgcgtcagcacatgcatgactggaaggccgatttagttcttcatgacggtgctcccaacgttggtagtgcatgggtccaagatgccttcactcaaaacgagttggttttgcagagtttgaaacttgccacagaatttttggccaagggcggaagttttgttaccaaggttttcagaagtcaggattataacagtttgctctgggtctttggtcagctttttaagtctgtagaagcaacgaaacctccttcttctcgtaacgtttctgccgaaatcttcgtcgtctgtcgtgactttattgccccgaagcacatcgatcccaaattcctcgacccgaagcacgtcttcaaggacattgcatctctccctacatcaatcacagagcccactgatacctctatcgcccccacctcttcttctaccgcctctgctgccgctgccgccgctcgactagctgccaactcgcacgctcactcaaacgtctatgcccctgaaaagaagcgtcgacatagggaaggttacgctgaaggtgactacacactgcatcacaccgccagtgccgaagagtttgtccgaggacaggatcctgtattgttgctgggtaacatgaacaagattgaattccgaaatgagaccgaaaaaggctggctcaaatctcgccacactacccccgacatcattgccaactttgaagatctcaaggttctcggtaaaggtgacttcaaagctctcatgaaatggcgtcttgccatccgtctcgaaataggactcgatgtcaaagccgataagacccaagatgccaccgaggaagttgttgtcgagcctatggacgaggaagagcagattactgaggaacttcagaagcttcaacaagctaaacttgccaaaaccaaaagggagaggaagcgagcaaacgagaagaaggcaagggagttgttgaaacttcagttgaacatgaccgttcccgacgaccttgaccaaaatgatcttgccctccaaggtgaagaggagatattcgatcttgaagaaggcgagaatgaggcgaggcgtcgaggaaagaatggaggcttagctaccctagtggatgatggcgaaggaatggatctcgcttcggaatctgaggaggaagaggatgaagatgaggaagacgatgaagtccttgactctgacgaagagcgtgagcgcaagactgccgctctcgagggtgaactcgacggcctttacgactcttatgttgagcgcaagaaagaacgcgatgccaaatggaaggtcaagcaagatcgactgaaagacaaaaactttgatgcgtggcatggtattcaggagaagagcgatgaggaaggaagtgacgatgacgatggccaggatgacgacgaggagggcggatgggatgtaattgctcagaaaaaggcaaagtatgctcagagaagtaagcaagcacagttgtggtttgaccagcccgttttcaaggaagttggcgatcttgctgctttggacggtgacgacgaggaagaagaggaagaaggcgagtccgaggaggaagagtctgatgatgaagatgtggatatggaggacgcatctgagagctcaagtaccctcgaaggcgacgacgactttgagatcgtacctcaagcgccagaagatgacggtcccgaatgggatgttgatgatgaggatcaagacgaggttaagaagaaggttatccaaggtatgtttagattatctatccacaagggtcttcttactgccgaggctgtttctcttgctaccgcccttgttaatcgaaaaaccactgccgacaagctcattgaccaaggcttcaaccgtctctctcctcacaacaaggacggtcttcccacttggttccttgacgatgaatcccagttttacaagcccaacattcctatcaccaaggaggctgtcgatgctctccgcgctcgacagagggcattggatgccaggcccatcaagaaggtcgccgaggccaagggtagaaagaagatgaaggctgtggcgaggatggaaaaggccaagaagaaggctgacggtgtcatggagagcgaggagatgggtgacggtgaaaaggctagacaagttaggaggatgctcgcccgtggccgccaaaggcaannnaaggccaaagagaagaagatcgtcgtggccaagggtgtcaacaagggtgttaagggcagaccaacgggtgtcaagggcaagtacaagattgtggacgccaggatgaggaaggaagtcagggcgttgaagagaatcaagaaggcgggaagcaagaggaggtag

SEQ ID NO: 2311 - DNA, 2277 bp, Cryptococcus neoformans
atgccaagaaggacacgatctgtgacttttcagcagatcgaaatcgaagagtcagctgatcccaagcatggaccaacgctacggctatttggagtcaacaaaagcggtaattcagttttggcgcatgtatatgggttcaagccatatttctacgttgcagcccctagcggtttcctcaacaaagaccttcaacctctggccgataagatcaattcttctatatctgcgctgggtccttgtgtgactaactgtgctatcttcaaccggcggtctctatggggttatcgaggagacgacaccgtaccgttcattaagatcaccgtatctgatcccaagaacctatcgaaagttaaagatgagttttttacattgtccactgtatatgttgctgatgatgattctcggcgtctctacagcaacattgcatacaccatgcgtttcatgatcgatacgaaaattgtggggatgaattgggtcagcattcccggtggacggtatgatctgctggaaggaggaagtaaaaaatcacagtgccaaattgaaatctcatgcaactataaggacttgatttctcatcctcctgaaaatgaatggctggatattgcacctcttcgtgttctcagttttgacatcgaatgtgctggccgcaaaggcatattcccagaagcaaatgtggaccccgtcattcaaatcgccgcgatggtaacccgtcacggggaatcaaagcctttcattcgaaacgtattcaccctcaacacgtgtgctcatatcgtcggatctcaagtgctcgaattcaaagacgaaagacagcttcttcttgaatggcgcaagtttgtagatacggttgatcctgatatgattatcggatataacatttctaatttcgatctgccctatcttcttgatcgtgccaaagctttgaagatcccggactttgcctttttgggtcgactgcgaaatgtcagaaccgaagtcaaggaaacccacttttcttcaaaagcttacggtcagcgagattccaaagctgttaatatggaaggtcgacttcagcttgatattttgcaagtgatgcaacgggactacaagcttcgaagctatactctcaacgccgtttgtgcacaattcctaggtgaacagaaggaagatgtccatcattccatcattacggagctccaaaatggtactgcggattctcggaggcgtctggctgtttactgtttaaaggatgcctatcttccacaacgtctgatggacaagttgatgtgttttgtcaactacaccgaaatggcacgtgtcacaggcgttcctttcaactatctcctgtccagaggtcagcaaatcaaggttatctctcagctttaccgaaatgccgcggatgccggctatgttatccctgctctcaaaagcgaaggctccgatgagcagtatgaaggtgctactgtcattgaacccagtaaaggtttctacgacgtgcccattgccactctggatttcgcgtcactgtatccctcaatcatgatggcccataatttgtgttatacaacattattggataagggtactattgaaaggctgaagctcgtcgaaggagaagactatgtgcatacacccaacaatgacttttttgcaacatccaaacgtcgaaagggacttctacctcacattctcgaaaatcttctggctgcccgaaagcgagccaagcaagatctcaaagttgagaaagatcctttcaagcgagccgtgttggacggtcgacaacttgctttgaaggtgagcgccaactcggtctacggtttcaccggtgccaccgtcgggaaacttccctgccttgcaatttcctcaagtgttactgcctacggtcgacagatgatcgagctcaccaagaaggaagtcgaggcagagtactccatgaaaaacggttatgaccatgatgccaaaatcgacactatcgccgatcttttacaaaacaagattgacatgtctcagctcgtgatcaccaaagcccttgccaaagctgactatgccgccaaacaagcacacgttgaattagtagagaggatgaggaagcgtgacgctggttcggctcctagtttgggtgatcgagtggcctatgtcattgtcaaaggcgttaaaggcgctgcagcgtacgaaaagtctgaagatcctctgtatgttttggaacacaatgttcccattgacacccgatattatctggaaaaccaactttcaaagccattgatgaggattttcgagcctatccttggtgagagccaatag

SEQ ID NO: 2312 - DNA, 2412 bp, Cryptococcus neoformans
  misc_feature (34)..(34): n=g, a, t or c
  misc_feature (1385)..(1385): n=g, a, t or c
atgaagtttatgcttggcgatcttcccgttctgntcccttatgatcggtatcttacatggcccatcgcagagcaatactcctacatggctgacctgaaaacaacattggacgcaggaggacattgtgtacttgaaatgccctcgggaacaggaaaaaccgtatccctgctatctctgatcattgcctatatgcaattttaccctaataaacggaaactgatttactgctcacggacagttccggaaatagagaaggctttagcggaactcaagcgattgatgatgtaccgcgcagagatgggggcaaatgatggtgatttcagaggactgggattgacgagtcggcggaatctttgtcttcacccggaagtcagcaaagagaaaaaaggcaaaatagttgattcgcggtgcagggatctcacctcagcgttcgcttgtgaaaaagggagggctgacccggggagcgtaccattatgtagtttccatgaggagttgaacaattacgagcccgggaatcttatacccccaggcgtctatactctggatgatgttaagaagtatggccaagaaaagggtgtctgtccgtactttacgatcagaagaatgttgcctttcctcgacgttatgatatactccttccattatcttctggatccaaaggtcgcagagcaggtgtccgctgaaatgagcaaggagagcattgtgatatttgatgaagcacacaacattgataatgtctgtatcgagtccctatccatcgacttgacgaggccaatgttggattcggccgcaagaagcgtcaataaacttagtgacaagattgcggaaatcaaggagactgatgcgaagaagctggaggatgagtacgcaaaactagtcgaaggtctgcaagaagccaacgagcgagtggaagatgacgacatgctcgtcagtccggttctgtcaaaagacatggtggatgaagctatacctgggaacattcgaaaggcggagcattttatagctttcctcaaacgattcattgaatatctcaagactaggatgcgcgtgctgcatgttgtagcagagacacctcaatcattcctagcgcatctgaaagaaataacatatattgatcaacggcctctcaaatttgcttccgagcgccttacttgtttggttcgcacattggaattgacaaacttggaagaacattctgcgctgcaaaaggttgctggttttgggacccttgttgccacttacgaaaaaggattcctactgatcctcgagccttacgaaaccgagcacgccacagtgcctaaccccatttttcatttcacttgtcttgacccatcgctcgctatagcgcccgtctttgaccgttttgcctcagtggtcatcacttncggtaccatatctcccctcgacatgtaccccaaaatgttacaattccaacctgttatggaacagtcgtatcctatgaccctcacccgaaacgcttttttaccaatggttataactcgaggcagtgatcaagtcccaatttcctccagatttgaggttagaaatgatcctgcagtcgtacgaaattttggaagcatcttgattgaaatggcacggactgtccctgatggagtggtggcattctttcccagttatctatatatggaatctattgtttcagcttggtatgacatgggcattctaagtgaggtgtggaagcataagctactgttcgtggaaactccagacgccatggaaacgagcatagccctcaggaattatcgcgaggcatgtaataatggaagaggggctgtccttctctctgtggcgcgaggaaaggtgtccgaaggaattgatttcgaccacaattatgggcgagctgttattatgtttggcattccctatcaatacacggaatcacgtattctcaaagctcggctggagtttcttcgagataatcataggatccgagaaaacgattatcttactttcgacgctatgcgacatgctgcccaatgcgttggtcgtgtgttgcgagggaagaccgactggggtctgatggtctttgcggacaagcgatttgcgagacaagacaagagggcaaaacttccgaaatggatcaacagttatattacggaggcccattccaacttgtccacggatgtggctgtttcgctggccaaaaagttcatacgtcaaatctcgcaaccatttgatcacacacagacagggatatctttatggactcttgaggacatagaggagaggcaaagacgggataaggatgaagctgaaagggtcgaaatgacacaatcagcagcaattagagagagtgccgccgaggagaatgaccatgctccgcttgctagcgattacatggagattgacgacgccgagttggcggggctgtctatacccatagatgaataa

SEQ ID NO: 2313 - DNA, 2616 bp, Cryptococcus neoformans
atgcccacgaacaacacaaaccttgacaggtcgttcttgaccgcaaatatcgatgatctccttaagcagctcaccacagaagagaagatctccctccttgcaggcaaggattggtggaacactgtaccgattcccaggctcaacatcccttccatcaagatgaccgatggccctggtggcgctcgaggagactcattttaccatatgacaccggcttgtgcccttccaagcgctacttctctggcctccactttttctcccgatttaatccattcagccggtaatctcctagcacttgaaacccttgctcgcaatgctgtctgccttcttgctcccactatcaacatccaacgttccccgctcggtggtcgagcatttgaatccttctctgaagaccccactttgtcaggcttgattgcggccgcttatgttgctggtctgcaggaaggtggtgttagtgcggcgatcaagcatttcgtggggaatgatcaagagcatgaacggatgggcgaggactctgtcatcgcgcctagggcgttgagggagatttaccttcgaccattccagattgcactcaagaagtctaaaccacaagcattcatgacggcttataacaaactcaatgggacgcattgttcggagaacgaatggttacttgaggagctgctgagaaaagaatgggggttcgatgggctggtaatgagtgactggtatggtacctattccatttccgaaagtatcaacgccgggctcaacctcgagatgccgggggccacccgatggcgtcccaacggactagtgactcaccttatcaaagcgcacaagatcgaccccaggcagttggacaaggttgcaggtggtgtattaagatgggtacagaagcttgcgaagaaaaacgaggagttggtatattcaccgcctggcaaagagaagactagaactgaggatcaagcagaagacgccaagttgcttcgtcgtttggctggggaaagcattgtacttctcaaaaatgagttgaatgttctcccaatcagggaacccaaaaagatcgccgtcatcggtcccaacgccaaggccaaggtcctcaccggcggtggatctgcccaacttcgttcagcctggtcgtcaactccctggcaaggtctctccgacaatgctcccgaaggtgttgaactttcctattcccttggatgtcactccgacaagttcctgcctatacttgacgacagttttacctgtcctgatggctcacccggcttccaactttcacacttccccatcacctcctcaggcgataaagctgaggaacccgtacatgtcgagacatgggactcatccgacatgttccttgctgactttaccgctcctggtctgactaaggagtactttacccagcttgatgccgtctggacaccggtggaggatggagagtatgaatttggagtggtcgttactggcaaggggtggttctggatcaatggagaacttgttatcgatgcgtcaagagaagatgaaaggtccacgagtttttttaacttgggaacgaaggaaatcaaaggccgaaccagggctaaaaagaacaagagatatgacattcgcttcctccacgacacccggccatactcagtcaacaacattaacactcccatcgcaagtgccggtatgcgtcttggctacatccaggttatccccgcttcgactctcctctctaacgccgtctctctcgctgcatcctcagacgtcgccttgctcgttatcgggcttaactcgggctgggaatcagaaggatacgaccgtcctgacctttctttaccgatggacacagacaagctcgtcaatgccgttgcggaagcgaaccccaacacgattgttgtcattcaagcgggttctgccgtttcaatgccgtggctcgacaaagtgaaaggtgtggtgtttgcttggtacctgggaaacgagactggtaatgccatcgccgacattatctacgggtataccaacccttctggtcgcctcccgatgacattccccaaacgagagcttgatattcccgccaacctgaactacaaatcggcacgcaccagggtttattacgacgaaggtatctgggtagggtacaagcattttaatgcaagaggtatcgaccctctctttcccttcggccatggtctttcctacaccacttttgcttattccggccttcacatctctcaagtaccagaatcaccaaagaacgtcggtgctgatggatggagagtggaagtcggggtgcaagtggaaaatattggcatggaagagggagcgcacacagtcatgttctggctgagtccgccacctgagagcccgaacggactgaagcacccgaagtggactctgcaagggtttcaaaaggtttatgggctcaaaccaggtgcaaaaagagagatcaaggtcacgtttgataagttattagatgcggtctcacactgggatgagctctggaacacttggagggcggagttgggagagtggactgttcgggttggcgtagacgcacaaaatatcagtggcgagaaggcgacattcaagattgaggatgatcttgagtggagaggcttgaagacagttcaatataaataa

SEQ ID NO: 2314 - DNA, 2385 bp, Cryptococcus neoformans
atggctgacgacccttctcgcgcggttcaggatgactctaccgccaccgccatcttaaggcaaaagcgatctcccaaccgacttgtggtagatgagagcccctcagatgacaatagtgttgccatcttgcatcccaataccatggaggcccttggtctcttccgaggtgatacgatcattggcaagtttcgctatcgacgaaggagggacactgtccttatttgcttgagtcaagacgacatagaggagggcaaggttgccatgaacaaagtcgcccgaggaaactgtgccatcaagctcggtgatttggttcacgtctctgctgccaacgatatcaagtacggcaagcgtatccatgttcttccttttgccgactctatcgaaggtctctctggaaaccttttcgacgtctatctccgcccgtacttcttggaggcttaccgacccgtcaggaagggcgacgtgttccaggtcaggggtggtatgcgaacggttgatttcaaggttgtcgaggttgacccttcgccttattgtattgttgcttctgaaactgtgattcacactgagggtgatcctctggaccgtgaggccgaggaggctacccttaatgacgttgggtacgacgatctcggtggatgtaggaagcagcttgctcagatccgagaacttgttgagcttcctttgcgacaccctcaactttttaaggccatcggtatcaaacctcctcggggtatcctcatgtatggtcctcctggtaccggtaagaccctcatggcccgagctgtcgccaacgagaccggtgccttcttcttccttatcaacggtccggagatcatgtccaagatggcgggcgaatcggaatccaacctccgaaaagcttttgaagaggccgagaagaacagcccttctatcatcttcatcgacgaactcgattcaattgctcctaagagagaaaaggcgaacggtgaagtcgagcgaagagttgtctcccagctcctcactttgatggacggtttgaaggcgcgatctaacgtcgttgtgatggcagccactaatcggcccaactctattgatcctgcccttcgtcgattcggtaggttcgaccgagaggttgacatcggtatccctgaccccactggtcggcttgagatccttcgtatccacaccaagaacatgaagctttccgatgatgttgacctcgaacagatcgctgccgacacccatggttacgtcggcgccgacatggcttccctctgttctgaagccgccatgcagcagatccgagaaaagatggacctcatcgacctcgacgaggacactatcgacgctgaggtcctcgactctcttggtgttactatggagaatttccgtttcgctctcggtgttaacaacccctcagccttgcgtgaaactgttgttgagatccccactaccacctggaacgacattggtggtttggacaaggttaaaagggaactccaggagactgtccagttccctgtcgagcatcctgagaagttcctcaagtacggcatgtctccatcaaagggtgttctcttctacggtcctcctggtaccggtaaaacgttgttggctaaggctatcgccaatgaatgtcaagcgaacttcatctctatcaaaggtcctgagcttttgaccatgtggttcggagagtcagaggccaacgtgcgagatgtcttcgacaaggctcgtgctgccgctccttgtgtcatgttcttcgatgaacttgactctatcgccaagtctcgtggtaattctgctggagacggcggtggttctagcgaccgagtccttaaccaaattcttactgaaatggacggtatgaacgcgaagaagaacgtcttcatcattggtgctaccaacaggccggatcagatcgattccgccctcttgcgtcctgggcgacttgatcagctgatctacatccccttgcccgacgaggagtctcgtctttctattctcaaggctactttgcgaaaatcacctatcgacccccgagtcgacctcgatttccttgccaagaacactgctggcttctccggtgctgatcttactgagatctgtcaacgtgctgccaagcttgccatccgtgcaagtatcgacgccgacatccgcaaagaaagagagcgaaatgagaaggctgaggctgccggtcaggatgttgaactcatcgatgaagagaacgaggaggatgaagttcctgccatcactgtggaacacttcgaggaggctatgcgttacgctcgtcgatctgtttcagatgccgacatccgtcgttacgagatgttcagcaccaccctccaacaatctcggagctttggtagcaacttcaaggagtctattgatatgcgatttgattgttga

SEQ ID NO: 2315 - DNA, 2604 bp, Cryptococcus neoformans
  misc_feature (1039)..(1039): n=g, a, t or c
  misc_feature (1051)..(1053): n=g, a, t or c
  misc_feature (1726)..(1726): n=g, a, t or c
atgctaccttctaccctcgcgagaatacccatacgcctcttacacccacaagccactcagcagctcagatcactctcgaacacaatggcaaccaacaagtcagctgtcacacagccgacttggtactctccagcaaaatcagcagacgaaccagtactcagagtctacaactccctcacaagatcaaaggatgtctttgttcccacaaacggaaggagagtcgactggtacaactgtggtcctaccgtctatgactcatcccatatgggtcatgccaggaattacctcactcaggacattgttcgaagaatattgcgagattatttcaattacgatgtcaactttgttatgaacgtcaccgacattgatgacaagatcatccttcgagctcgtgaatcgtacctcctggaccaagccatttccaccaaccttgctcttactcccgaactcatatccgacgtcgaagctgcgtttacaaagtatctcgccaaacctctcaaatcccttaccgcccctcttgaacactctcctaatgccacttcttttgaaatcctggacttgctgttgcaaaaggaccagtctgaagctcagtgggcaaaggaagctcgagaaagggaggaaaagtttggaatgtacttggcaagtctttcaaaagctagggatgcgtacaatgctgcccagcaaagggtcggaaagcccgaaggagagggacaagctgtcaaagacttggttgaaggagcgaccgacgtccttgggccgtatcttggtgagaagcttggccatacaattgccgatcccatcgctgtctgccgacgtctcgcctcttactgggaaaatgccttcttcaccgatatggcccgtctccgtgtactccctcccgacaccatcacccgtgtttccgaatacgtacccgaaatcgtctctttcgtccaacgcatcgtcgacaacggatttgcttatgaaggtggtggaagtgtttggtttgatgtcgacaagtttgagggtgccgagggtgatggattcaggcatgagtatgccnagctccaacctnnnagtaagggcaacaagaagctcttggatgaaggtgaaggtgctttaactggttcccagggaaagcggcgcccagcggactttgctctttggaaagccaagtccaagcctggagaacctgcctggccatcaccatggggagagggccgacctggctggcacattgagtgctctgtcatggctagtgcgatcttgggtagcggaatggacattcactctggtggtgtggatttaatgttccctcatcacgacaatgaacttgctcaagccgaggcataccatggctgcaagcaatgggtcaactacttcttacataccggtcatctccacattgaaggtttaaagatgagcaagtctctcaaaaactttatcaccatcgatgaagctctccagacatattctgcccgacagttacgacttgctttcatgcttcaaatatggaatgccaagctagacttcaaaaaggacctgatcgttgataccaaggccaaggaagagacatttgacaatttcttcacaaacgtcaaggctagaatgagcgatgccgctgctcgagcctcatggccgagtaagtcgtcaattgcaatctctgatctctatactgattcaatggacagctttcacaaagctcaaaatgatttccgagctgctctttgcgattccttcaacactccanccgccattcaaattcttcttgacctcgtatcctccgtcaacctctattttgcgtctcgtggccgagagtacaacattgctcctgtcgttaccgttgctcaatggattacccgtatgcttcgtatgtttggtctcggcgaaggcgacgtcacatctggtcaaataggatggggcaaggagggtgatgaggcgtctggcggcgactttgaaggcaagctcgacccttatctccgagcgatggcctcctttcgagatgatatccgtcgactcgccattgatggcgccacccctggggagattcttaagctctgtgacaaatttagagatcaggaccttgcgaacctcggtatccagctcgatgacggccagtcaacaactggcggtgccttgtacaaacttgttgacccggctatcctcatccgagccagagaagagaaggaacgagcagctgcggagaaggctgagaagaagaaggctgcagaggcgaagaggctcgctcagcttgaaaaaggtcgagtgcctcctcaagagatgttcaggcctcccaacgtcgccgagggaacatactctgcatgggatgaacaagggttgcctacaaaagatggtgaggggcaggacttgagcaagagcttgcagaagaaggtggcgaaggagtggaaggttcaggaaaaagcgcatggcgcatggttgttggcaaaaggagcaagagggaaagtagacggtgtaggtctatggcatagggcaatgtgtaccaatatagatatattagtatttcaggcatgttggttatttgggtttccgaatttgttctttgaacaggatttcgcgtacactggcgccgtggactatcgcatggacgataactcgacagaacgctag

SEQ ID NO: 2316 - DNA, 2436 bp, Cryptococcus neoformans
atggcagaggaagacttcatccctctccaaggttcagctgggaagaaagaacgcaaggagcgtgtcaacacaacccttttcgtctcctccctcccttatacagccaccaccaccgaccttctcacccacttctcatacatcggtcctgtacgacatggtttcgtcgctaccgacagagaatcaggcaagtcaaaaggtgtcggttacgtgactttttcgttgaaagaggatgccgatcgggcaattcaagagttggacggaggttcttcggtgggcagtaagaggaagatccaagtgaagtgggctgatgaaaggcgtcttgaaaaactttccgccaaaggagaaggcaaagctcccagccacgctggtagactgatcattagaaatttgtcttgggacaccactatccaagatctccgaaaagctttcctcccttacggtcctatccattctatcgatctccctacccttccctccaaactccctccttcatccgaccctgccaaaccgccgccccctccgcgtgcgcgtggcttcgcatttgtctggttcttggcccgacacgacgctgaaaaggctattgaaggcaccaacggtaaaccaatcaagaagggtcctgatggtgagggtcgagtggtagctgttgactgggcgttgagtaaggaaaagtggcaagaggcgactaaaggagaggagaagaaggaaggggagaaggaaagttctgattctgggtccgattctggatccgagtctgagtctaattcggaatctggcgagggatctgatgaagaatcatcaggtgatgaaggtacttccgtagttagcggctcagaagaaagcagcaacacggatgaaaatgaagaggaggaggaggaggaggaagaagaacctgtcaagcctaccctccccactgtcgatgtcggcagtaccctcttcatccgtaacctccccttcgaaactaccgaacttgagcttaacaccctcttccgttcttttgggcccttgcgatatgccaaaattaccattgacaaggcaactggacgatccaggggaactggcttcgtttgtttctggaagaatgagcatgccgatgaagttattgaagaggcgcagagaaatcccttcgccctcccttccctccttaccgctgacccttcctcttctctcgcttcccgtcttgtccttcacgggcgaaccctcgacatcacccgtgccgtcacccgagaaaccgcctcccaaatgaaggaagacactgaacgtctccgtaacgccgcagacaagcgaaacacctacctcatgcgcgaaggtgtcatcttccctaactctccagccgccgagggtctgccagagagcgagattgaaaaacgtcaggcgagcttcaactctcgtaaagccttgttgcgaggtaacccttcgctgtacatctccaaaacacgtctatctatccgacagttgcctctcttcgcgactgataggacgctcaagcgattggctatccatgcagtcaaagctttcgacaaggaagttgctgatggtgagcgagaaggtttggctagggcagaagagatggacggtaccatgagttctgctattgccgctcgtggcgacaagtcaggcggtaagggtaagggtaaaggaggcaagaaggagcgtgagacagctgtcatccaatccaagattgtccgccaaactgaaaagctcgatcccgtcacaggccaaggcaggtcgaagggttatggtttccttgaaatgcgttcccacaaggatgcacttaaggtgcttcgatgggcgaacaataaccctgaagtgggtccattgatgtgggagtggtggaaggttgagctcggagatatgaaggagcgaactcttatcatcgagttcagtattgagaacgtccaggttgtgaagcgccgagtagaaaagatcaccacggcgagagagaacgggaagcgcaaggcggatataattgcagctgaagacaccgatgacgacgaatctgcctcttccaagcccgctggccgatttgacaagcgcgccaagcgcgacggacgtgatggtcgtgatcgtcgcgacaggcatgatggtcccggtggtcgtgaggggttaaaaggcaactttagaggcaagcaaggtcaagatcgagagcaaggcggcaagtttgataaagacaggcctaggggaggtcagaatggcccaagacgggattataacgatcgtggaggtcgaaatgaacgaggtggtcgcaacgaccgtggtgacagacctggtcaagtccagccccgacaacctgggaggagggaccaaaaaagtgtgaaccaggtgaagaaggatgtcaagaccaaggaagctggggagaagagaggtattgagaagttcggaagtcaactgggtagcatgattgggaggaagaggaagatgcgcaagggtgcaaagtag

SEQ ID NO: 2317 - DNA, 2814 bp, Cryptococcus neoformans
atgtcccaaccgatcatgctcccccagggctgggaagccagatgggatccccaggcgaacgcctacatctatgtcgaccagagcacaggcaggtcccagtgggaggtccccctcaaccccaccttccccacctcccccaccccgcacgcccccccccagcgccacggccgccgggcctacccctccgccatgtacgcccacgcctacgacacgcccgccccgcacgtcggccccccccagccggtcgcgggctacgccgagcagggcacaccgcagttcatcacccccggcttcgagggccagcagcccgtgcagcagccgccgtacgccgctgtggaccacgtcgccggccagttccagcagatgaacattgctcccggcgccgcgcccgtcgctggcgcggctgccggtgcgtaccagggcgcgggctatgccgagaagcagctgcactcgacaaagaccaagacggtcaacctgataggtctccagccggacgtcgccgcgctcgacaacccgcctccgcctgccctcctccccgccaacgcgagcgtcacgtcgtccgcccactcccagccggatccgtcgtaccagcgctgcaccctcaacgccatgcccaccacgcagtctttgctgaacaagtccaagctgccgcttgcgctcgtcatggcgccttaccgatccattcgcgagacggacaatgatcccgatgtgccggtggtcgaggacggcgtgattgcgcgatgcaggcggtgcagggcgtacatcaacccgtttgtcacgtttatcgaaggcgggaacaggtggaagtgctgcatgtgtggtctgagcaacgaagtgccgcagctgtttgactgggaccagcgtgcagagaagccggcggacaggtgggcgcgcaaggaactgaatcacgccgtcgtcgaattcgtcgcgccgacagagtacatggtccggccgcctcagccgcccgtatatgcctttgtcattgacgtttcatccgctgcgatccaaagcggcatggtcgccgtcgccgcgcgcaccattctcgaatcactcgactcgttgccgaatgccgataaccgcacaaaggtcgccatcatcgccgtctccaccagcctccatttcttctccttgcccgccgacgcgaccgaagccggcatgctcgtcgtccccgacctgacagacgtcttcctcccgaaacccgtcgacttgctcgtcaacctgaccgaatctcgccccgctatcgaatccctgcttgccaagctgtcagacatgttccaagactcgcacaccgtcggttccgcgctcggctcgggtttgcaggccgcccaccagcttattgggaagattggcggtaagattatcgcgctgggcgcttccctcccgaccattggcgagggtgtgctcaaggcgcgagatgatcccaagctgctcggtacatcgaaagaatctcagctcctcaatgccggcaacaactggtacaagacgtttgcgatcgagtgttccaagaaccaagtctcggtcgacatgttcctgttcagcgggacgtacaccgatgtcgccacactgggttgtctgccccgatacactgccggccagacctatctctacccaggcttcaacgcctcgaggagcgaggatgcgatcaagtttgcgaccgagtttggtaaagtgctggcgatgcccatcggtctcgaggcggtgatcagggtccgtgcgtcgagggggatccgcatgtctgccttccacggcaatttcttcatccgatcgaccgacctgctcgcgctgcccgtcgtaccgcaagaccaaaactatgtgatcgagctccagatcgaggatgatatcaagggctcattcgtcgtcatccaaaccgctgttttgcataccacatgctatggcgaacgacggatcagggtgatcacccaggcgatgccgacgacggacagtatcgccgagctgtacacctcggcggaccagatcgcgctcgcgacctacctcgccaacaaggctgtggagagaagcatgtcacacagcctggacgatgcgcggaaccacgtcacaaacaggctgggagaaatgttgacggtgtacaagaaccaggtgacctctgccgccggcggcgcctccgcccagctcgccgtgcctgaaaacctgttgctcctccccctgctgtgttgcgcgctgacaaagcacgtcggactgcgtgaaggcgcctcgatccctccagacttgcgggcctatgcccaatgtctgctcaccacgcttccctgccagacgctgattccgtatatccacccgaggttttactctctccataatatgccgcccgaggccggtacgattggcggcgatgacggggcgatgatattgcccccggcgctgaacctcacgtcggagaaactcgagcgccacggtttattcttaatcgaggatggacaaaacatcttcctctgggtcgggcacgacgccgtcccgcgcctgatccaagacgtctttgacctcgcgtcataccacgaactccagggcgggaaatataccctcccgagactggataaccccttctcggagagggtgtgtaatgtggtggataagacgagggagatgaggaggggagtgtataggccgcaggtgtatgtggtgaagagtgatgccgagccggcgttgaggagctgggcgttgagtttgttggtggaagatcggatggataggatgtcgagttatgcgcagtatttgacgactgtgaaaagcaaggtgggtggttttttgttttttttttttttttgggaaaaagctgatgcgtgtgtgtggtttaggtga

SEQ ID NO: 2318 - DNA, 2718 bp, Cryptococcus neoformans
atgatgaagcaggtggaatatgtacgtactctcttaacggcgcagctcacacccgcagctttctaccacgataaatccactgtcatacaagaagcccgcgtcttcaacgaatcgcccatatctcccaggaaatgtagggccctcttgacccggatcgtataccttctatacacaggggagactttctccactcaggaggccacaacccttttctttggtgttacgaaactgttccagcacaaggatagtgcactaaggcaaatggtctatctggtcgtcaaagagctgtctactgttgcagaggatgtaatcatggtaacatcttccatcatgaaggacatgcagcccaatttggaagttgtgtacaggcctaacgccatccgagctcttgctaggatcattgatgcgcaatcggttcagtctgtcgaacgtttcttcaaatcggcccttgtggatcgctcgccttcaatctcttcagcctctctcatctcctcttaccacctcttcccactctcccccaccattatcaaacgctggtctaatgaagctcaagaagctgtcaacgcaaagtctgtctcttcatactctggcgcatctgcatacttttccggtggctcagcaggaggttatcaggctgttgcgagttccagctacatcatgcagtaccacgcattgggcctattatatcttattagagaaaaggatcgtatggcgatcaccaagatggtgcaacaactcggtgcaagcgggaaggggagctctatcgtgagaaatcccatggcaatctgcatgttgattagatttgcgaggaagattatggatgaggaccccaatctcagaaagcaaatgcacgaatatcttgagactttgcttcgacacaaatcggaaatggtcaacattgaggccgcgcgagccatttgtgaaacgaaagatgttcaaccaggcgacctttacaagactatcgcggtattacaattattcttgagctcccctaagcctgtgatcaagttcgccgccgtgaagactttaagcaagcttgcgcaaactctacctcaatccgttgctgcgctcaacgtcgaaatggagaacttgatcaccgactccaacaggagcatcgccacgtacgctatcaccacattgttgaagttgaccatggcacagactggcaacgaagcttctgttgacaggctaatgaagcaaatttcgtcgttcatgaccgatattacagacgaatttaagatcatcgttgttgatgcgattcgatcactttgcctcaagtttccagctaagcaagcggtgatgctctcttttctttctggcgtgctaagggacgagggcggttatgaattcaagcacgcggtcgttgaggcgattttcgacatgattaaatatatccaagactctcgcgatgctgtaactgatgaaacagcactcgctcacctttgcgagttcattgaggattgcgagttcacaaagctttctgttcgtatactccacttgctcggtattgaggggcccaagacccggaacccgactaagttcatccgatacatctataatcgcgtcgttcttgaaaatgcggttgttcgcgcagctgctgtcagtagcttggcgaagtttggtgtctgcgtcgatgacccttcagtgatgaagagtgtcaacgtgcttatgaggagatgccttgatgatgtcgatgatgaggtcagagacagggctgctatgtacatcaaggtattggaggaaaaatctttggcagatctgcttgtgaaggatgctcaattctcccttgccaatctcgaggaacaactgatgtcgtacgtccgagataattcgaagcacgcttcggcattcgacatctctgcagtgcctaaagtcagtcgcgaacaggcccatgcagagatggctcagactcgctcatctgctctcgatgtcgccggcccctctactgctgctgtcatcaccccagcctcccccattccatctgctaaggaagcccaatcgtcgtatgccgctcaactctcgaccatccccgaatttgagccatacggtcctgtccttaaatcttctgccaagcccatcgagctcacagagtctgagacagaatatgtcgtcacggctgtcaagcacgtcttcaggaagcatgtcgtgttccaattcaatgttgccaacaccattcccgacactgtgttagaacaagtcgctgttatcatgcagccatcgcctgactgtggattgatagaagatttcattattcctatcaatagcctgacaacgcaagtaggccaggcaccggtatatgtaagctttacgagagagaatccacaagaatatgcggccggatcattcggttgtactctcaaattcgtcagcaaagaagtcgacccatccaatggacagccggaagaagaaggatatgatgatgagtaccaggttgaggagctcgacctgggcgcggccgattatataactcctaccttcgttactttcgtgaacgaatgggacaagttagcctcttccccgtcacttaccgaaaccttcgctctatcttcttccgaatcccttagagaggcttgtcgatcccttattgaagtcctcggtatgcttcccttaggtggcaccgacacgcctacctccaattctgtccacacccttaatcttgctggttgccatccctatagcagatggcgaaaagtcaagcaaggtattagccagatgtag

SEQ ID NO: 2319 - DNA, 2694 bp, Cryptococcus neoformans
atgttgctggtcttggtcgagggtaagtggcatctgcgcccaattcctgttgcttcaggtttcacaactcggtccgatattggtcccgcccgagctggtcccagtgcagaggttgttgcggaagctcaagctcgccgtggtgaagaagaaatccctgatccagatgctttccaagatccggacgacgaaaggaatctgtttgctggtacagtctacgaagcggacgatgaagaggccgacagggtgtgggacagtgttgatgccagaatggatgcgagaagaaaggccagacgagacgcggcagaagcgaaagcggcggctgaagaacgtgctcgcaatcccaaacttcaaacgcaatttgcagacttgaaacgatctctatcgagcctcaacgatgctgattgggacgccatccctgaagcaggaaacttgactggaaaaaggagaaaggccaatttgcgattggaggaaaatcagaatggaagaagctacaatgtcagcgacactgtcattgcagatgccgctggtattggtatcgatggtaccgaaacggatcttgtatctatcggtaatgccagggaccgagtattgtcgctgcagcttgaccaagtgagtttagatttaatcgccacaagagacgcctcaaacggctcttctaccagcatcgaccctaaaggctatatgaccgctcttaacagtcagattgttcaaacagacgctcaaattggtgatattaagcaagctcgccagctcttgcaaaacctcattcagtctaatcccaaacacgccccaggatggatcgccgccgcttccttggaagtacacgcgaagaagatggtcgctgccaggaagattatcgctgaaggatgtgagaagtgtccgaaaaacgaggatgtttggttccatgccgctgaactcaacacaccggagaacgcgaaagttatcttgggtcgagctatacagcacgttcctcaatctgttaaaatttggctcaaggctgcttctctagaaacagacataaacgccaagaagcgcgttctccgaaaagcccttgaattcgttcccaactctgtggggttgtggaaggagactgtcaacctggaagatgatcctgaagacgcccgcgttctccttacccgtgctgttgaagtcatccccaactctgtggagctctggcttactctggcccgtcttgaaactcctgaaaacgccaagcaggttctcaattctgcgcgcaagcgtatccctacctctcacgaaatctggatcgctgccgcggaatacgaggctgagcaaagaaagaagcttgctcagcaggtcaacaaactcatggctggtgcagtcaattcattgcgcaagaatcaggtcattctttcgcgagaacaatggttgcaagaggccgagaaatgtgaacaggacggctcacctcttacagcgcaagctatcgtgaaggctaccatcgctcaggacgtcgaggaagaagataggagatctgtctggattgaagatgcggagagggcgacaaagggtggattttacgaggtcgcgagagcttgttacgccgtcactctcgaggcttttcctaatactccatcagtctggagaaaagccgccgagttcgaaaaggcccatggcacacccgatgctgtccaagaaattctcgcccaaggatcccaacactgtcctcatgcggaggttctctggcttatggctgcgaaagagaagtgggtcggcggcgatatccccggtgctcaagccattcttgccgaagctttcaaacaaaacgaagattccgaatctatcttccttgctgccgccaagctagcagctgagaccggcgagatggaggctgctatccagatccttgagaaggccaaggcacaggcagacacagagagagtctggatgaagtcagcggtactgttgaggcaattgggcaagttggacgaggctctttcaaccttggaagttgcaatcaagaaattcgcttcctttgacaaattgcacatgatccgagggcagatctacgagtcccgtaatgaggttgcgcttgcgcgaaatgcatatgctcaaggatgccgatcatgtccgaagagtatcccattatggatcttgtcggctcgtctggaggagaaggcgggtgtgacgatcaaggcaagggcattgctcgaaaaggcgaggttgcataatcccaagaatgatgaattatgggcggaaagtatcaagattgaagaacgaacgggcagcccacagcaagcgaaatctcttcattctatagcaatgcaagaatgccccgcctctcctcttctttggtccatggccatcttcatggagactcctcaacaaagaaaaggtcgttccgttgacgcaatcaaaaaggccggcgaacatccggccgtcatcttggcggtcgcgagaaacttctggagtgaaaggaagattgaaaagacgagacagtggatggccaatgctattaccgccgatgaagattggggagatgcctggggttattggctgaagttcgagaggcaacatggagagaaagaacgtcaagaagcggtcgttgaaaaatgcatcgcggcatcaccacgccatggtccggtatggcagtcggtatcaaaggatttggccaatgttggcaagtctacaaaagagatactggagttggtcgcgcaaactggaataatgttttag

SEQ ID NO: 2320 - DNA, 2706 bp, Cryptococcus neoformans
atgtttatgtttacggagagcaaaggaaaagtggaggcgacttgtgctgatggtgtggtggcaactggcgggttaccggactttggcatgcatccttttgccaccggtacagtcttctttcttcctacccccgtacggctggcacggcgcactcttctgtcctcccgcctttcctacactactctatacatacacctccatagtagtcacggctatctccacacccttgccacagagctcgccaacgaaagccagggcctcgatgtaagatatgccgcaggtctcgccttcaagaacggtatcgccgcccgggacgctataaaccagcccgtgctttccgaacgatggcttgccctccccgaatcagcaaccaaccctctcaaacacctttcactttccacccttgggtctccccagcttcgtgccggtgcggtcgctgcgcagtgtgtttcagccatcgctgcaatcgaattgccggtgggcaagtggccagagttgatccctcagttactcgaatttgtgcagaaccaggacaacactggattgagagtcaacactttgcaggctgttggctacatctgtgaagtcatccgacctgatatccttgctgccaagtcaaatgagatcctcaccgcggttgttcagggagcccgaaaagaagagcctagtcacgaggttcaacatgccgctattcaggccttgtacaattctctcgagttcattagggataacttcgagcgagagggcgaacgaaactacatcatgcaggttgtatgcgaggctactcaaagcccctctgttcctgtccaagtcggagctttcgaatgtctcgtgcagattatgcacttgtactacgaaaagatggacttctatatggagcgcgccctctttggccttaccatcatgggtatgaaacatgccgaggaacccgttgctctccaagccatcgagttctggagtactgtctgtgaagaggaaatcgagttgactgctcaggcccaagacgctttgcaatacggcgatcaccctgaaattgagtccaagggttttgccaaggctgctctcaatgatatccttcccgttctcctcgaactcctttctcaacaaaatgaggatgatgacgaagatgactggacaaagtctatggccgctgctgcctgtctgcagcttttggctcagaatattggtgatgagattgttgggcccgtcgtgcccttcgttgaggccggtatcacccgacaagactggcagcaccgagaggctgctgtcatggcctttggttccattcttgacggtcctgaccccatgactctcgctcccctcgttacccaggccctcggtgctcttatcagcatgatgcaatccgacccaagcttgcaggtccgagacactgttgcttggacactgagcaagatcaccgagaccatgctcgaggtcattgaccctagtattcacctccgcaactttatcacagcccttgtcatgggcctcaacgcctctcctcgaacttgcaacagttgctgtgctgccctcaacaaccttgttatgcaaatctctcaaccccctgagctcctcaccgaagaggttcaaactactgtcatgtctgaatactactctggtattctcaaggagttgatgcccattgcagagcgacccagcaaccagtccaacagccgaagcgctgctgttcagactatcgctaccttcctctccttttctgccaacgacactctccccgtcgttcaggaggtcgctgttgccttcatcgctcgtcaggaagcccttatgggtatgcacaaccagcttgttggtatggatgaccgaaacaactggaatgacatgcaaatcaacaactgtgttgccattgccgccttcatccggcgatcacctgctttggccgctcctttcgcggacaggatcatgaccaacctcatacagctcatttccgcctctggcaagcagtctggtgtgctcgaagaagcgttctccaccattggtggtcttgcctctgcccttgaggccggattcaacaagtacatggaggcctttgccccttacatcatcactgcgcttggatctcacgaagactattctgtcgcccaggctggtgtctttatcacttctgacattgcccgatccgtcaacgaaggcctccagccttacgccgagtctctcatgtcctcactcatcgagctccttcgatcgcccattgttgccagacaggttaagcctcacgctatctccgccatcggtgaagtggctcttgctatcggatcgggcttcaagcccttcctcgaagccaccatggctatcctttctcaagctggatccacttctgctccccctggtgatgaggctatgatggactttgtgcagactatgagggagtctattgttgatgccttcattggtatcatgaacggtttcaaggactccgaggccggtgtcatgctcccctacgcccctggtattctttctttccttcaaacttgttgggccgacgaggaccgttccgaaggcttctgcagtgcctcccttggtctcattggtgactttgccagcgcattcaagaacaacatcaaggaccaaattacacaaaactggattcaagaggctatcaccagcggcagaagcagaagcgcttccaagcaatccaagaccaacgccgcctatgctcagcacgccatcaaggaactgctcaagtaa

SEQ ID NO: 2321 - DNA, 2670 bp, Cryptococcus neoformans
  misc_feature (963)..(963): n=g, a, t or c
atgcccttacagcgcgcagtatctgattcccatgcccttgtttcgtttcgagctaacgatgacccccaacatgtcttcccagcccctcgagaaggccaaggtaatttttttttttctgcaagatgcacattccaacaacacagactgattcttttacttgaccagctgccggtcccaaagaatcttcttttcatcgaaaatgatgttccaccttcgaccaccccttcagcggcgactactcccacagatcatgaactcgacccgcttgcccatgctggcgataaggcagaacttctcacccaagctcttcatgagagtcaagtccctacaaagccaaagagcccacctaataatgtgtcgaggttgggcaaacttggacagcttgagacaagattgccggatatcaatgcggaacctaatgagtattatggcggagcacaggtaaccagtagggcacgaacattcagcaatgtaagtctcgtgtcctgttcctggacgaaccaactgatccacaataggtcggtgtcgagggtgaattcaagcgtcggcctatgcaaatgggcggtgagaaaatctctagaaatcgccgactttcgcatggtgagtactacgttaatggcgtatgctgataatgaagacgagagtaccccgtctgctcccaggcgctatttaattgatgtcgaggaaacaatgagactcgtgttggagcaagaagacacggataacaacttccaaatttctatctatgattcgggtcccaaacttctttcattgggtacggcgagttctaatgcccataaaacctttgatatccggggcacatatatgttatcgaatcttcttcaggaactcgcacttgcccgagactatggacgcaagcgcattgtcttggatgaagctcgtcttgccgagaatcctgtggaccgtctctctagaatgatcaagaactcattctggaacagnctcactcgacgcatcgacgcagagggtcttgaaatcgcttgcgcggatcccaagaatagaagccagcacatgcgagccaggatttatatcccacatggagaggatgaaatggccgagcattatcgtcaaatagcgaaagagaaacccaacctcaaactcgaggtcgatatccttcccaaagaatgtgacaatccagcttttgtcaagactctcaacgataaaccaggcattctcgctcttgcaatggataaaaaggttgacgcagacggcaagtctcacctagaggctctgccatttatcgttcccggtgcaagattcaatgagaagtatggttgggacagctactttatggccctgggcctcttggtagacggtcgggtcgacttggccaagagtatcgtcgagcactgtattttcgaaattaaatattacaacaaagttctcaatggtaaccgatcatactatctctgtcgatctcagcctcctttccttacagacttcgcccttcagatctacaaccagcttgatcgcagcaagccagccgaaaacaaagcatggctcaaacgtaccatccaggccgctatcaaagagtaccaccggtactggatgcaagagccctcgctcgaccttgtcactggcttatctcgctaccgcccttctggcctaggtattccccctgagactgaagccagtcatttcactcacatccttcagccgtatgctcagaagattgggatctctgtgaatgagtacattgatggttacaacgacgggacaatcaaagaacctgagcttgacgagtatttcttgcatgaccgaggagtacgagagtcgggacatgatacctcatacagactcgacagaaagtgtgcagacttggcgactgtcgacttgaactcgctcttatacaagtatgaattcgatattgcttcggctatccaagtagcctttgacgacgaactctacctggacgaagagtttgaattgtctccctggcctatcaccgccgaggccttcaaggctggcgccacctaccagctctcgaccaaaactcctcagacaagcaggcactggtttgaacgggcagctaaacgcaaggcaaccatggatgagctttgttggaatgatggacagggaatgtactttgactatgacaccaagctcaggaagcagacgcgatatgagtccgtcactacgctctggcctttgtgggcaggctctgcctcggaggaacaggctttgaagcttgtccgcaatgccttacccaagttcgaagttgctggtggtcttgtatctggaactgaagaatcgcgtggcgtaatctcgttggacagacctaatcgtcaatgggactatccttacggttggcctcctcatcaaatcatggcatgggtcgggcttgaacgttacggatttgtagacgatgcatccaggctggcgtacaggtggatctatatgatgactctatcgttcatggatttcaatggtatcgttccggaaaagtttgacgttgttgaacttagccacatggtagatgcggaatatggtaatcaaggtactgatttccgatacgtgccgagagaaggtttcgggtggatgaacgctgcctatcaaatcggtctccaatgcctgtcaaccggtatgagacgagctgttgctgcttgtgtaccagttagtgttctagcaaccaaccaatggctaagctga

SEQ ID NO: 2322 - DNA, 2850 bp, Cryptococcus neoformans
  misc_feature (1837)..(1839): n=g, a, t or c
atggtcaagtcatatatgcgccacggccctactcaggtaaagttgaactcaaactcctcttacaatggcagattagcctatgttccaggatgggaagatgttctcgtctgggatacaaagcggggagaaatggttgccatgtggcattctacggggcttacttcaccagtgacttaccttatccctgcccctacgccttacacctctacgtcgactactcctgtcacttttgcagtctcatatcaggacggttcgatccgtttatggtcgtacgatccctctacacccgatgttgaagcttccgaaaccgtcacattcaacggtcacaagaagagcgttaccacaatgacttgggactatgatgcttctcgactggcatccggtggtactgaaggtgagattgtcgtttgggatcgcattggagaagtcggtcttttccgtctcaagggtcaccgtgcaccaatcaccggtcttgcatttattcctcacccccgcggagggcaccccggatggctcgttagtaccagcagagacacctacttgaaggtgtgggatttgggaactcagcactgtgttcaaacagttgttgtcgggcgaggggaggtgactagcttggctgagatcaagggtcgatggactgtcgtcacgggaagtggtgacggtgaagccaaggtctacacgattgaaaaatcccagctcgcaagaggtatggccgaggacgagaaaggggaacttcccgctctcataacctccgtctgcactctccccctcccttcatcgactcaccctatctcccaaattacctggcaccccgcacttcctctgctgtctttacaaacttccgaccgcggtgtcgctatacttcgtttgaggactgaagaagaagttagcgcaaagagggctaggaggaagaagagagatagggagaagaagaagaagggaaagggcgacaagcaaaaggaagaagacaagcagaaggaagaagacaaggaggaagatgagaaggatgaacctgtcaaatgggaggaaagagtggctgtctggtgtatgtattcgagacatgctcatcaattgcagttgcttttggccttgtccaacaactccatcgaatcatacactatccctactccaggaagcaaatctaagcttgccgatggaactaccccggaacccactaaaactcattccattgaacttcccggtcaccgacaagacatccgaactatttccatctcttctgacgaccaagttattgcctccgcctcgtctggtaccctcaagctctggaatgccaggacaacagcgtgcatcaggactatggaatgtggttacgctctctgttccaccttcttgcccggtgacagacatgtggtgattggtaccaaggggggagaactgatgctctacgacgttgctgcgtccagtctattaaagacctacaaagctcacactggacctgtttggagtgtgagcgttcgacctgacggtagagggttggtcagtggtagtgcggacaaggacgtcaagttttgggactttgagatgagggaggaaggcgaaggcgaaaaagttaccaagcaactcgctctcgtccacgttcgtactctcaagatgaccgacgacattctttgtctcaagtactctcccaatggccgtttccttgccattgctcttcttgactccaccgtaaagatcttcttctccgacactctcaaattcttcctctctctttacggccacaagcttccagttctgtcgctcgacatttctttagatagcaagctccttgtaacctgttccgccgacaagaacgtcaaaatctggggtttggactttnnngactgtcacaagagtatttttgcgcacgatgaagctgtcatgggcgtcatgttcgagaaggaggcaggaagtcacaacttctggacagttggaaaggataggatggtcaaatactgggacggtgacaagtttgaactcatccaaaagctctctggtcatcacggcgagatctgggcgctttctacttcgcaaagcggtcaatttgtcgtcactggttcccatgacaaatccattcgtatctgggaaaagactgatgagcctctgttccttgaggaagaaagggaaaaagagattgaggctatgtacgattccaacctcgccgatactctgaatcgtgaacctggagagggcgagggtgaaggcgacgaagccgaagccgtccaaaaacagactgccgaaaccctcattgcgggcgagaagataatggaagctatcgaacttgccgatgctgaccgtgcagccactcgtcaatggcaggtagataatgccaagtccaacatcgaaattcctcgtccacctagaaatgccgagttgatcgctcgaggagatttggagccggatgaatatgtgttgaaggttgttcagaagttacctgcggcgcagatggaggatgctttgctcgtcttgcctttcaggatggtggtcagtttgatgggctatcttgacgaatgggccatgcaggtgagaactacttatttgtcatcgaaaaccgaaattatcttggtgtctcggatcctgttcttccttcttcgaacacactcttcccagattgtatccaaccgcattatgcgaacgccccttcttacactccgacatcacttgcgtgatgcgttggcgcaacaacgcgacgtgatgggttacaatttggcagcactcaaattcctcaaggggagatgggagggcgaaagagtggctggtttgtatgagcaggaaggtcttgatgaagaggccgttaggaaaaggttggaagaaggcagagggaagaggaagagaattgaggtcagggcataa

SEQ ID NO: 2323 - DNA, 2763 bp, Cryptococcus neoformans
atgcagccttggtcgatgtcgatgtgctcttatcgggcgaagctttccttttatctgttggcgaggaccatcgaaacggtcgaaggtggtggtatcgttgtgttattgttaaagacaatgtcaagtttgaagcaattgtacgctatggccatggacgttcactcccgataccgaacagacgcccaccagtttgttcaaccccgtttcaatgaacgattcatcctttctctcggctcaaatccagattgtctcgttctcgacgatgaactcaacgttttacctctttccaagggcaaggatattcaaataggcaaggccggcgaagaagacgatcgagggaggaagagaaaggcagaggagctcaaagagatgaaggaaaacttggaaggtgtagacattgttggttctcttgccaagttggcaaagactgtcgaccaggccaaggctatcctgacttttgtcgaggccatctccgagaaaaacctttcatctactgtcgccttgactgctggtcgaggtcgaggtaaatctgccgctctcggtctcgccatcggtgcagctcttgctcatgactactctaacatctttgttacttctcctgaccccgaaaacctcaaaactttgtttgaatttgtcttcaaagcccttgatgccttgggttacgaggagcacattgattatgatgtcgtgcaaagcacaaaccccgacttcaaaaaggctattgtgagggtcaacatcttccgaggtcaccgacaaaccatccaatacatctcccccgaagattctcacgttctcggccaagctgagcttgtcatcattgatgaagctgccgccatccctcttccccttgttcgtaaactcatcggcccctatctcgtgtttatggcctccaccatcaacggttacgagggtactggccgttcattgtccatcaagctcattcagcaactccgtgaacagacacgaccatcgattaccaaggatagcgagaatgcggctgccagctctgctggttcatcttccaaggctgcggctgctggtagatcgggcgctggtctcgtgcgatctcttcgtgagatcaagcttgatgagcctatccgttactcccccggagacaatgttgaaaagtggttgaacaacctcctctgcctcgatgccaccatcgtctccaaatctatccaaggttgccctcacccttccaaatgcgagctttactatgtcaaccgcgacactctcttctcttatcaccccgcttcagaagtgttcttgcaaaggatgatggcgctctacgtcgcttcccactacaagaactctcctaacgacttgcagatgctttccgatgctcccgctcatcatcttttcgttctccttccccctatcgacgagaatgataataccctccctgaccctcttgtcgtccttcaagtcgcgcttgaaggtaatattagccgagaagctatcttgaaagagatggctcagtcgggtatgcgatcatccggagatatgatcccctggatcatctccactcagttccaggacaatgactttgccacgctttcaggagcgagggtggtgaggattgccacgcatcctgattatgccaggatgggctatggatcaagggcgatggaagcgttggagagtttctataacgggacttcgtacaactttgacgatgtccctgttgatatgggcgagtcttttgctgacgctgccaaggtcggacctgtaagtgacaatgccaacctccaaaatgacaccatcgccatccgtgacccttcacgtatgcctcctcttctccaacgtttgtcggagcgtaaacccgagaccttggactacctcggtgtctccttcggccttacccgtgacttgctcaggttctggaagaagggcggtttcacccctttgtacgcgagccaaaaggagaatgcgttgactggcgagtacacatttgtgatgctcaaggttttggcgagtgctggtggtggtggagagtggttgggtgcttttgctcaagactttagacaacgattcatgaaccttctctcatatgaggcattcaaaaagtttgacgcttctatcgctctctctatcctcgaatctaccgtccctcgcaactctccctcccccgcacccaaacttctcaccaacaccgagctctcttcgctcctcactccgtttgacatcaaacgtcttgaatcgtacgccgacagcatgctcgactatcacgtcgtcctcgaccttgttcctaccatcgcttccttattcttcggcaagaggcttgaaaccagcttaccgcctgcccagcaggccatcttgctcgctctggggttgcaaaggaagaatgtcgaggcactcgagaacgaactgggtatcacttccactcaaacccttgcactgttcggaaaggttttgaggaagatgacgaaatctctggaagacatccgaaaggcctccatcgcgtctgaacttcctgctgagccgaccctcgccggccgatcagccaacgggtctaacaagtttgtcgcgctgcagcaaaccatcgaacaagatctcgccgattctgcggtacagctgaacggtgaagatgacgatgcgtcaaagaaggagcagagagagctgttgaatactctcaacatggaggaatttgcgattgatcaggggggtgattggacggaggctgagaagcaagttgagagacttgcatctggtaagggccacgagactgtccagcacagtcagcgtaaaagtggacaagcttga

SEQ ID NO: 2324 - DNA, 3036 bp, Cryptococcus neoformans
atgtccgaggtgtccccacagtcccaatatggtggagaaccggacaagccaacaacaaaatcgagctcctggctacgaaatctttcgcggtccaaccttgctgctctcatcttgttttacgtcgcctcccttcacgtcattgggttgtacgtcttcacgcaagggtttctcctttcccgcttggctatcccccatgtctctcccgcctataacgtatctaacccctcccccatatccgctacccactctaaagcggtcatcattgtcattgacgctcttcgtaccgactttatctccccgtaccaccctcaaccgccttcaccccatcatcatggtgtcctctccctgcctgccgagctcacacagagtcgaccggaacactccctcattttcaactccttttctgacccccctacctctactatgcagcgcatcaaaggtattaccaccgggtcgttacctacattcatcgatatcggctcaaactttgcgtcagctgccattgaagaggattcgctcgtctctcagctcgtagcggcgaacaagagggttgggtttatgggtgatgacacttggatgaacctctttccttcttctttccatccgaacatgtcccatccgtacgattccttcaatgttgaggatttacacactgttgataacagcgtcatcacccatcttttcccttacctccatccttccaaccaatctcagtgggacgtccttatcggtcatttcctgggcgtagatcatgttggtcatcgtgtggggcctcatagggatactatgaccgagaaacttactcagatgaacgaagtgctggaaaaggttgtggatctgattgatgaagagactcttcttgtcgttctcggtgaccacgggatggacgataagggtaaccacggcggtgactcggagatggagacctcatctgctctttggctctattccaaaggccctatgctaaccaatcccgcgaccacttctgccatttttaaatctttgcctacttacattttcccgaaatccaccatgcctctcaggcagattaaccaaatcgatattgttcctactctcgcacttttgctcggcgtccctatcccttataacaaccttgggtcagtcatccccgagtgtttcacaaataatctggaaactttggaggtggcgcaaagggtgactgcagacggtatatggagatacgtcgaagcgtacggagacaaggaagtcaaggaaaacttgaacagcgcttggcgtcacgcccaatcccaatatcaaaaggacaacctgtccgcctccatcatcgctcatcgtgctttctccctcgacgctctcgtccacctccgatcactctgggctcaattctccatgcctctcatcgtcattggttctctcatcctcggcctttgcgcgcttaccctcatcgcactttacgtcggtgtgcgtaacaatggtgtgaattgggacgtttatgcgcgattggctttggaaacggctacgatgggatccactgtcctcgcgagtattgcaggaaccgtagccggggtgtacaccgcccggcctatcgtggctatcaaagttttcatcgttgccgcagccttgatctccgaggtaatcctcatccttcccctattcgtcaaatcctctctctctctcgctctccctctcccgacttcattctccatcaacagacatatcggccccttcattcttattgtccatgcgttgtcattcgcttccaattcattcatcatgtgggaagaccgggtggttctctatctcatatctactatccctatcatctatatcatccgagcactttccgctcctacagccgatatgcgtctcaaaatcatcttcctctctctcgctttcaccatcctctctcgtctggctggaacgatcaccatatgcagggaagaacaacagccatactgcagcgtcactttcttctcaggcgtgaccgctaccgcccctacatgggcactcatcgctatagtcccgcttgccctccaaatccctcgtgccatcggtatcaccctctcccgctccaaatccctcgctgggcctgcaccttttatactcggtatcctttggcgtgccgtgctcgtcgccaactctgtctactgggtcctcgagtttttcgaatcgttcgacgggctcaatcctgcccgaataccgctggtcaatttcctcaaactctggctcgctcgatgttctgcaggcgcgagtttaggtgctatcccatatgtatggctcacttcccccctgtgtatctctgtagaacgcacgacggatcaagcgacgggtgaagaagaagtgacagtgtttgggttcgccaatgcctttgggtcgacgtacatcctgtatacactcgctccttttgcgctcatacatctagtgtcgcagccaatggcccagttcacactgaccgcctttcttattgggcttcttgtatacctcgaattgaacaacaacaacgcttcttcaccagcgggacttgcctcatttgacccggctgatacagcgcaaaccatcgtacgcccctcattcacagatgtagtccccatcgctctatctgggttcctcacattctttgcgacaggacatcaagccgtcatctcatcaattcaatggaaatctgcttttgtaggcttctccactgccagctacctgttctcccctgtactcgtcgtcctcaacacatggggaggcttcttcttgtcagcgatcgctgtgcctcttttggcgatttggaatatcgcccccagaccacgagagagtatcccaaccctcgcgcatgctttgcaagtgacgttggcgttcttggtgtaccacaccgtggtcgcgttcgccagtgcaatcacagctgcctggttgagaaggcatttgatggtgtggaaggtgtttgcaccaagatttatgatggcaggcgtcacgttgttggttgtggatgtagggttggcgctgggattgtttggagtgagagtgaccgggtggaaggtcaaaaagacgtttggatgcgagagtatataa

SEQ ID NO: 2325 - DNA, 2895 bp, Cryptococcus neoformans
  misc_feature (1150)..(1152): n=g, a, t or c
atggccacaaacgcaccgtgctataccatagtacacgacgaccttctagactcaccctctaccaatgacctcaggaatgctctccagaagggctcagacgaggtcaagctcgagaccatgaggaccatcattgtcggcacccttaacggccagagctatgcgtcccttctaatgcccatcattcaatacgtaatgccctctcgaagcaagcagctcaagaagatgctccatttctactgggaggtctgtcccaagctggatgagaatggcaaactcaagcaggagatgatattggtagtcaatgctattcgtaacgatctgcaacatcccaacgagtacatccgcggtgctacccttagataccttcagaaagtccgcgaatcagagctcttggaaccgctcgtccccaccgtcagacagtgcttggagcacagacactcgttcgttaggaagaatgccgtgtttgcagtctacactatctaccaagatcacgagcacttgattcccgacgcgccggagctgttagataccttccttgctgccgaatccgactctacatgcaagcgcaacgcgtttgtcactctctgtaacatctcccagcccacagccgtccaatatctcctcaacaactttgatcagattgagtccatggacgagttgatgcagatggctgtgattgagcttgtaaggaaggaggctaggtctgaaggtggtcatcgcgccaagtggatccgatgcatctttgaactcctcaattccaaatctcacgctgtcaagtacgaagcggctacaagccttaccaccctcactcaaaatcccgcagctgtcaaggccgccgctgctgctcttgccgaactcattgtcaaggaggccgacaacaatgtcaagctcattgttcttgacagattcaacaacctcagggcgaagcacgagaatgttctggatgggatggttatggatatcttaaaggtcctgagcagccccgacatggaagtgaagcgaaaggctatcggggttgctctcgaaatggtttccagccggaatgtggaggaagtcgtcttgttcttgaagaagcagcttcaaggcactctcgatcaggattttgataaggcaagttgtcatgatcttaccatttctttatctaacaccnnncagaacctcgaataccgacaacttcttattcaaagcatccactcttgcgccattcgtttctctgaagtcgccgccaacgtcgtttacgtcctcatggacttccttggcgactccaacaacccttcagccgtcgacgttatcgcctttgtccgagaagtcgtcgaaaaattccccaaactccgaacagctattaccgaaaagctcatctccacattcggggagatcaagtctggcaaggtcttcagaggtgccatgtggattgtcggagaatactgtgagcagccagaggatattaaacaagcgatcgccgcgattcaaaaagtgttgggtgagatccccatccttgcatcagaacagcgattattggacgaggccgaagcagccgatgagactcccgccgagcaacaggagcaacccaaggcaatcaccacaacccgcgtgctcgccgacggtacctacgcgaccgaaactgtttacacctcttccgcatccgccgctcgcctcgaagccgtccgatccgcttcaaaacctccacttcgatcactcatccttggcggcgactttttcactggtagcgttctcgcttctacattgaccaagctcgtcttgcgatattccgaagttacgtcttctgatcagcagagcatcaacatccttcgtgctcaggccatcttgattatgacctccgtcatccgtgtcggtcagagcaagtttgctgctgtccctatcgacgaggatgccgaggagcgaattatgaactgtatcgagactcttgccgaacttcaaggcagtaaagccctccaccaggtgttcttgaaggataccaaggcggcatacgccaaaatggtcgcaactgaggagaagaaggctctggagaagaaggagcgggaaagcaaggtgtcggtggttcaggcggatgatttaatttctttcaggcaattgtccaagaaatccgtcgttggggacgtcgacgaggtgagtgcggctaccggctctatccatcctcaagacgactttgtctccaaactctcccgaatcacacaactcaccgggttttccgaccccgtctacgctgaaaccgtcgttacactctcacaatacgacatcatcctcgacgtgttgcttgtcaacactacaaatgagacattgcagaacttaatggtggatttcgcgacattgggagatttgaagctcgtcgagaggccagcaccatttacccttgccccgcacgggttccacagtttgtccgcgaccgttaaggtttcttcaaccgagactggtgtcatctttggcgctatcacttactccaaacaaggagcttccgatgccgatgtgactatcgtcatgtccgacattcacgttgacatcatgagctttatcaaacctaactatgtcaacgaggcgcaattcagatccatgtggacggagttcgaatgggagaacaaggtggccgttcaaacatctattagcgatctccgagcctatctcgatcaccttctcaaatcgacccacatggcccttctcactcccgaagcagctctttctggcgactgcgacttcctcagcgccaatcttgctgccaaatccctctttggcgaagatgcgcttgccaacgcttcaattgaaaggacagaagatggtcacatcactggtcacgttaggataagaagtaagacacagggtattgcgttgagcctgggtgacaagatcacgttgagtcaaaaggctttggcgacagcgtaa

SEQ ID NO: 2326 - DNA, 2955 bp, Cryptococcus neoformans
atggctggagatcgggaaaggcccttgccccctccaccacctggagctgagcaagacagcgccaagaagcctgaaacgaaaaattattctcaattagatttgttacgatatgacgcaccattgaccggagctaaaattactcgaatgttaaatcaacttcagttcaaattgcaagttgaagaacaatacaagacgggtatcgagaagatggcacaagcataccgggctgagggtgataagagattgaagagcgagacggacgctaaaaagtctgaaagcgaggggaagatacaactgttgagaaaggcgaagaagaggtatgaatcgctggccaaattcggtggagctgtggaagacgacgaagacttaatgtctgatggaaaacgcaaggaggctcttcgtaaacccatctccggcaaattggtaatctctcttcgctctgctcgtgatcttaaccatcgcgcccttccccgtcgttcttcgaaaacctactcggaaaccacagtcgtcatcaaggtcgaaggtaacgaacgtgctgtctctcatccttcacgaaacgacaagtggcacgaggacttccatattccggtggaaaaagccaatgaggtagaaattactatttatgatacggttgcccccggtgattcagcccccattgggatgctctggttgcgagtgagcgatcttgtagaggcattgcgaagacaaaaagtcgggattgaaggtcagggtgctggctgggtgactgctgcgactgctgcgacgatgggcccgaggagcagcggcaatgcgccagactcggttacgttgcacagtgctggaactttgagaggcaagccggacgcagaaggcaaagggcctgacgggatcgacggttggtggtctgttgaacccgccggtgcgatatcattgagaatggattttgtaaaggatacggtggctggtgcgcgtcgtccttacgaagctcttggtcgacaaggtgctgttcgtatgcgaaagggcgatgtctacgagatgaacggtcacaaattcgtacaacgccagttctaccagcccatcatgtgtgccctgtgccaggagttcttgctcactggtgaaggatatcaatgcgaggattgtaggtatgcctgccacaagaagtgttatccgaaggttgtgacgaagtgtatcagcaagtcgaacgcagatggcggagacgaggaaaaaatcaaccatagaatccctcacagattcactccgtacaccaatatgtctgccaactggtgctgtcactgtggatacatgcttcccttcggtcgtaagaatgctgtcaagtgttctgagtgtgcccttacttgtcaccaaacgtgttcacatcttgttccagatttctgtggtatgactatggagatggccaatttactgctcaagaatcttcgtgacatcaagaccactcagcaccgcaagcctgttccttcaacatccacctcatccagtgtgtctactcttccctcttatcattctcaagagtctcgttctcatccagtgcaatctgctgcgctacaacaaccggccccgtcatctcgtccacctgctggtgctttgccctcaacagaccaaaggccaattcagccacaagttcaaaaccagcaaactggtgcttatgataatctccgtcctgctggtggcagagcaatgccccagttgccacctgtcgcagtgccaagcaacaaaattagctttgaaggcgacagactgcaagagcctcatggtcaaattcctccggttatgcctgcggctcagccccaaccacaaactctcccacctagtgctcaatctgttcaatcccctgtcaaacctcaatatgttcctcaacccgctgtccagcaacaagtggcccagagattgcctcctcagcagccgctcatggctagaaagaggaaggttggactggatgatttcaactttttagcagtgttgggcaagggcaattttggaaaggtcatgcttgctgaggaaaagacttcgagcaatttgtacgccatcaaggtcttgaagaaagaatttattattgagaacgacgaggttgagagtactcaatctgagaaacgagtgtttttggctgctgcgcaggaacgtcatcccttccttctcggtctccactcttgtttccaaacggagactcgtgtttatttcgtcatggagtacatctctggcggtgatctcatgcttcatatccagaaaaaacagttcactctccgtcaagccaagttttacgcgtgtgaagttctgcttgcattgcagtacttccattcgaaaggcattatctaccgagatttgaagctggataatattttgttgacattggatggtcatgtgaaggtggcagactatgggttatgtaaagaggagatgtggtttggtaagacgacgagcaccttctgtggtacccctgaatttatggcacccgagattcttcttgaacaacgttatggccgtgcggtggattggtgggctttcggtgtgttgacatatgagatgttgctgggacagtctcctttccgaggcgaagatgaagatgagatctttgacgctattttggaggatgagcctttataccccattactatgcctcgggatgctgtgtctcttcttcagcggcttcttacccgtgatcctacgcggcgacttggtgctggcgaaggggacgctgaagaaatcaagcaacacttattcttccgcgacgtcaactttgacgatgtctatcataaaagaatcccaccaccatacttcccggtgatcggtaatgctactgacactagcaattttgaccaggagtttacaagggagcagcccacattgactccggtccatacgcaattgagcgaggcggatcaaaaggagtttgctggcttctcttgggtgggtgtcttctctctcactattgataggatttacactgacccaacaacgtag

SEQ ID NO: 2327 - DNA, 3045 bp, Cryptococcus neoformans
  misc_feature (2185)..(2187): n=g, a, t or c
atgctatcgtcaagaaaatttttagctgactcagattaccaggctctcaatgacaagaagtctcaatctgcgcgtgaaggtgcctgcgaggttatctctactctctgcgagaacggtgctgctcagcttctcgagcctcacgttatctcctctgccgagaacactcctttccccgctcttctcgaggctttcgctgacaaggtcgccgctgtcaagactgccgccatcgctgccgtcaaggccatcgtgcagagcatgaacccatgggcttctttcgttctccttcccgctcttcttaacttgatcaggacttctggcaagtggcagatcaaggctggttctcttgagattctccagcagttgatcacttctgccccttaccagatgggcgaggcgatgcctgaccttgttcctgttctcgccggagccgtttgggacaccaagtctgatgttaagaaggctgcgaaggctaccctcgagaaggctgtgtctcttgtcgagaacaaggatattgagaagttcgttcctgctttggttaaatctctcctcaaccccatcgaggaggttccgaagactatttctctcctttcagcaaccaccttcgtttctgaagttaccgcccctaccatctccctcattgctcctctccttatccgaggtcttgatgagcgacctaccgccaccaagcgaaaggtttgtgttatcgccgacaacatgtccaagcttgtcgactccgaatacaccgttcgacctttccttcctcagcttttgcctcgtcttatcaagactgctgagaccatcgccgaccctgaggctcgatcagtcgccaaccgtgctattgttacccttcgtcgaattggtaaggtcccagttgagtctgatggctcagaccttcctcctcttcctgtcgctgagggacctcacctcgccaccaacttcgtcgctcttgtcaagaagcacggtggtgtttccgttgaacagaccaaccctggtcttgcctacgccggtgtcctcgccgcttctcttgtgaaccaccacaacttcgaccagaagacttgggagtctactctccctccttatctcaagctcgctctcccttcctacgactctcttcctgctgttcgagagctccttcagaagaaggctgatgaggctgagactgacgacgccaagttccctgatgaagaagagggcgaggacctctgtaacattgagcagttcaacttggcttacggtgcaaagatcttgctccaccacgccaacatgcgtcttaagcgaggccaccgatatggtctctgtggtcgtaacggttccgggaaatctaccctcatgaacgccatcatcaacaatcaagttgagggcttccctccccccaccgaagttcgaactttctacgttcagcacgacatcgacggttccgaggctgagatctccattcttgactgggttttgagtgacaagcgattgctcgccacccctgaggaaattaagtccactctcgaatctgtcggtttcgacgaagtcaagcagaagaactccattggttctctttctggcggttggaagatgaagcttgctcttgcccgagccattcttttcaaggccgacattctcttgctcgacgagcctaccaaccatttggatgttcttaacgttgactggctgatcaactatctcacttcccttactcgatgtacctccatcattgtctctcacgactctgacttccttaaccgaactgttaccgacgttcttcatcttaacaacttcaagttgaagaggtaccctggtaaccttgaggaattcgtcaagcacgtccctgaggctaagtcctactaccaactcgatgtcgctgaggattatcagttcaagcttcccaaccctcctctccttgatggtgtgaagaccaaggagaagtctttgctcaaaatgcgaaacgtttcattccagtaccctggttcttctatccagcaactctacgacatctctctccaggtgtctctctcatctcgagttgccgttcttggtcccaacggttccggtaaatctacccttgttaagctcctcactggtgagaccgagcccaaccttggcggtcaggtctggaaacaccctaacttagtcatcggttacgtcgcccaacacgctttccaccacattgacaaccaccttgactctactcccnnngagtacatgctctggcgataccagaccggtgaggacttggaggaaatgcacaaggctaaccgggtcatgaccgaggccgagcttgccaagatgaaggagggtgccaccgttatcaaggacggtgtcaagcgaatcatcgatgagcttgttgctagaaagaagctcaagcagtcctacgagtacgaggtatccttcaagggtatgtcctctgccgaaaacatctggatttctcgagacgaacttgttgcccgtggtttcgagaagaaggttatggagctcgacaccagggaggctcagcgattgggtctcatgaggcccttggtcaggagggaaatcgaaaagcacttcgaggacttcggactcgatgccgaattcgtctcccacaactccatgcgaggtctttccggtggtcagaaggtgaaggttgtcctcggtgccgctacctggcgaagaccccacatcatctgtctcgacgagcctaccaactatctcgaccgagagtcccttgccgcccttatcgcggcccttaagaacttcgagggtggtgttcttattattactcacaaccgagagttctctgagtccatctgtaccgaagtctgggccatgcgtgagggtcatctcgaggcttctggacacaactgggttgagggtcaaggctccggtgagaggattgacaagaaggccggcgatgacgacgaggtcgagtacgacgctttgggtaaccccatcgtcaaggcgaagaaggagaagaagctttctgccgccgacaagcgaaaagccaagaaggaccgaatggctagaaggaagcgaggagaggaagtcttcagtgatgaagagcttagcttccttttatag

SEQ ID NO: 2328 - DNA, 2994 bp, Cryptococcus neoformans
  misc_feature (2038)..(2040): n=g, a, t or c
  misc_feature (2407)..(2409): n=g, a, t or c
atggcgagacaatcaaagccattcacggcatctactgtttcacaagaaaagcccaagaagcaggtgatcaagaagaaaaggcttgaccccgccaacgcatacacctacctcccgtctctccccaaacgccaccgtacatccgccttccagaactcgctcagttacgaagaactccaacaggccaaggagtcgtccaagggacgccattatgatggtgaagacgatgaagaatctatgcaggcgagggtgcgaaaagttgcgatgatgattgcttctgaagggcctcaagaagtggatagcgaagaaagtgaagtggactctgacgaagcatgggagagtgatggaagtgacgaagagagatggggagatgtatttaaagagctagaaaagggaaaagggaagaagaaggcaaaagacgtagtcagaaaattgttacagcctgcgaaaccattgactgtcaatcttgatgaaagcgacggtgaagcccccaaagaaattgccaataattcaaccgttcctatctctcctgagtctgcagaagaagacgaggataatgatgatgacgaggatgaggatgaggatgatgacgaggatgaggatgaggatgaggatgaggatgaagacgaagacgaagacggattgtcggaactttcagcggaagaggaagaccccgacacgcttgccgaccttgacgcttttgtcgaccaactcgccgcgtccgacaagaaacgcaaagctacagagaccgacgccgattcttcagctgagcagaagaagagacgggtcttgcctgtcaagtttaggcaagagatcaaggatgacgcagctttgaagagcatcctcaagggcggtgttcttgctgctcctcttcctaccgtccaacaagaacgacttgaccgcgaggccgcttacgcccaaaccaaaactgaaggccaaaaatggtctaccttgatgaaacgagtcaaagaggccgaacacttgtccttccctctccaagcaaaggaccgcggtggcgtcaaatcttccagcgagattcttgccggtttcaagcctcaaaatgaaatggaatctgccgtcgaagcactcttaaaaaaggccaacctgacagaggacgagctcacgaagcatgaagatctccagatggaagctcgtgaaatgacggaagaagaaattaaagctcgtcgagctgaacttcgataccagcgtgaacttcttttccgcgctgaagccaaagctaagcgcgtggccaagatcaagtccaagacatttaggaaacttgcgaggaaacgagcagcaaaggagaaccccgggatggcgttggaggacctcgagaggcttgatcccgaggcggcgcagattgagagagagaagattgagcgtgagcgagcaaaggagcgagcaaccttgagacatggcgcgaagagcaggtgggcaaggggggtcggtggtgaagctgatgatgacgagaggatggcaaaggaagcaatgttggatatgaaggagaagctgttgaggaagattcagggtaaggatgagggttcatcctccgaagaagagagcgaagacgaggaagaagatgaagaaaccgtcaaggccaaggcgtttgaccagctcgctcagctcaactctgattccggtgcggcctcacaagctcaaggcaaaaagggtctcatgcaaatgaagtttatgcaaaaggcgcaagaaaggaggatgaaagaagtcgcagagcaagagaaggatgctcgtatgcaaatcgagctctttggtgaggatggcgaaagagaggaagagagtagtaacgagagtgatgaggagccagccgttgttaatgttggtgggaatgaaggaagactcaagtttagcggtcctactcctggcgtaagttatctcgcacaagcccatgtagttcaaaggactgatacccctcttcacagaccggcgcttccgaatcaccagctcttcctgctccttcagtccaagaccccgtccccgcatccaaatccaaatccatctttacccgtgccccttctccccctcnnngactccaatccgtggctcaccgctaccaactcctccggcccctctcgaaaacgtcacgcccaacttggatcccagcttaacgacgagaccaaggctgttaaagctatcaagaaggcaagcaagagaagagaggatgaagaggaggatgagagggttgatattgatggtaagacctctattgctgcgattgcggcggtccaagcggacgaacaggaagaagatgaggaaattgcagacttgcttcctgccagcggcgttaaagcattcaaacaacgtgatcttgttgctgaagcgtttgcgggtgataatgtcgtggaggactttgcgactgaaaaggccagacagattgaggcggatgcctccaaannngaagatacctcactccctggatggggatcatggggcggtaagggtgcaaagaagcgcaaagccaatccgaaattcctcgtcaagacggccggtatcgagcctattgcccgaaaggactttgcccattccaatgttatcatcaccgagaagaaggacaggaaggcgtcccaattccagctcaaggacttgccttatccttacacgagcaaggagcagtatgagaagagctttgaagtgccagtgggtagtgaatggaatagtaggagcgggttccagagaggcactctgcccagggttgtcaaaaaggcaagttcggctcatgacattggattcactcgaaaagctgacaattcttatagcctggagccattatcgaacctgtcaggagactgttctaggcttcgtatattatgtaatgtattgtgcgcacttttgatgtttagtatgcattcgtcgagcttgttatgccaggtgttcgcagtctgtttcttatacaccctttcccgtcagccttttttcggcctggacaactttacacctctcgccccttgtagttttattaccgacaccattaatctaatctaa

SEQ ID NO: 2329 - DNA, 3027 bp, Cryptococcus neoformans
atgtttatcgctctgtcaatgtttgcgtctctttgtgctgactatatactagggagtcctccctcgagaacaaggtgcagggtgaggaggtccccgctgctgctgctggtgagttttgtcgcagttacgattattgtttgccgacgactgactgcggcatctgaagccgacgaggagcccaggaagaagcgagagtacaaggaaatggagcacaagactgagggtgacctccacgccaaggttgacatgaacaccatccagttcactgctgccgacttgtacgacaaggacaaggtcgatattgagcacgtcgttatggaggaggtctaccagctccttcaatgtaccgacgccggtcttaccgaggctgaggccaccgaccgtatcggtatttttggccctaacaagcttgaagaaaagtccgaaaacgtcctcctccaattcctttctttcatgtggaaccctctctcctgggttatggagggtgccgcccttgtcgccatcgccctttctaacggtggtggtactccccccgactggcaagatttcgtcggtatcatccttcttctttttgttaactctactattggtttcgttgaggagcgtaacgctggtaacgctgtcaaggctctcatggactctcttgcccctaaggctagggtcaagcgagacggccaatggaaggagattgagtcttccgagcttgttcccggagaccttattgctttcaagcacggtgatgtctgcccttctgactgtcgattggttgaggccattgatgtttccatggaccaggctgctcttactggcgagtctcttcccgtcggcaagcatgagggtgacgagtgtttctctggttctacctgtaagcaaggtgaggccgagggtatcgtcatcgccaccggtcccaacactttcttcggtcgtgccgctactctcgtcggtcaggacaacgaccaggtcggtcacttgcagcaggtccttgcccgtatcggtactttctgtctcgtctccatcggtatctttgtcctcctcgagatcttgattctctacgccgacttccgatacccttaccgacgtggtcttgacaacatccttgtcttgctcattggtggtatccccattgccatgcctactgtcttgtccgtcacccttgccgtcggtgcccagcagctcgccaagcacaaggctatcgttacccgtatcactgccatcgaagagcttgctggtgtcaccatcctttgttccgacaagaccggtactctcaccaccaacaagcttaccattgacaaggagaatgtcaagtgctactccaagtgggacgttgagggtgtatgtctcctcgctgcctatgcttcccgtaccgagaaccaggacgccattgacggttgtgtcgttggtaccctccctgaccctcaacaagctcgtgctggtatcaaactcctcgacttcaaacccttcaaccctgttgacaagcgtaccgagatcacttaccgagacgaaatggacggtggcaagcttaagcgtgctaccaagggtatgactggtatcatcattgaaatctgtacccgtaacaagaccaacgagcttgaagaccaacttgaggccgatgttgaggagtttgcccgacgtggtctccgtgctctcgctgtcgctttcgaggatgttgctggtgatgacccctccgctgagggcaacggtttcgagcttgtcggtctcctttctatcttcgaccctccccgatcggacaccaagaagacgattgacgacgctatggctctcggtgtcaaggtcaagatggttactggtgaccagcttgctattgctaaggaaaccggtcgacgacttggtcttggtgaccacatgtaccctgctaaggttttgaaggaaggtcccgaggctggtagcaagcacgccaaccttgacgagatgatcatggacgccgacggtttcgctggtgtcttccctgagcacaagttcgagattgtcaagcgtatccagaaccttggtcacctttgtgccatgactggtgacggtgccaacgatgcccctgctctttctcgtgccaacgtcggtatcgctgtcgagggtgccaccgacgctgcccgaggtgctgccgacattgtccttactgagcccggtctctctactatcgtccacgccatctacggttctcgagttatcttccagcgtatgaggaactacgccatctacgcttgtgctgttaccatccgtatcgttctctgtttcgccatcatggcctttgcctggagatttgacttccctcccttcatggtcctgatcattgctgttctcaacgacggtaccatcatgaccctctctcttgaccgagtccttccttctactacccctgactcctgggatcttgccgaagttttctctttcggtgtcgcttacggtgtctacctctccgcctctaccattgctctctacgctaccatggagaacactacattcttcgaggacaggttcggcgttgaacctttgaagggtaactcttacggtggtcacatggttatctacctccaggttgccatcatctctcaggctcttatcttcgttacccgatctcacggcccttcatggactgagcgaccttccgttgctctcatgttggctttctgtctcgcccagctcgtctcctccatcatcgctgcctacgccgactggagtttcagtcaggtccactctgtctctggtggctggattggtatcgtctggatctggaacattgtctggtacttccctctcgatggtattaagttcatcatggaagaccgttatcgctgctctccagaggaggaaggcccgaaaggccggccctgccgtcgccgatgccgccctccaccgagctccttctcgacacgagtctctctactccaaccgaaccaacttccttacccgagctgccaaccgactcaggggtggtgccaagatctctatgtctcagaacgagcttcaacggtgagttttcgtgtctggattgtccatttgtctggttactga

SEQ ID NO: 2330 - DNA, 2916 bp, Cryptococcus neoformans
atgcaggcaactccagaaacgctctccctcctcacgaactacctctcctccactgtctctccagacgctcatacccgtcgctctgccgaagagtctcttcgtcaggctgagggtcaacagggcttcctgttgctcgtactcgagctcgtcaaagccgactcggttaatatgatcgtgaggcaagctggcggtgtatacttcaagaacactgtcaagagactttggtctggggatgaggagacacaaatcgatccggccgacaaggcagccattaaatcacaacttgtccctatgatgattgcgttgggtactcctcagacatcgcgactgcagagccagatcggagagggcctaagccacatcgcttccctggattttccccgtgaatgggaaggtctctgcgacgaacttgtgaactcactcacgccagataactttgtcatcaacaacggcgtcctggccacggctcattctatctttaagcgctggagatctcaattccgcacaaatgagctttacagcgagattaactttgtgttgtctcgtttttgcgaaccatattaccgtcttttccagcatgtcgatcaattgcttcaaacgcctcctgcatcccttcctaccaactcttccattcttcttttgggccaaagccttcttctccttatccaactattccacgacttatctagtcaagatctgcctccattttttgaagaccacatgactgaattcatgggaggcgatcagcctgggtggttgaggaagtatctggactgggaagtagaggagctcaagggcgacgatgatgacgaggctcctggacctttgcaaaaaattcgctcatctatctgcgaaatagctgaattgtatgcccagaagtactcggatgtttttacccagttgggaagctttgtggatggcgtctggaatatgttgacccgtgtcggcaccagcaccagggaagatgtgcttgtctctcgtgcactgaggttcttgtccgttgtggtaaagatgggcaatcaccgtgccatgtttgctgcttccgagacgttgaacgctttctgcgaaaagatcattcttcctaacatggctattagagagcacgaagaagaaatgttcgaagatgacccaatggagtacattcgacgtgaccttgagccctccaccgaaagcgacacccgacgacaggctgctactgacttcacccgtgctctcatggagttatttgaaaaagaagtcacgggtatcatcaaaggttacatttctgtgttcctccaagagtacaacaaaaatcctgtaggaaactggaagtccaaagacactgccatttacctgttgacctctattgcctcccgagggtctacccaacagcttggtgtcacctccacaaacgtccttgtcgatgttgttgacttcttcggtcagaatgtcttttcagatttgcaggcagctcccggatcagttcatcctatcctcactgttgacgctatcaaatttttgtatactttccgcaaccagcttaccaaggatcaactcgtctcggttctccccctccttgtccaacaccttgcctctgataattacgtcatctcttcctatgctgctattaccattgagcgcatcctgttcatcaagaatctgacaaaaatggtgattaggttcactcaggccgatatcaggccatttgcggagaacatcctcatggctctcttcgccaacattgagaaggggggaacacccgagaagatcgctgaaaatgactatctcatgaaatgtgtcatgcgagttatcatcacagcccgaacatccctcacgccttcacatgaaggcatcctcactcggctcgttaacatcatgggcgaaatcagcaagaacccaagtaaccccaaattcaatcagtactgctttgaaagtgtatctgcattgatcaggtttgtgtgcgaaggaactcctgcagctttgccgacatttgaaaacgcgttatttggtcccgcccaacacatcttgaccaacgatgtcgccgagtttattccctatatattccaaattctcgcccaacttctggaattgcattccccttccgagcttccgcctgcctaccaggcactcaccggtccgcttttgtctgccgctctttgggaacagcgcggtaacatccctgctcttgtcagaatatggaaggctttactccttcgcggtgcgcctagtattgtggccgcaggtcaggtacagggattactgggtatcttccagagattggcaggaagcaaggtcaatgatgtttgggcgtttgagctggttcaggcactgtatgagtttgtgcccattgaagtgatgcggccattctcccagacagtctttgtgctccttttgaaccgacttcaaggtaaaccttcgacccaatttaatcattgcttcgtttatttcttcgctttcttggccaatctggacagcgtgggcgcggatttcctagttggtgttctggaaggtattcagactgggctgtttggcaacctcctgactggcgtcatcttgtccaacacccagaagataaccgccaggaatagaaaattggttgaagttggtcttataaagactctctctcgttcagatagtcttttggtagagccgaacaggcagttctggcctcccattttccttgcccttctggacatgttcactcttccgcaagatatcacctatgccaatcccgaaggatcaggtgatattaccgagctggatcccgaggaagccggattccagtctagcttttccaagctgggcgcgagcgagaagactgtgagtgaccctactgcaggcgtggaggatagtaaggtgtttgcggcgaaagaattagccaagagatcgaacgagaaacccggaatggtatgtggcatgtcctctcatgatacttga

SEQ ID NO: 2331 - DNA, 2997 bp, Cryptococcus neoformans
atgccagtcccagcagtaacgacgtcagcagcaggatccctcaccctccttgaagatcccgacaaggatgtcagggtctacgccctcaaccaccttctctccatcgttggccagttctgggcagaaatgtcggacaagcttccttatctggaattgttggccgaccctctttccaaagaacttgccccggagaaccgaccgtttgccgcactcctcatctccaagatttacttttacatgggtttccaagatgaagctgtagagtttgcattgaaggctggggtagcatttgagaaggaatctgaaggagagtacagggaaacgatcatcgctggatgcttggatcaggcgattgacaaaacgcaaaaaggagaggatatcccagcggatctgcagagcattgttgactctgttctccgaagcagctctggggagaatgcaaagctcgtacgtctggatcttgcaatgggtttggcgctctcccttcggcggctcgaccttatcgagatgatctatcttagttctagagggccatctcaagcatcttcatcgaagtctgagcgagtcgtgcatgatgagaatttgttgcgatatgtccttgcagaggttgtctcaggtactagcgggaatgaggcttggccggaagatttccgtgccaatttgttcagcctccttcgccgattattccatctcaaccccaaccccgattggaattctataactaccgtttgggctcaaagctcagacgttgaatcaacagtagaatccctcgtcaagcttctcgaggttgacgacaacttgacggtgtaccaaattgcgtttgacctcaccgaagtggcatctcaagcgtttatcgacgaggtgcgggaaaagttgggagagaccaaatgggctgcgcctgtcgacggctctgtgagtttcttaaataacattcttcgaggcgacaccagcgccgaactgttcctcaatttcctcagtaggaacaacaagaccgacatgtcaatacttaaagtcaccaaggaaactcttgaagatcgatattccatctatcactccgccatcaccttcaccaacgcttttgcccactgcggcaccacatcggacaagttccttcgtgagaacctcgactggctcggccgagcttccaactgggccaagttctccacaactgccgctttgggtctcattcaccgtggaagctgggtcaacggtaaccgcgtcgtaaagccctaccttcccggaggtgctgctcccaacaagtacagtgaaggaggtgccctcttcgcgcttggtctcatctatgccggtcgtgtcgagtttgctgaggaagagctcaagaagggtttggccgaaggtaacgaccctctcgtccaacacggtgctgctcttggtatgggcgttagcgcattggcttctgccgacgatgaaatttacgacgagattcgaccaatcctcttccaagatgatgctgtcgcgggcgaggccgcaggttatgccatgggtcttgtgatgctcggtacagcgtcagagagagctttggaggagatgttatcttacgcgagggaaacacagcatgagaagattatccggggtttggctatgggtatcgcgttcttgatgtacggtcagagggaggcagcgaaccctgtgatccagaggttgacggaggacaaggatgccatcctccgatatggcggtatgtacaccatcgccctcgcctttgcgggtacgggtaacaacaaggctgtcaagaagcttctccatgtcgctgtctctgatgtcaatgacgatgttcgacgggctgctgtcaccgctcttggttttgtactcttcagaaaccacactacagtgcctagggttgtgcagctgttggccgagagctataacccccatgtgaggtatggtgcgacgcttgctttgggtatctcgtgtgctgctactggtcttgagtctgccattgagctccttgaacccatgaccaaagaccctgttgactatgtccgtcaaggtgcttacatctcccttgccatgattctcatccaacaatccgaagccgcatgccccaagtctatcaccattcgagaactttttgccaaggtcgtcgccgacaaacacgaagatcccatggctcgattcggtgcttctctcgcccagggtatcattgatgccggtggtcgcaacctgaccctagccctctctacacgagctggtactttgaaccagaacgctgttgtcggtatggcgctttttgttcagttctggtactggttccctctcgcccacggtttgggtcttgctttcacccctacagcagtgattgctatcgatggcaagatgaaggttccacaactggagcttgaatgccacgcccgcccgagcttgtatgcttatccggccactgagaagaaggtggaggagaagaagaaggacaagcagaaggctgccgtgctttctactactgcaagggctaaggcgagggagagggtcaagaaggccgaagcgggtgaggttatggagaccgacgacaaggctgaagagagtgggaagggcaaggatgccgcgcctacaccaaaaaaatctaaaccatctgagccatcctctttcaaaatcccgaacatgtcccgcgttaccccgtcacaattggcatacgtcaccttccctacttcgggacgatacacgcccgtccgacctcttgaccactctcctctttctggctctaatattaacggtaaaccatcaacgttagcgtcaggagcgagtgcgagtggcagtatcgtggttcttcgagacgaaaagcccgaggagcctgcagagtatattgaactgagtaaggagttggcctggatggctgccggcaaaccccgaagcggcagcagctattttggcgcaggctaccgcagaagggtctggtggggcgccgggttcgggtgttactgggcaagctcaacaacaacagcaagagcccgaggaggaggcagaggccccaccagcgtttga

SEQ ID NO: 2332 - DNA, 2970 bp, Cryptococcus neoformans
atgttcctagctctgctgcagtcagacgaatccgcgatgaaacaccattgttcttccctccgtggtagttccggaggatcgacccctcgtcgagctcgtcgaggtgacatccactcctctttcccgcactcatcgccgtctctcgctcgacgacaagcccaagtcccggctgactctctttcgctccgtgcgtcttcccctggtatgggtaccgatagctttggtactccgcgtgttttcggatcggctgcccctaccctttccgcagttgcccaatctcaacttggtgccgacggcgacgatatcgatggtatggtcaaatttatctggggtacgacaatctctttgcaagagagcatgaaccttttccgggattttttgagaggcttcaaacccaagtaccgtgctgtgtacaatgcggaacaatccagacatgctgaggagagtggcggcgttgcgcctcctccgatgactttgtacgacaatctctctgctgagcgtgccgaggtccctctctatgagacgtatctcaaccggcttcgactcactggtgaaactaatttaaacctcgacgcgctcaatctgctcgcgtaccgacccacaaaaaagctttaccagcaattggtcaactatccgcaagaagtgatccctatcatggatcaggtcttgagggatgtgatgattgaattgggtcatgaagagctggagaaagcgcagaccaaattcgctgagggtaacttatctcaagatgtggagtcacgagtgtataaagtcagaccgtttggtggagagaagacggtcaacatgagggatcttaatcccggagatactgacaagctggtgaccgtgaagggtcttgtcatccgtgcaactcccgtcattcctgatatgaccactgctttcttccgatgcttggtttgtcagcacactgttcaagcggatatcgaccgaggaagaatcagcgagccagagcgatgtccccgagacgtctgtggttcaactggcactatgtctcttattcataaccgctccgaattcaccgacaaacaagtcatccgtcttcaggagactcccgatgctgtacccgatgggcagactccacatactgtatctctttgcgtctatgatgaactcgttgacttggtcaagcctggtgaccgagtgatcatcactggtatcttccgatcaatcccagttcgtgtcaaccctcgccaaaggagtatcaaatctttgtacaagacctatctcgatgtcgtccacgtcaagcgtaccaacactgcccgaatgggctttgacccttctactcgtgcgggcgagagcaagccaccgggtgaccttgggtcgcctgtcagatcagccgctgcggagatggaacaacgcattatcgagctctccaaccaccctgatctttacaacatacttgcctcatctttggcgccctccatctacgagctcgaagatgttaagaagggcatcctcctccagcttttcggcggtaccaacaagtctatcgcccgtggtggcggtgggggcggtcctagatacagaggtgatatcaacgtgttgatggttggtgatcctggtactagtaaatctcagattctgcagtatgtgcataagattgctcctcgaggtgtctacacctccggtaagggaagttcagcggttggtttgacggcctatgtaacgagagatcccgattccaagcagctcgttttggaaagtggtgcattggttttgtctgacggcggagtttgctgtatcgatgagtttgacaagatgagtgatgccactcgaagtgtcttgcacgaagtaatggagcaacaaacggtttctattgccaaggcaggtatcatcaccactctcaatgctcgtacatccattctcgccgccgcgaacccaatcaactctcgatatgaccctaacctccctattcctgccaacatcgatctccctcctacattgatctcaagattcgacttgctgtacttggtgttggacaaggtggatgaggtgaacgacagaaagttggcaaagcatttggtgggactctatttgtcagatgtagaggatcagcctgccgacaatatcattcctcttcagaccttaacgtcctacattacatatgcccgctccaaaatccaccccgtcctcaccgaaggagcttctgaagcgcttgttcaggcctatgttgagatgcgcaaggccggtatggactctcgtactcaggaaaagaggatcactgctaccactaggcagttggaaagtatgatcagattgggcgaagcgcatgcgaggatgagattaagtgacagggttgaggaagaggacattagggaggctgttaggttgatcaagagtgccctgagggagagtgctaccgatccccttactggtcaaattgatcttgacctcatcaacaccggtgccggccaaaccatgcgtcgcgcccgagccgatcttaaacgtgaagttatcaaactcgtcgtcgaaaaggcccgatctcagggtattcgctgggcagcagtcattgatgagctcaacaaacaatccagtgttcccgtggatcatgcacagttcgcagaaattgttagggagctggaagaagagagcatagtcaaggtcatgggtgaaagggaaagaaggattatcaagagtctgggtgtaattactttggagaatgggttttctttcatttttttcgtcgtgtggtgtttgtccttgttcttctgtttggtacaatgtttgcataatataaatgaaaagcttgtactacatcttggacttcaatcgctgttattcttcaaaggccgtaacaacaaatattggatctcgtcatctgcaatatcgcgtaagacattccggtctgggctcacgaaagtccgtaaagaatcggccattcatcaccgctcgattgcctattgcagacatgtcggttgtcggagttgcaaatgcgattgtgaagagtag

SEQ ID NO: 2333 - DNA, 2871 bp, Cryptococcus neoformans
  misc_feature (708)..(708): n=g, a, t or c
atgtacaccatcgggtatggggtcgtctgtcttataggaatgcaacacgataacaatccgagttgcctgaaaacggccagccttgacttgtcacttcttccttttcttcttccttccaacccccaaagctcgactgaatactttaagaatggtaattatacggatatcgtccttaaacccacgctaactcgtccgcagggtgttccagctcttttccgatggctttctaagaagtaccccaagatcgtcgagagggtgaaagaggacactcccaagaagatcagaggtccagatggcgaaattgtcgaggagcctataagatatgaaaatcccaatcctaacgggttcgaggtggataatctttatctggatatgaacggtatcgtgcatccctgtacgcaccctgaaggccgacccgcaccagagacagaagaagaaatgatggtggaaattttcaagtatactgaaagggtagtcaacatgtgcaggccgagaaaagtcttgatgatggctatcgatggtgttgctcctcgagcgaagatgaatcaacagcgttctcgtcgtttcagagccgctcaagaagccgcagacaaggaagaagagaggagagaggctatcaaattgtttgaagccatgggccacgccgtttcagaagagactgccaaccacaagagttgggataccaacgcaatcacccctggtacaccnttcatggaccttctctcaatatcactaaagtactgggtgtcccacaagctcacaaccgaccctggatggaaagatctcaaaatcatcctctctgactcatccgtccctggtgagggtgagcacaagattatggactggattcgtcgtcagcgaagctaccccacatgggatgccaacacgtcacatgtcatctacggtttggacgctgatttgattatgctttcgcttgccacccacgaacctcatttccgtgttcttcgagaagacgtcttcgcccaaagttctaagggaccccatgcttgcaaaaactgtggcaaggtcggtcatattgccgccaattgtaagagcgataaaaagttcaaagaccccaatgttgctgaagttgccaagacggaggaccccaaacctttcatcttccttgatgtggcttgcttacgcgagtatttggcagtcgagcttgttgtaccaggcatgcccttcccgtttgacctcgaattggcgattgatgattggattttcatgatttttttcgttggtaacgatttcttgcctcatctgccgagcttggaaatccgtgaaggtgcgattgatgtgcttctcaagatctggagggcggagctaccgaggatgggtggttaccttaccaaccacggcaaagtcaatcttgaccgagctcaagttatcttggaagggttggccaagtccgaggatgaaatcttccagaagagaaaggatgatgaagagcgtcaggagcattcccagaagcgtaggaggattgaagagcataagagacaagatgaggataaggcgcgtgaagaggatcgtaacaccttgactctaaacggcacagagtacgttgctgatcaggaccaaaaggcaaagaaggcaatggctggctccaactcggatatagtcaagaatcgcaaggcgatcaggatggcaaacatgagtgcggctcaggcactcaaggctgagttggagggtggtaatgacgtgaatgtcgacgacaaaaaggcgattgcccaagaaggaaaggaagaggatgaagcggttgttactgttgagaggacggaggacgaggaaaaggagcagctgacgaaggaggaagcgaggggaactttggaagagcaaggcgagaaagaggacggaacggtcgactatgaagatgatgttaagctatgggagcccggatatagagaaagatattatgagaagaagttcggtgtaaaattgtcggagagagaattcattgacaaggttaccaagtcctatatggaaggactctgttgggttcttgaatattactaccagggcgttcctgcttgggattggttctatccttatcactatgctccctttgctcaagacttccgcgatgttgggtctatggacatcaagttcgaaaccagcatacctttcaagccgtttgcacagcttttaggtgttttcccggccgctagtcgaattcatctgcctgaacctttacagactctcatgattgacgaagactcccccatcctcgacttttaccctcccgactttgagatcgatatgaacggcaaaaaaatggcttggcaaggtgtcgctctcttgccctttatcgatcagaaccgccttttgaccgctttgaagagtaaggaagagctcctgtctgatgacgagaagagaaggaacagttggggagacaatgttatgtttatcgccaacgagaacccgttgtatgatttattctgtgataagttgtatggtttaagagcgaaagacgtaagcaaggtaacttcgtacggcataactggttctgttctacccgatcccaactgtgtccctgcgtccacattcgacacgcctattcccagtatttcggaatgccctgatcttaaccccaacgactctatctccgtccgatattacttcccacgccaagcgcatcctcatcgatcgattcttctgagaggatataaacctgagcctgcaaggctgacggaaagcgataaggatggtccgacgtggtggtcaaggtggaagaagaggtcacaggcacaacggcggtggaaacggaaatgtgacaggtggaccgggtatggcaagaggcaggtacgagagtgggccgccacggaccaatggctaccaaccgcctccgcctcggtcgaactatgggggtag

SEQ ID NO: 2334 - DNA, 3018 bp, Cryptococcus neoformans
atggcagctcctatgcaagttgacgaagccgtccctggtgactctaagggcttgtactctcgtcaactgtgggttatgatctcttctgtaccaataaagatggccacttccaacgttcttattgttggcatgaagggccttggtgttgagattgccaagaacgttgccttggcaggtgtcaagactgtcaccatctacgacccttctgcagtagaaatcgcggatctcggtacacaattcttccttcgtgaagaggacattggtcgacctcgagctgaagtcaccgctccccgacttgccgaactcaactcttacgtccctatcaagattctccctggagcaggcgaaatcacaccggaaatgatcgagccttaccagattgttgtactcaccaacgccactgtcaggaagcaagtagagatcgacgagtactgtaggcaaaaggggatctattttatcgcagcggatgtgaggggtctattcggtagcgtgttcaacgactttggcaaggattttgcttgtgtcgaccctacaggagagaaccctctaagcggaatgattgtcgagattgacgaggatgctattgttacctgtcttgacgaaacgcgacatggacttgaagacggcgactttgtcactttctctgagattaagggtatggagggtttgaacggctgtgagcctagaaagatctctgtcaagggtccttacactttctcaatcggcgacacccgtgggttgggcaagtacaaatctggcggtctcttcacccaagtgaagatgcccaagattcttcaatttaaaacccttaaagagtccctcactaaccccgagttcttcatcaccgactttgccaaatgggaccgacccgctgccttgcacgttggtttccaggctctttctgcattttacgaaaaggccggtcatcttcctcgacctcgtaacgccgccgacgccgagcaagtcatttctctcgctaaggagatccactctgctgctggaggcgaagacgtccttgacgagaagattctcaccgagctttcttaccaagctactggagacctttcccctatggttgctgtcattggtggtttcgtcgctcaagaagtcctcaaggcttgttccgccaaattccaccccatgcaacaaaacatgtactttgactcactcgagtctctccctgctacccttccttctgaggctgacgtccagcctcttggatctcgatacgacgggcaaatcgccgtcttcggtaaggcctttcaggaaaagatttccaacactcgcgagttccttgtcggttcgggtgctatcggttgtgagatgttgaagaattggagcatgatgggccttgccactggtcccaacggtatcattcatgttaccgacctggacaccattgaaaagagtaacttgaaccgacagttcttgttcagagccaaggatgtgggcaagttcaaggctgaaagtgcggctgctgccgttgcggacatgaaccccaatttgaagggcaagatcattgctcacgatgacagggtcggccccgagactgaaaatgtctatggtgatgaattcttcgccaatcttgatggcgtcaccaatgccctcgataacgtgtcagcgcgtcagtacatggaccgacgatgtgtgttctactgcaagcctctccttgagtctggtactcttggtaccaaggccaatactcaggtcgttgttcctcacctcaccgagtcatattcatcttcccaggaccctcctgagaagtctattccctcttgtaccgtcaagaacttcccgaatgccattgagcacaccatccaatgggcccgagaagcgttcgattctttcttcgtcaatcctcctactactgtcaacctttatctttctcaaccagattttgtcgagaccaccctcaagtcttctggccagcaccacgagcatctcaaacagattgagaaataccttgtgaaggagaggcccatgtctttcgaggagtgtatcatgtgggccaggttacaatatgagaacaactatgtaaatgagatcaagcagttgttgttcaacttgcccaaggaccaagttaacgccaacggcactcccttctggtccggacccaagagggctcccaccgctcttgccttcaacattgacgatcctcttgatatggagtacctcatcgccgctgccaaccttcacgctttcaactacggtctcaagggcgagcgagaccctgctttattccgaaaggtggtcgagtctatgaacgtccccgagttcactcctaagagcggtgtcaagatccagatcaatgaaaatgaacctgttgaaaacaacgatatagatgaagatgacattgaagctattgtttcttctcttccccctcctgcttccctcgctggtttccgacttcaacctgttgacttcgagaaggatgatgactctaatcaccacattgacttcatcaccgccgcttccaacttgcgtgcccgaaattatggcatcacccttgccgacaggcataagaccaaactcatcgcgggaaagattatccctgccattgctacaaccactgctctcgctgttggtttggtttgcttggaactttacaagttgattgacggcaaaaacaagcttgaggactacaagaacggtttcgtgaatttggctttgcccttcttcggtttctctgagcctattgcggcggcgaagcaaaagtatggcgagactgagtggaccttgtgggacaggtttgagatcgagggcaatcctacgttgcagcaattcctggaatggttccaggagaaccacaagttggaagtacagatggtttctcagggtgtttccatgttgtggtcctctttcgctgccgaccgaatgaggatgcgcatgagcgagcttgtcgaacacgtcggcaagaagccaatccctcctcatgtcaagaacttattggtggaggttatggttaatgatgagaatgacgaggatgtcgaggtgccctatgtgttggtgcacatctaa

SEQ ID NO: 2335 - DNA, 3198 bp, Cryptococcus neoformans
  misc_feature (2665)..(2667): n=g, a, t or c
atgtcctcctctgccccaagcgacccgcctctctcagccagtagtctcaccgtaaagcataaaaagagatcctccaaagacaagagcggtactccttcccctcggcctagcaaaaccgctcgtctcgatcaagaggatggcgcagacgatcctatggacgtattggaggaagggaaggacggacgatcgagggatcccatggaagccttagaagacggagcaatgcccaaagttgaagacgagtatgaggttcaagctgaaagagaggtcgacgctgcaaaggactttgccgatgttactgcccctggacaggaggccaagttgaagcttgtacaccaggtccgacatcaggttgctattcctcctgattacccctacatccctatcaatcagcacaagcgcaaagatccgccagcccgtacctacaaatttgagctggaccctttccagtttgtgtctacttcctgtattgaacggaacgagtctgttcttgtatcagctcacacttcagctggtaagacggtggtggctgagtttgctattgcgacatgtttgaaggaagggaggcgagtggtctatacaagtcctatcaaggcgttgtcgaaccaaaaattcagagaattcacggaaacatttggtgacgttggactgatgaccggtgatgtgactatcaacccagaggcgtcatgtctggttatgaccactgagattttacggtctatgctgtaccgtggttcggaagtcatgcgagaggttgcttgggtcattttcgacgaggttcattacatgcgagacaaggaacgtggtgtcgtttgggaagagacaatcatccttcttccccacaccgttcgctacgtcttcctctcggccaccattcccaactcgatggaattcgccgaatggatctgcgcaacgcatgagcagccttgccatgtcgtttacactgatttccgaccgactccgctccagcactaccttttcccagccggatcagaaggcatatatctagtcgtggacgagaaaagcaatttcagggacgacaatttccaaaaagcaatggcagccttagcgcagggtcaaggagaagacccggccaatcctagcggcggaaagggcaagaagggcaagaccaagaaaggcggcgcattaaagggcgaaacatccgacatctataaaattgttcaactcatcatgcgacgcaacctcaaccccgttatcattttcgccttttcgaaacgtgaatgtgaagatcttgctatgcaaatgcaaaaattcgatttcaacacacccgatgaagcggctaccgtcgcacaggtgtttgaaagcgctatcggttccttatcggaggacgacaaaaaactttcgcaaatcgaaggtatattacctttgctcaaaaggggcattggaattcatcacggcggattgttgcctattctcaaagaagtgatagagatcttgttccaggaaggtttgataaaggctttgttcgcaactgaaactttctcaatcggtctaaacatgcccgccaaaacagtcgtattcacgagtgtgcgcaaattcgatggtaaagatttcagaaacctttctggtggtgaatatatccaaatgtctgggcgagccgggcgtcgtggtctcgatgcgcggggtatcgtcatcatgatgtgtgatgaaaagatcgaacccgaggcagcgaagggcatggtcaagggccaagcggaccgtcttgattcagctttccatcttggatacaacatgatcattaatttgatgagagttgaaggtgtgagccctgagtacatgctggaaaaatgcttcttccagttccagaattctatgagtgtaccagttttggagaaacaattgaaagaggctgaggccgagagggacgccatcgtgattgagcgcgaggatgaaatcgaagagtattacgagctccgacaacaactcaaagaacgtgggcaagatttccaagctgtcattacacaccccgcgtactgcctccgcttccttcaggccggtagacttgtcgaaatccgcgacggtgataaggatttcggatggggtgtagtcgtcgcttttaacaaagtcgtgaatcaaagaggtcgacctccaatttggacggaccaggatccacctcagaagcaatacattgtcgacgtgcttactcgagtcgaaacaggagcgtccatccctcgagaccgatcggcgtctgagatttcccccccttcaggtgccgacaagggtgaggtcgccatcattgcttgttctctctccactgttcagtctatcagccaataccgagtcaaccttcccaaagacttgcgcggtcaacaggagaagaacactgccttcagggcagtcaatgagatcaagaagcgtatgcctgacgggccacctttgctcgacccgatcaagagtatgggcatttcggataaatcgtttgtcgatttagtcaagaagattgcactattggaaaaccgacttcaaactctcgaaatcacaaagtctcctgagcttccacgtctctatgacctctacgaccgaaaacaaaagagcattcagtctgtcaaatccttgaaacgccgcatcaattctgtgcatgatatccttcagttagaagaactcaagtctcgtaaacgggtattgaggaggttgggtttctacnnngccgacgacgtggtggaaatgaaggggcgtgtagcgtgcgagatttccacgggagatgagttgatgttgacagagatgatgtttggtggcacatttggtacactagcacccgaacagtgtgctgcattgctgagctgtttcgtctttcaagaaaagtcagaggcaaaggtgaggttaaaggaagagctcgctgtcccacttcgcactctccaggagacggccaagagaatagccaaggtgtcaaacgaatcgggcattgcgattgttgaagatgagtatgtgcagagcttcaaggtggaaatgatggatgtagtcttgcagtggtgcaaaggtgccaaattctctcagatctgtgaaatgaccgacgtctttgaaggttccattatacgatgctttagacgattacaagaactcatccggcaaatggggcaagcagcacatgcgatcggtaacacggagctggaagaaaagtttgcaaagagtatggagcttcttgagagacccaacactgtcgttttcaacccttcgtga

SEQ ID NO: 2336 - DNA, 3207 bp, Cryptococcus neoformans
atgtttcctgccgttttctcctgctcatcaactgtccagaacgtcacaatcgttgcccatgtcgaccatggcaagacctcttttgccgattcgctcctatcctccaacaacatcatctcctctcgaatggctggtaaacttcggttcctagactctagagaagacgagcaagaacgaggaattaccatggaatccagcgccgtctcgcttcgatttgacatgactcgtctttcgcccgatggtacatctagtatccaacagtgcatttgcaacgtcattgatactcctggtcatgtggactttgccagtgaggtttcaacagcgagcagactgtgtgacggtgcactcgttctggtcgatgtgtgggaaggtgtggcaactcagacgatcgccgttcttcgtcaagcttggatggacaagctcaagccattactcgtaatcaacaagatggatcgtcttatcacagaactcaagctgtcaccttcagaagcttatcatcacatttcacaattgattgagcaggtcaatgccgtcatgggttcattctacgcgtctgagcgaatggaggacgatttgaggtggagagaagaaagagaaaagcgacttgcggcaaggaaagagcagcaaggcgaagatcttgatgatgatgaagagtacgaggagaaggaggatgaggatatctattttgctccggacaggggaaatgttctgttcgcttctgctatcgatggttgggcgttccgtctgggtaaatttgcccgtctttacgctgaaaagctcaaaatcaaagaaggaaacctccgtcgagttttatggggtgattggtatctcgacccgaagaccaagagagtcgtggggcgcaagaagcttgctggacgaaacctcaagcctatgtttgtccaatttgtactagagaatatctggcgagtctacgatacagtcctcaacgagtacaacccggatgcagtccagaagatcgtaacagctctcaacattcgcattacccctcgcgatctccgatccaaagacacccgcaacctcctcaacctaatcatgcaacaatggcttcccctctctaccgccactttccaatccatcattgaagtcatccctccacctccctctgcccaagccatccgccttccgtacatgctccacccagaaaaggcaaaagcagctgccgctagcggtggtttgaaggctgaaaacgagctggagagggggttgtacgagtgcgaccagggagaaggagctgaagtggttgcgtatgtgagtaagatgtttgctgtccgcaagggggatttgccagagtacaaaccgaaagaaatgacggctgaggaaatgcgagcgagaggaagagaggagcgagaacgacgtgcggctttagtggcggagcgacaggctaaaggtgaagggcttgatgggcaaccgttgcctgaggaccttgctaagccactagagtcactttcactcgagaacatccaacccgctacttcggagaaaccagccgtcgacgatagcgactctgaagttctcctcggattctcccgaatattctcctctacccttcaccgcggtacttccctcctcgccattctcccaaaattcgactcttccttgcccccttctcacccacacaacattaaacacactgtccccatcatcgcttctgatctttatatgatgatgggccgagaacttgtgtctgtcgacagtgttccagcgggtcatgtgtgtgctattggtggcttgaacagggctgtacctcgaagcgcgacattatgggcgcctgatgcaaagggcgttgaggaaggatttggaaaggaggctttggtcaatttggcaggtgtaggtgttggagcgaacgccattgtacgagttgcacttgaaccagagaaccctagcgatatgccaaagttaatcagaggtttacgaattttgaaccaagccgatccttgtgcagagtactttgtacaggaaagcggagaacatgtcatcatcactgctggagaattgcatctcgaacgttgtctcaaagaccttcgtgaacgttttgccaagtgtcctattcaacagtccgcccctattgttcccttccgagaaaccgccgtcaaggcaccggacatggcacctcccaagactaccggggcaccccgaggtactattaatggtacagtgatcaacggtcttgtcaagttcaggttgagagctatgcccttgccagagggtgtcgaaacctttttgcttagccaacaaggtgctatctctaagatgcttgtccgtgagcgcgatggcaaggaagcccgtcaactctctcccgaagagttctggactgagctcgagaggttgctcaacaaggccggcggtgattgggctggagccgcggacagagtatggagctttggacccaagagagtgggtgccaacttattgttggaccctgttggcaccaaacatctcaggttaaggcgacgtgaacagctcttcacccaagcgcgggcacaagattacgagtcatctatcgaaactggtttccagctttccactttccagggcccgctctgtgctgaacctgtggtcggaatggcttgggttgtggagagtgtggagcttgataggcaaggaatggagtcggagcaaggaaaggggcaggtggtgggtggagcgctcatctcggctgtgagagatgcgtgtaggcaaggcttgttggattggagtccaaggataaagctcgcaatgtacacctgtgatattcaggcatctactgatgtactgggcaaggtctatggtgtcattgccaggcgtcgaggaagaattgtctcggaggagatgaaggagggaacttcattcttcactattcgagccatgttgccagtggtggagagtttcggtttcgccgatgaaatccgaacgcgaacttccggtgctgcctctcctcaactcattttttccggctacgaaacccttgacctcgatcccttctgggttcccaccacccaggaggagctggaagatcttggagagaaggctgataaggcgaatgtagctaaggcctacgtcgatggtgtgaggaagaggaagggtatgtttgtggagaggaagattgtagagtttgcggagaagcagaggacgctaaagaaaaatgtaccaagtcgtgaagacaagtgcagaaggaagcagagccaggtcgaagacatagtacaatag

SEQ ID NO: 2337 - DNA, 3354 bp, Cryptococcus neoformans
atgcgcctgccggggctgtcgtggtcatggaaaaggtgggtatattgaggcactaagttgtcacagaccgacaaaagagactaccttatcgacctcgaaaagactgcccaggcttcttgggccgagcagcacctctttgagaccaacccccctcctcttcctgagggtgtcagctcttactctgaattcttcgcttccggcaagtctatggaggaggttcacgagaaaaaccccaaatggttcggtacttttccttacgcctacatgaacggttctctccatcttggtcacgctttcaccatcagcaaggtcgagtttgccgctggttttgagaggatgcgtgggaagagggtcttgttccctgttgggtaccacgccactggtatgcctatcaaagccgcctctgacaagcttatccgagaaatggagatgttcggtgaggactttgctcgctacaaggaggatgagcccgaggaggttgagcccgccgctgctaccgctgcccccgccaagtccctcgagtctaccgatccctccaaggccaagaagggaaagctcaacgccaagtcaaccggtctcacctaccaattccaaatcctcgagctcatcggtgtcccccgtgacgaactcaagaagttcgctgatccttcccactggctccactatttccctcctatcgctaaacaggacttgagcggtcttggcgccagggttgactggaggaggcaattcattaccaccgacgcgaacctctactacgacagcttcgtccgatggcaaatgaacaagctttacaagcaaaaccgtgtcaagttcggcaagcgatacaccatctactcccccaaagacggacaaccctgcatggaccatgaccgtgccagtggtgaggctgtaaaccctcaagaatacactgctgtcaagatggaagtgctcgaatgggggcctactgttcctgagggggtgaagaaggccgtcgaaggcaggaaggtttggatggttgctgctacgctccgacctgaaactatgtatggtcagaccaactgtttcgttggccccaacctcaaatacggactcttcgaggcttccgacaatgaacttttccttgttactgagcgatcagcccgtaacatggccttccagggtatctttgaccgacccaagggcgcttgcaacaaggttgcggacattattggttccgatttgctcggtaccaaggtcaacccccctttcggtctcgtcaaggaagtctacgtcctccccatggagggtgtccttgccaccaagggtaccggtgttgttacttctgtcccatccgactcccccgatgactaccgaacccttatggacctccgtaagaaggccgagatgtacaaaattaagcccgaatgggctgccatcgaccccattccagtactcagaactcccaaatacggcgatatggccgccgaggtcctctgtactgagctcaagattcaatctcagcgtgacaaggacaaacttgccgaggccaaggaccttacttacaaggagggcttctacaacggtgtcatgaccgttggtgactttgcggggactcctgttagtgaagccaagcccaaggtccgagagcagatgatccaggctggtttggcttgcccttacgccgaacccgagagtgaagtcatctctcgaagtgccgacgtttgtgttgttgcccttgttgaccaatggtacctcgactacggagaggacggctggaagactcaggctttcaagcttctcaataagctcaacacttaccagaacgagacccgacacgcctttgagggtgtcctcaattggctcaaccagtgggcgtgcgctcgatcttacggtctcggttctaagctcccttgggatcctgtctggcttatcgagtctctctccgactccaccgtctacatgtcgtactacactgtcgccaacctcctccacgaagacatgttcggcaagaaccccggtccgcttggtattacccctgagcagatgaccgatgaggtctgggagtacgtcctcgctgacggtcagctccctgccgacagccctgtcgatgccgagaaggccgctcagctcaagtaccatttcaactacttttaccctctcgacgtcagatcttccggcaaggatcttatccctaaccacttgacgttctgggtctactgccacgctgctctcttccctgagaagcactggcccaaggctgtcagggccaacggtcatttgatgcttaacggaaagaagatgtccaagtctaccggtaacttcttgaccatgaaggaggctaccaagaaatacggttccgacgcgatgaggttgactctcgccgatgccggtgacgacatcaccgatgccaacttcgaggagactgtcgccaacgctgccattcttcgacttcacacctgctccagttgggccgaggagatgaagtctaccaaggaccagctcaggactggtgaatggaatgactttgaccgtggctttagggcagagatggatgctctcatcaaggaggcgtacggcgcctttgagcaaatggagtacaagcgcgccctcaaagcgggtctctatgactttgagaacgctcgaaactggtaccgaatggtgtctgaccccgtcaacagcggctccggcatgcaccgcgacctcgtcttcgcctggcttcgcgcccatgtcctcctcatcacacccttcactccccactattctgagcacatctggaagaacgttcttggcgagacttcctccatccagaccgctcttttccccgagccttcaggccctatcgaccccacagtcctcgagcagaccgagtacctccgtggtgtcgttgatgctatccgatctgccgaggcgcaggctggtaagaagaaggggaagaaggctgctgctgccgtctatgaccctagcaagcccaagaaggtcaggatgtacgttgccaaaaacttccctgaatggcaagaaaaggctatcggtgtcatcaagaaccaggcctgggatggtgagaaagtggacgacgttaagctcaggaagggtttggaggaggttggtttaatgaaggacaagaaggtcatgcctttctgccaggctttcaagaggaaacttgctgttaccggtccctctgcctttgaccgaactcttcccttcgatgagctctactctctcaagatgctcgcccctctcatcaagtcttctctccgattcgaggaaattgacgtgctcagtgtggaggaggctagggagatcattgagaaggatggtgagaaggaaggatgggccaaggaaaagattgaggttgccgagcccgctgtccctggtgttcagttctggaacgtatag

SEQ ID NO: 2338 - DNA, 3207 bp, Cryptococcus neoformans
atgcaccccaagtataagaggaaagcggccaagatgaaagcctcgaagcagtcaggaaagtctgacgatgggcaatctgtcatggaggagcagaagcaacttcaggcgagaaagtttcccgggttgtccatgcctgaccaagattggaagcctgccgagaaatatgtcgacgaaagggccgcaaaagaaccgcacgagacccttccggaatcactttcgaccagtgatactatggcccagttagagtcgatcgcgtctcgccgaaatagaccggcggctgaggatttcttggacggggagcctgctgcgaagaaattgcggagtgccactagcagtggtcatgacgggtcgtcaggacgacggggcggatatgaaggaggcagctttagagattcttttagacatgggcgtccgacggttgatgagaggcccgtactctacaagatctacaatggcactatcgcgaatatcaccgattttggggcttttgtaactttagatggcgtagaaagaaaaatcgatggtaatcaaaggtcaaatgaaggtaaagttaactcaccccgagacttccttaaacggggtcaacgagtcaaagtcaaagttatggctgtcagtcctaagatcggtctaagtatgaaggatgtcgatcagaacactggtgatgatctttccacccccctcttagcagttgatgagcggcagcgatctagtgcaaagagattatcaagtcccgagcggttcgagattaaacagctcatagccagtggggccgtatctgcagcagattaccctgatcttgatgaagacttcagcactaacgtcgccaatcatgagattgaagaagacattgatgtcgaagttaatgaagtcgaaccggcgttcttatcgggccagaccaaagtcaccctggaactctctcctgttaaaatcatcaaagcaccagacggctcacttaaccgttctgctttagcaggcgcttcattggcgaaagaaagacgtgatctcaaacgtttggaagcgaatgagcaggccgacgcagagaccagagagatcaaccagccttggcttgatcccatggctaaccaaaacgagcggcagtttgcatcagacatcaaagggaacctgcttggccaaaaggccgctcaaatgcctgcctggaaagctgcaaataaagttgtgtcgtatggcaagatcacttctatgagtatacaagaacaaagacgcagtctgcccatctacaaattacgggagcagttggtcgccgctattcgagataatcaaattcttgttgtagttggagacactgggtctgggaagactactcaaatggcgcaatacctcgctgaagagggattcctcgaaaaagggcgtttgggatgcactcagccgcgaaaggttgctgctgtttctgtcgctaagcgtgttgcagaggaagtgggttgtcgactcggggctgaagtcggctacactatccgttttgaagatatgaccagtcctgagaccaagatcaagtacatgaccgatggtatgcttcttcgtgaattgctggttgatccggattgctcgaaatactctgtgattatgcttgatgaagcgcacgagcgcacaatcgcaactgacgtcctcttcggtctcctgaaaaaggcttgcaaacgacgcccagatcttaagctaatatgtacttctgccacactggatgctgccaagtttgcgacctacttctggggttgcccaatctttaccattcctggccgaacataccccgtcgagacactttatacaaaggagcctgagcccgactacctggaggcctctctcatcaccatccttcaaatccatctcatggaaccagcaggcgatgttcttcttttccttacaggtcaagaggagatcgatacagcatgtgaggttctatatgagcgagtcaaggcattgggtcctcaagttccagagcttctcattttaccggtatatgctgcacttccctctgagatgcagtcacgcatctttgagccagccccacctggtgcacgtaaggtggtcatcgcaaccaacattgcagagaccagtatcaccattgatggcatatactatgtcattgatcctggttttgcaaagcagaatgcttatgacccaaagcttggtatggattctttgatagtcactccgatctcccaagcgcaagcacgtcaaagagctgggcgtgccggccgcacgggccctggcaagtgctatcgtctctacacagaggtcgcctaccgtaatgaaatgttacccaacccaattcctgaaatccaacgaaccaatcttgcatctactattctcactctgaaagcaatgggaatcaacgatcttatcagtttcgatttcatggatcctcctccagcagcaaccatgttaacagctttagaacaactttatgctcttggtgccttggatgatgaagggctgttgaccaggattggtcgaaaaatggcagattttcctctagaccctcctttatccaagatgcttatcaaatctgttgattatggatgttctgaagaagccttgacaattgtggctatgctgcaagctgggggccaagtatactatcgacccaaggacaaacagactcaagcggacgccaaaaaggctaagtttcatcagccagaaggtgaccttcttacattacttgctgtctataatggatggaaaaactcgaaattcagtaacccatggtgcttcgaaaactttattcaaacacgagccatgaaaacagcgcaagatgtaagaaaacagttgattggaattatggatagatataaacacgatcttgtgtcatgtggtaccaattacaaccgagtacggatggccatttgctctggattcttcagaaatgctgccaagaaggaccccactgaaggttataagacacttgttgagggtacacctgtcagcattcatccctcaagtgccttgttccagcgaccccctgaatggtgtgtgtattatgaactggttcttactgccaaggaatacatgcaccaggtcactgttattgaaccaaaatggctttctgaagtggcaccaacattcttccgtattgctgatcaaaacaagattagcaagcgtaaggcatctgagaagattgagcctctgtttgatcgttttgctgcagataaagatgactgggtatgtatgttctggactggtgatccaacatga

SEQ ID NO: 2339 - DNA, 3384 bp, Cryptococcus neoformans
  misc_feature (1149)..(1149): n=g, a, t or c
atggcgataagaagggcgctgattggtattccaagggtacttgaactgatactgttgcaggataaatggcaacttctcccagcttttctcaaagtaaaaggccttgtcaagcagcatcttgactcctttaactattttgtcaatgtcgacatcaaagctattcttgcggccaactctcttgtcatttcagatatcaaccccaagtactacatccgatataccgacatccgtgtagggcgtccagcacgacatgatgctaatcaagtggcctctgctctttcgccgatggagtgtcgattgacagattccacatatagcgcgccgatctatgtggatgtggaatacatgggagaagaaaagaggagcaagcagaggggtgtgcagattggcatgttgccagtaatgttgaggagcgatttgtgtaacctcaaagggaagaatgaggcggagctagcgaggatgggagagtgcccgatggatccgggaggatatttcgttgttaagggaacggagaaggtcatattggtgcaagagcagttgagcaagaatcgtatcttggtaatgaaggataagaaggatgaggtgatggctgaagttacatcttcaacgcacgaccgagttgtcaaaacctatgtcgtcagtaaagccaaccgtctctatctccggcacaactctttcaaggaattcatccctatcgttatcgccctcaaggctatgggtctcactgcagacaaggaaatcctccaactcatatgcggttccgacgaacgataccaggaggcctttggtgtttccctcgaagaagctgccaaggagaagacctttacgcgccgtcaagcgctcgaatggattggcgccagagtatctcccaaccaggctaaggatgacagcgggtccaaccagaagcttaccccaagcgatattgcccagcaggctcttgctgcaatggttcttggtcatgttcctgtgcgaaacatgaacttccgacccaagtgcatctatcttgccaccatggcgcgaagggttctcatggccatgattgacgatcatatggttgatgatcgagattacgttggtaacaagcgtctagaacttgccggtcagcttttgtctttgctctttgaagattctttcaagacttttaacagngagctcaaaaagcgaatggacaaaattctggaaaagcccaaccgtgccggtcctttcgatgccgggactctgattcgtcaaggtggtgatcccatcactcaggcgtttgtccgttccatctccaccggcaactggtcgcttaagcgattccacgtcgagcgggcaggtgttacccatgtcttgtctcgtttatccttcattgccgcattgggtatgatgactcgtatctcttctcaattcgaaaagacgcgtaaggtctctggtcctcgtgctcttcaaccgagtcagtggggtatgctctgtccttccgatacgcctgaaggtgaagcatgtggtcttgtgaagaacttggctcttatgacccacattactacggacgtacctgaaacgcccttggtcaagatggcgttcatgcttggtgttgaggatatttcccttgttaccggtaatgaactctaccggcccggagtgcatatggtgcaggtgaatggtacgctcatcggtgtgaccaacatggcgaaacgatttgtgagacagtttagaaagttgaggcgagctggaaggatgtctgagtttgtgtcaatctttattaaccatcaccacaagatcatctacattgcaagtgatggtggacgaatttgtcgaccgatgattattgttgaaaagggaagatcacgagtgacaacggagcatgtgaggcttttgaaagagggcaaagtcactttcgatcatttcctccgagcaggcttggtggaatacctagatgtcaacgaggagaatgactctttcatcgcgtgttacgaaaatgagatcgaagaaggaacaacgcatctcgaaatcgaaccatttactattctcggtgctgtcgccggtttgattccttaccctcaccataaccaatctcctcgaaacacctatcaatgtgcgatgggtaaacaagctattggcgccatcgcatacaatcagcttaaccgaattgataccttgctgtatctcatgacataccctcaacagcccatggtcaagaccaaaacgatcgagctgatcggctacaacaaacttcccgccgggcagaatgctacagtcgctgtcatgtcttactctggatacgatatcgaagatgctttgattctcaatcgtgccagtgtagaccgaggttttggtcgatgtcatgttctcaagaaggtgacaacgccaatgcgaacgttccataacggttcacatgaacgtactgcttatcctgaccctcctcctcgacccgacgcatatacttttgttgataaggccgatggcatgaccgctcccggtgctactatcaaccaatacgacgtgatgatccatcgagaaacccctgtcgatactcgtggtggtggtgcggacacccagctgtacaaaccaatgcctgtcacccacaagacacctgaaccgattttggttgacaaggtgatgctaacagagggcgaggatggtgcgttgatcaaaatcttgacgaggcagactcgaaggccagaactgggtgacaagttctcttcgcgacacggtcagaagggtgtttgtggtttgatcgtgccccaggcagatatgccattcaatgatcaaggtattgtacctgatatcatcatgaatcctcatggtttcccctctcgaatgactgtcggaaaaatgattgagctcctttctggtaaagccggtgtcgtcgctggtaaactccaatatggcactgcatttggtggttccaaggtcgtcgacatgtcgcagatccttatcgacaacggtttttcgtatgggggtaaggatatgttaaccagtggtatcaccggtcagccgatggaagcctacgtctactttggacctatttattatcagaaacttaagcatatggtcatggacaaaatgcatgctcgacctactggtccacgagctaatcttactcgccagcctactgaaggtcgttcgaaggacggtggtctccgtctaggtgaaatggagcgtgattgtttaattggttatggtgccactcagcttttgttggaacgtcttatgatctcctccgatgcgttcgagactcaagtatgtgagagctgtggtatgttgggatacaataactggtgtcccaaatgtaagagtggtaagggggttgtagggttgaccattccgtatgcggccaagttgttgatacaggagctgatgggtatgaacattatgcccaagctttgcttggaagacaccgtctag

SEQ ID NO: 2340 - DNA, 3345 bp, Cryptococcus neoformans
  misc_feature (2484)..(2484): n=g, a, t or c
  misc_feature (2535)..(2535): n=g, a, t or c
atggccatgggacgttgcgggccttgcgtgagttgcttcatatttggtcccgtccttgctgacttgggtagatcgcgctcgccggctgcttcacctacctacgatacggcatcttcacctactactcctacggtggacatgtccttccatccccgagcatctaccgattcgaccgtttctctcccgttggcactccacacgaccgaaagtctgccacctggcgccagacgaggctacgagaatcgatcgacatcattctctggctcttctcgtgaaatcattcgtccactctccaaccccgctgctagactgagtaaccctcaagctcagagtcagacacgcgcccctcttccttccttatacccagctatcctttcaatggtctctgctgcgttcaaatcatacatccctcttgccgacctcaccaaagatggtatcacgtacaaagattccttctccggccaagctgctgtgacactgatcgcagagctcatcaagacgtctgatcgaaatttggctctgctgctcggtcgaagccttgacgcccaaaagttctttcatgatgtgacatacgaccaccgattgagggataaccctaaagaggtgtaccgatttaaagacaggctcgctgcaccctttacggacacaaacggcaatggggaaagcccagtttcggaagggagattgacgaggaacgggagtggagcgtcaagtacggcgatgggcttgggtggtggattgaaagctttgacagctgcaaggcctgcagattcttcctcttcaatgcatactgaatctacaccagtatctatgaccccatctcgatcttcgaccatgcctttcctcgactccgactcgccagatggcttggacagcgaagatactctcccagtgggtgtattcacccttcttacagactgttactcccccacatgttcgcgcgacagtctttgttattctatcaattgtcccagaagactagagcagatgaagaggctaaacatgaagccggagcctgggttgaataggaagctcagtcgtgagagtttagtggatgtcaaggagactggcactctgtggattcattctgtttcgcaagagatcttggatagtgtggatgataaagagaagaagaggcaggaagccatcaacgaagttatctacacggagagggactttgtcagggatctggagtatcttcgagattcatgggtcaaaccgctacggacgcaagaagtcatcgatgccaagcgccgagacgactttgtccgacaagtattttggaatgtccacgacgtcctctccgtaaaccatgtcctcgccgaacgtctcacgaagcgccagaaaaaggaaccagtcgtgtcacgtattggcgacatctttctcgaacgtgtcccactcttcgaaccgtttgtcacctatggtgcccatcaacttttcggcaagtatgaattcgagaaggaaaaaggcgcgaacccagttttccaaaagtttgtggacgatacagaaagaaaaccagagtcaagaaagttggagttgaacggttacttgacaaaacccactacacgtctgggtcgttatcctctcttactggaagctgtcctcaaatatactcctgacgatcatccggataaggaggatttgccagaggtgatcaagatgattagagggttcttgacgaaagtgaacgcggagagtgggaagagtgagaatatatttgaattggcgcaaatcgagcaacagctggtgttcaggccaaatgaaaggattgatctgcgactgcgagacaagaatcggcagttagtgcacaagggtccgttgaagagaagaggtggcaatcgagaagagattgcagatttactgggctttttatttgaccatgcgtttttgcttgtcaagcccaaatgggtaaacaagagtgagcagtacaaggtttatcgccgaccaattcctctcgagttacttgtcctcgtcactccagatgaacaatacaactctggcaaattgtcatatggccatgggcgttcccgactcatcacacgtcaccccaactcaaaaaccaaccactcttcccagaataactctataacagcccctccgaagccagaatcaaaacacggtttttcgattacgatccttcacctcggcaaaaaaggctattcgatgcagctatgggttgacactcatattgggaggaaaaagtggttggagaatatagataagcaacaagggttgttgagggagaagagtacggttttcgttagcgaaactatcactgaaggaattttgagcggtgtgaggaaagtgaactgttctagtccttatgatcaagggaataggatgatcttcggtacagatgaaggtgtttacttcgccaacttgcgcgatgaaaagctccgcgaaccagtaaaagtcattaaccttatcgacgtcactcaagtcgatgttatcgaagagttccaactcctcattgtccttcacganagatgtgtcactaccttcccacttgacagtcttgacccttccgatcccaangccgctctcaagcgagggaaacgcatttcatcgcacacaagctttatcaaatcgggtgtatgcctcggcaagactttggttgcgatcgtcaagagctcaacgttgagcagtacaattaaagtgatggaacctgtggatctgagtcaaaatcggaaaaagacacaagcggggtttatgaaaaggctcaatggcaaagacgacgcattgaagcttttcaaggaattctatattcctacggaatccagctctgtccatttcctgaagacgaagctctgtgtcggctgcaccaaggggttcgagattgtcgacctagagacacttgatatgcagggtttgctcgatccgtcagatggatcgctggactttgtgttaaagagggataacgtcagaccgattgcaatttacagaatcgaagaggatttcttgctgtgctacgacgcagaatttgcgttctatgtaaacaagaacggatggcggtcaaggcctaaatgggcgattgtttgggagggcattcccacatcttttgcattgcaatatccatatgtcattgcgtttgaaccgacgttcattgaagtgcatcacgttgaaactggccatctggtccagatcatccctgggaacaatatccaatgcctccgccgacactcctccttcacgagtcaatgcccctttaccaccgaatcgcatgatgtacgctccgcccactctcgggactcccccttatgcccgtcctcccaatatgccagggtatcctgcttatcccaacgtatcttatcctggtcatccccaacaacctcgacaaacctctaa

SEQ ID NO: 2341 - DNA, 3375 bp, Cryptococcus neoformans
  misc_feature (250)..(252): n=g, a, t or c
atggtcgctgctttcgaccccctcgccccctcgcaggcatcctcgtccaccagcccggacaacaccacgttccatactctcaccagagagaggcagttcagacatccgcccgtcaacgcctcagatgttcctgccctcgacgagctcgtcgctccccacatcaagagtttcaacgcattgatagaagatgaagggaacccaggtgcaaagggtctgctgcagatgggcgtggaggactcggagagaaggnnngttttcgatggcaagggaagcgaaggcggtttgggcacaaaattgagctaccgaatcgaccgggtcgcccttagtaagccccttgttcccgaaaaggacaagcttgccgttgagcgaagggcccgggagcgtcttgctacctaccgttcaaaattgacagtcaacatcaagtggacagtcactgacgaggacggaaacaggaaggagtttgaggagatcaaggagtgcggtttgttgcctgttatggttcgatcaataagatgtaaccttcaaggccttcctgccaccgaactcatcaaacacagcgaagagtctacctctttcggtggttactttatcgtcaacggtaatgagaagattatccgatatctcgttgttccccggcgacacaaccctatcaatctctaccgaccttcattcgccaagcgtggtgcttcctacactccctacggctgtcagattcgatgtgtccgaccagacgaaaccgcttgtaccaacactattcattacttgtccaacggtggtgctaccctgcgttttgcgtggcgtaaggtcgagtacatgattcctcttatgctcatcctcaaggctctcgtcgatgcgagtgacaaggagatctttgagggtcttatccagggcgagtacgacaataccttcttgaccgaccgtgtggagttgttgttgcgaggccaaaagtcgtggggtttacacactggtgctcaatgtttggactacttgggagaaaagtttagggttgtgctcaatgttcccgatgactggagtaacgtccaggttggtggctaccttttgcgaaaggttgtgctggtgcacttgcctgctcctagggacaagttcaggatgctccttttcatgcttagaaagctttactctcaggtttctggtgccacttgccccgacaaccctgattctcctcagcaccacgaagttctccttcctggtttcctctacggtatgattatcaaggagcgatttgatgactgcctcaacgccgtcaagtcacaaatccaactcgacctgagagacggtaaggcgagaagtttcatggatcccaagtactttaccagcgtactgtcaaaaacgaattgggatatcggttccaagctgtcatacttcctcgctaccggtaaccttgtctcacccaccggtcttgacttgcaacaaacatctggtttcaccattgtcgccgaaaaactcaacttttaccgatacctcagtcactttaggtgtatacaccgaggtgctttctttgctgaattgaagacgaccactgtgcgaaagttgatgcccgaatcgtggggtttcctgtgtcctgtacacacccccgacggttctccatgtggtcttttgaaccacttgtcgcacacctgtcaaatcgtcacttcatcccttgacgtttcacacatccccgctctcctttcggcccaaggcatgacccaagtgttcgcctcttctatcgacggtcgtcgcatggtttgcatccagcttgatggtaaagttatcggttacgcttccccaatgaaggccaaacagctcgccaataggcttcgaaagctcaaaactgaggcagactccaaggtgcctcttgatctcgaaatcggttacgttcccgttacgaagggtggacagtaccccggcctttatctcttcgccagcaggagtcgaatgatgcgccctgtgacgtaccttgagaatggcaagcttgaccacttgggctcgtttgagcaggtgtacatggatgtggcgattaccaaggaagagatcgaaaagggtgtctcctctcacgtggagctggatcctaccagcatgttgtcagttattgccaacatgactcccttctctgactttaaccagagtccccgaaacatgtaccaatgccaaatgggtaaacagtcgatgggtactccttcaacagctatcagcaagcgtaccgacaacaagatgtaccgactccagtctggtcagacacctgttgttcgtcccgatcttcacaaccaatacggtttcgataacttccccaacggtaccaacgccatagttgctgtcatttcttacactggttatgatatggaagacgcgatgatcttgaacaagtctgcccacgagcgaggtttcggttacggtacagtctacaaggccgatatctttgacctaaagggtgtgcccggagcgagtcgaagcgccaagcctactttgcactttggtctcggtagggatgtcaaggaggaccacgacgcgaggaacattatcagtcaggacggtttgcccatcattggtaccagggtcaaggctggtgatcctctgtgtgcctacattgacgacaccaccggtcgaaccaagttccacaagtacaagggtgacgaaaccgccttcatcgacgaagttcgtgtcctcggttccgatgctggtgatgccgagctccagaagatccacatcaaactccgtatcccccgttctcccgtcatcggtgacaagttctcttcccgacacggtcaaaaaggtgtatgttcccaaaagttccctgcgatcgatatgccttttagcgagagcggtatgcagccggatgttattatcaaccctcacgctttcccctcgcgaatgactatcgggatgtttgtcgagagtatggctggtaaggcgggagctttgcacggtcttgcccaggacgctactcctttcaagttctctgacaaggaccgacctgttgactactttggcgagcagctccgagctgctggttacaattactacggtaacgagcccatgtactctggtatcactggtgaagaattccatgcggacatctaccttggtcttgtctactaccagcgtttgaggcacatggtgaacgacaagttccaggtcagaacgactggtccagttgatcctctgaccagacaacctggccgaaaacgtgctggtggtatccgattcggtgaaatggaacgagatgctcttatcgcgcacggtacttccttcttgttgcaagaccgactcatgaactgttccgactactctaccgcttgggtctgcaggaactgtggttcactcgtatcgcggtttcgaagaagtcggtggcgctcagggtatgcaggaatactgtag

SEQ ID NO: 2342 - DNA, 3279 bp, Cryptococcus neoformans
  misc_feature (1027)..(1029): n=g, a, t or c
atgctaccactgcaacacaagcccttgacaatattaattggctttttgaactactcatatatttcacttctagtgatccgtgccacaccccttttaagtccgcccacgtggcttataggctggacgcgcgtcttggatgagttcgttgttcgccgtcattcactcgatccttctttagcttacaacggtttgccgtcttctttatatttttcttcctcttcattactctctaatctcgcatctaccaccatgaccgaaggagaaagacccacttttgatatcgcagtccccgctaaagatcccgaacccaaggaggacgacaaacccaaacacaccggtgacaaaggcaaggctagagatgagaacctgcagctcaaggctgagctggagatgcttgtccagcgattacgggaaccggactctgggctttatcagcccgctcttgagtcacttagaacattgatcaggacatctaccagttcaatgacttccgtccccaagcctcttaagttcttgagaccattctatgaggagatgggcaagattagggatggatggagcgaagatttgaaggagcaaagagtaagcgagattctctttatattgtctctccttgcttccatcctttccgtccttgctatgacctactccgatactggcaagcgcgaaaccctttactatcgagttctctccggttccgaagaagctcctggtctctggggacatgaatatgtacgacacctcgctgctgagctcggagaagagtatgccgctacatacgcagctttaggtgaagatgccgacattcctcaaccagacaccaaatacacgaccgaccagctgagagccctctcgatcgagcttgttgaattctttttgaagcacaatgcggaagccgatgcggtggatattttgctggaagtggagaacatttcggccattacgaagtatgtggatgacaagacgttcgaaagggtgtgcagatatatggtcagctgcgttccgttgttggttaaccccgatgacnnncctttcctcgaaactgcatctgttatttattctaaatacgaccgttatcccgaagcccttgctcttgctgtccgtcttaacagcccggaacttatccgcaaatactacgaggctcctacaaaccctgtgatgaagaagcagctctcgtacttcctcgcccacgctgagcccaacgatactatacctacccaaccggaagacgttcttgagtgcctcggtaacgttaagctttccactcacttccgaaattttgggaaggctgttggtgttgaagaggcaaagtctgttgatgacatctacaaaactcatctcgagccctcatctcgaaacaccgctattccggactctgcccgtcaaaaccttgcctccacctttgttaacgcctttgtcaacgccggtttcggtaacgacaagcttatggtcaacgccccggaaggtcagagttggatctacaagaacaaagctgaaggtatgatgagcgctacggcatctgttggtttgagtcttctttgggactcagagagcggtatcgaccacattgataagtactcttactctgccgaggaacacatcaaggccggcgcgttccttgctaccggtatcgttcattctggtattcggtccgatcccgatatcgcgtttgccttgcttgaagagcacgtcgacagccaaagcattcccctcaaagtcagtgccatcaacggcatcgccatcgcttacgccggttctgagaggcaggatattgccgacaagctcttgccatacgtccaagatgagtccacatctatggaagtctcttctatggctatcctcgctcttggtttcgtctttgttggatcttcaaacggtgacattgcgagcgagattttgcagactttgatggagagagaagagaaccaattggcttccgagtggacagtgtttgcttgcttgggtttgggtttgctttatttatccgctcaagaaaagtccgaacctactctcgccaccctcaaagccatcgagcaccccatcgcccaaatcgctcagaccatcgtcaacatttgtgccaacgctggaaccggcaatgtcctcaagatccaggaaatgctttacatctgttccgagcacgctacagagaagaaggatgagaagaaggaagacaccgctgctgagggcgagggtgaatctcctgttgcctcatccgaagttcctggtgcaatccctgctgccggaccacccgtcccccctaccgctgctggtgtgcctggtacggacattgaaggcgacgtggatatgagcgatgttgccgccgaggctggggcgcccgatggtggagctcagtctgctgttaccggtgaggaaggcgagaaggagaaagaggcagagaagacggcggagcaattgaagcaccaggcttttgctacgcttggtattgcgttgattgctatgggcgaggatgttggtgccgagatggctttacggcagttccagcacttgatgacctacggtgaccctgtcatccgcaaatctgtccccttggctttaggtctcatatccgcttccaacccccaactctctatcctcgataccctttccaagtactcccacgactctgatcttgacgtcgctatcaacgccatcttggctatgggctttgtcggagctggtacgaataacgctaggttggcgcaaatgttgagaggattggcggtgtattatgcgaaggaggttgactgcttatttatggttcggattgctcagggtcttgtgcacatgggcaagggtactattggtatcaaccccttctacagcgaccgtcaggttatgagcaagaccgctgtggctggattgctgtctgtcctcgtgtctttcaccgacgctagaaaattcgtcttgggcaagtaccattggatgctttactggatcgttcccgccatgttccctcaattcctcatcactcttaacgaagaactcgaggaaattccggtcactgtgcgagtcggacaagctgtcaacaccgtcgctcaggcaggtacgaggcatggtatcagtggtttccaaactcatcaatcgccagttcgaattgcaacaacagaacgagcagagctgggaaccaacgagttcttcccttatcagagcgtgttagaaggcttggttatcctcaaaaagagtgttgccttatttgggccttggaaccgtttgaggattataatgttgattttgagcttaggaacgagcagtataacgcggaggaccttcattaagtag

SEQ ID NO: 2343 - DNA, 3354 bp, Cryptococcus neoformans
atgctccgtcacgcactgagatcagtacaacgcattttaaccccaagccctattgtgtacccacgcctacaaagaacgtacgcagcaatgtccgctgaagaaaccaaggtcccttctcaagaatccttgcccgtagaggagatcaaccccgccggcccgcaaccagcaatcgctaccgagggtgccgctgaaaaatcgaagaagggcgccaagaaggaggccaaacgacttgaaaagctcgccaaagctgccaccaagacttccgctgcacaatctcaggcccccaagaaggaaaaggctgagaagaaggagaagaaagccgaagttcctgctgaagcttgggttgacacgactcccaagggcgagaagaaagatgtctctggtaacttcccctctggctatgaccctattcaggtcgaggctgcccattatgattggtggaatgccaaggggtttttcaagcctcgttacggcgccgatggaaagcccttggacaagggaactttctgtatcactttccctcctcccaatgttaccggtaatttgcacattggtcatgctttgaccgtctccttgcaggacgctttaatccgttggaagagaatgcagggtcaaactgtcctttatcttcccggatatgaccacgcgggtattgctacacaagcagtcgttgagcaacgtcttatgaagactgagggtcactctagacatcattacggccgagaaaagttccttgagaaggtttgggaatggaaggaccaataccagggcaagattaccaaccagatgactcgtttaggtggttctttcgattgggacaaggtggcgttcaccatggacgacaacttgagtaccgccgttagagaagcattcgttcaaatgcacgaaaaaggtctgctttacagagctaaccgactggtgaactggtgtgtttaccttaacacctctctttccaacctcgaggtcgatcaacttcaccttactggccgaacccttctcaatgtcaagggctacgatgccaaagagcgtttcgaattcggtgtcatcacttctttcgcttaccccatcgagaactctgatgaacgtatcatcgtcgctactacccgtcctgaaactatgcttggtgataccgccattgctgtgcaccctgatgaccctcgctacactcatcttcacggcaagtttgcagttcatcctttcaacggcagaaggattcccatcgtcacagatgccattactgtcgacatggagttcggtaccggtgccgtcaagatcacccctgctcatgaccctaatgactttgagtgcggtatgaggaacaaccttgaattcatcagcctgatgaacgacgacggtacctacaacgagaacgcaggtccttacaagggaatgaaacgattccatgttcgaaacgccatcgtcaaggaccttaaggagaagggactgtacgtcgagcaaaaggacaacgagatgcaaatccccatctgctctcgatctggcgacgtcgtcgaacaaatcatcaagcctcaatggtggatcagctgcaaacctcttgccgaggatgctctcaagcgaacccgtgcgggcgaactcgagattaagccgaagacgtctgccggcgactgggtacgatggatggagaacatgcaggattggtgtatctcccgtcagctctggtggggtcacagatgtcctgcttggttgctcaaatttgagggcgagtctcccgacacttctgacgacaagaactggatcgttgcacgaactgaggaagaggctcaggaaaaggcgaaggcccgtgctaacggcaagaactttatcttggagcaagatgatgacgtgcttgacacctggttctcttccggtctctggcctttctccactatggggtggcccaacaagacacccgacatggagcatttctaccccaactccatcctcgaaactggttgggacattctcttcttctgggttgcgcgtatggtcttcttcggtaacacccttaccaacgtcatgcccttcaaggaagtctactgccaccccatggtccgagatgcctatggccgaaagatgtccaagtctttgggtaacgtcattgatcctctggacgtgatcactggccagaagctggagaagctgcacaacgacttgaggatgggcaaccttcccgagaaggaaatcttgaaggctgaggaaggccagaagaaattgtaccccaagggtattcctcaatgtggtaccgacgccttgagatttactttgtgtaactacacatctggtggtcgagatatcaacatggacattggtcgtgtggaaggttacaggaagttctgcaacaagctctggaacgcgaccaagttctgtctcttccgaatggaccttgtcgatttgcagggtgtcaggcagacaagtgctttcgtccccaatgcgtctcacttgcccactggcaaggaaggtcttgtcgaaaagtggcttttccacaagctcaacctcgccagcgccgctatttcggacgccctcgaaaaccgggacttctctgaagcttctactgtcgcctaccaatacttccttaacgatctctgtgacgtctatattgaggctaccaagcccatcttcgaggccaactctgatcctgctgccaagctctccgcccaaaacactctctatacatgtttggaagctggtctcaagttgttgcaccccttcatgccttatgtgactgaagacttgtggcagcgtttgcctaggagggaaggtgactcttgtgaaaccatcatgttggctcctttccccgagaagatcccagaacaagagttccccgcagaagttgctagctttgacctcgttgttgactgtatcaagtctgctcgttcggtcattggtctttacaatctccccaccaacggcaagactcccgaagacaagatcactgtgatcattcaggcccgtaacgccgagcaactcgagttgttgaagtctgtggagactgtgattgttggtttgacaaagggttgcggtaaggttgagtggattcaggaggacagcgagattcctcgaggctgtggtactgaagtcgttactaccgacatcagtgtacacattcctgtccagggcaaggtcgacgctgcttctgagattgataagctcgagaagaagtccattgtagtcgagggacaaaaggccaagctgcaaaaggtcattcaacaacccaattacgagaagactgtcaaggaagacgtgaggcagcagaacgacgagaagatggaaaagatcgaggttgaaatcgaagcgcttaggatggccattgaggttcaagggtcttttgtagataggttagagatcggaggagtgtga

SEQ ID NO: 2344 - DNA, 3567 bp, Cryptococcus neoformans
atggaattatttcagcgagagactcagaggggacttttgtcaatctacgcttcttctttgttatgggcatttaatccacgtcaccagaatttgatcccgttgcctccaccggggtacgtacatagcgccctgcaattccccacccttacactcacccttacacaggcattcacaaacacctccttcagagcagccgatagagcggccaggcgtaccgccgagaaaaaccaacagcgtctccatgtcccgctggtcaatcgtaaccctgaggaacgcaaggtcaccaatgaaaaaggcaaaggaatggacgaaggtgccttgccacctccgcccatcgtcgtcggcattgttggccctcctggtgtgggaaagacaactttactgcgatctcttgtcaggaggttcacgaagcacaatctctcccagccgcagggccctgtgactgttgtttctggcaagaccaggagaatcacttttatcgaatgtggcaatgatcttaacagcatgattgacttgggtaaagtggtcgacctggtgcttttgatgatcgatggtagttttggatttgaaatggcaagcggcttctttcgcccggcaatatttagctaacttgctattcaggaaacttttgaattcctcaacattcttcaatcccatgggtttccaaaagtcatcggagttctcactcatgtcgatcttatcaagaaagcctccacccttaaagacaccaaaaagcgcctcaagcatcgtttctggacggaaatctatcagggggccaagctcttctccctttcaggtgttatgaacgggcgttaccctgatgcggaaatcaaccttttgtcaaggttcatctctgttatgaaattccgccctcttgtcttccgaaaccaacatccctacctagtggctgacagaattcaagatctcacaccccgagaggctattcgtgagaacgccaagatagatcggacaatcactctctatggttatgttcgcggtccaaaccttcctccacgtaacgcgaagattcatatccccggtgccggtgaccttgaggtcaaagaggtcgagagattagccgatccttgtcctcttcctacgctcgagagcgaaagaagaaggaaaatgggcgagaaggcaaaattgattcatgccccaatgagcgatgttggcggcgtaatgtatgacaaggatgcagtgtacatcaacgtccccggtaacttcactaaaggaggagatactcctcagggcgagggtgaaaagatggttatggatcttcaagatgccgaaaaaacgtttgcggacaacattcaagcgtctgaaattaggttgtttggccattcatctgctcccttgcaagtcactgaggaacgcaaggatcgcgtccgccgcaaagccgaacctcgttctggtggtcccatgcttggcaaagcggatgaagatgagtttgatgagagtgaagacgacgagtttgacgatagaagcgatactgaggaaggaggtgtgttcaacggagagtcggaccaggacgacgaccaggatgaaagagatgtagcgtacgccgagtcagaatcggatcacgatgatcttgcctttgcgactggctttgagcaagaagggggccgaatcaatttcgatgatgaggatgatgacgatttcccttcggacgaagatgatgaggatgtacctggttggaagcacaacctagcttcccgtgcttcctccactttggccgatagactacgcaagaaacgcaaccttatgacacttatatacgacactcctctttctcccgaggaaattgtcaatggcaaaacacgtccttcttccgccgatgcttcatcctctttcgctgaactgcaaaatgagggtttgttccgaatcagtcacggagagaacaagggcgacgatggtgatcaagtaaaagaggaggtagacagggatcaattaaagaacaagtgggcggacgaggaaatgcttgactcgctcagggggctctttatctccggtcctgttgctggagagggtgtagatgaggatggggaggcatatgaggaggagggcgaggatttcgaggatctagagggaggaagtgatggccgaggcgatggcgaggatgatgtgccatacgttggtgtcaagccttctcaagtaagcgttgaggatgcgcgcgccgctgctttagcaaagaagaaggaggctctcaagatcaagttcgatgagcaatacgacgactctgacgatgaggcgtccaaaatggacttttatgaccaacaaaaggcggaaatggctcgccaaaagcagatcaatgaagaggagtttggtaaccttgatttggatgcccggacgcaaattgagggttatcgttctgggatgtacgtcaggttagagattgaagctgtgccgtatgagttgatcgagaactttgatcctcgattccccatcatcgttggcggtctcttggctgcagaagagagatttggtttcatcactgttcgtatcaagcgacacaggtggttcacgaaaacactcaagacgaatgatcccctcatcttttcccttggctggcgtcgattccaaactctcccgctctaccatctggacgaccattccatcagaaaccgatacctcaagtacactccggagcatatgcactgtttcgccacattctatggtcccgtctcagctcctaacacaggtttctgcgcattcaactctttgcaaggggatgcccccggtttccgggtatcggcaaccggtgtcgtcctcgatgttgatcgatccaccaagattgtcaagaaactcaagttgaccggtgcgccttacaagattttcaaaaacacggcgttcatcaaggacatgttcaacaccgggcttgaagtggccaaattcgagggggcaaacatcaagactgtctctggtatcagaggtcaggtgaagaaggccctaagtaagccggacggtgccttcagagcaacctttgaagacaaaatattgttgagggatatcgttttcctccgagcatggtactctatagaaccgaaaaagctttacaatcctgtgtgctctcttctactttccaacaaggaatcgtggcagggtatgcgtctcacgggtcagattcgtcgggaggaaggcctcaagacacccctcgatcccaattcagcctatcgacccattgagcgcaccacacgacgcttcaatcctctcaaggttccacgtaagcttgctgcttctttgcccttcgcatccaagacgccagaactctcaaagcaacgtaaacctacttacatgcaatctcgtgccgttgtgctgggagaggatgagaagaaggcggtgacgctgttgcagcagatccaaacgttgaagaaggataaggcagagagaaggaaagcgaagcaagatgagcgaaaaggagcatacaggaaaaaggttggtgagaaagatgagaaaagagaggaaaagattagggaagagaggagggaaagattcaagaaggagggattgaagagaaagagggaggaaatgagcgaaggaaaaggtcggggaaagaagagcagagcgtaa

SEQ ID NO: 2345 - DNA, 3786 bp, Cryptococcus neoformans
atggatgcaggtgaataccattcctttacatgcacaccagacgactatccgcttgcatcccagcccctcgacgatggcttcacttacgatcctgattacgactactctcagcagacggccccaaagggcgacgaggacgaagaaaagtacgatgttgacgaggatgagccgatcagccaggaggactactggactgttatcaattcgttctttgaggaaaaaggtcttgttcgtcaacagctcgaatctttcaatgagttcatcgaaaacaccatgcaagagatcgtcgacgatcattcgaggttaactttggatcaatttacacagtatacaggcgttgcaggtgacgaaacaagacgttacgaaatttcctttggccagatctatttggctcgggtcaatcatacggagatggatggtagaactaatatgttgttcccgcaagaagcgcgtctcagaaacttgacttactcggcgcctctgtatgttgacatcaaaaagaggactttgacagcatccggcgttgatgatcctgtggaagctgattggcagcctgccgtgggcgatgatggtgaggtggaaggtgctgaggaagaaaaaacatcaatcggcaaagtgcctgtcatggtccgctccaacttttgcctcctgcatggtcttcctgacgaccagtgtcatgagattggagaatgcccttacgatcaaggcggttattttatcatatctggttccgagaaggtcttgattgctcaggagaggatggccacaaaccatgttttcgtgttcctaaaggcagcccctgcgagattcacctattttgcggaaatcaactctcaaaaagaaaaaggtggacgggtggcgaatcatacagaagtcagaatgtacgcaagggcatccggaacaactggtggcgtcattcgcgtatctcttccctacaccaaagttgacatccccctcgttgtggtcttccgagctttgggtattgttcccgatagagacgttctcagccacatctgctttggcgccgaagatgaagcccttcttgaaatgcttcaacccagcattgaagaatcttttgctgtccaagaccgtgacactgccctcgacttcattggtcgccgtggtcaacatgaaaaggcccctcgagctcagcgacagcgtgcggcctttgatatccttcataaagagtttttgccccacgtgtctaccgccgaaggatttgagtcgaaaaaagcgtacttcctgggctacatggtgcataggttatgtatggcggcattaggaagaaaggagttggatgacagagatcattttgggaacaaaaggttggatcttgctggaccgctgatggcggagatgttcaatgttgtgtttgggaaattgagggaagacatgtacagatatctgaagaaggcaactaacttccggcagtgcgtcgaacaaaacaaggagtttgcccttaacatggctattcgccctaacacgattaccgacggtctcaaatacgctcttgctacaggcaactggggcaagcgagacaatactcgagcaggtgtatcacaagttctcaacagatatacttttgcttctaccctctcccatttgcggcgtactaatacgcccattggacgtgattcaaaagctgctaagccacgtcaacttcacaacacccattggggtatggtttgtccggctgagacgcctgaaggttccgcatgtggtctcgtcaaaaatctcgcgctcatgtcttacatttcggttgggtcctattccgctccagtcatggaatttttggaagaatggggtctggaagatctttcagaatatcaagatgcgcccactgcgacgaaagtgtttgtcaatggtgtctggatgggtattcatcgagacgcacccaccttgcacaacaacctgttgcaaatgcgtcgtggtggccagctcaagtacgaagttagtatcgtccgagacatccgagagagagaactgcgcttgtacaccgatgcgggacgtgtctgtagaccgcttttcattgtcgaccagccaacgcagacattgcgcctcaaacgtgatcacattgacaggatcgaccagatggcagacgagggtcttttgtcaggagcgtgggacaagctactgtccgagggtattgtcgaatatgtggacgcagctgaggaggagaccatattaatagccatgacgcctgaagatcttgtgaacgctcgtactgcacacagcaaacatgagcttgtaagggatagagcagcccacaatcttgaatcctttgatcctgcggctcgtatcaagagtacggtgtggagtcagcagtatacccatatggagatccacccgagtatgattcttggtgtctgtgctagtatcgttcctttccccgaccacaaccaatctcctcgaaatacctatcagtctgcgatgggtaaacaagccatgggtgtctgcctcaccaactaccagcttcgtatggacactatggtcaatgtactctactatcctcaaaaaccgcttgccactactcgttcaatggagtatctcaagttctctgagcttcctgctggtcaaaacgcaattgttgccatcatgtgttattctggctacaatcaagaagactctgtcatcatgaaccaatcttcaattgaccgcggtcttttccgatcgttgtacttccgttcctacaccgatactgagaagatgaagggtatggttaaggcggagacgattgagaaaccggacagaaatgagacgttaagaatgaagcatgggaccggcgatcggtacgccaagcttgatgtcgatggtcttgttgctccgggaacaaacgtcaacggtgatgacattctcatcggcaagactgcacctttgcctgaagacagtgaggagcttggtcaaaggacccaacttcacacaaagcgagacatatccacaccgctgaagagcacggagcagggcgttgttgaccaagttatgctgagtaccaacggagaaggtaacatgtttgtcaaaattcgtgtgaggtccaccagagtgccccaaataggtgataaatttgcctcacgacatggtcagaaaggtactatcggtatcacctatcgacaagaagacatgcctttcactgcggagggtcttgttcccgatatcatcatcaatccgcatgctattccgtcacgaatgactatcggccatttagtcgaatgtctcttatcgaaagtgtcaactctgactggagctgaaggagacgctacgcccttcacagagctgactgtcgaagctgtttccaaagttctgcgagcaaaggggtaccagtctcgcggttttgaggtactttaccatggtcatacgggaagaaaacttcaggcccaggtctactttggccctacgtactatcagagactaaagcatatggtagatgacaagatccacgctcgtgcgcggggaccgttgcagattttaaccaggcagccagtagaaggtagaagtagagatggtggtttacgatttggtgaaatggagagagactgcatgatttcgcatggtatcgctggatttttaaaagaaaggatgtacgattcgtccgatgcgttcagaatacatgtgtgcgacgtctgcggtctcatggccgttgccaatctcaaaaagcaagagttctactgctctgtttgcaggaacagtacccagatctcccaggtgtacatcccgtatgctgccaaactgttgttccaagagttacaagccatgaacattgcatgtcgaatgtacggggaaacagattga

SEQ ID NO: 2346 - DNA, 3570 bp, Cryptococcus neoformans
atgtcagatataaattacttacgggggaccaacaaactcaatggtgcggccggtgctaagcgcaaagttatcaactcaacgtctgtcaagaacgtaatcaagcgggagccctcacctgtccttgccatcgctccagaagccgcgccagaaatagaagaaatacaatctgtcaagcctcgtaccaatggcaaacccaaagtcaaagcaaacgccaaacattggtccgccattcaagaatcccttgcggcatcttcctccaatcaaacatctgagcttgataccgtcagcgcccctgttggttcaacaaagcccgagaatgtaatggagaaggatggttcattgagattcttctggcttgaccacttggagcaagatggaatcgttcatctcgtgggtaaagtgcttgacaagcaaacgggaaagtatgtcagcgcttgtgtctcggtgacgggaattgagcggtgtctctatgtcaagcctcgtgccaaacgatttgctcgtggatttgaaaccgatctcgacgtgtcggaagaagacgttttagacgagttcgaaaacttccgttctcaagtaggtatcgatcagtaccgttgcaagtttgtcaagcgcaaatatgcatttgaggacaaggatgtggaaaaaggagaaagcgattggttagaggttgtctatggttttgaccgtgagtcttgcgttcgggtttaccgactggtgctgaacaaaatagaacctgctatccctatggactcgaatggtgctactttcagtcatatctttggcacaaacaccactcctttcgagttgttcgtcgttaatcagaagattatgggtccttcatggcttgaaatcaaagatatcgctcctgttgagaaggcttcatcatggtgcaagcttgagttctatgtgaccgatccctcagaagtcaacccgttctccgaaaccgacccttccgcacctaaagacacgcccccttttactatcatgtccatttcccttcgcaccatcgttaaccaccgcgagaacaagaccgagattctgtccgtctccatgagaacatgggataattataacattgaagatcccacccctcctgatcaactccgatcgcaactcaacaccatcgtccgacctatcgagcgatttcccagcggcctcgaatccaaagcgcgatcagaaaaatcccaattccaaacggtgaaaacggagcgagcactactcaactctatgttgggtatgatctaccgccacgaccccgatgtcattgtggggcataatttcttgggaggcgggtttgaagcattactgtataggatgaaagagctcaaagcagatcattggtcgagaataggaaggttcaggagaaagggaatgaatgttagtaagatgggaagtaatgtaaagctcatggccggtcgtttggttgcggatttatcaagtgatgccgccaagggtatgatttcatcaacgacctggtctctcaccgagatgaccaacacccacctcaaggtccaacgcgaagacattgacccagaagacactgccggttattttgaccatactgccacttcacctgatagattgatcaagtttatcagactgtgtgaagtcgatgcctttttccagatggcgattgctgctagagtacaaatcttgccattgaccaagcagctgaccaacttggctggtaattcatggaatttgaccctcaacggtggtcgtgcggtccgtaatgagtttatccttctccatgagttccaccgacttgagtacgtctgtccagataaagcgccttacaaggcaaagaccagaccgactggggatgatgatgaggttacggaagacattatagcgatgaaaggccagagaggaaaagccaagtatgctggtggtttggtctttgaacctaaaagaggattgtgggacaagtacatcatcatcatggacttcaactcgctttatccaagtattattcaagaatacaacatcgattttacaacagttgagagggacgatgatgagaataagatcccagatgttccttcaagcgatgtacctcaaggtgttctaccccgtattattgcgactctcgtcaaccggcgtcgtcaagtcaaggcccttatgaaggataagtccgcaacccccgctaagctcttacaatatgatatcaagcagcaagctctcaaactcactgccaactcgatgtacggttgtcttggttttgctggttctcgattctcctcgagaccactggccgcattgacaaccttcaagggtcgagagattttaacgcacacccgggagttggctgagtctctgcagctcgacgtcgtctatggtgataccgactctgtctttgtcaactccaatgtcacaacctaccccgaagctctcaagattgccaatgagttcaagaagcttgtcaatgaacgatataagctcctcgaaattgacttggacgccgtatttgaacgaatcttgcttctgaacaagaagaagtatgctgctgtcaagatcgatgaagctggggaaagaagtactgaagttaagggtttggatatgaagagaagagagttcagtaaggtttcaaaggatgcaagcgctgcgatactgaaggagatcttgagtggtgaagctacagaagtcgtggttgagaagattcatgaactcctcaccaagctaggagaggctgtacgcaacaacgagattcctatcgatgactacatcatcttcaagcgtcttggtaaaaaccccgaagattacccagacaagaaatctcaaccccacgttcaagtcgctcttcgtatgaaacaaaaaggtgccgctgttcgagctcatgatgttattccctatatcatctgcttggacgaacatggaaagggcggaaagacggcgtctgcggatcgggctttccatcctgatgatttgagaaggcaagggtcggaactgagaattgatcacgagtactaccttgatcagcaaattttacatcccatattgaggttatgtgagactatagaaggcactgagcgagcacgattagcagaatgtcttggtcttgatcctttgagatatacctcgacaggcacagccgaagctcaggaaaaagagttcttcacttttgattcccagatttcggacaacgatcgtttccgcgatgctgatcccctcaatctcgtctgtccatcttgtagcgaggaaacagtatttgtaggcttgcagactgacgcttctgaagtgtccaatatccgagcaaacggtatttgttgcaattcttgtcagttagtcatccaccccgcctctttacaactccagctcgaaaaccaaattcgatcccatatctcaaaatactatcttggatggatgacttgcgatggcgaaggttgtggattgagaacgagggccatgagtgtatatggaaagagatgtttagggtttatcaaggagaattgctggggtacaatgaggcttgagtacacggatgcaaaactgtacaatcagctcttgtattaccgtagtctgtttgacgttgagaagcctaaatgctgtgcgaggctcgcaacgtttcggtga

SEQ ID NO: 2347 - DNA, 3537 bp, Cryptococcus neoformans
atgtggatagaaagatcgccgacggatagaagaggatgctggcgggagaaaatgagaaaaggggcgtggtggaataaagaaatggttccgctgttgttactacgcgtgtcttcatcagcgctgagcactgagcatctgccgcccagccatacgatttcctcaccgctccttccttccttcctgccaccttcccacagccaccatggaggtacgtcgccccgccacccgccacccttccttccttccttcctccgcagaaagctgactcaatcacaaccacaggcaatcctcgacttctcaaacgacctcgacgtcggactcatcgaccaggtagtacaggcgttctacaccgggtcaggcgaaacacaacaaacagcacagcgggtcctcacccagttccaggagaatccagattcatggcagcgtgtcccggccatcttggaaacttctcaaaatcttaacacaaagtatatcgctcttcaggtcttggagaagcttgtccaggtacgatggaaagccttgcccgcggaccaacagacgggtatccgaaacttcattgtccaggcgacggtcgagatatcgtcagatgaaagtaggatgaggcgagaaaaggggtatctgaacaagttgaatcttgtccttgtccagattcttaaacaagcatggcccaaggactggcctcagtttattcccgaaatctgcgaatcatcccgcactaatctctctctctgcgaaaacaacatgatcattcttcgtctcttgtctgaagaagtgtttgacttttctgccgagcaaatgacgcaagcaaagacaaaagccttgaagcagactatgtgcgcggaattcggagagattttcaacttgtgtaatgaggttttggagaaggccaacaagccgagcttgatcagggcgaccttggagacattgttgaggttcttgaactggattcctctaggttatatttttgagacccaaattattgatattcttgtctccagattcctcgaggttcccgatttcagaaatgttaccctcaaatgtctttccgagattggtgcgctcaacgttggtcccgagtacaacagcaaatttgtcactcttttccaagtcgtcatgaccagcatcaaccgaatggttcctccccacaccgacatggccggcgcctatgcctcatccgatgacgaggaccagcagctcattaagaacctcgctcttttcctcaccaacttcctccacccccatcttcgtctcattgaaacaccagaaaacaccgaactcctcatcaacgcccacctctatctcgttaaaatctcaaccgttgacgaccgcgaagtcttcaagatctgtttagaatactggctcaaactcgtcaccgaactttacgaggagattcagtcattaccgctcaacgacatcaaccctctcatgaaccttaacctcggcggtatcggtggtggattgaatggcgctcagggaatgggtcttaacggcatgcctctccggaagaacgtatacagtgacattctttctaatttgcgtcttgtcatgatcgagaagatggtcaagcctgaggaagtgctgatcgtcgagaatgaagaaggagaaatcgtgcgagagtttatgaaggagagcgacacaattgtgttgtataagagtatgagggaagtgttggtctacctgacacatctggatgtggtggataccgagactatcatgacagacaagttggccaagcagattgacggttccgagtggtcatggaataaccttaacactctttgttgggctatcggttccatctctggtgctatgaacgaggagaccgaaaagcgcttccttgtgactgtcatcaaggatcttcttggtcttactgagatgaagcgaggcaaggacaacaaggccgtctgtgcttccgacattatgtacattgtcggtcagtatccccgattcctcaaagcccattggaaattcttgaagactgtcgtcaacaagttgttcgagttcatgcacgagactcacgaaggtgtgcaagacatggcgtgtgataccttcatcaagatcgcccaaaagtgtcgacgtcattttgtgatgcagcaagccggcgagcaagaacccttcattgacgaaatcctccgtaccctccaccgaatcaccgtcgacctttcacctcagcaggttcacacgttctacgaggctgtaggttacatgattgcctctcaaccgaacaagcctacccaggagaggttaattgaaaagctcatggagttgcccaacaatgcttgggacaaccttatgcagcaggccgcctctagcgtcgacgtgcttggtaaccccgaaaacgtcaagattctcgccaacattctcaagaccaatgtttcagcttgttcctccattggtcccttcttccttcctcaacttggtaggatctggcttgacatgctcgggttgtacaggactgtcagcgggatcatcagcgacgacattgcggcgatgggcgaggttgctaccaagacccccaaggtccgtgccctccgaacgatcaagaaggagattctcaagcttgttgagacctatgtaaagaaggctgaggatattgagggtgtctacaacaaccttatccctggattgttcgatgctattttgggtgactataacaggaacgtgcccgcggcaagggacgctgaagtattgaacgtcactgctaccattgtctccaaacttggccctatcctcacccctcagattgcccctatccttgacgctgtgttcgaacccactcttggcatgatcaaccaggactttgccgagtaccctgagcaccgagttggtttcttcaagcttttgagggcgatcaacttgacttgtttccaagctcttttggagattcctcctggacagttcaagttgatcgtcgactctatcgtctgggctttcaagcacaccatgagggatattgccgacactggtttgaacatcgcctatgagatcgtcaacaattttgccgcttccacccccgaaatcgccaaccaattctatcagcaatacctcctttccctcgttggtgatgtcttctttgtcctcactgacgccgaccacaaatccggtctcaagatgcaaggtatgcttcttgcccagctcatcgctctcgtggagaccggagctgtccaggctcccttgttcgatcccgcccaggttaccgaccctggcatgaacaatgtcatcttcttgaagggatacatctccgacttgttgtccaatgcctttggccacgtccaacccgctcaaattgcctcgttcgtcaacctgatgttcgagactgcggccgaccacaacaaattcaagctcaccatccgagacttcctcatctctctcaaggaattctctggcgataacgccgagctttacattgatgaacgtgaggccgaggccgagaggagagagagggaggagagggaagcagccagccgagtgccgggtatgttgaagcctgctcagatcgaagacgatcgagttataggggaagggaaggggggttga

SEQ ID NO: 2348 - DNA, 3612 bp, Cryptococcus neoformans
  misc_feature (2632)..(2632): n=g, a, t or c
atgcgcatgacaggtttcaaatcttacagagatcaagtggctgtagatccattctcacctggacacaatgttgtggttggtcgaaatggtagtggaaaatcaaactttttctccgctatacgatttgtactgtctgatcaatataccaaattgagtcgagaagaaaggcagcgtttgctacatgaaggaacgagtacaagtacgacactttctgcttatgtcgagattgtctttgacaattctgatgggcgcttcccgactggtcgacaggaacttgtgcttcgccgaacaattggtcttaagaaagatgaatattccctggatagaaagagcgctagcaagtcggaagtggatcagctattggaaagtgccggcttctcaaaggctaatccctattatattgttcctcaaggaaggatcacgcatctgacgaatatgaatgatcgagaacggctcagactgttaaaggatgtggcagggacagaggtctacgagcagaagagggctgagtcaaccagaattatggaagagaccgacgggaagcgagacaagattcttgagcttctcactaccatcgaggaccgactacgagaactggaagaagaaaaggaggaactcaaagagtaccaagagaaagaccgagaaaggcgctgcttggagtacgcgttgcatcagagagaactggaagatgttaccaatgctctggatgagattgaggcagaaaggagacaagacatacacaatagtaacgagaagagaaaggaattcaatgatcgagaggacgaaatccaggaagctcttactgcggctaagcattctttgtcgactacacaagcttcgcttaggcagtatgaaaccgagcgggcggatttagtgcgtaacaaaacagaactggaatgcgttatcgccgatttcgagactgctggtcaagtgggagagcataggagggcagagttagctgaagagctggaagtgatgcaacagaaggtagatgaggcaaccgcgagattggaggacctggtgcaagaagctgaacagaggattggggaggaaaaagccgcaagagaagcgcttgaacctacacaatccaaactctctgtattgttcgccaaacagggacgagcgcagcaattcgcaacccaggctgcccgagataagtatctcaaagacgaaattaaagctctcaaagagcatgagaagaatcaaggaaaacgggtggagatcctgcaaaaggaggtggcgggtgcgaaggaacaattggcacagctttcggccaagtctgaacagcaggtccagggcgagaatgataggagagagaacttgaaaaaaatgaacgaggagattgcacaactgcaaaggaacattgcgggtatgcatgagcagaaaaaggagctgtggcgggaagagggcaagttggctcagactgaggtcaatgcgaagagtgaaatggaggccgccgagcgttcactgatgggcatgatgaacaaagacacgagcaatggtttaagggctgttcgacaaattgcgaagcgactgaaccttgatggcgtctttggacctctctacgatctttttgaagtttctgataaatacaaaaccgccgtggaggtgacctctggtaacagcttgttccacgttgttgtggataatgatgagactgccagcaagctacttgacgttatgaatcgcgaaaagagtggtcgagtgacttttatgcccctcaatcgtcttaaaagtcatagcgtcaactatcccaaagctaacgatgctataccaatgattcaaaagttacaatttgacagggagtatgtcatggcatttgagcaagtatttggtcgaaccatcatttgtgaagatcttcaaaccgctgcccattatacccgatcccatggtctgaacgccgttaccattgaaggtgatcgagttgatcgcaaaggtgctttgactggcggttatcacgatgttcgacgttcacgcctcgatgctgtcaaagccgcaaagaaatggcgaaccgcatacgaaacagaccacgcgcgtcatgcagaggtgaaagctgcgctgcaaaatatcgaacaggaggtcacaaggaccatgggtcaagtacaagcacttgaggcgaagaaaaggcacatgtcagatgggggagagggctcattcaagctacttacgttaccggcaagggatctagaccaggcaagagatagggtagcgagattagagtttagtctggaagaagctgagggagcatcgagggatgctaaagccaagagagcaagctatgaggaggagctcaggactcctatgaggcaaaacttgacggatgaagagttgagggagttggaaaccttgacacagaatgcggaagcccagaaaaagttgctgtttgaggcaacccagaacagagcaaaggcagtaggagagcgtaatcggttagaaatcgagctttcggagaatcttcggcgaaagagacaggagctacgaggcaaacttgatcgattggaaggtgaagcgggtaatggggaattgcagtctggggaggtggaattgcgaaggagcgagctcaggaatctcgtgcgcgatattgagcagcttgaggaaaaagtttctgagtctgagggccgtgttggagaantaaactctgaaatctccaaaatctcggagaatctcgagcgtgtacaaactcagcagatggaaaatactcgagccataatgcgtgttcaaaaaaatgctgagcgttatcttaccaaacgacagaccctcatcaacaggaaagaagagtgcaataatgcgattcgggatttgggtgttttaccggaggaagcattctcaaagtatattgaccaaaggtcagataagattatcaagagacttcacaaggtgaacgacggtctcaagaaatttgcccatgtcaataaaaaggcgtttgagcaatatagcaatttcacgaagcagcgcgacgaattaatggatcgtcgagatgagctcgatcaatcggctatcaaaattgaagaacttattgagactcttgatcaacgtaaggatgaggcaattgaaagaacattcaagcaagtgtccaagtactttgaagaggtatttgagacattggtcccattagggaaaggagagttaataatgcagaagaagacggatggtttcattgtgagtattgaagaagaatcagaagagtctttggagcaaggaagagagaaaagtgacattgacagctatactggcgtctccattcgcgtttccttcaactcgaagcatgatgagggtcagcgcatccagcagctgtctggaggtcaaaagtctcttgtggctctcgccctggttttcgccatccaaaagtgcgatcctgcacctttctacctatttgacgaaatcgatgcaaacttggatgcgcaatatcgtaccgcagtagcaaccatgatacatacgctttccaccagcgcacagtttatcacgactacgttcaagtctgaaatgcttgctcaggctgataaattttacggtgtcttcttcgataaacaaaaggtcagtacgataaaggtgattgaaaaggaggaggccagcgactttgtagaaaccgccgcgcaagtcggacagttgtga

SEQ ID NO: 2349 - DNA, 3756 bp, Cryptococcus neoformans
  misc_feature (803)..(803): n=g, a, t or c
atgtggcactctgcgcgctcaccctccgctcaccacgtcacgtccgacaacagagacccattacccacaacgtcccataactctatactctctaaactctccccaaaatccaaatccccaagagttaagggcatcgccttccacccaaagcagcccttgcttgcggcgtccttgcataatggaacaatccaactatggaactaccagatgggcactttagtggaccgatatgatgagcatgatggtcctgttcgaggtatctgttttcaccccactcaacccatcttctgttccggtggtgatgattacaagatcaaggtgtggaactacaaacaaagaaaatgcctttttactctgactggccatctcgactatgtccgaactgttttcttccatcgggaatacccctggattatctctgcatccgacgaccagactatcagaatctggaactggcaatcaaggacttgtattgccatcctcaccggccacaaccactacatcatgtgcgcacaatttcacccgtgggacgacctcgtcatctccgcctctatggaccttaccgttcgtgtatgggacatctccggtctccgcaagaaaaaccaagcttctcaagctcccatgtctgccgaagaacaaatcgctcgtgccagccagggtcaagctgatttgtttggcaacaccgatgctgtagtcaagtatgtcctcgaaggtcacgaccgaggtgtcaactgggcttccttccatcctacccttcccctcatcgtctcttgtggtgatgaccgccaagtcaagctttggcntatgtccgaaaccaaagcctgggaagtggacagctgcagaggtcacttcaacaacgtctccatgactatgttccaccccaagcacgagttgattttgagtgcgagtgaggacaagactatcagggcttgggacatgaccaagagaacagccgtccagacctttaggcgggaacacgataggttttgggtgttaactgcccaccctgagctcaacttgtttgctgctggccacgacaacggtctgatagtctttaagcttgaacgagagcgtccccccttctccttgtctggtaatcaacttttctacatcaaagacaaggttgtacgcatggccgacatatctagcggtaacagccaaggcatctgctccgtccgcaagtttggctcccaatacattcctcctcgaaccctcagctacaaccccgctgaacgagctgttatcgtgacatctccttctgataacggtatctatgaacttatcactctgcccaagtctactgcgcctactgctcaggatggcagggatgtgccttcagacggtaagaagggtacagggttctgtgcgctcttcgtggcaaggaacaggttcgcagtcctcgacaagggtgcccagaacatcgaaattaaggatctttccaactctatcaccaagactatcaagtgccctgtccagacgtccgagatattttacggcggtacggcgtccattttgctcgccactccttcttctgtagtccttttcgacattcagcagcaaaagattgttgccgaaatcaatacccctcccgttaagtatgttgtatggagcaccgatggtaacatggtcgccctcttgagcaagcacacaatcaccattgccaacaagtctctttctcaaagcgctctcatccacgagacgattcgaatcaagtctgccgcttgggacgacagcggtgtgctcatatacaccactttgaaccacatcaagtacgctctttctcaaggtgataacgggatcatcaaaactcttgaacagcctgtgtacctcactcgagtcaagggttctgtcgttcactgtctcgaccgttccgccaagccgcaggctattaacattgaccctgctgagtaccgattcaagcttgctctcaaccgcaagaactatgatgaagtcttgcatatcattcgaaatagcaatcttgttggtcagagtatcattggttatcttcagaagaagggataccccgagatcgctctccactttgtgcaagatgagcagactaggttcgatcttgctattgagtgtggtaacttggcggttgcgttggagatggctagggctgttgacaggcatgacgtttgggagaggttgggtgccgctgcgttgcagcaaggtaatcatcaaattgtcgagaccgcgtatcagaagactagaaacttcgacaagctctccttcctctatttgatcaccggcaacacccagaagcttaatatgatgcaagtcatcgctggcaaacgaggcgacaatatgtctaggttccaaaactctttgtacctcggtgacgttcgatctcgtgtcgttgtgcttcgcgaaactggccagtaccccctcgcttactacactgccaaaaccaacggccttgacgaccttgccttggagattcttgatgaagctggcttgaccgaggatgacctgcctcctccccctcagaactctggtcactcttccctcgccccccctcccatcatcttctctcaatccgactccaactggcctctcaaggaccttggtgagagcttctttgaccgagcacttgctaacggtggtgtcgacgctttgatcggcggtgaagaaagtggagaacaactggatgcttgggcggcggatgttcctgttgaggaagacgaaggagaggagcaagctgctgatgaggatgaaggatgggatcttgacgccaacgtcgaagtgcctgatgtcgaagaggaagagtttgacggtgaagacgttttggctgaggcggatttgagtcagggtgtcgagcctggtgcgagcgaggatgagatttggcaaaataactctgcattggctatcgaccatgcagccgccggtgctttcgaatctgccatgcttttgctcaataagcaagtcggcgttgtcaactttgaacctcttaagcctttgttcctccaagcctaccaacactctcacgtttacgtccctgccaacgcttccctccctcctcttcgactcaatgttcgccgaaatcccgaaaccgccgaacttcgcgacgccctgcctgccgttcctctcaactatagcgagctgaaggcaaccgaggtggccgatgccaacaagtactttgctaggggtaaatttgttgaggcgcttgcaacgttcaaaaatgtattgtcaaaacttttgttggtagttgttgaatccgaggaagatgctgaggagataaaggagcttgtcacctcttgtcgagaatacatcattggcctcactatggaagttgaacgacgacgaattgccgtccaagatcccgaaaacgtcgttcgaaaccttgagctcgccgcttactttactcactgcgaacttgctactcaacatatccaattagcattgcgtagtgcgatgaaggtgttctctgatgcgggtaacaccgccaccgctgctgtgtttgctaggaggttgatcgagacacagcctggtcaggctgtcattactcaagtaggtctagcattggttttgaagtgccagcgtaaccctcgagacgttcacgaaatcgcctacgaccaaaacgcatcattcaatatttgcgctgctacccatactcccatttacgagggctcaccatatgaagaaagcgcgtactctggcgccaagtacttgccagagtacaagggtacagtctgcgtggttgatggattgagccaagtcggtttggctggaagcgggttgagaaacatggtttaa

SEQ ID NO: 2350 - DNA, 3558 bp, Cryptococcus neoformans
atgagggtcgaagagctcattttggacgaagactcatggcctgtaggcttcaagtcgtatcccgtcagaacaaccatatctggatttgatgaatctttcaatgccattaccggtcttaacggttcgggaaaatccaatatcctcgatgcgatatgtttcgtacttggtattacgaatatgcagtcggttcgagcgaacaacttgatggaccttatctataaacggggccaagcaggtgttacaaaagcatctgtcaccatcgttttcaacaatgaggacagatcgaaatcgccagttggttttgaaaatacgcctcaaatcacagtcaccagacaaatcgcggtcggcaatgtctccaaatatctcctcaacgggcataaatccactctccaagctctccaaaacctcttccaatccgttcagctcaacatcaataaccccaatttcctcatcatgcaaggtaaaatcaccaaagtgctcaacatgaagccagcagagattttgggtatggtagaggaagcagcgggaacaaggatgttcgaggagaggaaggacaaggccatgaaaacgatgactaaaaaagacaagaaggttgaggaaattgaaagcctgctccgagaagaaatagatcccaaacttgagaagcttcgagctgagaaacgatcgtatctagaatatcaaaaagccacctctgagcttgaacgtctcactcgtctcgtgaaggcgtacgaatgggtcgctgctgttgaaaaggctgaaaaggccacagagactgttaagaaaaagaggaaggacatcgagactgctaaaggcgacataatgagaggaggaaaagagtgtcatggaatggaaaaggagttagaggaaatacgtaaaaagaaagaaaaggaacaagccaaaggagggaagatccagggtttgactgaagcggtcaacaatttggaacgcgagctggtcaagatcaaaactcagatcgagatcaccgaaagcactctgaaagatgatgccaagagactttccaaaacgctcgaagataggcgatctgagacttccaaagagagctccgcctttgccgaattgaaagatgcatacgacgccggccaagcggagctttctaaactcgaagaacttcttcagtcacttttgacgggtctctcgtctaatcaaaacgatgaagagaacgcgggcggctacctcggtcaattggcagaagctaaagcccgcctggcagcggctgggacagaagccgagcaggccaaagtcaagattggtctagcggagaaggagttgaaagagaaggaaccgagagctaaaaaggctgagaaggatggagaggggctggtcaaggagcttgcggctaagagagcacaaatggagaagctgagaaagcaggtcgagagtgctggatgggatgaacagcaggaacgcgagatgttggaatctcaagccgagcatcaatcaaagatgaccgaactcatggacaaacgcgacatgcttaaatctcgtcttgcatcaattgacttcacttactctgatcctgaagccaattttgaccgttccaaagttaagggtcttgtcgccaacttggtcgaccttgacgaagaaaacttcagcaactctacggccttggagatctgcgcgggaggaaagctttataacgtggtcgtacacgacgaaaaagtcggctccaagctgcttaaaaatggtaaccttcggaagagggtgacgatcatccctttgaacaaaattgatgctaccaagattgcagctgagaaacttgccgctgctcatcgcgtcgctcccggcaaagtcaatcttgctcttgacctcgttggctacccagaggacgtctctgccgcaatggcctacgtcttcggtcgcacgtttatctgtgctgacaagcgtacagccgaagctatcactttcaacaaatcaatcgcggtaaagtctgtcactgttgaaggtgatgtatatgatccttcaggtacactttctggagggtcagcaccgagcagcggaggtgtattggtgaaggtgcaggagttgaaacaaattgagagggagatcgcaaagcacagatctgcagtagaagaaatcagaagcaagttgcaaagcgctaaaaaagttattgaccaatggaagaaggacaaaaagaatctggagctaagtgagcacgaagtgaggttgctggaggagcagataaagggcagtaatgctaccaagattattgctgaggtggaagcggccagaacatcccttgccgaccttaagaatatcgtcaaccaagctaaggaaaagcagaagcaagcttcagcggattgcaagcgtctcgagaaggagatggccgatttcaagaacaacaaagattccaagttgaatgaaatcaaggcgaatatcactagtaaaaagaacgagcttggaaagaagacattgcaggtcaagacgcgccagaaggcgatccaaaccgcggagcttgagcttcgtaagttgacttcctcttttttcgttctgctatccgagcatttaaatctgatatctttgcagagcaactggaaagtgatctcgaaagtgctaaggctgaggtcgaggaagccactgctgctcaagcgaagacaaaggctgaacacagctgccgaaacgaagctcaggagcgaagaagctgtccttgtcgcttttgacaacgagcttgccgacttggaacgtgacctcaaagcaaagaaacaggatatatcggatgctgagctctccctcaagaagcttgagcatgatctagggcttgttgaaaaggagaaagcaagtttagtggatcataaggtgaatttggaaaatcggttccagtggatcttggacgagcatcagttctttggtaaaatcggtactccgtatgatttccgaagtgtagatcttcaacaagcgagggatcagtgtcgagagcttgagtctcaggctaatggaatgggtaagaaaatcaaccctaaggttatgaacatgatcgatagtgtcgagaagaaggagcaagctctgaagaagatgatggctactgttctcaaggataagtccatgattcaagacacaatagaggagctcgaccggtacaaacgcgacgcgctaacaaagacttgggaaaaggttaatggtgactttggtctgatcttcgccgaacttcttccgggcaactttgccaaactccaacctcctgagggacaagacttaacccaaggccttgaggtcaaggtccggttgggtagcgtgtggaaggcgagcttgactgaactgagtggtggtcaaagatcacttatcgcgctctctctcatcatgtcccttcttcaattcaaacccgccccgatgtacattcttgacgaaattgacgccgcacttgacttgcaacacactcagcacattggtcaactcttccgcaacagattcaaaggcagccagtttattgtcgtttctctcaaagaaggactattcacgaacgcaaatgtcttgttccgagcgaggtttcgggacggtacaagtattgtcgaggtcttgctttcgttgtccgccagtcaatga

SEQ ID NO: 2351 - DNA, 3639 bp, Cryptococcus neoformans
atggcagaattcacactgcaagaacacctcctcgccctctcagatccaccgctgtaccaaatttccgcagaactcgacatcccttctctccgaacatcctccatcgattcctccctttcctccgccattgaagaaatcgcaggtgatccggaatccatcgtgaactcctccccatcgacgttcgacgtcttccgctccatcctcaagcatgcagaccaaccaaacgttgattctggcatactcaccaaattgctggatgtgattgtctcagggctgagttatcactcgagcacggtgatggcgattgtcaatggacaagggtttggtgctgaagccgatatggatgcgccaatggtacataagcagccgcttgaaatgtgggcgtttctgctgcagtggtttgtcaatgccgcagagcgcggggcgggaaagacgaacgatgaaccgagacaggcaatgactgggagaggtaaaaagaagactaccaaaaccgcaggtggagctgggatatcaacatcattcgtattttcagatcacctccccctagtgctcggtacgatgcacaaaactctccgaataccaacttcacgattatggcgtacctcttccgaaagagaagccttcatctcgtgctttgtcaaacccgcataccaactcgccgagacagaggcatacctcaaaatttccgagatccgcctgggaatattcaaagtcatctgtctcgctgtcaaattccatcaacatgcttttggggcccaaacatcgattatgcagaatttgacgtatttcgaacatctctcggaaccgatggcggagctgctggcgattttggaaaaagaatttgatttttcgcagttgggagaagaagttctcagggatgtagcgggaaagagctttgcgcataatgatgcgaaaggtccgaggagtttttcgaggtttctcgttaggctgacagagttgagtccaaggatggtgcagaagcagatgccattgctgctcgcacatctcgatagcgacgcgcaccctatgcgaatggctattgtagagatcatcggtatcctcatcaaagacatttcatcatctgatgaaggtgacgaagagcaaaagacgaagcagatccagaggttctttgagttgttgatggagagatttttggatctgaactcttgggtgagatgtaaagtcctgacaacattgatcaagctctgcgacctacccgccaaatttcctaaacagcgtcatcaaattaccgaacttaccattcgcacacttgaagataagacatcgtctgctcgtcgatatgctatccaactgctgtgtaaactactggagactcatccattcggtgcacttcatggcgggacgttgaatttgcaagagtggcaagagaggtacgaaaaggtggcagaggagttgaaaaaggtggatgcgcaagaattggaaatggcgaaacgggaagtgggggttgaggatgatgatgaggaaggtgaagatgatgaagagcagaaagaggatgaagaagggactaaattcaacaaagaaaaagaagacggggataaagaggaagacgacgaggctcaaaacgaatccaccccaaaacccaagaagaagaaacctcgtcaatcccaactcgacctatccgccatccaatctgaacaagcctccatcgatcccaacctcatcaccaaattgcgtcttaccaagaaatactatggcgatgctctccgattcatcaaccaactggaatctgccatcccaaccttgtgccaattactcgtctccaccacgaaaacagaagtccttgaatccatgcggttctttagggttgcgtacgagtatgatatcgcctcggccgaacagggaatcaagacgatgttgcatttgatttggacaaaggataataacgcgacggctggggaggaaggggaaggaaaagggattcggggcagtgtgattgagtgctataggagtttatatttcgatgtggtgccggatctatcgccaaagcagcaggtgaataggatcacaaagaatatgattgaacggacgtatggtgctacgttggcagagttgacaagtctggaagagttgatgcgcacgatgatgggagagaatatggtgcataccgatgttgtcaacaagctctggcaagtttacataggtacggaacaagaaatccccaaggcgcagaggcaaggggcaatcatcattctcgggatgttggccctggccaagaaagaggtggtaaccgagaaggtggacaaactattgaagattggtttaggaccacttggaatgcaagatttggtgctggcgaagtatacttgtatcgctcttcaacgtcttagcgggtctgcgaagaaagtcaaagacaaaacaatgcgtttaccaatggacaatcctatcttcaccaaactccaagatatcatcgagttttctcccaaatccccccaatggttctccatggctgaacaggctgttaacaccatttacctattgggtgaacagccggatagactttgtacgaagatcataaaagacttgacagccaaggtgtttgaagcgcctgaaaaggaaatggaggttgcgcttttgaaagcacaagccagtagctttaggattgctcaaatggttttcattgttggtcatgtggctttgaaacatatcgtttatcttgagcttgtggagagggagttcaagaggaggaaggatgagaaagcaaaaggtaagtccaacttgatcgtcaatgcagagaaagcggcagcaaaggctgctgagaaggaccagaacgatctcgacgctgtagcaggtaatgccgaggatgacatcggtgatctcatatccaccatgaaagagaaggaactgctgtatggcgacaagagcttattggccgtgtatggagatttaatcgcgcatatctgtgccagtccaaagaaatacaaatatccttcactccgagaagcagcaacgctgagtttatcaaagctcatgtgcgtctcgtcccagttttgtgaacaacacttgccgttattgttcaagattctcgagacgagcaaagaccctgtcgtaaggagtaatatcgtgatcgctttgggcgatatcgcagtctgctttggtaacttgattgacgacaactccgaacgtctctatcaaggcctcgcagataccgaccttgtcgtcaagaagaacaccctcatggttctcacccatcttatcttgaacggtatgatcaaggtcaaaggtcaactgggtgaaatggccaaatgtttggaggatcccgatcaacggatctcggacctcgcgaaactgttcttcacagagctgtcgacaaaggacaatgcgctgtataacaacttgcaggatgttatcagtcatctgagtattggagcacatgccgttgatgaggggactttcgaaaggacaatgcgattcattttcaccttcattgaaaaggaaaagcaggcagaatcaattgtggagaagctatgccagcgattcagacaggcgacagaggagcgacaatggagagacatctcctactgtctttcacttttaccattcaagtctgagagatccgtcaaaaagctcatcgaggggtgcgtcttatttatactttcaatgaaagatgtcctagactga

SEQ ID NO: 2352 - DNA, 3801 bp, Cryptococcus neoformans
atgatttcacaggcgccagcggccaagaaggcagctccaaaaaagattaacaaagccccattagcgtctaagaagcaccccaatgagtcactttccgatgcaggttcggatacagtttgttcgccgcccaagaagaagacgaaagccgacgatgatgatggcgattttggtaccgaatcaagtgcaaaagcacccactagtaacaagaatgcgagcgaagtataccagaagctttcgcaaagggaacatgttttgaagcgtcctgatacctacatcggctctgtagaggctattactcagcccatgtggattttgaatcccgaaacaaagactatggtgcacaggcctattacatttgtcccgggtttccttaaaatctttgatgagatcttggtgaacgcttctgataataagatcaatgaccctaccatggactctatcaaggtcgttatcgaccgtgagaagaatgctatatctgtgtataataatggccgtggtatccctgtcgagatgcatactaaggaaggtgttatgattccggaattgatcttcggccacttactggcaggaagtaacttcgacgacgaccagaaaaagcttaccggcggtcgaaatggctacggtgccaaattggccaacatctattctcacgagttcatcgtcgagactgctgacaaggtcaacagcaaaaagtacaagcagatcttctccaacaatatgagcaagaagggcacccccaagatcaccgacaacaaaaaaggcgaggaatggaccaagattacattcaaaccagatctcgaacgatttggtatgaatgggattgatgatgacaccaacgctcttttgatgaaacgtgtctatgatatggcgggtacagtcaaagatgtcaaagtgtttctgaatgatgaacgtatcaaagtgaaaaattttaagcagtatgtagagatgtaccttaacgcttccactactgccacctccgaagctgccggcggtgctgctgtgaccaagccgccaatcatatatgaggtggcaaacaagcgatgggaagtagctttcgcattatccgatggtgaattcaaacaagtgtctttcaccaactccattgccactaccaagggaggtactcatgttgacatgattgctacgcaacttgccaataaactaatggatcaaattaaaaagaagaacaaagctgccccggtcaagccatttcagatcaaaaaccacatgtggatctttgtgaatgctctcattgagaacccggccttcgactcgcaaaccaaagagaaccttacactcaagtcatcagcattcggcagtaaatgcgaattgtcggaggagtttatcaagaaagtggccaaaaccggtatcatcgacaatgtcttgaattgggccaggtttaaacaggaccaaatactcaagaaaacagatggtaccaaacgatctcggatttctggtattgtgaagcttgaagatgcaaacaatgctggcggccgaaactccaagaactgcactctcattctgacggaaggagattctgccaaagctctcgccgtttctggtcttgcagttgtcggacgtgatgagtatggcgttttccctctcagaggtaaacttctcaatgttcgcgaagctggtcacgaccagattgtcaagaatgtggaaatccagcatatcaagcagattttgggcttgaagcacaaccaggattatgccactgctgacagtctgcgatatggacatttgatgatcatgactgatcaggatcacgatggctcccatatcaagggtcttataatcaatttcttggatcacttttacccttctttgcttcgaattcccaacttccttgtggagttcatcacacccattgttaaggtctggaaaggcaaaaaagagatcagtttctatacaatgccacaatacgaagaatggaaagcccaaaataacaacggtcgtggatgggagtccaagtactataagggtctgggcaccagtacctctgccgatgccaaaaagtatttcagcgatctggacaaacaccgtttggcatttgagaccatgcagccggaggataggcaactgattgatatggcgttcaataagaaaaaagccgatgatcgtaaggaatggttgcgtcaatttaaacctggtacctaccttgatcatgatgttcaatccctccccatctccgattttgtcaacaaggagctgattctcttctccatggctgataatatccgctcgattccttccgtggccgacggtctcaaacctggtcagcgaaaggttctctttggttgtttcaagcgaaacctcaccaaagaaatcaaggttgctcagcttgccggttacgtttcggagaaaaccgcatatcaccacggtgaagccagtttgacgtctaccattgtcggcttagcacaaaacttcgtcggtagtaacaatatcaacttgctggaccccaacggtcaatttggtactcgtcttgcaggtggtaaagacgctgcttctgctcgttacatcttcacaaacctcccacggatgactcgagcaatcttccaccctgcagacgacggattgctcaactacttggtcgaggatggcatgagcattgaaccagactatttcatgcccaccgttccaatggtattgatcaatggcgcagatggtattggtactggttggagtactgccatcccaaactacaatcctgtggatatcgtcgaaaacttgcgcagaatgatgagaggtgaggagccggagaaaatgacgccctggttcagaggtttcaaaggatttattgagcggattgatcaagacaagtacaaagtcagtggcataatcgagaagattaatgacactaccctcgaaattaccgaattgcccattcgaaggtggactcaagatttcaaggaaatgcttgaagagatgaccacagggaccgacaaagtaccccagaccatcaaggactatgaggagcaccacacagataccacagtgcattttcgagtccatatgaccgagaagaacctcgccgatgctgagaaggaaggcttcgacaaacgattcaaacttactacttctcttggtactggtaacatggtctgtttcgacctgaacggcaagatcaagaaatatgccagccctgaagagatattggaagaattcttccacaagcgcctcgaattctatgggcatcggaagcaacaccttgccgacgagctaaacaggcaatttgaacgactcagcaaccaggcccgctttgtccatatgatcatcactaaggagctagtcgtttccggcaagcgacggccagatatcgtcgctgaattgcgtagtctcaaatttaaaccttttcccaagaaagaaagggccaaagaggaaggagaaaacgaagctgccgaggaagaagaagacggagacgaaggacaagctagcgactatgattacctcttgggtatggctatctggagtttgacatcagaaaaagtgcgtaagctgttagcagaaagggatgcaaaggagcaagaactcatcgagttgctcaagctcagtcccaacaatatctgggatcgggatttggacaacttcttggctgagtggcaggtaagttgccggtaccttcttctacttacaagctggttgatcattcaaaaatatagcttgcccttgaagccgacattgctgatgccaaaggttcaaaacccaaagcgaaagccgctgctatcaaagcgactcaaaagccgaaaaagcgtgctatgtaaccaattatcactacctcacatgcattatgtgccataa

SEQ ID NO: 2353 - DNA, 3729 bp, Cryptococcus neoformans
atgccgctccaacggttggagctctacaacttcaagtcgtatcgagaaaaacaggtcatctcgtttggcgatgttcccttcgtctctatcataggtccaaacggtgctggcaagtccaatttgatggatgccatctcttttgttctaggagtcaaatcagcgcagctccgatcaacccagcttaaagatttgatctatcgtgggaggagagctgcagctcaggaagccgagagtgaaactcagacacagagtgaaagtggggacaattcaggcgatgctaggtctgcctgggtaatggcagtttatatggacgatgctggtaaagaatggacctttcgccgcagtgtgtctatgtcgggttcctcctcgtattttctggatggaaggtctgttgcttggaaagactacaatgctcaacttgccaagttcaatatccttgttaaggcaaaaaactttttggtattccaaggtgatgttgaaggggtggctagtcaggatagtaaagctcttgctcgcttgattgaccggataagcggttcccttgacttggcgccgtcttatgaagctgctaaggctgcccaggaaaaggccacggaggcgtcctcaacgaattatgcgaagaaaaggagcatgctcactgaagccaaacattttagagagcaacaagaggagatcaaacaatgggaaaggcttaacgactccaaggacgccttgacacaacgcctcatattgtggaaattatatcaccttgccaacaagattagccagtctacccagaaggtcgaggaagcaaacgatcgcctagctgaattcagagccgccagtagtgaagccgacagcaatttgtctgatgtcaagagagagcaagccaaagcacagttgaatgtcaagaaacgcgaagcaaatctcaagaaagcggaaaaggtttttgaagacaaaaaacccgagctagtggccatagatacccagatcgctcattccgagaaaagggcgagcggcgccgccgcccaggaagaaaaagtaaaaaaggatgagaagaggcaggcagacacggtcaaagagctcgagaagggtttggaactcattacgaaaaatatggaggaggccggaggtgagtgttgtgggagtttgacagctgatgagcatatcatagagaggcagcggcaaaggagtcaggcttcgggtataactctatcgggagctgacctgaacgagtatcgccagctgtgcgtatacccttggctgacatattcattgacaatggcttacaatcagcgcagacgcgcatccgctaaccttcatgctgttcaagaacgtcagcagcttgaaacgcttcggcgtgaagagaaaaatctcagggatgctcttgcttcagtggaagatcagatacagcaagctcggcgacgacgcgaaaagcttactggagaagttggcaaccttgctgaacgggaagaaactgtgagtcatagtcttatgcgggagactgaaatcaatgagcgtcttcaggacacttatcacaagcttctccaagctggggctgatagacgtgaaaatgagagggaggctaagctaaaggagaccctcgctagccttaaacgaatctttcccggtgtacatggtcgagttgtcgacctgtgtagacccgtggcgacgaaatacgatacagctgtcatgactgttctgggtaggaatatcgatgcagtagttgtcgaacacgagaaggttgctatcgactgcatcgagtacatgcggaatcaacgagcaggacaagccactttcatcccgcttgacactatacaggtgaagcctgtccctgagcggctccgcaacttcgctcgtggcgcccggcttgccattgattgtattgagtatgatcctgctgttgagcgggctatgcagcatgcttgcagtagctcgttaatttgcgataccatggatatcgcgaaatatgtctgctatgaaaggggtcaggaagtcaaagctgtaaccctcgacggcactgtgatccacaaaagcggtttaattacgggtggccagggatccggaggaggtaggaaatttgacgataaagaagtcgaaggtctcaataaattaaaagaaacctaccttggccagcttcaagaactttatcgatccaagcctcaagacaaaggcgatgaggctctcctggagagcctttctcggcttgatgctgaatccaatatcgccaaggatgacctccatgctattcaagtccgtcttcatggccttcgtgaggaactcacacatgtcatttccactattgaacgtctcacccccgacgtcgaggctcgctcccgatctgtcgcgtcatcagaggagcgtttagctgctctggtggaaactattgagcaggcagatgatgaagtattcgacactttctgtcagaggattggagtttctaatatcagggaatacgaagacgtacaactcagaattgccaaggaggcgaatgatgccatggagagttttgcagctcaacaggcgagagtaaaacatcagattgactttgagtcctctcagctcagaaatacccgcgagcgcattgcccatcttcgaaacctcgctagcaaagcagaaagcaacgttactgaactacgttctcggcgcgaggaagtccaggcagaactcgaatcccttcaagccgaaattgatcgtcagcgaggtaaactcaacgatgctaatgacgtacgcgacgaagtgattcgccgtgttgatgagatgcgcgagcgctctcgaaaagcgcaaaaaactttggacagggtgatcaaagaaattgcgacgtggaatgatgagatcttgaagtatgcgtcagatagacatgctatctatagaagatgtagactagaagaaattgacctgccgctggtcaaaggaaggctcgacaaagttccgatcgaagaggaagctacacagaaaccagtgcaagtcgatgattacggcttggaaccggattttgatgtcttagaagaggaagatagagagaacgaagatgaagaagtcggccgcgaattcgaagctcaaatctccaaaatgagaaatgatctcgaacgtttggccccgaatatgaaagcggtggaacgactggacgaggttgaaagggaactggatgatgcggagcgagaagcggaggagacgagaaaggagagtaaacgagcaaaggacgatttccaggcgataaagaaaaagagatgcgatctgttcaacaaggcatataatcacatgtctgaagtcatcgataagatctacaaggacctgaccaaaagtcagaatcaggtaggaggtacagcgtggtttactctagaagaggccgaggaaccatatcttagtggtgtcaattatagcaccatgcctcctggaaaacgatttgcggaaatggaacaactttccggtggtgaaaagacaatggctgctcttgcccttttgttcgccatccacagctttcatcctgcgcctttctttgtccttgacgaagttgatgcagctttggatgccacgaacgtacagaagctggcaagatacgtacgaagccaggccgacaggaatgtacagttcttgattatttccctgaagagcactttgtacgaaaaagcggacggattggttggcgtatatcgagaacaagaagaaaacagctcaatgactctaactctcgatttgagaaagaagttagattgcaattcaagtggcgtaacatgcagtaaagtctga

SEQ ID NO: 2354 - DNA, 4209 bp, Cryptococcus neoformans
atgtatcccggcgctaaactgtatctgcagcggatcaccgaactgcaatcggccggaagttcaaaagagtcgtcaacagagcttgcaaaactcaagatgattctcgatatgtacgcccgggctatgcaactggaacaagaaagagctgcggcggccaacaagcctgacggtccagccgatacgtccacagcagctagcaccaacggccaagctggcccttcaaatccagcccatgtctctatgaaccctacccaaatcgctcagctccgtactcaggcagctgcctatcaacatctctccagaggccagccggttccttcgtatctgcttgcggcggctcaaggaacgcccccaccaggaattggcggtcaaccacctgtaccaacgggattgaacggcatccagggcaaggtggcagataagactgttgaagctgttgtggaggacagtattgaagcgaaaaaagcaagagaaaaagaagaacagcaggacaagacttctgaaggacctgatggtgcggctcctccagatgggccttctcaacctccgtacgcaatggaatttgacgaaacctccatcatctacccttacaatgcctataccgacccgtccttctactccaagcgcaagtttgatgaagaagtcatcaatcctctccacaaacgtcagcgacttataacgccttctatcatgcctcgcggtcttgacccgtatctccttatggaagaacgaaacagatttatcgaaactcgcatggcgtggaggatgaaagagcttgagaacatggattctacagctggtctcggacagccaggagctggcgatgtgcccaacgtcattgaatctgagaagcccggaactcctatgggtgtgcgagcacgtattgagcttatgggccttcgtcttctaggcaagcaacgactcttgagagaagatgtagtccgcgccatgcatggtgcttcccagatccctgccgaccgttcccagttccgacgcttccgaacacacaccctccgtgatgcacgagcgacagaaaccgctgaacgtcgacaacgtactgaacgtgagcaaaggggcaagcaacgtcaccttgcttatattaactctatctgcgagcacggtcaagctctcatcggtgcgggcgtcagcacagcgagaggtcaaggggctgataagatgaagcgactgggtagagcgatgatgaagttgcatgctgagacggagagggaagaacagaagaggatcgagagaattgccaaggagcgtttgaaggccttgagaaacgatgacgaagaggcgtaccttgctttgcttggtgaagccaaagactcgcgtatctcccaccttatggaccagaccgaccagtatctcgagacccttgctgccgccgttgttgaacaacaaaatgacgatgtccatcgcgatgctattatggccgtgccctttgagcaagaagagggtgtcgctagtgaagagatgtttggtgcgaagagacaggatggtgaggaatctggagcagagcgaagggccggcaaggtggattactatgccgttgcgcacaagattcaagaaaaggtcacgaagcaagcgagtatcttgagtggtggtactctgaaggactaccaggtcaagggtttgcagtggatgatcagtttgtacaacaacaggttgaacggcattcttgccgatgaaatgggtctcggtaaaactattcaaacaatatcgctcatcacttatctcatcgaaaaaaagaagcaaccaggtcccttccttgtcatcgttccactttctacccttaccaactggaccatggaatttgagcgctgggctcctgccgttcgtactcttatcctcaagggatctcctgctgtccgtcgagaggcctaccctcgcttgcgtgccatcgacttccaggtgtgtctcacgacgtacgaatacattatcaaggagcgaccgcttttgagcaggatcaagtggattcacatgatcatcgacgaaggtcataggatgaagaatgtcaagagtaaactgagccaaacattaaatgaatattattcttcaagatatcggttgattttgaccggtacccctcttcagaacaatcttccggaattgtgggctttgctcaactttgtcttgccaaagattttcaattccgtcaaatctttcgatgaatggttcaacgctccctttgccaacactggtggtgaaaagatggagatgaacgaagaagaagctttgctcgtcgttaagcgtctgcacaaggttcttcgcccgttcttattgcgaagattgaagaaggacgtcgaatctgagttgccggataaggtggagaaggtcatctacaccaagatgagtgccttgcaatggaagctgtatgagagtgtacaaaagtacaagacattgcctacggatatgtctgtcgcgaaacctcaaaaacgacaaaacctgcaaaacgcccttatgcagctcagaaagatttgtaaccacccatacgtctttcgtgaggtcgacgaagatttcactgttggcaacacgacagatgaacaaatcattcgagtagcgggaaagtttgaattgttagacaggatccttcccaaactgttcaagacgggtcacaaggttttaatcttcttccaaatgacggaaatcatgacgatcgtctccgacttctttgatttcagaggctggaaatactgccgtctcgatggttccaccaaggccgaagaccgtcaaacccttctttcaacttttaatgaccccaattctccatatcaagtcttcattctttccactcgtgcgggtggtctcggtcttaatcttcaatcagccgatacggtcattatctacgacactgactggaacccccacgctgatttgcaagcgcaagatcgagcccatcgaattggccaaaagaaggaagttagggttttaaggttaatctcgtctggaactgtcgaggagttggtcctcgccagagctcagagaaagttggagattgacggtaaagtcattcaagccggtaaattcgacgaggttactactggtgcagagtacgaagcgcttcttcaaaaagctttcgagaccagtgctgaggaggacaacgaagagaccaacgagcttgacgacgatgagctcaacgagcttcttgcgcgtggagataatgagctcggtatatttacagcaatggataacgagcgcaaggagcgtaaaattgctgaatggcgcgcctctggcagcaagggcgaacttcctccccctcttatgcaagagtctgagcttccaccattctaccgacgcgacattggtcaagaactggctgaggaacttgccaatgaagaagaacaaggacgtggccgtcgaaataagggcgaagtacgctacaccgatggccttacggatgaccagttcattgctgcattggagaactcggatgatgatgtcgaagatgcggcggatagaaagagaaagagggccgagaagaaggctgagaggaagaggatgaatgaggtacttgttcaagccgaggcggagggcagaccgttggatgtcgtcgccaccaaggaagtggttgagcctatcaagaagaagagaggaagaccaagtagctccgtgacgccatctgtgacgggggacgaggttcctacaaagaaaagaaagatggagaaggtgcaagggcctgaagtgcagttgatgaccaagctgttcattgaagtgaataagctcaagtcagatttaggagaggatctcaaccaattcttcttggttccggtgaatcgcaaggattatcctgattactatagaattattgcccaacctatcgccatgtcacaaatcaaagccaagattggtaaaccctcctacaatcttgcctccttccgcaacgatcttcatctcctttggaataatgcgcggacctataatcaagaagggtcttgggtattcaatgctgcggaggatatgcaggaggcgttcgataagatgtgggacgatgaggtgccacagtttttggcttcgcaagccgctggggctgagaacagtgttggtgaaacatcggcaggggcaagcggtagcagtacaccaatgttcaagcctgttggcgataaaacgactgctcccaaaataaggatatcgatggggaagaagaagatagaggccgcgatggatggggacgaaagcatggatggaggtgaggacgatgactattag

SEQ ID NO: 2355 - DNA, 4104 bp, Cryptococcus neoformans
  misc_feature (1069)..(1071): n=g, a, t or c
atggatatggatacaagatacggctgtgggaaggcaacaaataagaagactaaaaaagctgataattgccacgtgagaagtggaggttgcaaaagtggtcatgtccgccagcagaaggcccaaaggtttcgagcgcctagcagttcatggtcctcgtcagcaaataggcgcgcgggacaagggtcgggcgtcatcagcgcgccagcacgctggctggaggctgccctcgttcgcttctcgttctctatccatccctcaatctccttcttccatcgacatctttccttcctcaaaccccttttacccacacaggcgcaagtcgccaatcgcaaaatgaaactcaaggacatatcacgcacggcaaccttcgcttgggataacacttcctcttcagcgcccctcctcgcaactggtgctgtcgctggtgccctcgacgaaagcttcagcaacgaatctcagctcgaaatctggcagccagactttggggacgtatcaaatgtcaagcttggtggtgaaggcaagccagctttgggcagcatcaccgttagcagccgattcaaccagctcgcatggtcagcaccttccactactcacatgaagggagttcttgctgcaggtatggagactggtgaagttaatgtgtttgatccctccaagattgttactggtgctagtgcggatgaggcacgaatcttcaaaagtgaaaagcacactggtccagttaggggccttgactttaactcaatccagaagaatctcatgcttactggttctgtcaatgccgagatatatatatacgatctcaactctcccaacaacgcgcctatccctccgggaccaacttctaccaaactcaatgagattacggccctccaatggaatcctacagtatctcgagtgttcgctgcatcttcatcttcaggcttcacctctgtttgggatttgaaggctgggaaggagattgttagtttgcagtatggcggtggtgctgctaagggaatggagactgttggtggtgctactcgacttattactgcctccgaagatgacgaatctcctatcatcatgnnntgggatcttcgaaatactcgggccccggaaaaaattctcagcggtcaccacaaaggtgttctttccgtctcatggtgtaagcaggatgccgacctcctcttgtcatgcggcaaagacaatcgaacattgtgctggaaccctcagaccggcgagatcatcggtgaacttcctactagcaatgattggtccttccagacctcttggtgccctagaaaccccgatttactcgctacggcatcatttgacggtcacattggtattcactccttgcaaacaaccagcattccttcccaatctaccgagaagctcagtgaggctgctaccgctgacgacgttttcggtgcactcgggaacgagcagccccaggatgaaactgtcaacgtcttgtccctcaagcaagctcccaagtggcttcgacgtcctgtttcagcgacctttggcttcggcggtcttctcgctaccacttccaatcttcctggagcatctggtaaacaccaatctggagttgaggaggttgcgaagaaggtgcaagacgctatcaagaagttccccaacgccatcaaggcagctggtgacgctactccagtcattgctccactagaagaggaaagtgtcaaaactcccactgctgagaagcctgaagctatcgaagacgttagcaccacttccgatgccggcgttgagtctcatgacgacaaatctgagaatatcgtctctcataagtctgaagctgcggagtcgtctgtcgcggctaccgtcggcagccgtgcctcttccgtaagagacgagattgtcaacaaggagaacaccttccaaatctaccccgaaggtgagagtgatatcgacaagcttgttacccaagctttggtcatgggtgacttcaagtctgctgtggacgtctgtcttgcttttgacagatttgcggatgctcttctccttgctgttcgaggtggtcccgaccttttgcagtccactcagaatgcctactttgctcagcagaccaccagtcgtcccttcctccgtgtcttccaatctattgtaaccgaggaccttttggacattgttcaaaacgctgatttgtccgaatggaaagtcgcctttgttgttttgtgtacatttgccaaggataccgactttggcaatcttgctgagcaaattggccagcgacttcagtacagatggcgagtgctctctgcctctgacagttccgaagccaaagcatccgccaaaattgctcgtcaggacgccactctctgctatcttgcggctaaaaagcttgaaaaggtcgtctccatatgggttgatgaaatggctgaggaagaggaagccgtttctgctactcgatacacttcccatgcgcaggcgcttcagtcattcattgaaaaggtttccgttttcaaagctgctaccggctatgttgacgaagatttgcttactcccaccgagtcggcagccgctgctgaggccggggcaagaacctacaagcttgccggcttgtacgacagatactatgagtatgccgatttgctcgctactcaaggcttagtggacatcgctgccaaatatgtgaagatgactcctgttgactacaagggcagtgaacaagtgggtgagcttgataaggccaggcagagaatcttgagcgctgctggtgggaatgtcggtactaagatggctcaaacaactgggaaggtccaaagtacggccggttcttccatcgcgagaggttacgcgcctgcccaacaggcgtccgcatatgcgtcctcccagcccgcgtatgctcttcagcagcctacgacttacgctgcttcaaccgcgccagcttatcaagcaccaccggccgccagcggaccttatcagcctgcatccacttcgaccgcttacgcacctcctcaacctactccgtcatacggcgactcaaatccttacgcacctgcgaccgtctaccaaccatcttctgggtatccacccaacggttatcgacccagcgaccctcaaccacaaggatatggtgctcctcaaccctcattcggccaaactcaggcaatgcctcccccccctcgtgtcggctcgcaacaacggggtatctcaggatggaatgatgcgcctaccttcgctccaaagagacctcaaagtgctgccaaggacgtcaagaaggcttctgctattttgtctcctttccccaactctgctgatccacttgccgctgctggtgctgggttgaacactgcaggggcggctcctccccccggtaggtcacctcagcctggtgtgattcctccccctcccaagaacgcccgacctccttctattgccgcgaaggtacaacctccgcctaccgttcaacaacagcaacagttccaccagcatgcgcaacatcaacaacaacagcgacagcagcagttaacttcccctccagcggctgcaggtcctccaccctctgccttctcgcgtccccctccccctggtgcccgagccggtcctcctcccggagctttcgctggtccccctcctcaacgcgccctgtccccattgggtcccggtaggctcagctcgcctccagggagccaaataaggccaccttcagctgtccagagaccccccagtcaacctggacaggtgcagtctcttgatggtggaattacgggaatgggcggacctcctcccccaggctctaggatggctgggcctcctcctggacggtcagctacgcctcagcagcagcagcgacagcagatcattcctcctgctacctcaccgtctcaaacgaaaattcagtcaccctcttctgagcaggtaaagcctcgacaccccgctggggatcgatcccatatccctgaagcttcaaagcccatttatgagattctctccggagaactcacaaaggtgaagcaatctaatattcctcctcacgtcaaacgaattgtggatgacaccgaaagacggctgaacattcttttcgatgggctcaataacgagacagtgccaaagcaggcggtggatatgatgaacgagatttctaagggtcagtga

SEQ ID NO: 2356 - DNA, 4389 bp, Cryptococcus neoformans
atgacggtcacatttccttactcctctgcgcctgtcaaacaggtcaaggagatccagtttggtataatgagcccagaggagatcaaagccttttctgtcgccaaaatcgaatccaccgaggtcttggatgagaatgggaagcaaaaagttggaggtctgatggatcccaagatgggcaccatcgacaggaattttaaatgtcaaacatgtctcgaaggcatgtccgaatgtccaggtcactttggtcatatcgaacttgctagaccggtttttcatcaaggtttcattgtcaaggtgaagaagatcttggagtgtgtttgttatagctgtggaaagctcaaggtcgacatggtgtatccgatggtagcgaatgcggttcgacgtatcaaggctcaacaccgactcaaagccatttgggccctcgccaaggacaagaagcactgtgaacctgatgagctagatgaaaaggacaacggcgatgccacatttgaggacgaatatctgcaggaacaaaaggcggcaatgaagggtcacggtggttgtggtcacgaacaacccgtatggagaaagaagggattaaaattaatgggtgtctggaagcctaccgacaagggagaggggaaggaacgcaatatttctccaggggaagtttacaatatccttaaaaagatcactcccgaggacctgcacatcatgggtctcaatgccgactatgcccgtcccgattggatgatccttactgttcttcctgtacctcccgcagctgtccgaccttcgatcgctgtcgacggtggtgccatgcgcagtgaagatgatttgacctacaagctttcacagatcatcaagttcaacggtgtcgtacgtcgaatggaggcggaaggtgtaccacctagtgtcgtgaacgaacagttcgacttgcttcagtaccatgtatgtacatacatggacaacgacattgccggattgcctagagatcaacagaagggaggtagggccatcaaggctatcagggcgaggttaaaaggaaaagaaggtcgtatgagaggtactctgatgggacagcgtgtcgacttttcagcgcgaacagttattaccggagaccccaacttgcaattggatcaggtcggtgtgcccaagagtatcgccatgactttggcatacccagagcgagttactccatacaacattgtctatcttcaaacgcttgtcaacaatggtcccgccacctatcctggtgctcgatactacgtcaaagacactggagaacgagtcgatttgaagtaccgcaagtcaggtgaaccgatcagtttgcagtttggttggattgtggaaagacatttgaaggatggagattatgtcttgtttaaccgacaaccgagtttgcataaaatgtccatgatgtcccatcgagtcaaattgatgaattattcaactttccgtttgaacctttcagttacttcgccttataatgctgatttcgacggtgatgaaatgaacttgcacgttccgcagagtgaagaaactagagcagagttgagtcagattgcttgggttcccagacagattgtctcgccccaagcgaacaagcctgttatgggcattgtccaggacactctgtgtggtattcgtaaattcactctccgagacaatttcctcgattggcttcaagtccagcacattcttctttggcttccagaatgggacggaaccatccccccacccgccatttttaagcctaaacccatgtggaccggtaaacagcttttatcgatgaccattcctaagggaatcaacatcacctacaaaaacaacgaaaagccttcgcctatcgacgtgacggatgagaatgtgttaatcgagaatggagagttggtgcacggaacgattgtcaagaacatggcgggtagcgccaacaacggtttggtgcacgtcatcttccgagaattgggccacatcgcggctcgagatttcttttcagcggttcagagagttgtcaactattggttattacacttcggtttctccgtcggtatcggtgacacgattgtcgataaggcaactatggcgggtatcaccaatcgaatggtggaggccaaggaggctgtccaaaaattgatccaagaagctgaagcgaaccgaatgaagcccaagcccggtatgacaatccgagaaaccctcgaagcgtctatcgccgcagagctcaacaaggctcgtgattggactggtaagacgactcaggataacctcaaagcggacaacaatgtcaagcaaatggtggtgtcgggtgccaagggttcgttcattaacatttcccaaatgagtggtgttgtgggtcagcagtttgttgaaggaaaacgtatctcgttcgggttccgacaccgctcattaccacacttctcaagggacgattatggacccgagtctcgaggtttcgttgaaaactcgtatttgcgtggtttgactcctcaagaattttggttccacgctatgggtggccgagaaggtttgattgataccgctgtcaagactgccgagactggttatatccaaagaagattggtcaaagcgatggaggacttgaaggttgcttatgacggtactgtgagaaatagtgtgaatgaggtcgtgcagttcttgtatggtgaagacggtatggacggtgctgcgatggagaagcagagtctggatattatccgactctctgatcaagcatttgagaggcgatacaagattgatgttcttggaggaagtggcttctccaaggggatccttcaagccggtatcgaccaatcatccatctctctccaaaagctccttgatgaagagtttgctcaaatctcggaggaccgtcgtatccttcgttccgaaatctacccggacggtacccccggtcatcccttacctgtcaacatccaacgtgtcatccaaaattctcagcaaattttccacatcgaccctcgtgttccctccgatctggatcccgtttacttgctcgaacaaagagatgcgttggctgatagactgcttgtggtgcgaggtgacgacaagctttcaagggctgcccaaaaaaatgctactcttgtgttcaacatgcttttgcgatcccatcttgctactcgtcgagttctggaagagtaccaccttaacagggaggctttcgattgggtcattggagaagtggaacaaatcttcaacaaggctgttgtcaatgctgccgagatggttggtactcttgctgctcagtctattggtgaacctgccactcagatgacactcaacacgttccattatgcgggtgtggcgagtaagtctgttactggtggtgttccccgtctgaaggaaattatcaacgtcgctgtcaacattcgaactcctgctttaaacgtctatcttgaacccgagtacagcaagaccgaagaggatgcgcaccagatcatgcggaaattgacatacactcgattgagggatattactgccactgttgaaatcttctacgaccccaagcttgactctacggatattgaagaagacaaggactttgtggacgcgttctttgcgatccccgatgaagacatcagactggagctccattccccttggctattgcgtcttgagcttgaccgagccaaggtgcttgaaggtggttatgaaatgtcgcagatcgttgatgccattgccgagaccgtgggcaaagacgtctttgttattcactctgaagacaatgctcccaagcttgttattcgtattcgagtcgttgctgagaaggaggatgaagaactgttgggtgacgaggacatgttcctgaagaggattgaaggcaccttgcttgatcaggttgagcttggtggtatcactggtattactcgagttttcatctcggaaggcaagcaggttgttgtctcccagaacggtgaatacgatcaggagaaggaatggttcctcgaaacggacggtatcaacctgaaggaggttatggctgtcgacggtgtcaatgctttcagaacctactccaacaactgttacgaagtctacgagactcttggtatcgaagctgcccgaaacgctctctacaaagagctcaacggtgttattgagatgggtggttcttacgtcaactaccgacaccttgcgctgttgtgtgacctcatgtgtagcaagggcgctttgatgagcatcactcgacacggtatcaaccgaaccgatgctggtgctctttcaagagcggcgttcgaagagacagtggagatcttgcttgaagctgcggctgtgggtgatgtggatgactgtaagggtgttgcggagaatgtgttgttgggtcagatggctcctatgggtactggtgcttttgatgtttcacttgacatgaatatgctcaagtgtcattgttga

SEQ ID NO: 2357 - DNA, 4398 bp, Cryptococcus neoformans
  misc_feature (4069)..(4071): n=g, a, t or c
atgcctccaaggcgcacaacaagagctgtatctagctcaacagccgctccagcaccatcgacaagaactagaagaggcaggaaggctgctgcgtcatcggctccttctgtggattcagacgaagatgatgggataacagtgacacagggatcaagtgatcaggaggaagcggaagaggcacaggaagaaactaagccgaaagctagaagaggtgtaagcaaagcaaaacccaaggctgtcccagcacctaaaagaaggaacgttggaacatcagtggctttagagaaagaagattctgaggacgagttgggcctgtcgccgcccagaccgaaagtcaagaaggctatcccggctccaaattccagggtaaaagagcagatggttacctcggaggatgaagacgaagcggaagaggagctgcagaatgcccttcgggcccggcgtgcttccactgccactctggcggcttcagaacctcctacgcccacacctcaagctcatgaagaggacgaccgcagcgcgacaccaagggcctcttcaggcgccccagaaattaggattgaaagggcagattccgatgacaatgatgaagttagcactgttggacaaaagacacccacaaagcctcctcgttcttcttctgagaaaccagtgacccctctcagatctccgcatacctccgctcccgctccagcacctcgtcccgcccaatcaggtcccaaatctcggcttaccatccacaagctcgtccttgtcaactttaaatcttacgctggtcgtcaggagattggtccctttcataaatccttttcagccattgtcggaccgaacggtagtggaaagagtaacactattgatgcgcttctgttcgtgtttggttacagagcaagcaagatgaggcaagggaagttgagcgagcttatccacaactcggcgggtaaagagaatctggagagttgctcagtggaagtgtggtttagagaaatcattgatttgcctggggccaacgacttccttctagttcccaactctcaaatcattgtcaaccgaaccgcttttcgcaacaactcttcaaagtacactattaacgatcgcacaagttctttcactgaagtcactacactcttaaagggcaaaggcatcgaccttgatcacaatcgattccttattctgcaaggtgaagtcgagtcaattgctcagatgaaggcaaaagcacagaatgagcacgaggatggtcttcttgaatacttggaggatatcattggaacaacaaagtacaaggagccgatcgagcaggcatcattggaatttgaggccttgaacgaggaaagggttgaaaagatgaatcgacttcgggttgtcgagagggaaaaagcggctctagaaggtcaaaagcaagaggcagaagagtatctccgagcttctaacgagttaacgaggatgacttcaaagcaatggcagttgtggatgtaccaccttcaaaatcagacagagatcacttccaaggcaatcgaacgactcgaaagccaacttgccgccgaacaagagcgtaacgcagaacacatcgctacggtcgatgatttgcaaaaagaatatgaagaaagacttgctagcattgcggaagtcaaagcgatgctggataaacttcataaagaggccaagaagtacgagaaggagcaggtcggttatgcagagaagaagaagcacctggagacaaagatgaaaaagatcaaaaagtccatcaccgaggatggccatgccaaatctgaagccttggctgctattgaaagctacactgagcagttggaaagtaaccgtaaaaaggttgctgatctggaggagaagcttgaatcggagcaggctgagctcgaagaggtcgtcgacagtctcaaagataaaactgctgttttcacaacccaaattgagataaagcaacgagagcttgaaccatggaccgccaaaatcagcgaaaagcagtctgccatggatgttgccaagtctgagcgtgatcttcttgccgagaaagctaccggtattctgaaatcaatgcaagaagccgaagagcatttgcaatcattgcgggatggtgatggtgagaagcaagaagagtacgcgaggttaaagaaggaggcgtccaagattaagaaactgactgctgagggcgaggccaaggttgattcaatgacaaccaagtgggatcagctccgaggcaaggtttcagcctcaaggctcaaaactgatgaagcacgagcttctcttgctgctgacaagagcgagaacgctgtgttgagcagcttgaacaagctgcgcgaccaaggtcgtatcaagggtttccatggtcggttgggtgacttgggtgttattgatgacaagtatgatgttgctgtcaccactgcctgtccaacattgaaccacctcattgtcgactctgtcaagcagggtgaggcttgcatcgactttctccgtaaaggcaatatcggtcgagccaatattatggttcttgaaaaacttcctcagaaagcgcccaaccctattcagacccctgagaacgttcccagactattcgatttgatcaagcccaaggatccttggttcgcgcctgctttctataaaggtttgggaaacacattagtggcaaacgacttggagcaggcacagaggattggtttcggttcttctcaaaggtggagggttgtcaccctcggaggtcagctcattgacccttctggtaccatgtcgggtggtggtaaccgagtcgcccgaggtggcatgtcttccaagttcaaggccgacaaagtcgctcccgaagttgttgtcaaattggaaaaggagagcgctgacgctgaggctgagctgcaaaagttccaggaagagaagaaagcaattgaatccgaggttgtgagcttgaagaggagattgccggagattgaaatggagatggaaaagattgagctcgatgtctcaacagctactaaaagaattgttgaggctgagaagagattatcggagctcaaatcccagagcaagcctgatgcgggtgatgaaaaacgtatcaagactctcgacgccgaaattgcctcactcacgaaggaaaccgacaaactgcgcgaaaagtcttcttccatcaatgacgatatcaagtctctccaaaacaagattcttgaagttggtggagttcgtcttcgtgccattcagtcaaaggtctcgattaccaagggccttcttgatcttgccaacgaatctattaccaaggcagaagttggtcaagccaaggctgagagagatgtagagaagcttgaaaagtctattgcgaacaacaacactacgttggaagaagttgtagaggagctcgagctggttgaaagcaacctagaaggctgcaccgcagatttgaacaaggtcattgattcgattcaacaagtaaacgactcgagtgacgatatcaatgaagactttgagcaaagtaaacaactactggaagaaaagcaagcaggcatcaatgcctttagggctttagaggtgggtttctttttcacaacacagaaaagagctaaaggcattgtgcagatggattacaagcagcagattgaagacaatgcgagaaaattgaaagagagccaggaaaagtaccagttttatgagagaaaattggcgggtctagaacttaagaaacaaagcagcatggaactcgaacagtattctcccgacgaactgcgggctaccaatgagacggcattgaaggcatacatcgccgaacttgaagatgacgttaagaattcccgaccgaacctcaatattctcgccgagtaccgcaaacgggaagccgagtttctggaccgagcaagagacctcgaaacggttacaaaggctcgagatgcggccaaggcccgttacgacgagctgagaaaggtcaggttggatgagtttatggcagggttcacagctatcactgccaaattgaaggaaatgtatcaggcaagtttgatttctttgggacgcatgattacgatgggtggtaatgcagagattgagttgattgatagcatggacccattctctgaaggcaagnnngttgtactgtccatcatgcctcccaaaaagtcgtggcgagccattgccaacctgtctggtggtgaaaagacgctggcctcccttgctcttgttttcgcgttgcacgtcttcaagcctacgcctctttactttatggacgaaattgatgcagcgctggatttcaaaaacgtctcgattgtggccaattatatccagtcaaaaacccaggcggcgcaatttattgtcatttctttacgaaatgacatgtttgaacttgcgcatcgtctcgtcggtatttacaaaacatccaacgtgggtcttgtcctgcttttggtcttgtcattttag

SEQ ID NO: 2358 - DNA, 4410 bp, Cryptococcus neoformans
  misc_feature (1255)..(1255): n=g, a, t or c
  misc_feature (1771)..(1771): n=g, a, t or c
  misc_feature (2550)..(2550): n=g, a, t or c
atgagaagcactacgtctcttcagacgttcctcgtagaatgtaaatacttcctattggctctattattggtccaacctaattcaattgtggtttgtagaaaacatattcagtttcaaccattcacacccaaggatattgtccgaatttcagaagtccaagttagcattgccgagctgtatcagaataatgaggatggaacaagaactacggctcttcaaggacctttggatgcccgtatgggacccaacgagaagggaaagaagtgtgcgacttgtggcgaagacactcagaaatgtgttgggcattatggttacatcaagcttgttttgcctgtattccatatcggatactttaggcccaccatcaatatgctctcttgtatatgtaaaacttgtgctcgtgtccttctaccagagacagaacgcgcttccttccttaaacgttttcgtcgccctaacctcgaatctcttcaacgtcaatctgctgccaaagctgtcctcgcagcctgtaagaagcaaaatatatgtacgtactgcggtgcccccaacggtatcgtcaagaagtccggtcctcttaggatttcgcacgaaccctaccgagcggccaagatggcaagtatgaaggatgagtggatggcgaccttcaaaaatgcggtggcggagaatcaggcggttgcaacgcatttagccaaggctgtggatgatttgaatccgttaaaggtgttaaacttgttcgaaagaattactgcggaggattgcgagttactatcactacatcctgaagttggtagacctgaagattacatttggcaatacatctctgtaccacctccttgtattcgaccatctgttgcttcagaggctggaaacaacgaagatgacctgacggccaagctcgccgagattgtcaactataacaataccctggcactcatgatggacttgggtaggggtattgagatgatttcgtccaactgggaagtcttgggtcaagcagttgcgctgtatattaactctcaagcacctggtatgcaaaccattggcgtaagttctaagcccatccgaggtttcgtacaacgcctcaagggtaaacaaggtcgattccgaggtaatctttccggtaaacgtgtcgacttttccggacgaactgtcattggtccagacccgaatctccgtatcgacgaagtcgccgttccagaaaaggtcgccgtcaagctttcatatccagaaagagtgacagattacaatcttcaanttatgcgacaagcgatcatcaacggttcaaagcttcatcctggtgcgaatgtgctggaaagaaaacatgagaatggatccaccgtgcggatctcgctgaatgtcatgaaggatttggaagcgaggaaaagatatgcgagagagttacagattggagatattgtacaccgacatgtgagggatggagatattgtattgtttaaccgacagccgtctttgcacaagctgtctatcatgtgtcatcgagtccgagtcaggccctggcggacgttccggttgaacgaatgtgtctgtaacccttacaacgccgatttcgatggtgacgaaatgaatttacacgttccgcaaactgaggaagctcgtacagaagctctcgaactcatgtcggtcaagaagaacctggttacaccgcgaaacggagaacccattattgctgctattcaggatttcatcacagccgcctacctgctctctcgacgagaccgattctacgatcgacaacagttcacgcagattntttcttacctcgatgatgccaacttgaagattgagatgcctcctccgactatctggaagcctgtcagactctggactggtaaacaaattttcaaccttctcatgcgacccaataaggaatccaaagtactcgtcaatctcgaagctaagtgccgaacgctcgtcgatcccgccaaggaagaccgttttcctcccgacatgtctcccaatgacggataccttgtcatccagaacagtgagatcatgtgtggtgtcttcgacaaaaacacggttggtgacggaaaaaagaactcggtgttcggtgtcattctgagggattacggacctgaggaagcggcgcaggcgatgaacagattagccaagattgcagctaggtggttagcaaacatcggtttctctctcggtatcaacgatgttatccccggtcctatcctccatgcgtctaaggatgcccgtgtcgagaaagcttatgatgaatgtgacgttttcatcgatcttgctaagaagggcaaattggagaatgcgcccggttgtgaccaagaagccactctggagtcaaagatctcaaagacactttccgacgtccgagaagctgtcggtaagatttgtatgcaggagttgagtagacacaatgcccctcttatcatggccacctgtggttctaaaggttccgtcattaacgtcgcccaaatggttgcctgtgtcggtcaacagatcattggtggttctcgtgttcgaaacggtttccaggatcggtcgcttcctcacttccgcaaaaantccaagaaccctccctccaaggggttcgtccgcaattctttcttctccggcctcactcctcccgaattccttttccacgccatgtctggtcgagaaggtctggtcgacactgcagtcaagactgccgaaaccggttatatggctcgtcgattgatgaaggcgcttgaggacttgtgtacacactatgatctgagtgttaggaattcggttggaggtatcgtgcagttccaatacggtgacgatatgcttgatccggcttgtttggaaggtgatgctacgcctgtggagtacgttcgaagttggacgcatgcttacaatagcgaacggccggtaaccaaggacgagctctgtatccctatgaagttcgccgaatcgctgctcgaatataccccgagtcttttgttcctcccaacttctctctatccccgcctaagaccaagagtcggcgtcgcaaggaacccactccgccgccgcctgtcgttgcacctactctccccaaggagtgggaaggttaacacctacaagtttgttgtggataagatcgttaagcaaatggttgaccagaggctggcgaggggtttaccggatgcggatgatgaggaaatggcggaggaatacgaggcgttgttgaactcggatgatcctgctgttcagcgtgtactggagaatgccaacaaggttaccgaagctcaactgagttctttcctcgaaaactgtcgtatccgctaccttcgagccaagatcgaacccggatctactgtcggtgccgtcggtgctcagtctattggtgaacctggtacacaaatgacgttgaagactttccattttgctggtgtcgcttcgatgaacgtcacgttgggtgtaccccgtatcaaggaaattatcaatgctgcaaaggttattagtacgccgattattgcggctgagttggccattccagaaagtgaaacggcggcgaggattgtgaaggggcgaatagagaagacagttttgggtgatatcgcggcagtgattgaggagagttggacaaacgcaaacgcctacattgaggttcacattgatatggatgctgtgcgacgactacagctcgagatttcactggagtccatcaaatgggcattggttagggccaacaagctcaagatccctgagggcgtaagtgcagccactatcctctcctccattcacatttcacaaaagacctcacgtatccgtatttggattgacgaatcagacaaggataagggtgttggtatctacgaacgtctgaaattcctcaagcgcgccatcccttccgttcaggtcaagggtctccctgctattgaacgtggtgtcgttaccaaggacgagaagaacgagaagatccatcgattgcttgtcactggttacggtctgtcagaggtcatgggcaccgaaggtgtcgacggtctcaagactaagaccaaccacgtcatggagactcaacaggttctcggtatcgaagccgccaggtctactatttacaatgaaatccagacgaccatgaaatcgcacggtatgtcaatcgacccgcgacatgtcatgttgttgggcgatgtcatgacctataagggtgaggtgttgggtatcacgaggtttggtgtgcagaaaatgaaagactcggttctgatgttggcgagtttcgaaaagacgacagatcacttgtttgacgcttctttgtactcaaagaaggacgaaattcaaggtgtatcggaatgtatcatcatgggatcctgctcctggttgtggtacctctctcgcgtctatcgtcactcccgctccaccactaccctccaagaagcccttgctgttcgaggcggcgtacaaggcgggccagcatag

SEQ ID NO: 2359 - DNA, 4875 bp, Cryptococcus neoformans
atggcagcgccagagaagcctatcgtgttcactgaacacctccaactcacagccctaggcgtccaacccacctccatctccttccaaacactaacactcgaatcagatgcctggatttgtgtcagagaaaccggcgatacacctcaggtcgtcattgtcaacttgaacgatgctggtgatgtcgttaggaggcctatcacggctgattcggctattatgaacccaagagcaaacgagaagatcttagctctcaaggccggtcgacagctccaagtgttcaacctcggcgccaaagccaagcttggtacccaccttatgaacgacgatgtgactttctggacttggatcaacaatactactttgggtatcgttaccgaacgagaagtgtaccactggaaggttatggatggtcagactgctcctaccaaggtatttgaccgacacgccaacctcactgcgaaccaaatcatcaactatagaatatcacacgacgaaaaatggcttgttcttgtcggtatctcttctaatcccaatgccggccaacccggtgagaacggtttcaagatcaagggtgccatgcaactctactctatcgagagaggcgtttcacaacccatcgaaggtcacgccgctacattcgcttccatcaagctcgacggtgctcccaaccctacaaaactgtttgcctttgcagtcaggtctgctgctggtgccaaattgcacatcgttgagattggtcaccaggcacccaaccctcccttccagaagaaggctgtcgacgtgttcttccctcccgaggccctgaacgactttcccgtctctttgcaagtctcccagaagcatggtattctctacctcgtcaccaagttcggtttcattcacctttatgaaattgaaactggtcagtgtatctacatgaacaggatttccggcgagaccattttcaccaccgccgagtatgagacattgtcaggtatcatcggagttaacaggaagggccaagttttgagtgttagcgtggatgagcagactattgtgccctacatccaacaaactctcaacaacccggagctcgctatcaagcttgctactcgtgccggtctccctggggcggacggtatgatccaacagcagtatcaagtttacatccagaacggccagtacggcgaggctgccaagattgccgccaactctccccgtgggttgttgcgaacccctcaaacaattgagacgctcaagaatctccccgctgttcctggtactcttactcccatcttacagtactttggtattttgctcgagaagggagagctcaacaagtacgaatctcttgaacttgcccgccctgttgtccagcaaggcaagaagcagctcctcgagaagtggctcaaggagaacaagctcgagagcagtgaggagctcggtgacctctgtcgaatggccgatatgaacctcgctctatccgtctaccttcgtgccaacgttcctaacaaggtcgttgcttgtttcgctgagctcgggcaatttgacaagattgttctctactccaaaaaagtcggctatactcctgactatgctcagcttcttcagcatcttgtgcgtatcaaccccgacaaaggtgccgagtttgctacacagctcgtcaacgatgagaacggccctctcgttgaccttgaccgaattgtcgacatcttcatgtctcagaacatgctccagcaagctacttctattctcctcgacgctctcaaggacaacaagcccgagcaaggtccactccagacaaggttgcttgaaatgaacttgatgagcgctcctcaggttgcggatgccattttgggcaacgaaatgttcacccactatgacaggcctcggatcgccaacctcgctgagaaagcgggtcttgtgcagagggctttggagcattacgaggatatcaacgatatcaagagggttgttgtacacaccaacttgttcaagcccgagtggctggtggactactttggacgactcactgtcgagcagagctttgcttgtttgcaagaaatgttgaggacgaacttgaggcaaaatttgccgatcgtcgtgcagatcgctaccaagtactctgacttgcttggttctgtcaagctcatcgaactgtttgagcagttcaagagttcggacgtaggtttgtactactatctcggttccattgtcaacctcagcgaagaccccgaggttcacttcaagtacattcaagctgctacccgtaccggccaaatccgcgaggtcgagcgtatctgccgagagtccaacttttacaaccccgagaaggtcaagaacttcctcaaggaagcccgtctcgacgaccagctccctcttatcattgtctgcgaccgatttgactttgtacatgacttggttctctacctttaccagaacggtttgaccaatttcattgagatttatgtccagcgagtcaactctgccagaaccccccaggttatcggcggattgttggatgttgactgcgatgagacaaccgtgaagaacttgttgatgagtgttaccggcaccttccccattgacgatttggtggatgaagtcgagaagcgaaacaggctcaagctcatcttgccttggctcaacaacaaggttgagcagggttctaccgaccacgcgatttacaacgccatcgccaaaatctctatcgactcaaacaacaaccccgaaaaattcctcaaggagaacaacctttacgaccccgctattgtcggcaagtactgcgagaagcgagatccttatctcgcctatattgcttatgccaagggcttctgtgacgacgagctcatcaatatcaccaacgagaaccagatgtacaaacatcaggctcgatacctcgttaagcgacgcgacgttgacctctggacacaagtcctcaatcccgagtctatccaccgccgtgcccttatcgaccagatcattgccactgccatccccgagtgtgtcgatcctgatgatgtgtccgtcaccgttaaggcattcatgcacatggaacttcacggtcccttacttgaattgctcgaaaagatcataattgagccatcacctttcagcgacaaccgctctttgcagagcttgatgttcctcaccgctatcaagaacgacaaaggcaaagttatgggttatatcaacaagctttcaggatatgacgttgagactatcgccaaggtcgctaccgaggccggtctttacgaggaggcgttcacaatttatcagaagcacgacatgcacgccgaggcaatgagcgtccttgttgaacatatggcttccattgaccgaggcttcgcctatgccaacaagatcaacgagcccgctgtctggagcagactcggtaaagcccaacttgacggtttgcgtgtcaaggaggctatcgactcttacatcaaagctgatgacccatccaactttgaggaagttattgagattgccaaccgagctggcaagcatgacgacctggtgcgatacctccagatggctaggaagactgcccgcgagcccaagattgacactgagctcgcttacgcttacgccaagactgaccgattgcacgatatggaagagttcctcggtatgaccaacgttgccgacgtcttgcaggttggtgagaaatgtttcgatgatgagctttaccaggctgccaagctcttattctcaagcatctccaactgggctaggttggcaaccactttgatctacttgggcgagaaccaggcggcggttgacgcagctaggaaggctggtaacactcaggtgtggaagcaggttaacgctgcttgtgtggataagaaggagttccgattggcgcagatttgtggtttgaaccttgtcgttcacgccgaggaacttcctgctttgttgtcactttacgagaggaatggctactttgacgagattatctccttgatggaggccggtttgggtttggagagggctcacatgggcatgttcacagaactgagtgtcttgtacgccaagtaccgacccgagaagctcatggagcacttgaagctcttctggcagcgtgtcaacattcccaaagtcatcaaggccgcagaacaggctcacctctggcccgagcttgtcttcctctacattgtctacgatgaacccgacaacgcttctttggctatgatggagcgactcgccgactgggaccacgatcaattcaagaaggttattgtgaaggttgccaatatggaaattgcctaccgggccgtgtccttctaccttgctcgacaacccaccctcctccccgatcttcttgctgctcttaccccccgacttgaccacagtcgagttatcaagatcctccaaaccgaagaccacctccctctcgccaaaccttacctcatcgccacccaaaagctcaatctcgccgtcatcaacgaggcttacaacgacctgcttattgaagaggaggatcatgtcactttgcgaagcagtttggagacttatgatgagtacgatgcaattaagttggcgaagagattggagaagcacgagttgttggagtttaggagaatcgctgctttgctttaccgactcaactctttgtgggaagagtctatttctctctcaaaggccgatagattatggcgagacgcccttgagactgctgctgcgagcaaagacattgccgtttgtgaggagcttgcaggctactttgtttctattggcaacaaggatgctttcgctgctattctctatgtctgcttcgagtttgtccgagctgactttgttgaggaaatgtcttggcgattcggcttgtcagattactctatgccttacaaactcgcaacaacgagatcaagctaccaaggttgcggcgcttga

SEQ ID NO: 2360 - DNA, 4989 bp, Cryptococcus neoformans
atgctgcgacgtccttcggtggccagagggggtgatatggcatttaagggaagtgtaaacgtttcccattcccatacctcgttaccctccatcgttgccccctctctgccgccgacaccatctcgacagcaggcttacgcccgtccaccttctacaattcaaggacaccgctcacggagatcgtctacagcaacgacactttccttgtctaattttggccccaattctcctggtccccagctctcaaccgttctaatcacccccccacttcaacttttggtcagttctaaggaggcaaagaaatctccgtcgttccatgctgcggctcagcgtgcattagacctgtgtcaaagcagtgaaggggcaaatgcagcctatcttcatcctcgcgaaatatttgaacccttacggcttgcaatctccaatcctcagactacatcggtcccgatcctcgtgacatctctcgatctcctttcaaaacttatatcccactctttttttgccgaacctcatggccctccccctggactccctcctcttccagatcttataacccacactattacactttcatattctgaaagctctccgccccaagtagcccttcaggttgtcaaagcactcatggccattgtcctttccaccgacaaaggcatgcttgttcaccaatcatcccttctgaaggctgttcgtaccgtttataatgtcttccttctttccaatgatgccgcaaatcaggtcgttgcgcagggtggtctgacacagatggtgcaccatgtgtttggtcgagtgatacggcccgatataaagaatgcaacgcctgaaagcggcagaggaagtgcgcctcgtcttccgcagcacactgtttcgataccagtccctgccagtgttgctgattccaatggtgcaccttcaaaccaacaagcagggcaaggaatagacgaggaaggtggttcgttcgatgcgatgggcaggcccataccaactgaacagctgtttgtcaaggacgccttcttggtgttccgagcactatgtaagctcacgatgaagcctttagtaacagacagcgagaaagacctgcgatcacatgccatgcgatccaaactcctctctcttcatcttgttctcaccatacttcgctcccactctgacatttttgtgaatcctctcgtctgtataccgtcgaactcgtctctagagatgactccgttcctacaagcgaccaagcaatatctggcgttgagtctttcaagaaacgcattgagccccgtgaaccaggtgttcgagctcagtgttgagatcttctggtgtatgttgaaggatatgagggcacaattaaagaaggagattgaagttcttcttaacgaaattttcatccctatcctcgaaatgcgccattctactatccgtcagaaatctatcatcctcggtgtctttattcgcctctgtcatgatccgcaggcccttgtcgagatttatatcaattacgactgtgatcgttcatccctcgaaaatatatatgagcgtttgatgaatatcgtctcaaagatcggccagacacatttcgcacccccaagcaaagaggaactcgcccaggggggttcaagcaaacagacaagtggatcaagtggacctgctataccaccatcgctgagcacctcggcccttggagaaggtgtaggacacaatgctcctcattacgctggtatgccaccggagatcaagttgaggagacagtcgttggagtgtttggtcgctgcgttaaattcactcgtggcctggtctacttcaaaccctggtaccaaagcagggaatttggaggaaaaccactctacaactgatgccgtcgggaggcatcatgcttctggatcagtttcgggttccattgccgaacttgttgctccaacacccatttggccaacagactcgtcgttgaaatcgtcggatgacgtgggcaagtttgaatccgccaagcagcgtaagacgaatctgcttgagggcatcaagaagttcaatttcaaaccaaaacgtggtattgcctacctcctcgaacaaggatttatccggtccaactctcccgtcgacattgctcgattcctccttaccaatgaagggctaaacaaagctatgattggtgaatatcttggtgaaggtgatgatgagaatattgcgacaatgcacgccttcgtggacatgctcgacttctccaatatgcaattcactgatgcgctccggatgtaccttcaatcattccggcttcctggcgaagctcaaaagattgacagatttatgctcaagtttgccgaaaggtacatgcacagtaacccctcatctcatttcgctaacgccgacaccgcctacattcttgctttttctgttatcatgctcaacaccgatgctcataacaaaaatttaaagcagaagcgaatgaccaaacaagagttcgtgaagaacaacagagggatcaatgatgggaaggatctgccggaagagttgctggctgggatctacgacgaaattacgaccaatgagatcaagatgaaggatgaggttgaaatccctcaaccggcaacttctggtggtttagcaagtgtagggagggatctgcaacgagaggcgtacgtggcgcaatcagagaacatggctagtaaaacggagtcgttgctcaaagcgatggtacggcaacagcgacgaggcgttgttcgtccgacagatcattatcacacggcgtcacgtctggaacatgtgcggttcatgtttgaagttgcgtggatgcctttccttgctggtatctcagctccattgcaagagaccgacgatatggacgtcgttgatctctgtcttgaaggtctgcgttctgccatccgtattgtctgccttttcgatatggaattggagaggaatgcctttgtcacgactctcgccaaattcacttatctcagtaatgtagcggagatgaagccaaagaacatggaagccatcaagagcttgttagatgtggctgtgacggatggaaactacctcaaggcctcgtggaaagatgtgcttgtatgcgtaagtcaactggagaggatgcagttgatctcgagtgggatggatgtacccgatttaaacaggactgtccccaggacaacatcaaccgacaagagaaagccatcgtcatcaaagaagaaggtcccaacggaggaggtggcagaagagtctagatcttcccaggttactgtagcggcagatatggtgttttcaacaagtaaaaacttgtctggctccgcgattgtcgattttgtcaaagccctgagtgaagtttcctgggaggaaatccagtcttcaggttcttcggctcgccctcgaatgtttagtttgcaaaaactcgttgagatttcatattacaacatgggtagaatcaggctggaatggtctaatatctggttaatcctcggcgagcacttcaatcaggtttgctgccataataatcctaacgtcagcttctttgccttggatgccctaagacaactggccatgaatttcttagagaaggaggagttgtcgcatttcagattccaaaaagattttctgcgaccatttgagtataccattgtgcacaacaagaactctgacgctcgcgagatggtcttacaatgccttcaacacatgctgcaatcgcgtgtacaaaatcttcgatcaggctggaggacgatgttcggtgtcttttctgccgcttccaaagttgtcacagaacgtgtctgcagctacgcattcgaacttgttacactggtttaccgcgactacttctccctagtcgtcaaatatggctccttttcggatctcactgtttgtatcacggatttctgcaaagtatccaaatttcagaaaatcagtctacaagcaatcgagatggttaggggtttagtaccaactatgctacagtgcccagagtgtctcttgccccaattaggtgacgagggtaaggtacagcatggcgatgacccaatggtgaagtactggcttcctgttcttcactcattctacgaaattatcatgacgggagaagacttagaagtcaggcggctcgcccttgattgtctctttgacactttaaaaacacatggatctgggttctctgtcgacttctggaacatcgtctgccagcaagtccttttccccatcttttccatacttcgggccaaatccgacatccgcttcaagtcgcctgaagtccttagtatatggttgtcgacaacactcatctctgcgttaagggatttgattaacctgtacaccgtctattttgaggtaatgcaacggtatctcgatggtttgcttgatatcttggtagcttgcatttaaaatgatacgcttgcgcgtattggcacatcctgttttgaacagctcctagaacaaaacgttcggaagctcagcccagagaaatggatgctcattgtgtcggcattcgtgcagttgttcaagactacgactgcgtatcagctatttgatcccgtgatgtgttccgagattgagccgaccggcaatatggacgaaaatgacgccccccttgagcctgcaaccgataaacctccatctcttccttccaccatcagctacggcgagcaacgacgtatcttcaagcaagtcatcgtaaaatgtgtcctacagctccttctcattgagaccacccatgagcttttgcagaacggcgaggtgtacaataccattcccgccgagcacttgctgagattactggacgtgctagacgacagctggagtttcgcgagaaaatttaatgctgataaggaactgaggatgcagttgtggaaagttggcttcatgaaacagctgccaaacttactgaaacaagagtctagcgctgctgcgactcttgtgaatgtcttactgaaaatgtacaacgatccaagagaagcccacagggcgacccgaaaggacgttgttaagagactggtagtcagtggactcttatctttctctgcttga

SEQ ID NO: 2361 - DNA, 7293 bp, Cryptococcus neoformans
  misc_feature (4248)..(4248): n=g, a, t or c
  misc_feature (6268)..(6268): n=g, a, t or c
atggccgccctcttctcttccgcagcgccgatgcgccccctcgtcctccacgacgccgcaacgcgcgtctccgtacacgtcccagcctctccgctctccgcctgggtcacatcccaggtagtcgcccaggacttccaggactccatcgtcggccaacacacgcccgctcccgtcgccgacgaggacgaagagcccagtgcgccctccgttgagccccaggtcaagctcctcgcccagttcttgagctttgtcgccgacagggccgtccaagatgcctctcatgaactttcagaggtgctgctcgctgcctacaacaggttcaacgagctcttcctctccgccaccaacgtccactctctcgtccagtccttcgaccccgagacccgagcagagatcctcaaggcttacttcaaggcctttgcgactgccagggagcagctcggtgacaaggtgcagatcgctcacccttcggctcttctcgaggctgccaaggatggcagcacagagctttacgctttgttcggtggccagggtgtcaacgaacactactttggcgagctccagttgctctatgatacttacacgcctttcgtcgctcccatcatctctgagattaccgacttgttgatctctctcggccacaaggctgacaacgacggctacacctactattctcaaggcctcgacctcctctcgtggctcgacggctcttctcctcaacctagtgtcgagtactttgcctctatccccctttctcttccccttattggtgtcgcccagcttgcgcaatacgtcatttcttgccgagtcactgacatctccccagcggagatgcgagaaaggttcaagggtgccaccggtcactctcaaggtatcgtctctgctgtcgccatcgcttcctccaacagctggtctagcctgtacgagaacatcctcaaggctgtgaagcagctcttttacattggtctccgaggccaagagggcttcccgctcctcgctatcgaccccaagatcgtttctgactctgtcgagaacaacgaaggtgtccccactcctatgctttccatcaacggtctcggcctcaaggcgctcgagggccatatcaaaaaggtcaactctcaccttgcttccaactctcaaatcggcatttccctccacaacggacctaccaactttgtcgttaccgcccctgccaaggcactctacggtcttgtcaccgctctcagaaaggtcatggcccctgccggtctcgaccagagcaaggttcctttctctaagcgaaaggctgttttcactatgaggttcttgcctgtcaacgttccttaccacagccactaccttgaaggtgctacccagaaggttgagaaggacttgggcgaggaattgtgggatgccaaggctttaggtatggccatctaccacactgaggacggctctgacctccgatcctccgaaatctctctcaccacttctctttgtgaccagatcttcaccaggcccatccactgggtcaaggcttgtaacttcccttctactgccacccatgctgtcgactttggacccggtggtaacagtggtatcggacctcttactggccgtgccattgaaggccgaggtgtcaggattgtcgtcgttggtgaaaagggcaaggccgctgccgagttctacgacgctaccaagatccgacgtgaacctgtctgggccaaggaatggtctcccaagctcgtcaagactcttgacggcaaggtccacattgacactcccttctcccgattgctcggtaaacctcccatcatggttgccggtatgaccccctccaccgtcggcgccaaccttgtggctgccactcttgacgccggctaccacattgaacttgccggtggtggtcactacaaccccaaggctcttcgagccaaggtcgctgaaatccagaggcgggtcaagcccggagttggtatcacactcaacgctttgtacatcaaccagcgacaattctccttccagttccctctctggcaagaaatgcgcaaggaaggtctccctatcgaaggtttctgtgtcgctgccggtatcccctcctctgagaaggctactgaaattatcaccgccctcaaggaggccggtatcaagcacattgccttcaagcccggatccgttgaaggtatcaggcaggtcgtcaacatagccgctgccaacccagactaccccatcatcatgcagtggaccggtggtcgtgccggtggtcaccactcttgtgaagacttccaccagcctatcatcgctacttaccctgcgatcaggcagaaccccaacatcagcttgattgccggctccggtttcggtggtgccgaagatgtctggccttacctttccggtgaatggtccgtcaagatgttcggtctccagcctatgcccttcgatggtgtcctttacgcctcccgagtcatggtcgccaaggaagctgacaccagcgcttccgtcaagcagctcattgttgacgctcccggtgttgacgacgcccagtgggaaggtacctacgacaggcccaccggtggtatcctcaccgtcagatccgagctcggcgagcccatccacaagattgccacccgaggtgtcaagctctggagagagtttgacgacaccgtctttgcccagcccagggagaagagggctgcttggctcgagaacaagcgtgactatgtcattgacaggcttaacaaggactttaacaagccttggttcggcgagaagtctgacggcactgtcgttgccgacattggcaagatgacatacgaggagattaccaagaggatggtcaggttgatgtacatcgccaagcaggacagatggatcgacgtttctctccgaaaccttgtcggcgactggttgaggcgagttgaagagagattcgctggcgtcgacggtatccgcaccaaggagtcccttctccagtccttctccgacctcgacaagcccttgcctactatcgagtctttctttggcacttaccctcgagccaagtctcagcttgtcgctgccgaggacaaggccttcttccttgccatctgtcaacgacccggccagaagcccgttcctttcatccctatcctcgacaacaactttgaggtgtggttcaagaaggactctctctgggctgccgaagatgttgaagccgtcttcgaccaagacccccagagagtctgtatcctccaaggccccatggccgtcaagcacgctactgttgttgacgaacccatcaaggacatgcttggcaacattgaagctctcttggtcaagaagatcttgaaggagttctacaacaatgacgagagcaaggttcccgagattgactttatcggcgccaaacccggtaagcccaaggctggtctcgtttccgagtccgtctctggcgacgtcaggactctcaaggtcggcaagaacgtccccgctcttgacgactggctcgaggtcgttgcgggtgccaacgttagctggcttcgtgctgctttgacctctgtcaacgtcgtccagggagctggctacatctccaaccccttcaggagaatcttcagcccccgagctggccagactgtcgtgatcaagtctgagaacggcaaggctgtctctgtcaccgtttacggtgcagccaggtctttcggtcctcacgcggccgacttcaaggctgtcgagctcactttcaactccaacactaacgccatgtctctcatcatgtacgaggagcgacgaggtgtctctgtccctctccatttcgcctttgcttaccaccccgagcaaggctacgcccccatccacgaagtcgttgaaggtaggaacaagtccatcaaggacttttactggaggctctggttcggcgacgacgaaaagttgccctctctcaagcttgacactaccttcacttgtgatgagagcaaggtcgatgccttggccgtccagaggttctgtgacgttgtcggcaaccagggtgaggcgttcaagtctgctaggaacgagaaaatcatggctcctatggactttgccatcgtcctcggctggcagtccgtcatgaaggccattttccctgatgacattaacggtgaccttctcaaacttgttcacctttccaacggtttccgaatgatggatggtgttgcgcctctccgagctggcgacgcttgctctgccgaggcacgtgttgtctctgtcatcaactctgacagcggcaagactgtcaaggtgaagggttacgtnctccgtggcggcgagcccgttatcgagatcagctcttccttcctctaccgaggcaagttcaccgactacgagaacacctttgagactatcgacgaggatgactacgtcgttgagctttccaagcccacttctgttggtatcctccaggcgaagccttggttcgaatgggatgatgactcggttcccctcgatgtcggtaccacccttactttcaagacaaagtctgaattgaggtacaaggacaagtccaccttcagctctgtcaagatcagcggcgccgctttcatcagggacagcaccaaggccctcattcaggttgccaccatcgattacgaggcccacaacttgcagggtaacccagtcattgagtacctcaagcgacacggtactgccgtcggcaagcccactcccttggagaatggctactcccttatcgaggaccctaccgccgccgtcttcaccacccctgccaccaacgagccttactccaagatctctggtgactttaaccccatccacgtcaacccctacttctccgaccttgcttctttgcctggtaccatcactcacggcatgtggtcttctgctgccacccgaaagtacctcgagagcgtcgttgccgacaaccaccccgagcgagtcgtttcttaccaggtcggctttgtcggtatggtcttgcctggtgatgagatccaagtcaagcttacccacaccgctatgagggacggtaagaaggtcgtcaaggttgaggccttcaatcagcgtggtgagaaggttatcgacggttccgccgaggttcttcaaccccctaccacttatgtcttcaccggccaaggctctcaagaggttggtatgggtatggagttgtacaacaactctgaggttgcccgcgccgtctgggacgttgccgatgcgcaccttacttccacttatggtttctccatcgttgacattgtcaagaataaccctaaggagcttaccatccatttcggtggtatcaagggtcaggccatcaggcagaggtacatggacctcacctacgacatcattgacgagaacggtcgagttaagaccttgcccttgttcggtgacattgacctctacaccacttcttacaccttctcccaccctcaaggtctccttttcgctacccagtacactcagattgcgctcgtcgttactgagaaggctgcgttcgacgacatgaaggccaagggcttgattgaccagaacgccgctttcgctggtcattcccttggtgaatactctgctcttgctgctatcgccgatgtccttcccatctcatctcttgccgatgtcgtcttcttccgaggcatcaccatgcaacgtgctgtccagcgtgatgccgagggcaagtctcagtacgcgatgatggctgccaacccctctcgagttggcaagactttcaacgagatggctttgcgagagattgtcgacactatcagccagcaaaagtctgttctcctccaaattgtcaacctcaacgttgccaaccagcaatacgtctgcgctggtgaacttcgtgctctcgctacccttaccaacgtgctcaacatgctcaagatccagaagatcgacctagagaagcttagcacaatgatgagcattgaggaagttaaggagaagttgggtgagattattgagggctgttgggacatgatgaaggagaaagaggagaaggacggttctgtcatccttgaccgaggtttcgccaccattcctttgcccggtatcgatgtgcctttccactctaggtacctctggcccggagttctctctttcaggaattatcttgtcaagaagattgacccctctcaactcaaccctgacaggttgatcggcaaatacatccctaacttgatcgccgagcccttcgaggtttccaaggcttacgtccagaagatctttgaccagaccgcttctccccgaatggagacagtcctcaataactgggagaagggcttgggaatccccctcccaaaggcaacgattggcttanaacatcttgaccgaatgtcttgcttaccagtgagtttgattgtagatcatagcattggtgatactaattggccatttagattcgcctcccctgtgagatggattgagactcaggacgttttgttcacctacgccaagttcgagaggttaatcgaggtcggccctagccccgtcctttctggtgagtgcccacagcccattgtacaatcatctacagaaccagcttacgcttgcgtcaaggtatggctacccgaaccctcaaggccaagtacgaggcccaggacggtgccatctctcttcaacgacagatcttgtgtcatgccaagaaccagaaggaggtctactacgcgtttgaggatgaggctgctgatgaggctcctgccgccgctgctgcctctacctccgctgctcctgctcctgtggctgcgcctgttgccgctgcccccgctcctgttgccgcttctgccggtcccgctgctgctgttgaggatgttcctcccaaggccgtcgacactgtccgaatcattgttgctcagaagctcaagaagcaggttagcgaggtccctcttagcaagtctctcaaggagctctctggtggaaagtctaccctccagaacgagattcttggtgacctacaagttgagttcgcctccgcccctgaaaagggtgaggatctccctctcgacgagcttggtgctgctcttagcgttggctacgccgctctcggcaagcactccatggctcttaccaaccgaatggttgcctccaagttccctggtggattcaacatcaccgccgctcgagcccaccttaataagcaatggggtcttggtcccctccgaaccgactctgcgttgttcttcggtatccttaacgaacctcccaagcgtctcggttctgaagcagaggccaaggccttccttgaccagcttgctcagagctacgcttcttacagcggtatcagcctctcatctggtgctgctgctggtggagctggcggtgcggccggcggtggtgcggtcatga

SEQ ID NO: 2362-3000 - skipped (639 entries)

SEQ ID NO: 3001 - protein, 92 aa, Cryptococcus neoformans
MANLGVPVKLLHESLGHIITVELKTGEMYRGKLMEAEDTLNIALREITVTARDGRVSQLEQVYIRGSMIRFIIVPDLLAQAPMYVSSSQFRS

SEQ ID NO: 3002 - protein, 103 aa, Cryptococcus neoformans
MTRFTSVSRHISLTSCSSRYPNRYAGLQQRNGRKTLTTVQGIPSKYNHSKILKAMKKEFACNGTVVKPEVDSGEEDSPAPVAKNHGDVLQLQGDQRVAAKQFL

SEQ ID NO: 3003 - protein, 114 aa, Cryptococcus neoformans
MKVEINSYRAVAYWIWDVSDEPHKLYHYAPPDEVGLDDDDDQDVCGICQAAFESTCPDCKIPGDDCPLIWGECTHVFHMHCLLKWIGQKEDESQQQCPMDRRPWGKSSIKSLCS

SEQ ID NO: 3004 - protein, 118 aa, Cryptococcus neoformans
MLSFFSIMPPAPTVQQIQSLYSATVNASQRFTSYNFHKYFLRRADEVFKPVLASLAPPAGSAPSDPIDPSRLAQFYEQQKTQLEILERASEVNRMYEGPKLVVECSAYNKWRRGWYGS

SEQ ID NO: 3005 - protein, 129 aa, Cryptococcus neoformans
MVKAIEVLRRVEDSRKLHPLELWSLSANPSHTQTSGSDVVVVDYWATWCGPCKMISPHFAKLEGKFPNVKFAKVDVEEQEDIAKEAQIKAMPTFVAYKDGKVIETVTGAVPAKINVGLYSFFLRCLRFG

SEQ ID NO: 3006 - protein, 119 aa, Cryptococcus neoformans
MAEYKEDLEKTGAGAQKIHKIRITLTSKNVKPLEKFCADLINRAKDRDLNVRGPVRLPTKVLKHTTRKSPCGEGSKTWDRYQMRIHKRLIDLNSSADVVKQITSISLEPGVEVEVTIAA

SEQ ID NO: 3007 - protein, 135 aa, Cryptococcus neoformans
MPSKGLIRTRCRFLMKLNNETVTIELKNGTVIHGTITSVDPQMNTHLKSVKLTLRSQPSSQPPLSLDSIAIRGNNIRYFILPDSLPLDTLLVDDAPKPKKKKEGAAARGARGAARGARGARGGGRGAPRARGRGF

SEQ ID NO: 3008 - protein, 130 aa, Cryptococcus neoformans
MSQPISKLDNPSTLLQSVSSNAVHEKITIVRLVANHEPDYSACTFALWQEDHTLGNALRWIIMKDPEVEFCGYTAPHPSEPKIHLRIQMYENQSAVDCLRRALSNLRDLLNAVNDSYTSSLQYVCLFHVV

SEQ ID NO: 3009 - protein, 126 aa, Cryptococcus neoformans
MSAADHGRDPCPYVILNDFGGAFSMGAIGGGIWHGIKGARNSPRGERLVGSLSAIKARAPVLGGNFGVWGGLFSTFDCAVKGYRQKEDPWNAIISGFLTGGSLALRCESFFSVCCLETSGDVWDRG

SEQ ID NO: 3010 - protein, 119 aa, Cryptococcus neoformans
MSAQPNPKAFPLANAQLTNQILDLIQQAQHYKQLKKGANEATKTLNRGICEFIVMTADVEPIEIVLHLPLLCEDKNVPYVFLPSKTALGRACGVSRPVIAASVTTNEARELNAQIQAVK

SEQ ID NO: 3011 - protein, 146 aa, Cryptococcus neoformans
MVVVVEEVRDEAAEEVVLQEGENESDFETDSEVSSTISDDDDFNPADESFYDRLTALKDIVPPQTRSGLYNKYKSTTGWAWWGIQSAGSLAWLVSTSALLVGLPLALAIEDEARVVAQEKEMQMQSAGQAGEFGFFGTCHRLRRYC

SEQ ID NO: 3012 - protein, 165 aa, Cryptococcus neoformans
MDVSHVLDDRSTTAVLPRAAPVHTDPALLAAFDASPLDPAAYADRERHLLQLTLTSTHALVAALFALPTTPSSAGPVTAFPPPTTLLPREKPLPTPKAPTKWERFAKEKGISHRKKEKDVWDEERQEWVPRWGRFGKNKDKEDQWLHEVKPGDGASVFRPVDSLR

SEQ ID NO: 3013 - protein, 162 aa, Cryptococcus neoformans
MNQPNRIDSWLLQDDEKPLTITEDPKLPNASTIVIRRQDHTLGNMLRAQLMLDPTVLFAGYKVPHPLENDILLKIQTDERSNPAEALKRACHELIRQTVHIKAQFQQQAKNIEMGMGPEQGVAPDAAGANGAYDPYGDGFGREGNVVVGGAVRDQGQDVYDF

SEQ ID NO: 3014 - protein, 142 aa, Cryptococcus neoformans
MPTRFSNTRKHRGHVSAGHGRIGKHRKHPGGRGLAGGQHHHRTNFDKYHPGYFGKVGMRHYHLLKNHYYRPTINLDKLISLPEAKVDAPEGNVPVIDLVHLGKFKLLGKGRINKPFIVKTRFVSKLAEEKIKEAGGVVKLVA

SEQ ID NO: 3015 - protein, 163 aa, Cryptococcus neoformans
MRCIVNHWPVLLQLVPSPYFASKSVGDEPSLSGRSGIDFKIRTIELDGKRIKLQIVSCRQERFRTITTAYYRGAMGILLVYDVTDEKSFNNIRTWLSNIEQHASPGVNKILIGNKCDWEEKRSVTIEQGRALADEFGLRFLETSAKANEGVEEAFFTLARYVM

SEQ ID NO: 3016 - protein, 114 aa, Cryptococcus neoformans
MVSRFRSRVPIFLTHSSEIAHLLTLTDQVITVELKNDLSITGTLKSVDQFLNIRLDNISVEDPERHPHMMAVKNCFIRGSVVRYVRMAARSVDTTLLEDATRRGEFCLGCWRVC

SEQ ID NO: 3017 - protein, 185 aa, Cryptococcus neoformans
MTTDIPAQPLKTTKETHPDLPPGLIIGPDGKPCKVCNSWQDWAKIKVKKKAASGASKAPTNAPLDRTPDRSNCPPDTAALGRSTWTFLHTTAAYYPINAPPQTQSSMLNLLSSLSLLYPCSWCATDFQKDMRRHPPDVSGRESLMKWLCERHNEVNEKLGKEKFGCDIKNLDVRWKDGPEDGSCD

SEQ ID NO: 3018 - protein, 181 aa, Cryptococcus neoformans
  MISC_FEATURE (123)..(123): Xaa = any amino acid
MEVELPSMPTSIRQTYQGRLAASKQSLDKIRKTLVSLTRRVGYLRLQSQRSDLLSGPGFPHGDDPYTDDPEPYSTRSRLLAGTQTLEDGTTRLDNAHRIALETEGVGSEILRNLRGQRDQLEXTRDTASRHLVQADSSIDRAAGTLKKMIFKMYQQKFLSAGIIVVLVLLILLVLYSKFFG

SEQ ID NO: 3019 - protein, 158 aa, Cryptococcus neoformans
MRSHYFSGLLHPYLGSHVSSLPGKTLARDVLPTSTVSSVKEMIASAEGIPASEQRLIFAGVQMDDERALAEYGIQKESTINMVMSLCGGGKKRKKKNYTTPKKIKHKRKKVKMAILKYYKVGSDGKIQRLRRECPAPTCGAGIFMAWHKDRQACGKCG

SEQ ID NO: 3020 - protein, 163 aa, Cryptococcus neoformans
MQSGNNAEYREAFALFDKRGTGHVPRESLGELLRSLGQNPTQAEVAELEKTVGATFSYDEFLAVLNRPDGWKPAGTADEFIKGFQVFDKAGNGFIGAGELRYVLTQLGEKMTDEEVDELLKGFPVQDGQINYHSFVRSILSQRMGEGDGGRKCILFYLFLDEL

SEQ ID NO: 3021 - protein, 165 aa, Cryptococcus neoformans
MAESSNIIFDDRFTVDVGPFFYWLHISTEHFVFPRLRLIKDGKVSRITATSHSLSMSLTLDIANELYPLEQSETFTLTLARSLGSEVRRVKRELWRSHEQGLAEDYDYVMYGKIYKFDDSAQGEAQTTAYFSFGGLLMALRGSYRHLAGVVVGENVYLLMRVMKR

SEQ ID NO: 3022 - protein, 191 aa, Cryptococcus neoformans
MSRQLDNVNPTIFAPSAPSFVRRSTGKSAKSSLWAPEALSDDGEDYYSPGARSSGSVSDEEEGREDIDAQEVYDLLRSITDPEHPVSLEQLRVVNPEDIHVAGNRVLVYLTPTIPHCSMSTLIGLSLRVRLLRALPPRYRVDIRIKSGTHQSEHAVNKQLNDKERVQAALENKHLLSVVEGCLATAGKRGE

SEQ ID NO: 3023 - protein, 180 aa, Cryptococcus neoformans
  MISC_FEATURE (119)..(119): Xaa = any amino acid
MECSFGITGKCGYGTNGKDYVILASDMGAGRSIVRMKSDENKLKTLGPHLAMAFSGEPGDTNNFAEYIERNMRLYNIRNHFPLLPPAASAWVRRTLAEAIRSRHPYAVNLLLGGFDTTXQKPHLYWIDYLGTKAIVPYAAHGMGVYVSLSTMDKWWYEDMDKKEGVDLLRKCIDETEKRV

SEQ ID NO: 3024 - protein, 175 aa, Cryptococcus neoformans
MMRHWDIAETRDATIFNQLIRQHVSYTLSFHPLIILSFTQLISLSLFFPENCTKDNFPLVFSEVELVERPAPINPDFIKRFLPKLDWKALVDTARSLGDTSLPDTMPENWTDEEIQALHHVLFELHVEEGIMTCRGCGHAYPVANGIPNMVSDFGIWSMKQKPRGKKEKGLINLV

SEQ ID NO: 3025 - protein, 195 aa, Cryptococcus neoformans
MPSSRGLQPLHAKIISNNKRLLFIYLLLNLLPTSTLKLARHVLFYDPVSLTSPVIDPLANAHSLHSGWHVDQAILVEEDRVVCIRFGHDHDEECMAMDETLYGVSEKVQNFAVLYLVDITEVPDFNKMYELYDNCTLMFFYRNKHIMIDLGTGNNNKINWAITDKQELIDIIETVYRGASKGRGLVVSPKGGLHF

SEQ ID NO: 3026 - protein, 212 aa, Cryptococcus neoformans
MGAYKYLQELYTKKQSDVLQFVSRVRCWEYRQLAVIHRASRPSRPDKARRLGYKAKQGYLIYRVRVRRGNRKKQAPKGATYGKPVRQGVNHLKSPRGLKATAEERVARRCGNLRVLNSYWVNQDGVYKYYEVILVDPSHKAIRRDARINWIANPVHKHREMRGLTAEGKKNRGLGKGSKHNHQPQKATWKKHNTSVLFCFTLPIHLPLLTLR

SEQ ID NO: 3027 - protein, 195 aa, Cryptococcus neoformans
MPSLRMDSPLHCCYLVAPAVCLTYEKVQNIVATVNLDCRLDLKTIALHARNAEYNPRRFAAVVMRIRDPRTTALIFASGKMVVTGAKSEDDSRLASRKYARIIQKLGFEAKFAEFKIQNMVGSCDVKFPIRLEGLAFSHGAFSSYEPELFPGLIYRMLKPKVVILIFVSGKIVLTGAKVREEIYMAFNQIYSVLR

SEQ ID NO: 3028 - protein, 207 aa, Cryptococcus neoformans
MYFSVAGASETAVDRRERLRKLALETIDLAKDPYILRTHLGTLECRLCLTLHVNEGSYLAHTQGKKHQTNLARRAAKDNKDQTLMIQAPTAAQQVKKKVFVKIGRPGYKIIKIREPVSQRMGLLFTVSLPEIKAGERPRRRFMSAFEQRREIPNKAFQYLVLAAEPYETIAFAIPSKEMVDVDEDPESTWEHWDADEKVYSCQFLYK

SEQ ID NO: 3029 - protein, 213 aa, Cryptococcus neoformans
MNIFRFLGDLSHLASILILLHKIQTTRSCRGISFKSQLLYLIVFLTRYVDLVTHPLVSVYNTAMKLFFIASTAYTLYLMKFKYRPTHDASLDTFQLSYIFGPVAVLALLFNYKFTPFEITWSFSIWLESVAILPQLFMLQRTGEAETITTHYLAALGLYRGLYIPNWMYRYFTEGAFDAIAVVAGIIQTAIYADFGYIYVTRVLRGQKFELPA

SEQ ID NO: 3030 - protein, 191 aa, Cryptococcus neoformans
MRKYKWRWTEAGKGEDAKRKAKTNDDNNSRFPCYYFSCHFQFYHSSQTYLNMTGNGKGEDDVSLPKATVLKIIQEMLPEDISASKEAKDIIFDCCTEWIKLISTQSNMVCEASSKKTISPEHVVEALKQLGFEDFVAEVEESNKDFKQAQKERVRSQPDTKGMTEEELLELQERLFASSHARCSRAAIKIK

SEQ ID NO: 3031 - protein, 191 aa, Cryptococcus neoformans
MNKSAKLLFLGLDNAGKTTLLHMLKNDRLATLQPTLHPTSEELAIGNVKFTTYDLGGHIQARRLWRDYFPEVDGIVFLVDSADAERFAESKAELDSLLSIESLAQVPFLILGNKIDAYGAVSEEQLRHELGLYQTTGKGKIPLRDIRPIEVFMCSVVMRQGYGEGFRWLSQYVLSLDSTDWQSSCRILRSK

SEQ ID NO: 3032 - protein, 230 aa, Cryptococcus neoformans
MSVSAGIRNTSKRSFLIEITDAAQTYDSAPMRRPDIKKKLVVVGDGGCGKTCLLTVYAENRFPEEYVPTVFENLMTTVPSPTDPSKIIELALWDTAGQEDFDRLRPLSYNDTDVILIVFACNHRPSLLNVQDKWYPEMAHFCENVPLILVCTKTDLREDQQTVSLMAAQGTTPISASEGERIAKEIGARRYMECSAKAGMGVGEVFDAAIRESMKKGGLKKMKGRKCVVL

SEQ ID NO: 3033 - protein, 209 aa, Cryptococcus neoformans
MSHSHSTQTNNEGGRHFILLLTHLRGLAKMSSTGWEIRFSNSRQIPYFYNSERSISTWEPPSELSAEQIQQLPGAAKYMNVQLAQPAGGKEGQVRASHILAKHAGSRRPASWRNVRDKITITSDEAQAIIEQHIAYLQSLPPADLPKEFAKIASTESDCSSARKGGDLGWFGRGQMQKPFEDATFNTPVGQLSGIVKTDSGIHVILRTG

SEQ ID NO: 3034 - protein, 212 aa, Cryptococcus neoformans
MGGKNNRRGKKEDGENKRELIFKEDGQEYAQVVKMLGNGRLEAKCQDGESRLAQIRGQMRKKVWIVVGDIILLSLRDFQDDRADVIHRYTPDEARNLKTYGELKDFQLVENQEAGGEEDEEGGIEFEEADIDDICKPFALHPCLKRQPLMAYAETVGVVFCVYKECIQLSSVYRAFSFFHVIWFIISSTLSWPLSASCGIRKKGIGRPSPLT

SEQ ID NO: 3035 - protein, 252 aa, Cryptococcus neoformans
MEDMEELKVQMSALERANNIQGIEEDRMRKRRKTSAWPKNRELEVSPDFAIPLATPQLSLPKYALPLILSICLETRQLGTSIASIAESHGQLSLTQDRGLVCNLTVQHLAARRNKRCMLAYLATRVGGIKERWWDAGGGLAYLLSPAASASVNPEADAPDLRSALSPQELDFLRGYNNLLLDYKSDFLDVLDLTAGIEKPPGEIMVDVRVVRDAGEVFLDSGERVDFRKGQRFRLERAQVERLIIQGYLEEV

SEQ ID NO: 3036 - protein, 230 aa, Cryptococcus neoformans
MSLGRYIGWSILAFTYLVLAILLRLIFLQPSKTSRASYRPKDAKCSLGVFLGSGGHTSEMKALLSTLDYERYQPRTYIYCHGDDLSLRAVSDIESSKGGLISSKMYYLLSLPRARRVGQPLLSTMVSVLKTLYIAALRLFLIPLLKNPRRPFVDLLIVNGPGTCVVLVLVSYIRRILGLEYTRIIYVESFARVKSLSLSGKMIRPLADRFLVQWPDASDSDNVIHKGLLV

SEQ ID NO: 3037 - protein, 211 aa, Cryptococcus neoformans
MANINSVDISRLKNGEVNLGTSIMAVQFDGGVVIGADSRTTTGSYIANRVTDKLTHIHDRIYCCRSGSAADTQAVADVVHQHAQVYTSVYGSPPTVATAAALFEKLCYENKDQLSAGIIVAGWDKENGGSVYNIPLGGGMFQQPWAIGGSGSTYVYGYCDATYQEGWSKEETVKFVKNTLSLAMARDGSSGGCIRMCVITQDKVERHFIWK

SEQ ID NO: 3038 - protein, 197 aa, Cryptococcus neoformans
MIFARCLPIYRAQTHHQHSPSNYDIRISTTPPTRRQITSCLSRDIKQVLLMGKSQSKLSSEELAELQKNTYCEADCAREQYKGFLKDCPSGQLNKEEFKKIYRQFFPFGDPSQFADYVFNVFDEDKSGTIEFKEFICALSVTSRGRLDEKLKWAFQLYDINQDGYITYDEMLQIVRSIYKMTGQMVQLPEDEDTPEG

SEQ ID NO: 3039 - protein, 223 aa, Cryptococcus neoformans
MSFRAVISNAHHPQSVMELNGGSVVAMIGKDCVAIASDLRLGNQQVGIAANFDKVFPINDKLYCGLPGLATDVYTLREHLRFRVNMYRMKEEREITPKTFTHLLSSTLYEKRFGPFFLEPVVAGLPTPTSLEPHPRPYISTMDTIGCITTPKDFAVAGTAADKLYGIAEGLWEPDLEPEDLFETISQTLLSAVDRDALSGWGAVVNIITHDKVITRTLRARMD

SEQ ID NO: 3040 - protein, 234 aa, Cryptococcus neoformans
MPTLILPGETVPIPSTSKAVVLGPGISQSTPTLQASSSTALGMLHSGKGKERSQKLWIEGNSKRYIPAQKDIVLGIIIARHADGYRVDLGSSQMAQLDALAFEGATKRSKPNLKVGTLVFARVMSASRDMEPELECFDPNTGKSDGFGELKGGVMVNATLQLCRRLLDRNHIVLPTIASIFPFEIAIGLNGRVWMKAETVGETLAMKRLIESVDDHIIPVEEKAIKEKLREYLS

SEQ ID NO: 3041 - protein, 230 aa, Cryptococcus neoformans
MTTHHPRALPIVLITGTPGTGKTLHSQLLVSELSEADSPIPMKHLNIGDIVKEHGFHEGWDEEWKCWIVDEERLLDWMEEVVNPRDGPAETGFVIDHHDPSLFPERWIDLAVVLTCDNGILHDRLTARNYPANKISENITAEIMMTCLNETRESYAEEIVVQLQSEGKDDGEVEENVRRIAQWAENWTKSAGRGIIDMYGTSIRLMDARIVDGTDCLSVLLVEYIMCIDS

SEQ ID NO: 3042 - protein, 221 aa, Cryptococcus neoformans
MTIARPPIEHSFPSAFITCLIIPLSSLLTSRTNRKMPREAPMAPVSRSNRPSIVGPDEPEAPYPLKLEGTVTKGFGRGARYLGIPTANLPDESLGPLNDLGLTGIYYGFARKVESEAQLEALPTITAPYPPEHHAQRWSKEDEKVWPMVMSVGWNPYFKNEKITAEVHIMHPFKADFYGHHMSIVILGYIRPELDYVSRLAHPNHPLCFLFPLRTIFQIRG

SEQ ID NO: 3043 - protein, 201 aa, Cryptococcus neoformans
MSNEANRELARLWRVSRTVHEMVRDRGYLLADYEINVSFEEFKDRHADKSSSRSNMSFDAIHENDNTDKIFVYFCADKNVSKASMKTFIGSMDKMGARRGIIIWSEKMSPAAKKVRMQSEYHLEDFPESDLLVNITKHFLVPKHTVMKPEEKSALIKRYRLKETQLPRIMITDPVAKYYGLKRGQVMKIERASETAGRSHF

SEQ ID NO: 3044 - protein, 203 aa, Cryptococcus neoformans
MRPLTEEETKAVFEKLANYIGKNLVHLIDRDEDDEYCFRLHKDRVYYLPLPMLHLATSVARPNLVSLGTCFGKFSKTGKFKLGIMCLDYLAKYAKYKVWIKPSGELPFLYGNHVAKAHLGRITEDTPEHQGVVVYNMSDVPLGFGVTARSTLDTRKLDPTGIIVFHQADVGEFLRDEDTMFSSFTRLGIAVEVGRVWRNRRNR

SEQ ID NO: 3045 - protein, 176 aa, Cryptococcus neoformans
MQLSRTFLRQLRPASSSRVVLRSFSSSRSTFSETPAGDAPVNPKIAPIVDSISSLSLLEVSELVTALKTKLNITEISLPAASSPASAAASSTSSEAPVEEKPKEKTIFTVKLEKFDAAAKAKIIREVKALMPNMNLVEAKKFVESVPQTLKENIPKEDAEKLQKTLQDLGATVSLI

SEQ ID NO: 3046 - protein, 258 aa, Cryptococcus neoformans
MPYLSVFVTSPDTHSERRFDSGLTVQQLKDKLTPITGISPQYQVIKICRSADQTSGPPLAVLDDDSRTLASYGLEEWNCIKVRFPFLQPSKAKLTLSCQQVDNIDPNYRPGEFTDESNLERFELSPEEYAARSDTVLAHLKANKLGRFADAPTTLDSPLPPPPMIMDPTIVPGKRCEVSHGEDGMAKRGTVRFVGEAKIGKGGIWVGVELDEPLGKGDGEIEGTRYFSCLPKHAVFVRSAKVTVGDFPEEDIFSDDEI

SEQ ID NO: 3047 - protein, 238 aa, Cryptococcus neoformans
MWFWESVDVVKKGRPEIGGVITRRGIHFARYFCTSQNLLSITYPLLKHHEKKLLKKVDFLSWKQDASQREVKVMRKYHIQDREDYHKYNKLCGSLRSLIHKLSLLPANDPFRQQKEAEMLDKLYDMGILDIGSKPSDIENKVTVSSIARRRLAVVVARLKMSETVSDAVRTIEQGHIRVGPTPVTDPAMLVTRRTEDFVTWVDTSARKRTIMKYNDEVSVIFEPCGSFLSVKHQESDD

SEQ ID NO: 3048 - protein, 241 aa, Cryptococcus neoformans
MLRQPGTQIKYVRYRTLEPVIPARSLICLYRLTNVSIVRMKKGGKRFEIACYQNKVSEFRSGVENDLSEVLQIEQVFTNVPKGLVAKKEDWSKCFGTDDLNKVIEEILKKGELQINNLERTQHLSSLSREIATIVSEMTVDPNTSRKHTVGMVEKAMAEVGFSVRADRPAKAQALELIKKLAEGDVLPVRRVRMRVRITMPGKDAKRCKDKIVAECDEVEEEDMGMEWEAVGLLPTVQNVN

SEQ ID NO: 3049 - protein, 250 aa, Cryptococcus neoformans
MSPFLPALRSGKHRRPPRRHRSPRRHRSHPPAARPAAFRPALALARPLSSTAVAPRPHTPTSAINSYDHSPSTTLPDTTIAQQKSNQLSLETPRNGAEYVLSTLDKIVNWGRQGSMWPMTFGLACCAVEMMHMAAARYDQDRLGVVFRASPRQSDVMIVAGTLTNKMAPALRKVYDQMPEPRWVISMGSCANGGGYYHYSYSVVRGCDRIVPVDIYVPGCPPTAEALLYGMLQLMRKMRRNRQSVRWYRR

SEQ ID NO: 3050 - protein, 252 aa, Cryptococcus neoformans
  MISC_FEATURE (174)..(175): Xaa = any amino acid
MSGFLNSIGRLRAPKRSPTNTPTQQGFFDPLPSPGVENANQSYRPPSPGPKPLYLCQPFVKAALVKGSFKTIVAPPKYVDINEWVAINLFDFYHNLNQFYGVLTEFCTMQNCPTMSGGKTLNFLWPDHNQRLVSLAAPTYIDFVMSWLQKLLEDENVFPTKSGKPFDHSFAYTXXHIYKHLFRIFAHLYHAHFEQVLHLSIEAHFNSLFAHFLAFGKEFDLLVMKDLMTTQGMGQGVAELSEKWRQMGILES

SEQ ID NO: 3051 - protein, 241 aa, Cryptococcus neoformans
MAYPAAQSRFSASAPLPTTPLARRDSARTAPHPSLQQQLFGPPAAGAAPPSIVDRPLARTKGAEVAVGAWAFMFAEIVAYSQSRADSVSDLEARLSSLGYDAGQRLLPLLLLRNTQAAGTKEPKREHRLVPILQFIHTQVYRYCFGRAADGLERSVEEENEYMITLNQPPLTQFISVPKDMSQLSCEAYTAGIVEGVLDGLEVPARVTAHTVPTDAFPQRSVILIKLDQKVMDREGAGQVM

SEQ ID NO: 3052 - protein, 228 aa, Cryptococcus neoformans
MSGRGFSRGGGGGFRGGARGGRGGGRGGFQQRDMGPPDTVLEIGSFQHDVESEMLCSLTAPTKIPYFNAPIYLQNKTQIGKVDEILGPINEVYFTVKMEQGMLASSFKKEDKVYISGEKLLPIERFLPKPKVAGGKERGAQGGRGAPRGRGGAGSRGGRGGFSSRGGPGGRGGARGGAGGRGGFSSRGGGAPRGRGGFRGGTIRCTRRICVIDFLPFVCSGYVHVLSF

SEQ ID NO: 3053 - protein, 252 aa, Cryptococcus neoformans
  MISC_FEATURE (20)..(20): Xaa = any amino acid
MSAPGGGGAYSFSLTTFSPXGKLVQIEHALAAVAGGTTSLGIKATNGVVIATEKKSPSILLDTSALEKVAPICPNIGFVYSGMGPDFRVLVAKARKIAQAYWKVYGEYPPTKVLVQEVAAVMQKATQSGGVRPYGISVLIAGWDSHRGQSLWQIDPSGSYWAWKASAIGKNMVNGKTFLEKRYNDDLSLEDAIHTALLTLKEGFEGQMTEQTIEIGIVTCPTPEQMQEKPGERLPPTFRKLTEQEVKDYLSL

SEQ ID NO: 3054 - protein, 257 aa, Cryptococcus neoformans
MGIGQASEEVGGRKWDEPDNWRRVLDEWDSVDYLRFSASSSASQRQLICASFHLCLLAPNVHFHPPQLPRQGSPQACPQSSGQLLVSCSPSDGVYQQVYYRGAMRKVLTINRLASTESVTAAESIALLNSQRQHRPTSPHLAIYQPQLTWYLSSLHRITGVAFGGALYLSAMAYLLHPLVPVIDSAHLIQLVHDLPGWFKGSAKFIIALPFTFHCYNGLRHLNWDIGKALTIKGVYRTGYAVLGATVLSSLYLAFFI

SEQ ID NO: 3055 - protein, 275 aa, Cryptococcus neoformans
MPTPLALLLSAILIIGTYFAMPFWPFRKSNYDPRGKHCYITGGSSGLGKALAERLVKQGAHVTIVGRDSKKAEGVVEELKVSLEAPGQIIQCIAADLTSPIASTNAIHAACKPHADQAPDYVYLCAGFSRPKLFVETTKQELKDGLDGVYWVSAYTAHVCFMMSKQRRTGKIIFVASFLSYVSFAGYSSYSPAKYALRGLSDALRSEMLLHNIDIHIFLPCGISGPGFDAENRTKPAVTKKIEEGDTPITPEVCAAALESGASIFLHLCKMKKTD

SEQ ID NO: 3056 - protein, 261 aa, Cryptococcus neoformans
MAVRTQFENSTDIGVFSKLTNSYCLTALASSTNFYSVFEAELADVVPIVHTTIGGTRIIGRLTAGNRHGLLVPSSTTDQELQHLRNSLPPTVAIQRVEERLSALGNVIACNDYVALVHPDIDRETEEIIADTLKVEVFRQTIAGNVLVGSYCALSNQGGLVHPKTSRSELDELSSLLQVPLVAGTVNRGSEVIGAGLVVNDWCAFTGLDTTATEVSVIEATFRVSPPIKYRLILTTSTGLQGQTSTAVINEMRDSLIDHYA

SEQ ID NO: 3057 - protein, 204 aa, Cryptococcus neoformans
MAEKKQTVILTTSDDEQFTVEKIVAERSAMIKSMMEDLGDQEGQPIPLPNVSSSVLTKILEYCDHHKNDPLPTGDANDADDSRRKTSEIGDWDARWIQVDQEMLFEIILAANYLDIKPLLDVGCKTVANMIKGKTPEEIRKLFNITNDFTPEEEEQIRKENEWAEESLFHIIPRCHRLLTNTFVAAVKQLHVWGVLYIFRMLFI

SEQ ID NO: 3058 - protein, 253 aa, Cryptococcus neoformans
MAIFGLFGSSDPAPQESSASAELFSSTTFRSNVVPSQPEAQGSSFIPDPPSQSAPAPAPTAPAPTALDAFGSAFDPARLHPLAGLSENLDFLQLDEEKLNDLEGAASVLPSRGWTDDLCVGTGTTYLSGLAIGGTWGLKEGMSRPLGNNPSFKLRLNSILNGCTRRGSFMGNSLGVLAIFYNISNSSFDAIRGKHDVLNAMAAAGLSGAIYKSTAGLRPALVGAGLGTAAAAGWSAFKNFVIHFKGHTVLHHH

SEQ ID NO: 3059 - protein, 246 aa, Cryptococcus neoformans
MIQNYPTMALYAPPPPSYQDHAAGPVQHHGFNPYSDNGGSILAIAGKDFSIIAGDTRQSEGYSIQTRYARKVWQLTDKVVLATNGFAADGNNFVKRVKQRLEWYEHAHNKAMGLKSIARMIQTMLYGKRFFPYYVYNILGGIEEDGSGAVYSFDPVGSYEREACRAAGAAQSLIQPFLDNQVYFKNQQPEPGAAPFVPGNLPLSTVLSLVVDSFTSATERHIEVGDGMEIYVVMAKGRSTDFAWGR

SEQ ID NO: 3060 - protein, 271 aa, Cryptococcus neoformans
MQSLNALGNRQIASLNADLSRMENGEGGPAIQGELRDSSTISGRVIDMAYVTLLTMNWMLIHLFQGQITTTLSALSRLIDDYDSMARKEMVTVARDKANTKKRKSTQSGLSDCPVAVPLIWYQARQDLLGSSSSSSPYPSTASTSVSQRRAPNQSSFAESPFASSDPLFRPNHPPSSREDFALREHTFLQESENSIDQYIAQGRAVLGNLVEQKGMLKGTKRRLLDAANTLGMSRETIGWVERRTKQDAWIFGAGATFTLFSFWAIWYYLG

SEQ ID NO: 3061 - protein, 266 aa, Cryptococcus neoformans
MRYAVLVTGPAGAGKSTFCASLITHAQTIGRSVHLVNLDPAADKFEYEPTIDIRDLINLEDVMEELEFGPNGGLIYCFEYLLNNLDWLEDELGAYEDDYLIIDCPGQIELYTHVPLLPRLATFLSTSLNFRTSAVYLIDSQFMQDKSKFFAGVMSAMSCMLSLGISMLCLMSKMDLVKDKKGRTKREVGRYLDPDPNLLLEDINQGTNSKFNQLNRAVVSLIEDQNIVSFLPLDVTSEDSVNTVLSHIDNMMQYGEDEEPKVPKDG

SEQ ID NO: 3062 - protein, 257 aa, Cryptococcus neoformans
MGLTYPSVRDSVDENVFLFVPNLIGYTRVITAAASLFFMPYHPKACTMLYSVSCMLDVVDGQAARALGQTSRFGAVLDMVTDRCTTACLLCFLSSVYPTYSMLFMFLITLDFSSHYIHMYSSLTTGSSSHKTVTSDVSRILWYYYNDSRTLFVFCFANELFFVCLYLNHYWTTPLMANFPIPTAILTSELTAAHPKLVGGVINVLRNLNWPQVVAAMTFPICAGKQIINVVQFWKASKIVSPSSPVLLSLSFSFKNE

SEQ ID NO: 3063 - protein, 221 aa, Cryptococcus neoformans
MENTATFKMVLCGDGGTGKTTFVKRHLTGEFEKKYIATLGVEVHPLTFHTNFGTICFNVWDTAGQEKFGGLRDGYYIQGQCGIIMFDVTSRITYKNVPNWHRDLERVCENIPIVLCGNKVDVKERKVKTGNVTFHRKKNLQYFEISAKSNYNFEKPFLWLARKLVGNQSLEFVAAPALAPPEVQVDQALIAKYEEELKAAANAPLPDEVSFSMCLMRRFIC

SEQ ID NO: 3064 - protein, 217 aa, Cryptococcus neoformans
MPRPPEDPDVRNSKTLAYILRHGAEKEGLYIRSDGFIKLADVVRLSFPLSLYPSIRVLNDNPKGEYFIRATQGHSIQLESTAHLEQVKDDEEGKRKVGLMVHGTRWELWDTLKQGLQKMTRQHIHLAPGFSGPITPRPNSTLYIYLDLSKLVAAGIPVYVSANGVVLTPGSKGGENGEGAGVGKEFWRRAVRRKEGKRWVVWEDGREVEREELSGEE

SEQ ID NO: 3065 - protein, 281 aa, Cryptococcus neoformans
  MISC_FEATURE (133)..(133): Xaa = any amino acid
MSTTAVETVTTSPATLTTAVNDINLDSYDEEQVRLMEERCILVTPEDKVYGEGSKKVCHLMSNINTGLLHRAFSVFLFRPADGRLLLQKRADEKITFPSMWTNTCCSHPLSIKAELVEEHQAGALAILSIEIXTDFVAGVKAAAIRKLPQELGIPESQLKPEDFHFLTRIHYLAPSSGVWGEHEIDYILFSTLNVDLDLNPNEVSDAKYVSKSELEAMFTDPSNSFTPWFKLIARDLLFPWWDEMLAKSRSAGWDEESGVGEVRADVLANGPKINELIRMI

SEQ ID NO: 3066 - protein, 254 aa, Cryptococcus neoformans
MTHPQRRRYVTIGPLLLAHSLSFCTKLGLRQDARRPYELRSTSFQLSTHSSSDGSSTATQGLTTVEVSVFGPREPRNRGLASHDRAVVSVEVGVVPWAAGAGARRTRGDKRLQEIGAAIRQTFEPVIMTHLYPRSEIAIHVQVLSADGGILPTSINATTLALIDAGIALLDYVSSISIGLHLLQPLLDLSQPEESDLPSLVIASLPSSGKITLAQMETRLHVDRFEEMLTLGVEACKVLKEEMDGVVKSDRKNC

SEQ ID NO: 3067 - protein, 266 aa, Cryptococcus neoformans
MAHKSHRHKALQAQLEAQPTISLISQKTRKPPAPSMDVDQDDDVLISTNAASAPNTTDPSDAPVSATTTSSGFAPLTAAAQSTVLKNEFRRIPIPPHRMTPLKRDWVNLYTPMVEMLGLQVRMNPQRKAVELKTSGHTVDSGAIQKGADFVKAYALGFDVNDALALLRLDDLYLDSFEIKDVKTLHGDHLARAIGRIAGEGGKVKFSIENASRTRIVLADTHIHILGSVQNIKIARDAVVSLILGSPPGKVYAHLKAVGARMKQRF

SEQ ID NO: 3068 - protein, 285 aa, Cryptococcus neoformans
MGALSEVEMRFPAVIKVYLRLCFINTSHLLGRFFRADGLADGIHPSLSTACHQSKHKPEHFKMNPRSLTTAVRSFTRRVPLRPALPAARTFAPQLQARAYSEEKEFHEKEDKRIADLEAAKAESDKKAAEFEEKVKELTTAIRRTAEEKAKASEFAISSFARALLDTADVLSTALKHVPQPIPAENKDLQSLHTGVELTHKALLKTFESHGVKKLESLKGEQFDPNVHEALFTVPQAVAPKKENGEPHGPNEIFDVSKEGWTIGSRVLRPAQVGVVASEKRNTDG

SEQ ID NO: 3069 - protein, 260 aa, Cryptococcus neoformans
MGIIVVTSYLLIALLNESVILGPDPDLPLIRERMSSVRRKILVLSGKGGVGKSTFTAGLSWALAADEECQAGIMDIDICGPSIPLLMGLESSTIHTSASGWSPAYALDNLAVMSIGFLLPSSSDAVIWRGPKKNGLIKQFLKDVEWGDLDYMVVDTPPGTSDEHLSIVQYLKEAGIDGAVLVTTPQEVALQDVRKEIDFCKKVGIPILGLVENMSGFVCPNCKNESQIFAPTTGGAEAMGKELGIELLGKVPLDPRIDDL

SEQ ID NO: 3070 - protein, 288 aa, Cryptococcus neoformans
  MISC_FEATURE (26)..(26): Xaa = any amino acid
MSSPPRYTEEPNLRPAPSKAYGTTPXDTAATQPLLAAQASTNAQRAAEEGWRDDEDNVSDNYKLGVSVSDCDTEIRMLFIRKVYSILLIQLLATAGVSILLSLPSAKDFTHTNPWIMWIPLIGSFTSLFFVYWKRHQHPANLILLGLFTLFEATMIGLAVSYYESRIVIQALFITLGVFIGLTLFTFQTKYDFSSFAPILFIGIWGLLTTYLIQIFLPFNATVDLGIACFSTLLFSGFVLYDTQQIMKRLSVDEAIAGALTLYLDFLNLFLSILRIVSAVNNDWEFGS

SEQ ID NO: 3071 - protein, 274 aa, Cryptococcus neoformans
MPQLHIAISFLTKATSKVAVVTGASVGIGLAAATAFAEAGANVVLLYARSKHTEKTASDLAARTGVKVKAYQLDVRDYDATQRLVENVVKELGRLDIWVANAGIPQDDTILDGNRKHWEDIIAVNYTAVVYQAQIVGKAFKKQGNGSFIITASAAGIANIRPTDQGVYNSSKAAVIALARSLAQEFKDFARVNSVSPGYMGDAQGAPESEITNALTRQVLNRTGEYRELAGAYLYLASDASTFCTGTDLSTTSVTIFSHRADQVVRIVDGGYHC

SEQ ID NO: 3072 - protein, 312 aa, Cryptococcus neoformans
MTYPKIHSKRHFVDFCFVMEREETMKRCVSVEIFLGCRQKNNHRSQLFKTEGQPRGQSGGAGNSGIRDVWQTGGGMTRCHSLLASAGHLAGRNKEGGKKDKPGYKNRRNTLAHQADSTIMVSPLTCPSFSSLSYFTNKSNTLRPYLNAVRATLTAALTLSNFSSQVVERHNKPEVECGTSPEVVLHPLIISRNESERVLIEPSVNSIRLSIAIKQADEIEKILCHKFTRFMMMRAEGFVILRRKPLPGYDISFLITNFHSESMLKHKLVDFIIQFMEDVDKEISEMKLSLNARARIVAESYLSTVGLSSSSR

SEQ ID NO: 3073 - protein, 227 aa, Cryptococcus neoformans
MFSSEIARMRKLGVQGVSSHAQGSSVCYLADKFIPYTLSLLALALCVYVCVVLSSPLLPSASLNLLTVVASGLMMWKGLCLFTNSESPIVVVLSGSMEPAFYRGDILFLINPTDVPYEVGDITVYKVPGSEIPIVHRVIESHTTNTTQLLLTKGDNNPGDDVVLYNGLQWIERRHIIGKVRGFLPYVGYVTIAMNDYPQLKYALLGTIGLVMLVQQEIAELESDRWT

SEQ ID NO: 3074 - protein, 272 aa, Cryptococcus neoformans
MVLSGKLAFIIEHSCTPEHHGMYMTDELILQIATLEGHTGNVVALAYSALGKWIVTGSEDGTVKVWDTRTAQTQRIYLHDCPVNDVVIHPNQGELISCDQSGSVKIWDLAENTCTHELVPDEDVPIRSVSISSDGNTLVAANDGGMVYVWRIIPVPNANANLVPVTSFRAHTKYITRCLLSPDTKYLATCSADHTVKIWSTAGIDYTLEKTLTGHQRWVWDAAFSADSAYLVTASSDHAARLWDLSLGETVRQYDGHHRAAVCCALNDINLA

SEQ ID NO: 3075 - protein, 266 aa, Cryptococcus neoformans
MQTIKCVVVGDGAVGKTCLLISYTTNKFPSEYVPTVFDNYAVSVTIGDDPYTLGLFDTAGQEDYDRLRPLSYPQTDVFLVCFSVTSPASFENVREKWFPEIAHHCPGVPALIVGTQVDLRDDPAQTEKLGRQRMKPITQDMGERLARELGAVKYVECSALTQRGLKNVFDEAIVAALEPPMATKKKSKKCLILKTPLLFGFPFAHYLYLILRLSFAFHFCHHFLLDPRYPTFLIPCQISACNIFQNLNFTLPRPSLFSNSCHIIVF

SEQ ID NO: 3076 - protein, 300 aa, Cryptococcus neoformans
  MISC_FEATURE (187)..(187): Xaa = any amino acid
MSVLVQQCHCIVSVCSQLTVVGLTGGIASGKSTVSKLLSERHHLPIIDADLIAREVIEPGTSGYSLVVSHFGPDRILQEDGVSLDRGAIGDIIFHDPEERKWLNGVVHPRVKKEMVKRIIRYWLNGEWCVIVDVPLLIEAGMWKWVGDTVVVYVNERLQLSRLLGRQSNPPLTQSQASSRIASQLPXSAKLSYATSVIDNSGSFSDLNDQVDRTVAKWKAQQGGDSGWWWRVCWLVPPVGLAAGALSLLAVWRKGKKDRRRGRGEVSRRDNSEQASERIELMELKGGRRRTASGSVTDEE

SEQ ID NO: 3077 - protein, 248 aa, Cryptococcus neoformans
MYASVPQQIWPIKDTCRLVLAVAVLLVERGVTETRAHQNLNSEVTECTNAGIMCRIVLKVGMVGDSQIGKTSLMVKYVEGSFDEDYIQTLGVNFMEKAISIRNTEITFSIWDLGGQREFVSMLPLVSNDAVAILFMFDLTRKSTLNSVKEWYRQARGFNKTAIPVLIGTKYDQFASFPRAEQEEITRQAKRFSKAMHAPLIFCSTSHSINVQKIFKIVLAKAFDLKMLISVFFGKGINFSFAVCHSRN

SEQ ID NO: 3078 - protein, 276 aa, Cryptococcus neoformans
MSRSYDRVEYALEAVRRGTCAVGVRGKSCVVLGVEKKSTLQLQDPRTVRKVAMLDDHVCVAFAGLTADGRILIDKARIECQSHRLTVEDPVSIEYITKHIAGIQQRYTQSGGVRPFGISALIVGFDPHDTIPRLYSTEPSGIYSAWKACSIGRASKTVREFLEKNYVEDLEREQAIKLTVKSLLEVVQTGAKNIEITVMESYGVVKALEQSDIEKIVAEIDAEKEAEAERKRQRLAATQAGQASMAMGSSVPSGTETPAGRPQEHASAPGGDSGVQ

SEQ ID NO: 3079 - protein, 264 aa, Cryptococcus neoformans
MMAIECIQLRRMTDKIHHLEKSTSTSVSNTISSVTSALSPSSSIKPPRMVLIGPPGAGKGTQAPNISSKYCICHLATGDMLREQVARQTELGKAAKQIMDQGGLVSDEIMVGMIKQELEKNAECKNGFILDGFPRTVPQASKLDAMLAERKQAIDHAIELKIPDVLLISRITGRLVHPASGRSYHKEFNPPKKPMTDDITGEPLIQRSDDNVGTLRKRLDTYHAQTGPVVDYYKGTGVWTPVDAAQSPKLVWASISSILESKKN

SEQ ID NO: 3080 - protein, 296 aa, Cryptococcus neoformans
MAAAAAFDLLDKYIPGASDSLTIVNATTAQNTLYPGVDFAALNWLERLWASYYVWVGNPIIATGLMSFLLHEIVYFGRCIPWLIIDAMPYFQKWKLQPNKHVSRAQILKCTKVVLLTHFTCEAPLILAFHPICCLFGMKTYEIPFSSIGLMAAQIAFFFVFEDTFHYWAHRALHYGPLYKHIHKLHHEFSAPIGIAAEYAHPLEVLILAQGTISGPFLYAVFRNDLHILTVYVWITLRLWQAVDAHSGYDFPWSLRHFLPFWAGADHHDFHHATFTSCFSTSFRWWDYYFGTDQGK

SEQ ID NO: 3081 - protein, 299 aa, Cryptococcus neoformans
MFRNSYDSDNTTFSPQGKLFQVEYALEAVKQGSAAIGLRSNTHAVLLTLKRSTGELATYQKKLIRIDDHVGVAIAGLTSDARVLSNYMRQKAMQSRMTYGRATPVARLVQSIADRAQTNTQEYGRRPYGVGFLVIGKDETGPHLFEFSPAGTAFEYYAHSIGARSQSAKTYLEKNYHLFPNASLEELINHGLSALHDTLQQDKHLSSLNTSIAIIGPAEGQGVEDVSKSAAAQRGGFRVWENEGVEGILRGWRRSRGEPEEGPEAEGESQAEASAEGQNEGGAGQQEGQLPAEDVTMQE

SEQ ID NO: 3082 - protein, 305 aa, Cryptococcus neoformans
MGIAILSGVISSLETRASLPRNPNASSEPPSGISTPTASQFLDAPEASLPSTFIATVGREETGRKLRRTLADMGSIGKQVQVRAGQGNVKTVDEADVILVCSKPQIARSILEEEGMSKALEGKLLISICAGVTISQLKSWVPESTRVVRAMPNTPCKIGEGMTIVTPLSDALSRTLILNIFTSCGRCRFLDEKHFDACTALAGSGPAFVALVLEAMADGGVMMGLPRSEALELAAQTMQGTGRMALQTGLHPAQLKDSVTTPGGCTIAGLLTLEDGRVRSTMARAIQVATNVSFIYSLFSPEICS

SEQ ID NO: 3083 - protein, 276 aa, Cryptococcus neoformans
MRSLPSTLVHRLFSVATSLLLFLLALGPIPHHVAFVMDGNRRYARELGQQVESGHAEGFNALRRTLEICLRLRIRAVSIYAFAIDNFSRSEKEVGALMNLAKQRLAELCEHGCACLKYGVKIRFIGQLDMLPPDVLQAVRDMEAMTQDNKNGVLNVCCPYASRDEITTAMKESDVFDSLGVSKAINTVDKSLFVNPEEPEKLDILVRTSDVKRLSDFMMWQASDDTQLHFVKTYWPEFGLSDMLPILLGWTKGMDAETWLVLNASVEWYCVMHLTI

SEQ ID NO: 3084 - protein, 306 aa, Cryptococcus neoformans
MSFLTVSRDIQFVDYDNVRFHLSTPSSKTQLLLSMGIQCWPDLVKYGAREHLQNEYQGYFLAEADTEPEYDVSLLIDLERLPESPGTWQERAALISKIAHLKSTAMSSPFFAAFAEQASLQASYKEPAGAQQADLQPSEVKGDLKIVKYREEEAIFIQASHDRVTIIFSTVFKEETDRVYGRVFLQEFVDARRLHSLQNAPQVMYSNREPPLEIRHLPGLKNGEDWGYVTFVLFPRHFANPSQALATINRIQLFRDYLHYHIKCSKAYMHSRMRYRVAEFLKVLNRAKPEIASEKKTASGRTFRSR

SEQ ID NO: 3085 - protein, 287 aa, Cryptococcus neoformans
MSNEASLCNRLYIRSLFSITAQDVYDKVSTHADQTQLTAPRSEYDRGVNTFSPEGRLFQVEYAMEAIKLGSTTVGITTPHGTVLAVEKRVPSPLLESSSIEKIMEIDSHIGCAMSGLTADARTMVEHARVTSQMHAFTYDEPIGVESCTQAVCDLALRFGESVEDDDALMSRPFGVALLIAGIDEKGPQLYHTDPSGTFVRYEAKAIGSGSEAAQQGLQDAYHKQMTLAEAQSLALKVLKQVMEEKLDESNVQLAQVTKEKGFEILGEQALKGVIETLLEEVNVEYA

SEQ ID NO: 3086 - protein, 306 aa, Cryptococcus neoformans
MEKKTKDAIDVLEPRAIVDYPDYLSRLIPIIHPSPPSASSSASCFIDELAVDFTTLSLSPIQHVYRSRKPISLSYYSRKCSSPPQIEHTSTISAISPSTSTSGFTLTLSSSAPILTDCHIGDSICVNGACLTVTEFDSDSFQVGLAPETLRRTNLGQVKVGDKVNCERAMAGHTRFGGHMVQGHVDGTATIISKIPDGDSIRYTFQLPATTTLLPFIIEKGYITIDGASLTITHVNDAQRSFGIMLIAHSQAKLTLTDKKEGDTVNIEVDCVGKYVLGSVENRGDCGEDRGEKVEGKRIIKLLLCR

SEQ ID NO: 3087 - protein, 299 aa, Cryptococcus neoformans
MDGKCLLLSMCQLGIAALRIDQRVFVTPSNRKLDVNVVQSNYHIELTPSDVGMYDRVVIQDILKEIAQTQQVDLNAKQRFKVVIINEADALTRDAQAALRRTMEKYMTNMRLILCANSTSKIIAPIRSRCLLMRVAAPTDDEMSTVLNYVAKKERFMLPSSANNAILETSQGNLRKALLVFEAMRMQHPDLSGDVEVAKPDWETYCGKVADAILQEQTAQKLLDIRAKIYELLSHCIPPTVVMKTISERLVEKVDDTLKPQIVHWTAYYELRMRMGSKKIFHIEAFIAKVMTVYKQYTL

SEQ ID NO: 3088 - protein, 294 aa, Cryptococcus neoformans
MKCCRKGSSHYDIHISGDVEGFGIFYLMWVNYLNYVHFRLILVPKQVDETGSQIEKQVNATASTSTSRPALSSHESEGSSVMKTKKKKKAQTPGIVFISRVPPGMTPQKIRHLMGRWGDIGKVYAQRRDAPGGYNPNSANQKKQKHASANFTEAWVEFLDKSVAKTVASMLNAQVIGGKKGDRWRDDIWTMRYLSGFKWEMLGEQIAYERQAHQARLRTEITRAKTEQNEYLKNVELARTLEKRKAKKAAAGGPSESAPNQDAHSRSYKQRNVVEKPKTLEGQGMDGVLNNIFG

SEQ ID NO: 3089 - protein, 296 aa, Cryptococcus neoformans
MGVLVSLLSRSVVQMSIAPLRPSMSESYAINMPSVAAQTAPSPTDKYSVILPTYNERKNLPVIVWLLAKTFETDGINWEIVIVDDASPDGTQEIAKQLAGIYGEDKIVLKPRAGKLGLGTAYVHGLNYCTGNFVIIMDADFSHHPKFIPEFIKLQKLHNLDIVTGTRYSSHPSPKPTASSLSIGLGPGGVYGWDLKRKLVSRGANYLADTVLTPGVSDLTGSFRLYRLHVIKDIISRCTSKGYVFQMEIIVRARALGYTVGEVPITFVDRIYGESKLSGNEIVGYAKGVASLWWSV

SEQ ID NO: 3090 - protein, 302 aa, Cryptococcus neoformans
  MISC_FEATURE (2)..(2): Xaa = any amino acid
MXKYHRSQNLAASMCTVIHPLVLLSVVDHAARVPLSKNKRVLGVLLGQDNGTSINVANSFAIPFEEDERDPKTFFLDLDYVEEMWRMFRKVNAKERPIGFYHTGPRLRSSDLEITELFKRFCPRPVMVIVDVRTSGGRGDTGIPTDAYFAVEEIKDDGTATQRTFTHVSTSIEAEEAEEIGVEHLLRDISSSSSAPSSSLLTTQSLSTRVASQLQSLRGLHARLHEIGEYLEAVRSGKMPINHQVVYQLQEIIGLLPQLGGDVELGKAFRMGVNDQSLVVFLSSMIRTVLALHDLYVPCRSL

SEQ ID NO: 3091 - protein, 283 aa, Cryptococcus neoformans
MVSNTISLILLEGEIETSYTEADNSCVVATDTGKSQSTQREDLTVFAKTSPYVLDAPVFALHLGLHFVTKYKHIHKCFVDIIGLKWSRISVDGKPHKWSFIRDGDEKAIVECVVDGTAGPDAATANVKIGIKDLLVLKTSGSAFENFHRDENTTLADVADRIFSTSVSLQCSISLPPNTPLTIDNLGSIAKELDFPKMKELILKDVLDTFATDESASVQATLYLTLQKILASCPAVKDASMQLPNKHYIAFGLDNKLGYEGGAEVFYPAADPSGYITATVTRK

SEQ ID NO: 3092 - protein, 310 aa, Cryptococcus neoformans
MSEVARKPKDAKAFLTDFLMGGVSAAVSKTAAAPIERIKLLVQNQDEMIKQGRLATPYKGVGDCFARTYKDEGLASLWRGNTANVIRYFPTQALNFAFKDYFKSMFGFKKSEGYWKWFAGNIASGGAAGASSLLFVYSLDYARTRLANDNKSAKKGGSRQFNGLVDVYKKTLASDGIAGLYRGFVPSVVGIIVYRGLYFGLYDSIKPVILVGPLEGNFLASFLLGWTVTTSAGLASYPLDTIRRRMMMTSGGTVHYKSMFDAGSQIVAKEGMKSLFKGAGANILRGVAGAGVLSLYDKAQELMFGKVYCE

SEQ ID NO: 3093 - protein, 326 aa, Cryptococcus neoformans
MTIVTSYRRMTSMDLRVGGKYRIGKKIGSGSFGDIYLGVNIVSGEEVAIKLESVKAKHPQLEYESKVYKTLAGGVGIPFVRWYGTECDYNAMVLDLLGPSLEDLFNFCNRKLSLKTVLLLADQLISRVEYIHSRNFIHRDIKPDNFLMGVGKRGNQVNVIDFGLAKKYRDPKTHLHIPYRENKNLTGTARYTSINTHLGVEQSRRDDLESLGYVLMYFLRGQLPWQGLKAATKKQKYDRIMEKKMTTPTEVLCRGFPHEFAIYLNYCRSLRFDDKPDYSYLRKLFRDLFIREGFQYDYVFDWSLQPGVKSSGATGEDGLQGKQNHF

SEQ ID NO: 3094 - protein, 324 aa, Cryptococcus neoformans
MQKVQERPTENTRYFIFRLFDSYRYTNTKDPITMRQKRAKTYKRVMTLYTQTFGFRQPFQILVSQDLLLEGAKSELNMPKQFVTVIQGECKPMITQCCMEALYKLGKPVQRTTDLAKTFERRKCNHRTALEPDECLKDVIDAGATNKHRYILGTQSTTLLTAMDRIPGLPVIHFNPRGVLVLSPPSTATIREKNKVEEERRLEGVKVLEGVVDGGNVVGADLAPVSGGPAEKRSRKVKGPNPLSVKKKKTPGQDKEGESKKRRRVEEEEVKEDENEVNAEGKRKRKRKKKKTAVGEAIEELNATNADRTEKAVVSDDSDGSEEE

SEQ ID NO: 3095 - protein, 326 aa, Cryptococcus neoformans
MEFLPLRTLPAPPRQQSTTNPHSRHFHSFRHPLFIKHPAAITHIHFCPTKPHRYAVTSSTRVLIYAPKTGKVVKTITRFKDTARSGEFRKDGKLVVAGGDDGVVQVFDVNSRAILRTMKEHNQPVRVTHFSPHLPQVLSASDDTTVKLWDLSTQACLSTFSSHTDYVRSSIFSPSDPSLILSASYDSTIRLHDVRLPEDEANVITMRHGGAPVEDILAFPSGGVAVSVGGPILRVWDLAMAGKCVRALSNHQKTVTSVAFDGTKGRVLTGGLDNMVKVYDVEDWKVVHTMRYPAPVLSLAVSPDDTHIAAGMTDGTLSVRRRSQSF

SEQ ID NO: 3096 - protein, 333 aa, Cryptococcus neoformans
  MISC_FEATURE (205)..(205): Xaa = any amino acid
MACFCSGDSRQRPTARYAQRTGAETQARENTPDAVKEVPQAAPCNFPPFRTQTPAKWRSPLFFPRSVLCPVATVSQVSPHLSLLFFSTFNQKNNPQGITLTARKMSASQIISKRRKFVADGVFQAELNDFFTRELAEEGYAGCEVRVTHARTEIIIRATHTQEVLGDKGRRIRELKALIEKRFKFPENALELYAEKVQYRGLSAXAQAESLRYKLLGGLAMRRACYGVLRFVMESGAKGCEVVVSGKLRAARAKSMKFTEGFMVHSGQPARDFIDYAVRHVLLRQGVLGIKVKIMKPSDPAGRQGPAKNLPDDVQITEYVYYSVHRRRTLFFC

SEQ ID NO: 3097 - protein, 299 aa, Cryptococcus neoformans
MSGTYAVEQQLRRQTRERREYIFKKSQESQERAIYERKQKIKDLLAQGKPLPTELRNEVRELGGKDLVLDEAQQDPRSHIDDEYAKVGTYDPKIVITTSRSPSSRLLQFSKELRLVFPNSYRLNRGNTVVKDLVSACNAQGVTDLVVVHEHRGVPDALIVSHLPHGPTLSMTLHNVTLRHDVSSNSSTVSEQYPHLIFDGFSTKLGERVTGILKALFPVPKDDAKRVMTFKNENDFISFRHHVFANTGHKDVQLAEVGPRFEAKPFEIRQGTVDQTEADVEWLLRPYLRTAKKRNILNV

SEQ ID NO: 3098 - protein, 330 aa, Cryptococcus neoformans
  MISC_FEATURE (72)..(72): Xaa = any amino acid
  MISC_FEATURE (179)..(179): Xaa = any amino acid
  MISC_FEATURE (181)..(181): Xaa = any amino acid
  MISC_FEATURE (225)..(225): Xaa = any amino acid
  MISC_FEATURE (290)..(290): Xaa = any amino acid
MQPGPSKDILRFTGHRHLRQRILLSILSGKSMRIDGIRSDDVHVGLRDYEVNLLRLVEKVTNGSTIEISVTXTSFILHPGLLPGGSFNHSCHIGRSIGYYLEVLLPLAPFCKKPFNITLYGVTGEEGRDMTVDMIRTVTLPHLHLFGISDGLELQIKKRGSAPLGGGQIFFKCPVVRQXNXLHFVDKGKIKKIRGVSYSTRVSPQFANRMVESARSVLNRYVPDXYLYTDVYKGDDSGKSPGYGLTLVTQSTTSAVHAAESLSVAGEVTTPEDVALFASRLLLEELSRGGCIDSKHQWLVALLMALGKEDVSKCLFGSLTPYTYVNFRNY

SEQ ID NO: 3099 - protein, 290 aa, Cryptococcus neoformans
MPSPAVDLLKQKTASLPNAPISVVAANTPVTAGNQLPTSVPLPVLPAVEAAKRLAAYAAVDRHIAHEHKVIGIGSGSTVPYVVDRILAQGFEANKDRVFLPTGFQSKELIVKAGLTLGDVDQYARIDVTIDGADEVDNELNSIKGGGACQLREKVLAEAADTWIIVADYRKNSEVLGTSWTKGIPIEVVPFAYAKVLTNLAHMGSPHVLPNGQPGLSLRMGKMKAGPVVSDNGNFIIDAPFAEELMRQPEELLHKIKMLTGVVEVGLFCGMAKAAYFGNEVRHFFTYIKQ

SEQ ID NO: 3100 - protein, 314 aa, Cryptococcus neoformans
MSMLRTIKPKNARVKRALEKREPQIVENDKTAIFVRGQNSSDKVRNVMKDLYSLKRPHAINFSRKNDIHPFDDASSLEFFAGKNDASLFVTGLHSKKRPHNLVFSRMFDGRVLDQIELGVEGFKAMSEFPTLKSSLGVKPMMVFHSDLFDTHPTYQQLKSQLLDLYNGHPITEAPLLTTLEHVISITAGPVSDTTPLPQVHFRVYTVKLIPSGTRVPRIQLTEMGPSIDFVVRRLQEPDEEMMKAALKRPKIAKSDVEKGLGKKRKNIETDEMGDKVGRIHIGKQDLAKMQGRKMKGLKQGWEEEEDIWGRRHG

SEQ ID NO: 3101 - protein, 289 aa, Cryptococcus neoformans
MNRPPIPLVKHRVYIEQEGKIVSPFHDIPLFADESKTILNMVVEVPRWTNAKMEISKEETFNPIKQDIKKGKLRYVRNCFPHHGYIWNYGAFPQTWEDPNVKHAETGANGDNDPLDVCEIGEAVAYTGQVKQVKVLGIMALLDEGETDWKVLVVDVNDPLAPRLNDIEDVERHLPGLIRATNEWFRIYKIPDGKPENVFAFSGEAKSKKYAVEIIHECHEAWRKLVHGETAASTDAYNLAITNTTVKGSKGFVSTNDAAYASVPADSRKPAGPIDPSIDKSFFISSASA

SEQ ID NO: 3102 - protein, 282 aa, Cryptococcus neoformans
MFYSVNNIAGICSLRCLAWSPSTSSENMEALAQSGQPPGRRLSTLGSVYTRFQAIMSTIQERLTIQTVKNDTFRTLATDTQFKGKVKEDMLIRLLEAFTEDESQPFKYVQGMNVLSAPFLFTMPSQLEAFQCFSTFIEDGCPLYVQPSLKGVHKGLTLLDKCLEVVDPELYDRLASKNLKAEIYAFPSVMTLCACTPPLEEVLRLWDFLLAFGLHLNILCVIAQLLLIRQDLMDTPSPMKILRTFPPLEARPVIGVTVALVKDIPEELYRELVAHPFLLNGS

SEQ ID NO: 3103 - protein, 325 aa, Cryptococcus neoformans
MPKATSQTFRAQPASAAQRPKKGGESSAAAAAGGGARNHLFDTAKFGQHILTNPLVAQGIVDKANLKPTDVVLEVGPGTGNLTVRILPACRKVVAVEMDPRMAAEVQKRVLGKPEQKKLELIVGDFVKADLPYFDVLISNTPYQISSPLVFKLLSQRPIPRCAVLMFQREFALRLVATPNTKLWGRLAANVQLYARVEHVMKVGKGNFRPPPQVESSVVRIMPRDPPPPVKFEEFDGLNRIIFSRANKTLRAGFKAKGVVELLEKNYRTWCAEQGAVSIKKMIIEDNFDIREKVESILVETGFADSRAAKMDVDDLLKYVLRSLI

SEQ ID NO: 3104 - protein, 287 aa, Cryptococcus neoformans
MQPSYAQDLGTGTIDVSFSHLARSTPYSPRSQHGCYGSMMNVLGECIGALGMIPCCPCPNPFNNISQGAVGLVSRFGQFYKSVDPGLVKVNVCTEDVRVVDVKIQLTSVPRQTVQTKDNVSVEVDSVICWHVISPYRAAFGINDVRSALVERAQTTLRQVVGGRVLQSVISDREGLAHEVAEIIEATAEKWGVAIESILLKDINFSVELQQSLSSAATQKRIGESKVIAARAEVDAAKLMRQAADILASPAAMQIRQLEALQNMARSSGSKVVFYVILISSHDICNC

SEQ ID NO: 3105 - protein, 314 aa, Cryptococcus neoformans
MMGLILLSPSCIPKNVRVLAGHYFSSSRLTQYLLDKDAMDYFRAIAAKEEKSERALELTEVIVRMNPAHYTVWQYRFSLLTSLNKSLEDELRLMNEFAVQNLKSYQVWHHRLLLLDRISPQDPVSEIEYIHESLLPDPKNYHTWAYLHWLYSHFSILGRISEAQWESELDWCNEMLRVDGRNNSAWGWRWYLRVSRPGAETSSHNLQDELIYILKSIHFIPHNVSAWNYLRGFLKHFSLPLTPILPAILPYTASKPNTDMETDTPLPVPLALEYLADSFIEQNRLDDAAEVFEKLSSKYDKMRAGYWEFRKGMC

SEQ ID NO: 3106 - protein, 330 aa, Cryptococcus neoformans
  MISC_FEATURE (290)..(290): Xaa = any amino acid
MPHHCSSATTTIATTCEICSRTTSAQSSQNLNPPFRPNAVCFSIASPFTHNSQPPPQNMSAPQPASATIFPPGVTPFAQRRLPKTICMFDVDGTLSLARQSATPEMFATLRKLRESCAIAFVGGSDLTKILEQVGGDQGLSNFDYGFAENGLIAYKLGQQLESASFIKHVGEEEYKKLVNWILRYLSEVDIPIKRGTFVEFRNGMINVSPIGRNASIQERIDFEKYDKEHGIRGDMVAKLEREFLHLGLTFAIGGQISFDIFPKGWDKTYSLRHIEGEGFEEIHFFGDKXTYKGGNDYEIFSDPRTIGHTVTSPEHTMQLLDELFLTTAP

SEQ ID NO: 3107 - protein, 349 aa, Cryptococcus neoformans
MLCFLAYIPLLYHTGLENLPGEVTFLLEEIREKDVRISRELFISQRHFSAEQSLEYVQRINSRHMSLTKTAKTLASLPPSNATFPLPIPPGALLPSSHLSQKEAQSLAKIQNEWAQVLTLQDEKVKLAERLERIVLRAKERAKHQWVKVGGMEIEEVEKWSGTGELGNGEVVLPPGGLGSGIDGRPAKKRKPNIPSLSVNHTKQAIHPSISMPPPPPPSRPSLSARSSHSNVPSTSHTHTSSLGQHGSRSRRVSVASDEDADGEPDEGDTDMVDAADAEGETDETLYCICRQKSYGEMIGCDCDKCPYEWFHVKCVNISGPLPDTWYCPDCVARYGFSNDKGNKKARKK

SEQ ID NO: 3108 - protein, 332 aa, Cryptococcus neoformans
  MISC_FEATURE (63)..(63): Xaa = any amino acid
MIATQRPFPIPSPVPLAPSSTVLPTTVPENAPEHCPGVESSQAGKADACEGCPNQSVCAEGPXGPDPDLPLIRERMSSVRRKILVLSGKGGVGKSTFTAGLSWALAADEECQAGIMDIDICGPSIPLLMGLESSTIHTSASGWSPAYALDNLAVMSIGFLLPSSSDAVIWRGPKKNGLIKQFLKDVEWGDLDYMVVDTPPGTSDEHLSIVQYLKEAGIDGAVLVTTPQEVALQDVRKEIDFCKKVGIPILGLVENMSGFVCPNCKNESQIFAPTTGGAEAMGKELGIELLGKVPLDPRIGMTCDQGMSFLDEYPESPATMAYLDIVQRIRES

SEQ ID NO: 3109 - protein, 320 aa, Cryptococcus neoformans
MLEDYRRKLTVKPRRRRQGKTDYQARRGLVSQAKNKYASPKYRLVVRITNKQVICQIVYAKLQGDVVFAHATSKELPRYGIKHGLTNWTACYATGLLVARRALTKLGLADKYEGVVEPTGELQLIEPLGDDEPRPFKCYLDVGLRRTSTGARVFGAMKGASDGGIFIPHSEKRFPGYDPESKELDAEVLQKYIVGGHVAEYMESLEEEDDERFKKQFSSYLADGVGSDDIEEMYTNAYEAIREDPTFKPTEKDVAKWKAESLKYKTFKLTKEQKQERVQAKIAAYKAQARCRGGRGVISWRLKGLCIQAFGITRYYGQML

SEQ ID NO: 3110 - protein, 329 aa, Cryptococcus neoformans
MAERGGFGRGRGGAGGRGRRGPRRGGKKEEDKEWVPVTKLGRLVKDGKIKSMEEIYLFSLPVKEFQIIDLFLPALKDEVMKIMPVQKQTSAGQRTRFKAFVAVGDFDGHVGLGIKCAKEVATAIRGAIISAKLSIVPVRRGYWGSHIAEPHTVPCKVSGKSGSVMCRLIPAPRGTGIVAAPASKRMLQMAGIQDCYTQSKGCTATQGNFLKATMAALAKTYQFQSPDLWRYRSWSYSLRRALFLVGYRRQEGRQLLNCCWNLGFYLAGCDLVLCCVFEDFSFFRLVVPVQLQKCDSKAFKWKCAYECSYRNRTSGIEHGRIERSFLFRY

SEQ ID NO: 3111 - protein, 348 aa, Cryptococcus neoformans
  MISC_FEATURE (325)..(325): Xaa = any amino acid
MLKDIVERTSSPAEAPKAPAPSSTGFPVAVHRSQRPSAFARARRAQQALKEEGKQEIGYGKAVDTVPTVQAAGPSSASSMTEWEEVKRQVQGDNSKRVQNMSQQEREQEIEELRERLGDKTLDLLRKRAEARQSKRNLLDVPKSELSSIDLEQPFNANNTQKILQDVSEENTRRVDLMSFEEREQETEELRERFGDKIMEALRRRAEVKLTEGKSNVVERSVKPDVPASSSTSDDDTNLDILKAKYFPTLPSEPSKLEWLQPISAPSSDKSIRFDLSGKVLSAKDTASLPTHLGLHHHGESPDLAGYTFQDILYLCRSTVPSQRXTMMGVLSRILGRLQWGIGPSCPD

SEQ ID NO: 3112 - protein, 318 aa, Cryptococcus neoformans
MRKKEAREVKPEYHPEWKLTRVISGHMGWVRAVAMDPGSQWFATGAGDRVIKIWDLASGELKLSLTGHISTIRGLAVSDRHPYLFSCAEDKMVKCWDLETNKVIRHYHGHFSGVYSLSVHPTLDVLVTGGRDASVRVWDMRTRANIFTLTGHTSTVGDVKTQDSDPQIISGSMDSTVRLWDLAAGKCMNTLTHHKKSVRALAIHPTEYSFASASSGGNNIKKWKCPEGIFVNNFVGHEAIINTLSINSENVLFSGADNGTLTLWDYKTGLPFQHLKDIPQPGSLDAEAGVFCSTFDKTGTRLITGGADKTIKVYSEQA

SEQ ID NO: 3113 - protein, 304 aa, Cryptococcus neoformans
  MISC_FEATURE (120)..(120): Xaa = any amino acid
  MISC_FEATURE (130)..(130): Xaa = any amino acid
MKRIHQWNTITSYIKYTRYSIRLFSSFSLLTISSACKIVSVPSGSSAEGLPASTIIMDEVSGKAKALINARKLTALRNACGSAVFLSLFPAVTTKHLLLFGSGAQCVSHALLFLRLHPFXQVTFVVRSIXQRSQSSASAIQSQFPAARVSLSVHSSPSDELSQLVATADVIVTATSSLTPLFDSSPTCPKPGARVIMIGSYKPEMHEVDQALMKRAAKVVVDSRKACEREAGEIIDAGIKVAGGAGLVELGELLEEAGLPGAVKDSGDTFEKEVGLGIQDVAISKVVLEQAEINNIGTVIEDYD

SEQ ID NO: 3114 - protein, 320 aa, Cryptococcus neoformans
MSLAATSQPLNKSLHIKYIQDLDKKKDLAYYITSHLRLNGIYWGLTALYMLGQPEALDREGVIEYVLSCWDDETGTFGPHPGHDGHILATLSGIQVLLMEDALDRADIERIISFLLKLVNPDGSVSGDKWGESDTRFSYILLSCLSLLGRLSSLTDEQIEGITENIRKCMNFDGGFGLSPGTESHSGQVWVCTAALTILDRLDLVDRDLLGAWLSERQLPNGGLNGRPEKLEDVCYSWWCLASLSIIGKIHWVNADKLINFILSAQDLDDGGIGDRPGDWVDVFHTIFGVAGLSLLGYPDLRDIDPVYCMPADLISRLFA

SEQ ID NO: 3115 - protein, 336 aa, Cryptococcus neoformans
MSDTPSSDTPPKRRAADTTAVPPQKSSKMSATAPPFNPTRPLTKKPAASFHDIAQEFKPKVKTEEVEDAMEVDKEAEGSARVTKPLPGGKRNVQRADFVPVQASVPKSTEDKENTRRLIVVLSQACLEAYKISSGSAGKSSAKEAKYALLNCDDHQGILAKTGRDIADARPDITHQCLLTLLDSPLNKAGLLQVYIHTAKGVLIEVNPSVRIPRTFKRFSGLMVQLLHKLSIRGVNGSEKLLRVIKNPITDHLPTNCIKLTLSADAPTVRLSKYLNTLPESHSVCVFVGAMARGADNFADQFVDQKVSISDYSLSASVACGKFCCAMVSSAVTSSL

SEQ ID NO: 3116 - protein, 279 aa, Cryptococcus neoformans
MQSRKVKQASASNPSSEQKEEQQQSRWKQMMTLSTNCVRCKKKQRWRWNVRASKWRHGRSEMDSSKTQPKRLIKMAAIQALPTEVQKIANEGTVKLFGKWESEGVEVKDISLQDYINVNHAVYVPHTAGRYAKKQFAKGRMPIVERLVNALMMNGRNNGKKIMAVRIVQHAFEIIHLVTEQNPIQVLVDAIINTGPREDSTRIGSQGTVRRQAVDVSPLRRVNQAISLLTIGTRESAFHNSKSVSECLADELVNAAKGSSNSYAIKKKDELERVAKSNR

SEQ ID NO: 3117 - protein, 357 aa, Cryptococcus neoformans
MVSKNCCSLIVYSQINVMTGNDRVESTRDHLHPRPHKGALIIVALVCTFSFSLFCSISVQDGHLKRKLPRRTEDTISSADITQHPALWKQPAPANSAFNDYNTFPLGQTQRHNTSSHHGPMSHTQQPLVTGTSVLGIKFDKGVMIAADNLGSYGSLARFRDIQRLHPLGKHTLLGVAGDMSDYQWLKRELDGLLYESALSLTDSHPSLSPSNIYTLLSNLFYARRSKVDPIWNAVLVGGWDDTKKESFLAYVDLLGTTYSAPTLATGFGAHLAQPLLREAYEAKAGIDGKGPLLTQEEAEKLIDDCMKVLFYRDARSINKYQVATITDEGVKISDSRSAPTEWKFAEGLRGYGAQTQ

SEQ ID NO: 3118 - protein, 350 aa, Cryptococcus neoformans
  MISC_FEATURE (271)..(271): Xaa = any amino acid
MSGTDARTSQQSTSSCPSRLLTRTVNNILQEYQYLDLIRRIINVGEVRPDRTGTGTVALFAPPSFRFSLADNTLPLLTTKRVFLRGVIAELLWFVSGCTDAKMLSSQGVGIWDGNGSKEFLEKVGLGHRREGDLGPVYGFQWRHFGAEYTDADGDYKGKGVDQLQRVIDTIKNNPTDRRIILSAWNPKDLPLMALPPCHMFCQFFVSLPPADSPGSKPKLSCLMYQRSCDLGLGVPFNIASYALLTHMIALITDTEPHEFILQMGDAHVYXDHVEPLKTQLGREPREFPKLKWARSKEEIGDIDGFKVEDFVVEGYKPWGKIDMKMSVSTDIYQTIPVTNDGNVRLKSSP

SEQ ID NO: 3119 - protein, 329 aa, Cryptococcus neoformans
MFIKVSAIKCIFAIKKIKVGEMKHGLDMTALREVKFLQELKHPNIISLLDVFSVKQNINLVLEFLDTDLEAVIRDKALIFQNADIKSWMAMSLRGLEYIHRNGVLHRDLKPNNLLIAANGELKIADFGLAREFGDAGNKMTCQVITRWYRPPELLFGSRYYSPTVDIWSMGTIFVELILRVPFLAGETDIDQLKKTFHAMGTPTEQDWPGYTKLPDYHEVGSFPKNPWWNMISSIGREGQDLARELLRFDPAQRPSAKKALLHSFFTSYPPPTPPIALPKPLAELRPRELAPDETQGKPLLTSGAGQSLKRKAESPRTSQSVPRKLIFT

SEQ ID NO: 3120 - protein, 358 aa, Cryptococcus neoformans
MCLWPLIQSAQASKPVPVETQHEDMIVSLACAMPYILFLTNYSHQHDAQLDYYGKRLATCSSDRTIRIFNVIKGEAKGEPVILKGHTAAVWQVSWAHPSFGSILASCSYDGRVFIWKEVGQGQGKGSGGELQDGWERIKEHTLHTASVNSIAWAPYDLGPILACASSDGKVSVLSFQNDGSIEVNIFPAHGTGANAISWAPSVLSTVSGVSRSQQPSNSLAPQKRFVTAGSDNLIRIWGFDEEQKKWTEEETIKGHEDWVRDVAWAPNIGLPGMYIASASQDRTVLIHSRPSPSSSWTSAPLLPSLPQSQDPHFPDAVWRVSWSLAGNVLAVSCGDGKVSLWKEGVGKGWECVSDFSS

SEQ ID NO: 3121 - protein, 321 aa, Cryptococcus neoformans
MRAKSDGYGTSSPRGSGRDQILRPAANARPSAWYHILLSPIQLSSSHIIIHITMAKLAETPSVGFDFSNYARNQFLGQRLQGIPKATSTGTTIVGVIYGGGSSGEEPGVCLGADTRATGGPIVADKNCEKIHYLAPHIRCCGAGTAADTEFVTNLISSNLELHALSQGRQARIVTAMTMLKQYLFRYQGHVGAHLVLGGVDATGPHLFTVHAHGSTDKLPYVTMGSGSLAAMAVFESSFKEHMTRQEAIDLVARAIRSGVFNDLGSGSNVDVAVITKNGTEMLRNYQTPNERGLKSRNYKFRRGTTAWTKESVRSLIVTEE

SEQ ID NO: 3122 - protein, 335 aa, Cryptococcus neoformans
MRFAGGRPLRTAREAELYGGVLSAALTREHLLLSAEFLRGDEEHFLNVLASVLSSSQFYQHELNELVIPVVEAETISAQATPSAIALDLAHSLAFRRGLGNSLYANKNYPVSIDDVKTFGEAAFAKSNIAVIGTGISTEVLAKSVGNAFGTGTSSSSKLSTPKAAYYGGETRVPLDIHAPATAAPTMVIAFGTSAPPSADLKVLKHLLGGETSVKWTPGASPLAQAADKIPGASAKAFLLPYSDASLFGVVLSAPTSAETKALAQEVASIVKGAGEFKEEEVKRAVAKATFEDAASTETLSGFVAAAGPAALIGSVPEAQSFSGVSASSISKVSL

SEQ ID NO: 3123 - protein, 350 aa, Cryptococcus neoformans
MPSLLSNAHPKLAEAVAARLGITLTPCHVSKFRSLETSVQIHSSVRDEDVFIIQSPSPPDVNDHLMELLIMISACKTASAKRITAVIPCYPYARQDKKDKSRAPITSKLVANLLAVAGADHVITMDLHASQIQGFFDIPVDNLFSEPTMMQYIKSEIPGWRDAIIVSPDAGGAKRATALADQLNLDFALINRKRRRDLAASMCLPTVPPTPTGSDSGSVHSHDIDDESNIVEKMELLVGDVKGKVAILIDDMIDTGHTVRLAAGVLRENGAKEVYALVSHGLLSDTTMENLSDLPVKKLIVTNSIDQTKRVIACNGLLETLDIAPVIAESIRRTHNGESISALFRPHDSF

SEQ ID NO: 3124 - protein, 376 aa, Cryptococcus neoformans
MYHSMPDSHDLPAQSIASSSRQPSSILNRADQHASEAGPSRSASTDKGYHADVVNRPKGDHLGVPPSSAYARGPTSPTSELSPLSCSGMTPHLDICKYPTQQLLRLLAGLLQHIAGSNDQLRAELEAEEDDEMDEQHVDDNTANVDWRSRPHSRASGRSYVPSGTSSTAELFSEPASSTLTSPALTSRSSSAASNPTSYPLSQFPLFTASKSSLSHPSALLAFHARHIPSISIEAYLLRILKYCPATNEVFLGVLVYFDRMTKLGTPAGIGGESSKVGKKGKGFAIDSYNVHRLVIAGVTVASKFFSDVFYTNSRYAKVGGLPPTELNSLELQFLLLNDFRLRVSVEEMQRYGDRLLAYRGSGGGYRNSWSGEKAE

SEQ ID NO: 3125 - protein, 349 aa, Cryptococcus neoformans
MDDKELEIPVEHSTAFGQLVTGPPGAGKSTYCHGLHQASIGRPVHIINLDPAVPNPPYPCSINITELITLESVMEEYNLGPNGAMLYCIEFLEANFDWLVERLDEVLAEEGGNGYVVFDTPGQAELWTNHDSLKNVVEKLVKMDYRLAAVHLSDAHYITDASKFISVVLLALRAMLQMEMPHLNVLSKIDLISTYGELPFDLSYYTEVQDLSYLLGSLDSDPRTAKYHKLNKALVELIEGFSLVGFQTLAVEDKESMLNIVRLVDKMTGYIFIPSGDLEGTNAINTQALFGSAMSSAKLTGRAGGDVRDVQERWMDNKEAWDEWEKKEWKREAEKSPDGHWNTRRDERR

SEQ ID NO: 3126 - protein, 324 aa, Cryptococcus neoformans
MSSLNPEIDGHSYNRPDAGAQTPVDAKAARRARFEKVFDQIAEELLTYVKGEGMPKDAVEWYQKVLYHNTPGGKLNRGMSVVDTVEILKGRELSEEEYTNAAILGWCVELLQAYFLVADDIMDQSVTRRGQPCWYRVPNVGNIAINDAFMLEAAIYYLLKKHFRSQKYYVDLMELFLETTFQTELGQLVDLITAPEDHVDLNKFSLEKHHLIVVYKTAFYSFYLPVALAMHMSGVEDKAAFDLALKILLPLGEYFQVQDDYLDCYGKPEHIGKIGTDILDNKCSWNVNTALAHATPEQRKILETLLTNTYRQYIFPSSGNHSVG

SEQ ID NO: 3127 - protein, 337 aa, Cryptococcus neoformans
MLRTTLTRFNTSSSLTTLKANMSTTAAINTATGTSRSITKTVYAHEVSEGAGATVRRSIGTRELRNLTPFLMLDHFKVLPGAGFPDHPHRGMQTVTYLFRGIFKHEDFLGYSGTLTPGDVQWMTAGKGIAHAEMPIFDPDPTKAEPVEGMQLWIDLPQKEKYIEPEYQDRKAEDIPVIHPKDGVEITVLSGDSHGTNGSVTPVGGAWYLGFKLQKPGASVYQPLPEGYNAFIYIVKGKLQIGDDTKTHDKFNLLVLSSKPGESGVTLTRPEDDTDAEEAHFVVIAGKPLDQPIVQYGPFVTCSQRQAMEAIMDYQTGKNGFERAVGWKSKIAKDFRG

SEQ ID NO: 3128 - protein, 372 aa, Cryptococcus neoformans
MAAQAASAAQSDDGFLDQLIASMPKSTVPPESGVGPAAPKKEVTVEDFEKLLDSTPLFMRETPKDGDDNPVLEALRSLVFEGEGDEIATNFKNHGNELHAQKSYGEAIKAYSEGIDAHPSSATLLVTLYNNRAACHLILKNYRSALKDTSAVIALYTAGKIPQPDKALVKALFRAAQSLVQLSRWKEGGDVVERGKELAEQVKEDTKVWDTLEKEVVKGKKRDDDRVERIRRDNMTKLALRKAVEDRGLIVVDTPSPPDNPHPLHFDEQSIPTINEEVGWTPPPPHTPIVFPVFLLYPPYGQSDFITHFHEDAAFEDQLSAMFPVSPSAPQIPWAEWDEKHEYYVPNLAVYVETKERRLLKVGKIDVERSVG

SEQ ID NO: 3129 - protein, 375 aa, Cryptococcus neoformans
MSIPTEKPAGPSAFTPYLDAVANVFHPVSGPVLNTYAKFHGWKENMGLVQPGTVENLTRDAQQVQLANWMFDGARADVAKVISGNPAFQLTHSFSLGSTTRPAAYNFGVIFANAKTFLQGGLDGSGSLTMRANQTWSARDLSKIQAQVTDKPGHTMVQFEHDHIGDHYTFSWKSINPNLLDFTGIHMASLLHSVSPRLSLGFETVIQYPEPAILQTATSYVAKLTSLPNPVAALTPTAPGLPSPFVPSWIATGHLQPDGNVQATYYQKLSDKVDVALDFQTILRPQSMLGPAKREALTTLAAKYDFRMATFRGQIDSAGKVGMYLEQRFTPAFAFLVAGEIDHAKNASKFGVGIMIESSTMTQEEMIAAGMLTPV

SEQ ID NO: 3130 - protein, 332 aa, Cryptococcus neoformans
MEGLQRLLQGGRGMGMGGAAGGQTVVADNGETVHISALALLKMLKHGRAGVPMEVMGLMLGEFVDDYTISCVDVFAMPQSGTTVTVESVDHVFQTKMLDMLKQTGRPEMVVGWYHSHPGFGCWLSSVDVNTQQSFEQLHPRAVAVVIDPIQSVRGKVVIDAFRSINPAALATGQESRQTTSNIGHLNKPSIQALIHGLNRHYYSLAIDYKKTEAEQGMLLNLHKRGWTEGLKMKDFEEMEQGSQKAIENMLNLAVAYTKSVQEESTMTEEQLKTRHVGKLDPKRHLSEAAEKAMEDQVSKSSHGSFGRVVDVDSSISCSKTTITIHTTALQS

SEQ ID NO: 3131 - protein, 337 aa, Cryptococcus neoformans
MDWIHLFPSQLFFHYFFPTTRKEKMSNSPPTFESYLVVGGCGFLGRHIVEQLLGRGETQVSVFDIVQRHFDSNVNFYIGDLSNPQDVENALAKSQATVVIHTASPTHGMGRALYEKVNVTGTRTLLDAILSPSSTVSKLVYTSSGGVIYSGKEDICNADERLDYPAVPLDAYNETKVAAEKMVLEANGQEKGGEGGAKLLTCAIRPAGIFGPGDRQMISGFYSVVKNGQTKWQIGDNTNLGDFTYVGNIAHAHLLAADKLGDEDEKGDEEDEGIPIAGQAYFITNGEPIYFWDFARTIWRQLGHVPPYTIVLIHQISPVITDISTISSACPVGCLNC

SEQ ID NO: 3132 - protein, 335 aa, Cryptococcus neoformans
MLHNRGWPGEKPEKGVSRELKSAVAVPIGARASSMTSQRQAYRVSFELLLSDCPLQNLYHGPQRQPQTIRVTVQHVSFILRSVSVSQYLTIFSPEGRLYQVEYAFKAISSAGITAVAIRGKDTSVVITQRKVPDKLLDPETITHLFQITPTIGCVVTGLIADARAQVQRTRSEAAQFRYKYGYEITPESLAKRMANINQVYTQRAGMRPLGISMILIGPDDERGPQLFKLDPAGYFTGYKATSSGQKQTEAANYLEKRWKTLEAEKKDLDRAGVIEMAIECLSSICATDFKASEIEIGISSLSPDEKHIEGQDGRFRQMDERERDEWLIRVGEKD

SEQ ID NO: 3133 - protein, 351 aa, Cryptococcus neoformans
MSATQLPEIMDAILFKHPYKVAVEQVPTPKLQTEGDVIIKVHLAGLCGSDLHLYRAKEDAGKDYTMGHEVVGTIVQKGKEVNSFNVGDIVAVPFTISCGKCYYCSTSHTARCTSSALFGTPSLPGCQATYVRVPLAASCLLLKPPQLPEELMLLMADILPTGYSAAWNAWRLLDRGGERGGKGEKKDICVVVGCGPVGLCAITSAQTLFSKVFAVDPTPARRELAIKHGATALVPGELQSAVMAATEGRGADAVLEVVGNQGAFDTALSIVRPYGAVSSVGVHAGELKIDGGLLYDKNVRLQFGRCSVRHFYPAALEVLMNNQELFKSFIEYKVGFSQAEEECPATQLYCR

SEQ ID NO: 3134 - protein, 371 aa, Cryptococcus neoformans
MAPKDRTSEFHSTLNSIKSRSALTTNRAKGKQQDREAKQPLISNGPGQTGAKSEFGKMAGGIAKDINATTLKLQKLAQLAKRKTLFDDRPVEISELTYIIRQDIASLNSQIAQLQAYIKSSKGGKGGSAASGSKGKGNGGKQEEEHNSNVVMLLQSRLANMGMGFKDVLELRTQNMKASKDRTEQFMHTAQGSSPGDRKGKSRANTPTPNPSSSLSNLGSKRGEKEGQDFLALDIDGDRGESGIGMGGDYQQMQLVEQQDTYIQSRSTAIESIESTIAELGNIFSQLATMVAEQRETVQRIDADTTDIAANVSGAQRELLKYYASVSSNRWLMLKIFGVLIIFVSPFVLLLLAFFVLGILCSRKRKTLMVI

SEQ ID NO: 3135 - protein, 359 aa, Cryptococcus neoformans
MVTVRLNIRTLGNDYDKTEDDIKALQSVGQIIGEVLKQLDDERFIVKASSGPRYVVSYRPTLPVHKLKPTTRVSLDMTTLTIMRILPREVDPMVYNMSLEDPGSASFAGIGGLGEQVRELREVIELPLMNPELFERVGINPPKGVLLYGPPGTGKTLLARAVAATLNTNFLKVVSSAIVDKYIGESARLIREMFAYAREHEPCVIFMDEIDAIGGRRFSQGTSADREIQRTLMELLNQMDGFESLGRTKIIMATNRPDTLDPALLRPGRLDRKIEIPLPNEQGRLEILKIHAKKVNKSGDIDYEAIVKLSDGFNGADLRNVCTEAGMFAIRDDRDAVVQEDFMKAVRKLNEAKKHETTM

SEQ ID NO: 3136 - protein, 348 aa, Cryptococcus neoformans
MSPIANGNPHGSSFSVREPERTGEVSKKMHSKVVIIGSGPGGHTAAIYLARANLEPVLYEGMLANGFAPGGQLTTTTDVENFPGFPEGVTGTEMMDKFRAQSERFGTKIITETVARVDLSVRPFKYWTEGEEEEHEFMTADTIIMATGASAKRLFLPGEDTYWQSGISACAVCDGAVPLFRQKPLAVIGGGDSAAEEATYLTKYGSHVYVLVRRDELRASKIMAKRLTSHPKVTVLWNTVATEAKGDGEVLTSLTIKNTKTGEIGDLPVNGLFYAIGHEPATSLVKSQVELDSDGYIKTVPGTSQTSVHGVFAAGDVQDKKYRQAITSAGSGCIAALEAEKLISEEEA

SEQ ID NO: 3137 - protein, 397 aa, Cryptococcus neoformans
MISSRGSVEGFLKVWSNPSPTETPTIHFPPVGRPLARMTENLNLQKALLRRIEEAGKGIVDIRENSRVREMRLGEGGRWVGLRIGDEWVRGSLVVGADGPNSPVRHFSEIESYGHGYNTHAVVATLNHDPDPLYPNTTAFQRFLSTGPIAFLPLSDTSSTMVWSTLPENAAALKKLSHDALTQMVNAAFTLPEETLSSLCEAMLSAQSEGTPLTAPQIVTLIATLPTPLTSSDQPIIPPAITSIHPPSVASFPLRISHATSYLGERTALVGDAAHTIHPLAGQGLNMGLADVKCLAEVLEETRRLGGDLGSLEGTKGYPKERYPLNHLMLSATDKLHYIFRARNGLVNWVRGTGFDVINELGPIKRILMRCGIRSRTWWCFCENRKGTGIWKSACGR

SEQ ID NO: 3138 - protein, 393 aa, Cryptococcus neoformans
  MISC_FEATURE (299)..(299): Xaa = any amino acid
MGLTSWWPAARTSHVEFAWGSETGPRCCYSRDSSLRRIWRADTPERGSVRQSNADIPATYTMSAIRTLANPVTACFSTSLSPRAAFHRFLHALSASIRRLDLSRDPSKTLNRLKQHRFTLANTLPRAFMLLCASYSLYIMTTPPFPLKLGIPIAYVAAVILPITSQFVWPATPIFAWLITFFSARFIPSGRRPEIHVALLPALESVLYGANISDLQTRYTNAFLDVVAWLPYGVFHFTLPFVVAVILWSLGPRGAVQFWGLAFGWMNLLGVVCQLLFPAAAPWYEIIHGLTPADYSMAXSPGGLMRIDRVFHSSGYTNAFGSAPLVFGAFPSLHSGCAVMEALFLSHFFPSLKGLYWGYVGVLWWATMYLSHHYLIDLVGGACLSVLVFLVHA

SEQ ID NO: 3139 - protein, 370 aa, Cryptococcus neoformans
MMSRCAWNVFPSIVGRPILRAEERLGTSQLKDIMIGDEAAENRSYLQVTHPMEHGVVKNWEDMRHLWDYTFNEKMHMDPRGKKILLTEPPMNPKANRQKMCEVMFEEYGFGGVYVAIQAVLTLYAQGLQTGVVVDSGDGVTHIVPVYDGFALPHLTRRLDVAGRDVTRYLIKLLLMRGYAFERTADFETVRGIKEALCFTSYDLEMDKKLAEETTVMVENYTLPDGRVIKVGSERYEAPECMFQPHLVDVEQPGVAELLFNTIQQAAVDTRTELYKHIVLSGGSSMYPGFPSRLEKEMKQLYLTRVLGNDTSRLKHFKIRIEDPPRRKHMVFLGGAVLADIMKDKDAFWVTKEEWEEQGIRALDKLGRGD

SEQ ID NO: 3140 - protein, 404 aa, Cryptococcus neoformans
MSILRVGTLHLRSVCKAHTTIAPALRAKAVPRAVPLVSKRNANDLSITSPPNPSASVRPAIRYGPPTGGRSSDSGRTVTVFGSTGFLARYLIQKLARQGTQVIVPYRDEDEKRRLRPCGDLGQIVPLEWDARIPEQTAECVKHADVVYNLVGRDYETRNYSYDDVNVKVAQSIAEISADMNIPRLIHVSHINANPESPSEFYRTKYAGERAVRDAFPEATIVRPSQLFGHEDWLLNAIARYPILCKLNNGNTKLFPVHVVDVAQALNLMFDAPVTSTASTFVLPGPELYNYAELERLVSALTLRPISSAPSLPKPVAKFLANLVNRGLWWPTISPDEVERMFIDDAGAEAFQVHSPGPDGWNAPPRPQIVGVNGEPVKSWADLDMQPDTIAEHAIKPLRRYRST

SEQ ID NO: 3141 - protein, 384 aa, Cryptococcus neoformans
MADDSVPLPYPNLKVPTWYYQVQHVDYKKDEAEKSFWEAVEKDGMSHSINSDKTELIQKLEEKNKQQVEEYDRKLKDAEENEGDSEISELLRNKAMYFVRIGDKERALPALEIAIEKTAGLGAKIDLVLAIVRIGLFFSDIHLVTTNITRANNLIDSGGDWDRRNRLKVYRALRHLTIREFKEAAELLIDSLSTFTAAELMEYDEFVALTILAAGVGCDRKGIKDKVLASPEVNGALPNIPSLASLTNSLYKSNYSAFFIALAEVEQQYLLTIPYLVPHARYYVREMRIKAYSQLLESYRSLTMERFCRSFGVSEQYMDKDLSRFIASGRLACTIDKVNGVITTNKLASQNKTAMYEQVLKQGDVLLSGEYLIPCYKVRMLTMI

SEQ ID NO: 3142 - protein, 402 aa, Cryptococcus neoformans
  MISC_FEATURE (249)..(249): Xaa = any amino acid
MATVNIRRDVDDKFYRYKMPLLQIKIEGRGNGIKTVVPNMEDIARALNRPPTYPTKFFGFELGAQTSMANDRYIVNGAHTADRLRELLDVFIEKFVLCPSCKNPETEIVITGRSGHEDMHRDCKACGRQNPIDMRHKLSVFIIKNPPKKKDKGGKKGKKSGGMTAEANLGGPMVFEKTEDGSGEDDSSPDAGIAGVPTTGTEIDAVLGRGDPILGDPDAAEAASKKLAKLDVNGGGDEEEDEDADSPYXALGSWLENNKEADDASIIAQIKDLGIAGKHKVLVEIGQHLFSDDICDEIAGRTALLQALVTSEKHQKSLLGGIERLIGLSPSLESLIAAGTTSKILMVLYQADIIEEDVVQQWGTHVSKKYVDKDKSKKVRKNAEAFLKWLEEAEDESDSDEE

SEQ ID NO: 3143 - protein, 381 aa, Cryptococcus neoformans
  MISC_FEATURE (328)..(328): Xaa = any amino acid
MPSNYSPCLVVPSSITDGRCQAASPDGCPCSFRRVSCFSKCPIHNANIALFRCDEVMRPAIDRKVLHPMHYKKQRMQWSLNDSFKKGLRNALTGLGTSNSFGVPFERHQATDLDLPSEDELVAYGEDTFESILKYMVSSGLGTEFSGSRPQPEVLQLLHTSGLMTDSNPNINRLTITSKGFQFLLEKRQTQLWEILMYYLSAKEANSERSSEVLSMFFSLGCMQLGQDYSASNSFPGAQEALDDLAQYGFIYKSSPDSDQFWPTHLATSLCSGDASAIQSQSADDKRFLILETNYKIYAYTSNELEIAILNLFVDIRIRVPQPRCRKXTVSTVKAAMEKGISARQIIAYLSSHAHPQMQLSPTIITSHHCRSTLFMGSREE

SEQ ID NO: 3144 - protein, 399 aa, Cryptococcus neoformans
MHLGLRFGAACPETSSLTHVLLDLFFSLRPYISIFTDHCISIAQINFIRHPRVQSYISPNRPTEGCLKLLHLFESNMVAVAGPKAPGVGISFGQSVVPNLNIKQICPNCRTDPPNIVEEYAKGDLVCADCGTILGDRIVDTRSEWRTFAGDENGDDPSRVGDAGNPLLGSNHLDTMISHKDGRTGIARDLNRAQARANTLSNGIYGKSSVAQLSAVFSRIGEKCDAMQLPRGVRERAQHVYKIVDEARAIKGKNEPAVIAACIVYACRDAKVHRTFQEVCKALKISKKELGQVFNHVKSVVQSSSAQGSMVSVHGSNNAQESAEGLLGRFANYLDLGNAVFNVSKHIAGEAVAKSAIDGRSPVSIAAGVLYFTCVLLGKSTTAKDISAMGGVSESTTKL

SEQ ID NO: 3145 - protein, 401 aa, Cryptococcus neoformans
MAAVETPSKVAASALANIDLNTAKKASEPTLLSKLQAAAPTKPVVEEAQAAPEDDVEEYRKRFVGDLDCEEKDEPLLKETNARFVLFPIKYHEIWQMYKKAQASFWTAEEINLAPDLHDWENKLNDNERYFIEHVLAFFAASDGIVNENLVERFSAEVQAAEAKSFYGFQIMMENIHAETYSLLIDTYIKDTARRNFLFDAIDTIPCIRKKADWALRWISDKRSCFGERLIAFAAVEGIFFSGSFASIFWLKKRGLMPGLTFSNELISRDEGLHTDFACLLFTHLRRRPHPDTIARIIKEAVTIEQEFLTDALPVSLIGMNAKLMCQYIEFVADRLLVAMGNEKIWNSTNPFDFMEMISLQGKANFFESRVSAYSKSGVNQAVGAADHNAIKKGFSLDEDF

SEQ ID NO: 3146 - protein, 405 aa, Cryptococcus neoformans
MSAPATSEAGPSSTNPPSVEGKKQPVVILCIGMAGSGKTTLMQRLNSHLHSKNTPPYILNLDPAVTHMPYSANIDIRDTVDYKEVMKQYKLGPNGGILTALNLFTTKFDQVLGYVEKRAETVDYILVDTPGQIEIFTWSASGAIITDAIASSLPTVVAYIVDTPRTASPVTFMSNMLYACSILYKTKLPFIIVFNKIDVQPHEFALDWMTDFEKYQEALNDKSRDEHGEGSYVNSLMSSMNLVLEEFYNNLRAVGVSAMTGEGMKAFFSAVEEARKEYETDYKPELDRLAAERAAQTEADKKAQLERLMRDMNISDSPRSGPGGNPFGPHARNDREDRYYDDEGEASDIDEQEQEAIRRQMEEEEEDAEAEELGKLDVEEPEIGSLAGGAAAAAASRGVTWPAPR

SEQ ID NO: 3147 - protein, 399 aa, Cryptococcus neoformans
MAAPSETTIQLSPEAEAQYERITRNLQEVTSGEVIRKVLSEGKVVKAYWGTAPTGRPHIAYCVPLLKIADFLTAGVNVKVLLAGELILHAFLDASKSTLETVQYRVKYYSKLLITVFTVLGVPTDKLEFITGSSYQLKPDYTLDVYRFHALTSTREAEHAGADVVKESESPLMSSLLYPGLQALDEQYLDVDFQFGGVDQRKIFMYAATFLPKLGYSKRAHLMNAMVPGLSGGKMSASDPKSKIDFLDTAADIKSKIKAALCPPGEVENNGVIAFIKTVLIPIQALRIEQAERRGEKAPVGEGSFVKPGAPEGTIFSISRPEKFGGDIHFKSYEELEKAYVAGDIHPGDLKTGVQEALIQFLGPIRKSFDEDKEWQEVERTAYPLFCCPHCRGAQEGGE

SEQ ID NO: 3148 - protein, 372 aa, Cryptococcus neoformans
MLRLQSLGSLPAHAEPAWTVSFNPTRSLLASCSTDRTIRLYSYIIPSSSDGLPSQDDSQAVFSLAKVIETDHKRTVRSIAWSPDGRTLASGSFDSTVGVWEEVIPLSDDEEEEDEGAQGVYKPAGEWECVTTLEGHESECKSVGFSSDGALLASCSRDKSVWVWEVQPDADFECIAVMMEHSQDVKSIAWHPHEEILASASYDSYIHLAYDDPDSDWCIFQKLHPSLPSTPLTIPSTSPSHLIDALVPTEEEKKAEAELQVPPLEEDETVWYSAFKEILHTAAHSRSVFSLSWSPPYPSAESAGSTDSTDLGMLASAGEDGKIIIWQITKDAHGVNDINSVAWCVREDKKGWGMLSSAGDDGSVKVWRVVRD

SEQ ID NO: 3149 - protein, 389 aa, Cryptococcus neoformans
MRHFTGSFNFGPQHPAAHGVLRLILELNGEEILRADPHIGLLHRGTEKLIEYKNYTQALPYFDRLDYVSMMTNELSYSIAVERLLNIEVPERAKWIRTLFGEITRVLNHLMAVLTHAMDVGALTPFLWGFEEREKLMEFYERVSGARMHAAYVRPGGVAFDLPHGLLDDIFKWATQFSSRVDEVEEVVTGNRIWKQRTIGIGPVTAQQALDYSFSGVMLRGSGIPWDIRKVAPYDAYDKVEFDVPVGKNGDCYDRYLCRVQEFRESLRIIGQCLNKIPDGAYKVDDHKIVPPPRASMKESMESLIHHFKIFSEGYSVPPGETYAAIEAPKGEMGVYLVSDGTNRPYKCKIRAPGFAHLAGADFMMRHHFLPDAVAIIGTMDLVFGEVDR

SEQ ID NO: 3150 - protein, 409 aa, Cryptococcus neoformans
MHTSLRLLSQNIKQARIMANPVYIVSASRTPVGAKDGALATVSAPQLGVVAVKHAVERAGIKPERVEELYMGNVVQAGVGQSPARQVGIGAGIPETADATTINKVCASGMKAIMLAAQNIQLGQRGVMVAGGMESMSQAPFLVPRQTPAFGHFETKDSLVVDGLFDVYNKFPMGNCAEHTAAKLKITREDQDDFCLSSYTRAQEAWAADAFADEIAPVTVKGRKGDVVVKEDEEYKKLLKDKFRTIRPVFVKENGTVTAANASTLNDGASAVVLASGEVVEKEGLKPLAKILGFADAACAPIDFPTAPTLAVPLALKNAGVTKDEIALWEFNEAFSVVGVAAERVLGLDRSKVNVKGGAVALGHVRPFSYTLPPPSFNKLAGGGDGAAGLGPVPEFDRESGTIAMVGIS

SEQ ID NO: 3151 - protein, 325 aa, Cryptococcus neoformans
MTDELPPTTESTDANGITTIVSWKYNADDQKVKVTRRVRRRLQVSTVTQTMAERKQWPKFGLDKGKPPGPDRKTTIIGENLHFKIAPISKVCAIQRVEPEPETAVKAPTGKAVVCRLCSGQHYTARCPFREQLAAIDNLNADGAEEEQVVVSGTLAAKGAGETGGKYVPPSQRAGATGAGDSMFRARDELPTLRVTSLSIDAEEDDLRALFQPFAKNGKLGRANIVRDRNTRVSKGLAFVSFESKRDAEAAMAHLNGRGYDSLILEVAWSQSRRTNVVVVYRSVLMRLKSGERCYAALYMQPDTHTKILSSFIESIKKEEHGHAA

SEQ ID NO: 3152 - protein, 395 aa, Cryptococcus neoformans
MSCPFHTTTNTSNRSPLPDRALLLAMKSQTNTFILGTRKSNLALVQTGHVADDLRRLHSGAGSKFGETREEGDDAEQGDVPFVHPYTFSIESMTTVGDRNQTTPLHLLSPYSSTQPAKSLWTDELEARLINGHFDMLVHSLKDVPTVLKDGCEIGCMAKRHDPRDALVVKQGLPYKRLEDLPDGAVVGTGSVRRVAQLKRAFPNLVFEDMRGNLNTRFNKLDNPQSPFSALILAMSGLERLGMAHRATSPLSSPTLMHAVGQGALAIEIRSTDPRVRNCLRGLGHWQTEWSCGAERGCLRVLEGGCSVPVGVESELVELDEDELTLHSCVTSTDGSKHVLFTPPPVLVRSYRQAEQFGEECARRLRGMGAGEILDEINKLRGARVEGLGKRYREK

SEQ ID NO: 3153 - protein, 376 aa, Cryptococcus neoformans
MGEGFFSDMATVYNQCPVSRHPKTCSSSPSVHLFGHEIVLDVSIPALILSTVGAAFLLRYTLSIFRLFLELTVLPGKDSRKGETWAVVTGCTSGIGLEFARQLAAKKFNIILVGRRQSALTDLSKEIESKYDVHTKSVTVDVSTPGSARDDALTQLELLAQNLDVGILINNVGASHSMPVAFHETERSEMSRIIETNVTWTYLVTRSILPSMVARSKQKGAPKSLVITIGSLSGRIPSPLLASYSGTKAALATWTKALAEEVKPQGVIVELVQAAFVVSNMSKIRKSSPFVPTPAPFVRSTLNSIGLPRGAQGRPHERTPFWSHAILDYVVGFAGYVSEMAGIKVILGMHKDIRKRALKKAARDEKKAEKRVNKAR

SEQ ID NO: 3154 - protein, 386 aa, Cryptococcus neoformans
MMLIFSIETYHSPRSAFISCNSKRISAKCAVSIGHERSLNQIVFNSEGDLLFSASKDSVVNAWYTSNGERLGTYGGIKGGDGHNGSVWTVAVDSQTRFLLTGGADNAMKLWEVKTGECLYTWEFLTAVKRVAWNEDDDMFLSITEQRSGQPSVIRIFSINREDPRSRSSTYPWFFFSFAIADARAESTTPITEMRLSGSRATVAIWAPLSDYIITGHESGKIAKYDVKTGEEVQAVEDEHSALISDIQLSPDGTYFITASKDKTARLWDIETLEVMKVYTTETPVNSAVITPDRPYIILGGGQDAMNVTTTSQRAGKFESRFFHKLFEEEVGRVKGHFGPINTLSVHPQGRAYASGAEDGFVRVHWFEESYFRSRPFGDLEPEPEV

SEQ ID NO: 3155 - protein, 420 aa, Cryptococcus neoformans
MAEQEPQVQSQQQKQQKQKPQQPPSGEPKAKSAKELKKEKRAAAVASRAIPTEGGVPEGPQGGKQSSSTATSDGRRSPVVHLNPSSQNPASSAGPSAPRRPPNHSEPSAPTLSVIQQNLFFSHLPHQAPADTVSALDTGKIHPIIVRVGVLMNSGQLRGANARTIGMMSAFKEVIRDYECPDQAVLWKDLPVYLSPMIAWLETCRPKGVGGGNAIRWLKSEINRLGEKGDKSEAEQKSYLVDAIGLYLRDRIEFADQVIADSAKEKIKPGDTVVTFARSSVVETVLLEAWTSMREQDPDATFNVVIVDSRPLLEGEKLLKVLTAAGLPCTYILLPLLSSILPQADLVLLGASALHSDGALYSRAGTAVVAMLAKEHRVPVVACVETYKFGERVVLDGVATNELGDVEGLLALPTKKPCIR

SEQ ID NO: 3156 - protein, 387 aa, Cryptococcus neoformans
MTVNPSSSLAGNEDLLRDKEVALIKLGTLYRDSRYLSIRTMIYRTFLTLVCDDNFGSMLDKLSQLITDSRTFMSHIAKAKTTKLVRTLLDLFPQDSKDMQMKVIQENIDWARTEKRVFLRQSLEIKLINVLLDAEKYQEALTITQTLLKELKKFDDKIILTEVYLLESRAAHHMHNHALAKTALTSARTTANSVYCPPTLQAQLDLQSGVIMAEDKDYKTAYSYFFEAFEGFCQSAERDNRALSALKYMLLCKIMIGSPNDVFSLLSLKSAAPYIGKDVDAMKAIATALEERSLDLFKTALQNYSDQLQKDEIIRSHLSYLYDTLLEQNLIRVIEPYSAVELSWIASEVGQSLQVIEDKLSQMILDQKFCGILNERMGTLEVHDDFK

SEQ ID NO: 3157 - protein, 430 aa, Cryptococcus neoformans
MSYVTIFISVLYTSGRIHLFITPHLTSSTFHFIPTSSHLPTSAALTPYYIFISTKRGSIIRHSTSTLRRAGQNFGHAQGGGNGHNGEILCLAASEDGKWLVSGGRDKVMGVWDVSEREPKWVDPSYQSIALSPLNNPSYHILSASLSRHLALHSLSTLSVIDTFFGHQDSIPSVSSLKPTLAVTAGSRDRSCRWWKVEEEVQLVFRAGGKTRKDLKGLMPAERKERLGGGWTEGVEPEKEKDSKGKGKEFMEGSVDCVCMLDDQHFVSGGDSGSLLLWHTGKKKPIFTQAFAHGFTPITAENPISAPRWITSIAALRGTNLFASGSWDGQIKLWAMNQELKSFSYVDVEIPAKGFVNSLQLSSLPYETISHASLPESGEKESTNAKSEIVLVAAVGQEPRLGRWMRDKLVKNGVLVARLELDRKGKAMMI

SEQ ID NO: 3158 - protein, 425 aa, Cryptococcus neoformans
MRLSRILTAISLLLSPLISSLPHEQLDPQLSNLFGNDTTTDGHTNNWAVLVCSSRYWFNYRHMANTLAMYRTLKRLGLPDSNIILMLADDVACNARNAFPATVYANAGKMLDLYGEGIEVDYKGYEVTVESFLRLLTGRHDATVPRSKRLLSDASSNVFIYMTGHGGNEFLKFQDNEEVSAYDVADAIEQMWEKRRYNKLLYVIDTCQANTMYSKFYSPEIIATGSSSLGESSYSHHNDMDIGVAVIDSFTHNVLQYLETVGKTSRNSLQEFASRSFGTCLGFNTYDPAKIFSHPGISTSLSSVPPEQILITDFFGAVARVEISPQSAELPLESRLIASKDGWEHTSLSINDGSLTEEIPEVLPRKIEGTKKGNGEWNRPLVDKTSEWGFLPPYLIGVVSFIWLYISLGDKEDKDDSEEVREEEL

SEQ ID NO: 3159 - protein, 373 aa, Cryptococcus neoformans
MRSSPVIEISPASSGTAIFQHNPKGDATLRREWEPGCQPDELYDAFLPAWRASLRRLLVRRLRNESTQMADWQKRVRSEARDKYFYWTAVFGTHTFFMMFLPILFFFGHPLEGRGLLHVVGLGIYISSFAKDLVCTPRPYSPPVIRLSMSTHHHEYGFPSSHSTNSVSIALYLGQWIFKLQDRLGWPTVLLSWLMLAVYMTSVIGGRVYTGMHSIGKNEAWVNSGSWTGRTRQFWSMSNMIVNNVTVPAIIAPLAFTLIHRHPEPFEACPCFEDAIAVLAVMLGSTLGQWFTVAIWPSIKVQNPTAFYSYNLATIILSIMFRLVFGLGTLFAWRLLAKYTLRQVLPPVFRSCSLLLHSSLPARRFYISTASEA

SEQ ID NO: 3160 - protein, 349 aa, Cryptococcus neoformans
MHKLDAPKSTSCLPAMSGNGSSSFAAPPSARILVIPPQFHSMTAGAGAGLVSSIVTCPLDVVKTRLQAQAASVHHKDYQTVEMIIKDIWTSGGFRGFYRGLGPTLAGYLPTWGIYFTVYDLVKDRLGAWAAHSDLPTKPSMVHIVAAMTAGATGTCMTSPLWVIKTRLMVRPSDQARYRNTLEAIVDIYRNEGFRAFYKGLLPSLMGISHVAVQFPLYEKAKSWSGKSISKARDADNNTEGDHSSLTPSTILICSAFSKMVASIATYPHEVLRTRLQIRKSSPKSNSSSSVFSGIIDTFLSIKNQDGWRGFYRGLSINLIRTVPSSAVNAYVSAIFFFDRKRAITVFHH

SEQ ID NO: 3161 - protein, 434 aa, Cryptococcus neoformans
MSPSVFKISPGINSYDWGKKGSASLAAQLATTSIPDFSIDEDKAYAELWMGTHPNNPSRLSDNTLLSEHLKSHPELIGSSVSSKFEDCKDGSLPFLFKVLSIGTALSIQAHPDKPLAKKLFDEKPDVYKDPNHKPEMAIALTPFLAFLNFLPLSVLLLHLLTVPELQEFVDSSLTESLASSLGLPTSQPPDTSLFKPTESPATAEQKDILKQIFAALMSADKKLVEEAISKLIKRYQAKRDIKENEKSLVDLALRLNDQYPGDVGVLCVFLLNVVELKRGEAAFLGANEPHAYIEGDIIECMATSDNVVRAGLTPKLRDVDTLVSMLTYEAAPGNKQLLQPTPFQKGDDTTKLYDPPIAEFSVLRTELSKGMKTSHRPVEGPSLCVITEGEGVVRNGNDRSEFVRGDVIFVGAGKEVEWEAIKGLEMFRAYVEA

SEQ ID NO: 3162 - protein, 392 aa, Cryptococcus neoformans
MKSPIFASWRTLTIRFGKSPAARRYSYSGGRAPEPTPTPRTSLPGENDHSYFPPQWDDRPSMPPSEVSYGGPPSSTPGAPPSGYSQYPPNWEAQTPGGNWNGERPGRLGKRRARDEEDDEYERNKRVVSGPVAGQAYSKKVTVVAEHYNSRPEVGVERREFSPIIGLKKFNNWIKSVLIGKFAYRPRGKVLDVGCGKGGDLNKWKQARIALYVGLDVADQSVQQAADRYRRMPKPGFDAFFYAHDCFSNPLSDVLSPELQIKDLYDNVTMQFCMHYAFENAAKARMMIENVSRYLRRGGIFIGTIPNAELLLQVLPDRDEELRFGNSCYSIQFTERRHKGVYGHDYRFYLTDAVEDVPEYLVDWENFVSLASESGLRLVYKKAFHEILQEER

SEQ ID NO: 3163 - protein, 393 aa, Cryptococcus neoformans
MGMAKWVCEITFCSPSVSLTHPPHSAMASRPTRARKQAKKGVQLTLMVVGQSPPPLPTPNNPLTPHRRIRHRSHHLCEHPRRQPIRIKPTNIELEEEGVRISLTVVDTPGFGDGIDNEYCFQEISSYLERQYDDILAEESRIKRNPRFKDNRVHALLYFIPPTGHALRELDIELMRRLSPRVNVIPVIGKADSLTPSELRDFKKRIMEDIEYYGIPVYNFPYDAEEDDEETIADNSALRALLPFAIVGSEEEILIDGEPVRGRRYPWGIVEVDNPDHSDFTRLRSALLASHLTDLKEITHDFLYENYRTEKLSRSVGGNDPDSSIHPEDMANQSVRLKEEQLRREEEKLREIELKVQREIQMKRQELLAKEDSLKVLEARLGTSSSYISQRKC

SEQ ID NO: 3164 - protein, 418 aa, Cryptococcus neoformans
  MISC_FEATURE (15)..(15): Xaa = any amino acid
  MISC_FEATURE (131)..(132): Xaa = any amino acid
MKAKAASQAQLAPTXLGALSSNDQDISNSSFDLGNVTFHDVIDTSLTKDSSSKAFMRELRKVIERSDVIIQVLDARDPEGTRSRWVEDEVRKRDMQGKKLLGVLNKIDLVPRANLEAWLKHLRHSFPTMPXXSSTQSQKQHLSQNALPTTSASLGAPALLHLLKQYALSTPHSSLTVGVVGYPNVGKSSLINSLKRSRACAVAAMPGKTRVVQEVALDKGVKILDCPGVVLEDVGSHMEGEEGRRRQAEIMLRNCVKAELVQDPISPVEVILNKVEPAQLQKLYNIPAYDDVRDFLIKMALIRGRLGKGGVPDLEASAVQVLRDWNSGKISYYTTPPKFHPSSAPAPAPVVTPVLAPNEAAGDMEMGGDKVGDAKILTTLSEAFTIEGLFDNLGRCCLGRRGCGQRRGNCRRVSYLSQ

SEQ ID NO: 3165 - protein, 452 aa, Cryptococcus neoformans
MSAPEVFQLSFGPLTGVAFSPDRTRMFLLLIPLVHSSHALIIDVAVSPNNNEVHIYQRQGAEWIHKDTLAEVCFSIVPRNNHCVDTWTRTPQHDKLITAISWAPNSNRIVTCSQDRNAYVWTPTESGWKPALVLLRINRAATCVKWSPNEDKFAVGSGARTIAVCYFDEENNWWVSKHVKKPLRSTVLSIDWHPNNVLLAAGTAEAKAYVFSAYIKGVDSKPEPTVWGERLPFGTICGEFISPDGGWVHSVAFSPSGNILAYVSHDSSLSIVYPSGPGAPPAAHFALRLPSLPFVDLTFTSESALIAAGHDCQPIVFTGSESGWVLSHSLDDPSSGGSRPLTPTATGSRSGGVGRLGNNEAFNMFKAADSRGQRGVPAPGATPTSAGLTPVGADGLLTTVHQNTITWVEPYEWGQGGEVTKVGTAGKDGRLVVWPVTAAKSGLAGRMAGLSV

SEQ ID NO: 3166 - protein, 398 aa, Cryptococcus neoformans
MAVSCGEAYASLASWQDGSWQEGARGGGRATRGKYIMQEEANEEEEEMNNATRDAATRPASPHHVANLIPYSLRNLRSKQKSSSPCAAKTWDTDDIDHWAMEEFKAPNPETHKPFLEESSFALLFPKYREPYLRSVWSSITSALEAYGLACELDLVQGKMTVKTTRKTWDPYIIFKGRDLLKLLARGVNAPQAIKILEDGIACDIIKIGGIVRNKERFVKRRQRIVGPNGSTLKAIELLTECYVLVQGNTVSVMGSYKGLKEVRRIILDCMNNIHPIYRIKELMIRRELAKDPKLANENWDRFLPSKHIFEKKKKKVYTPFPPPQQPSKLDLQLASGEYFLKPKEKEAIDKRKKMEKQKEVAQERRAVREEAFVAPPEKRDETVEERRKKRRKAEEFM

SEQ ID NO: 3167 - protein, 415 aa, Cryptococcus neoformans
MQLGCRLYYIITHCSICISGSVRGLFFVHRSLRSNPLFSRCLLSCASPSFHLPASNSPFPTRYTMNGYYDPQQHQSTNIEIPQGPTNQPRLLLRNLNETDATFHLSGVELAYANSLRRVMMADVPTIAIDQVLFMQNTTPLADEMIAHRLGLIPLISRNVSKGLRYTRDCDCDEGCYYCMVTLRLKVTFSGNDGEQFMRVTKEDRIIINNRDPEMGQPIGKGNPTVPPILIAKMGKGQEIDVLCKAYKGIAKHHAKWSPLSTVAFEYDPYNKLRHTTHWFETDERAEWPLSSNAAFETPPNPAEPFDYNAVPSTFYFSAESVGSIPVRSVVEQGLDLLIEGLANVVLGVQKEIGGEEEEGEDGAAADGVVGDGMGVGMGGGLVEPNIPAGIGQDQMAMAGGYGGYGSQQGYGGSW

SEQ ID NO: 3168 - protein, 409 aa, Cryptococcus neoformans
  MISC_FEATURE (409)..(409): Xaa = any amino acid
MSFSRASSNALKQALKSTASRQVARRSYSLLSGAAPRAAMATRLGATRGIKTLDFAGTKEVVYERADWPLDKLQDYFKNDTLAMIGYGSQGHGQSLNARDNGLKVIVGVRKGGESWKQAQEDGWVPGETLFDIPEAINKGTIIMNLLSDAAQSQTWNEIAPLITKGKTLYFAHGFSVVYKEDTHVIPPKDVDVILVAPKGSGRTVRTLFLEGRGINSSIAVYQDVTGHAKEKAVALGIAVGSGYLYETTFEKEVYSDLYGERGVLMGGIQGMFLAQYEVLRKNGHSPSEAFNETVEEATQSLFPLIGKYGMDYMYNACSTTARRGALDWAPKFKEANLPVFEALYNSVRDGSETRRSLEFNSRKTYREDLQKELDEIDNQEIWRAGKTVRGLRKCCELQWMFCFPANAX

SEQ ID NO: 3169 - protein, 444 aa, Cryptococcus neoformans
MVLSYSAIAKPTADTPKVISMTASKQVFPEAFEALPAPAAEESQELESQPEALAQASSSTIEAPISSEDRKVIQHLILDAGPLLSLTPLRHLATSFHTTPMVLAELRDPKAREHWERLALTGVNVKVESPTAEAMAQVTAFAKKTGDFAVLSQTDLSVAALTYQYEVMVNGVKRIRTEPPQAKKPSAKGKEKEKDTKQAEKKDEEVQENKNEKEGKPEEEDVEVEEAIQSLSQIIIEPSTKSELSVNDVSTTNRSHTQTSVPASAHAEDPESEGEWINPTNLSTHRSRDLGLITPSGSTAKPPAVACMTGDYAVQNILLGMRLGLVGEGGKKIGKVKSWVLRCHACFKVCKDPSKRFCPSCGNATLLRTSVSTSAKTGEQRVHLKQNFQYRTRGTIYSIPDPKMGRAKGQQKGGSGLILREDQREWQDAMRGDRIKKEKEERGG

SEQ ID NO: 3170 - protein, 386 aa, Cryptococcus neoformans
MAVDSAPSSETVSHESVRTFYMLTSRILRQIVGSLNVALATAALIQNIVRSARYNTIDELLALIKAVGRKLTEANPKELAAANIIRRILRLIREEYRAAAAAHVSSAPNSIPSTPLMGSSGMATPRASVDSDEFMKHSAKLKPLLIQAIEEVVGELETTHEDVAKGAREHIHSSEIILTMGHSRTVEAFLKQAYKDRKFTVVVAESAPSYLGHSLASSLSASGIPTLLIPDSSIHALLPRVTKVILGAHSVLANGGLFALSGSLACALAAKTHSKPVVVTTGQFKFAPAWNLYHEYGAVDFQGPGAVIGEQGKGGGGGMEGVEVVDPYYDYIRPELVNLFVTNEGDHPPSYIYRLIKEAYDDEDRDLVTVTSVYAFLRIRYFLCLV

SEQ ID NO: 3171 - protein, 442 aa, Cryptococcus neoformans
MPSPSPEASSSMSQPGPPSRSPSPASSNPDAPEASHNKTFADLGISPELCRACASMGFKKPSDIQAEAIPHALEGKDIIGLAQTGSGKTAAFSLPILQTLWENPQPFFALVLAPTRELAYQISQQVTSLGSGIGVRTAVLVGGMDMMSQSIALSKRPHIIVATPGRLMDHLENTKGFSLKSLKYLVMDEADRLLDLDFGPIIDKILKVIPKERNTYLFSATMTTKVAKLQRASLNKPVRVEVSSKYSTVSTLLQHYLLLPLKNKDAYLLYLANELSSSSMMIFTRTVADSQRLSIILRRLGFPAIPLHGQMTQSLRLASLNKFKSGGRSILVATDVASRGLDIPLVDLVINYDMPTNSKDYVHRVGRTARAGRSGKSITLVTQYDVEILQRIESHIGKKMTSFDVDKEAVALLTDTVAKANREAALEMRESGTGWRWQARKG

SEQ ID NO: 3172 - protein, 434 aa, Cryptococcus neoformans
MHPETPGGGRTRSAQCGRKGFRLVATARGGRCKDEQEGYDGSAWIESMMEKGRDDGDGIFEMRAMCDCMLTLADEWGSFDDMKLKGELLRGIYAYGFERPSAIQQRAIMPIVTGRDCIAQAQSGTGKTATFSVSILQRIDTTVKKTQALVLAPTRELAQQIQKVVIALGDYLNVDCHACVGGTAVREDIARLNEGPHIVVGTPGRVFDMINRGALKTEAVMMFCLDEADEMLSTGFKESIYEIFQLLPGETQVVLLSATMAPEVLDVTKKFMRDPIRILVKKDELTLEGIRQFYINVEKEEWKLETLCDLYETVTITQAVIFCSTRRKVDWLTQQLHDRQFTVSAMHGDMKQEEREVIMKEFRSGSSRVLITTDLLARGIDVQQVSLVINYDLPSSKENYIHRIGRGGRFGRKGVAINFVSNEDKNMLEEIETY

SEQ ID NO: 3173 - protein, 431 aa, Cryptococcus neoformans
MCGRAGSVVLWTLSTSIRTLRSVYIWRRIRSTVGIAASVSFLQPLLHSLLRHFIQICHISAQPISRCHLSRYRGSIQAPCQRKLTFQPYSSVLHGGIHHPTLRTWQANGRNLTKSMLIYPIFISDDPDAEQEVATLPGQKRWGINKLEAFLKPLVEKGLKSVILFGVPVTMEKASCILDFGVTDPRGSAADDESTPVIQALKLLTNVFPQLMLCVDVCLCEYTSHGHCGILSSLPNPAHSNAPTLDAEASAQRIAEVAVAYAKAGAHCVAPSDMMDGRIRAIKYGLMQVGLANRCALMSYSAKFASGLYGPFRDAAGSAPSFGNRKCYQLPPNARSLARRAIQRDASEGADILMVKPALPYLDIISDCAQYAPDHPTACYQVSGEYAMVVAGAEKGIYDLREMAFETTESMVRAGASIILTYFTPQFLDWL

SEQ ID NO: 3174 - protein, 361 aa, Cryptococcus neoformans
  MISC_FEATURE (258)..(258): Xaa = any amino acid
MDRLMVSQTTGRYPRPDSTHDQKTMSLDNYQKIEKVGEGTYGVVYKAKDINTGHIVALKKIRLEAEDEGVPSTSIREISLLKELSKDDNIVKLLDIVHSEAKLYLVFEFLDMDLKKYMDTIGEKDGLGPDMVKKFSYQLVKGLYYCHGHRILHRDLKPQNLLINKSGDLKIGDFGLARAFGIPLRTYTHEASFSPHSSSFLMVVTLWYRAPEVLLGSRHYSTAIDMWSVGCIVAEMATRQPLFPGDSEIDEIFRIFRXLGTPDEDVWPGVRGLPDYKPTFPQWHPVELADVVKGFEADGLDLIAQTLVYDPAHRISAKRALQHPYFDGQSLRRINPRTIYPLFSKSLSGILFLALFITHVD

SEQ ID NO: 3175 - protein, 415 aa, Cryptococcus neoformans
MPWKRRLPQNLFWLILQVFYSSKNSSPNMSHRKYEEPRHGSLAFLPKKRAARHRGRCKAFPKDDPKKPVHLTAVMGYKAGMTHIVRDLDRPGSKMHKREVVEAVTVIETPPMVVVGAVGYVETPRGLRSLTTVWAEHLSDEVKRRFYKNWYRSKKKAFTRYAKKHSENSGASVARELERIKKYCTVVRVLAHTQISKTGLQQKKAHLMEIQVNGGSVADKVDFARSHFEKTVDVGSVFEQDECIDIIGVTKGHGYEGVTARWGTTRLPRKTHRGLRKVACIGAWHPSNVMFSVARAGQRGYHSRTSMNHKIYRIANGASGSSGSTEFDLTKKDITPMGGFVRYGVVKNDFVMIKGTCVGPVKRIVTLRKALRTHTSRAHTEKVTLKFIDTSSNFGHGRFQDAAEKNAFLGQLKQV

SEQ ID NO: 3176 - protein, 419 aa, Cryptococcus neoformans
MAVATQKMPKAPTSAPGGSIKNKIEAAELDITRKTQNLRRLEAQRNALNARVRLLREELQVLQEPGSYVGEVIKVMGKKKVLVKVQPEGKYVVDFSPDIPISALTPNIRVSLRADSYLLHSILPNKIDPLVSLMMVEKVPDSTYEMVGGLDKQIKEIKEVIELPVKHPELFESLGIAQPKGVLLYGPPGTGKTLLARAVAHHTDCRFIRVSGSELVQKYIGEGSRMVRELFVMAREHAPSIIFMDEIDSIGGSRGEGAGKSGDSEVQRTMMELLNQLDGFEATKNIKVIMATNRIDILDSALLRPGRIDRKIEFPPPNPEARITILKIHSRKMSLQRGINFRSLAEKMGNCSGAEVRGICTEAGMYALRERRQYVGQEDFEMAIAKVLKKNADNNMSVNKLFLEVFLIVSYETFCICVF

SEQ ID NO: 3177 - protein, 434 aa, Cryptococcus neoformans
MGGGFGGFHILIRLQGEKLTKCRAYDDYFKAYSTAVMGGRERPEVMYGGKIIMPPSALARLSALDIPSPWTFQLRNPRSPTQHITHAGVLEFIAEEGIVHLPAWMMKRLNLEEGDPIRLTGAKLPKGKMVKIQAQNTDFLQVSDPKSVLESALRFYSTLSPDDIIEITYNSLTFEFLIMSVVPEGPGISVIDTDLEVDFATPKGYVEPPRPEPKPIPTMADKLNIDLSSNEPTGSGAGSVSGGSRPGTSMGTQTPVESFTGVGQSLSGKKVKGKGLAKKIEEVDPIPSALILPEGKFFFGFKYIPYDPSKAPKPSLADQQKVELQPFGGEGNTLKGGKRIGGEEGKGKEKAAEDEKEDPWAKLGSGNTLKRTTTTAASSSSTPAPVSAPLEEFKARKATEQEIIDATMLDEDDFMFEDEEDDEDDVIEIDSDYD

SEQ ID NO: 3178 - protein, 409 aa, Cryptococcus neoformans
MVIDESEESSDEDEESFNNFGSQFGDDRPLSTIRFSPSSQYVLTTSWTGDTKLWDLPNLNPISTKRGHTEKVGGAAWHPFATVGASEEAVNFATGGGEGDVKLWSLSGYVFSFSSIHPVLSFFLTLPCSEKPLSTLSGHTSRVGRLAFHPSGAYLASAGFDGTWRLWDVESSKELMIQEGHSKEVYALGCQDDGALIASGGFDAIGRVWDLRTGRTAMVLDGHVKEILAMDFAPNGYQIATGSGDDTVRIWDLRALKTQYIIPAHKSSVADVKFFRSSGEMPPVGIQGLPLSSRSANVDGMDVDKSNDTEDNEKEEKLSRSGMFLVTAGFDCNVRIWSADEWNMVRNLSTDAGKVMSVDVSGDGKFVASASYSRSFHLFGRELFVGMYTCWKGSRPQMETEETKKTYAF

SEQ ID NO: 3179 - protein, 451 aa, Cryptococcus neoformans
MHSRPVFLRALRLRQQPLPARRFLPPQSLRPLSSTARLLDESKKSEQQSQKKKSTNDEPITPRSPWAVFTQVLKEEIEKNKGWQDNVKQLQGDVDKFADSAAMKRAKDVYEKTRLTNLIKNNPRIQSAVGDLQKAGISVHDAVQHALADSEVLKAISAATNRFVSAASSATAPIRDTKAYKLMAESLEEAFEDESGVGSRYGGYEEKEARRKKREMRAKKAGRAAIKRVEENPEAGEALVLSDKPESVSRLAFIKESPTYQRMMENYYESDSPFVSAIRTIGTKVGSLFEENETAQVIRAMKALDPNFRMDRWTGELREYIVPEVVDAYLSADRESLKAWCGEATFNVLWATMGQFIKQGLVSDSKILDIKHVDIAHGKMLENNIPVFVITFATQEQLLFRSAKTGKVVVGSEDDVEQCRYAMVITRLESELENELTGGWKVVEEFSFSLF

SEQ ID NO: 3180 - protein, 412 aa, Cryptococcus neoformans
MSEFLDQYKTLVMQLFYRRLFPYRPLYLWLNQEQIPSKLFTHREFAFTLAGDVYLRYQSFNNVDEFKASIARHIPSRFEIGPQYSARPKDRKTLASGALQPQRRELVFDIDMTDYDEIRTCCTDKTICKRCWGFIAAAVKVLDHSLRETFGFKHLLWVYSGRRGIHCWISDQSALDLTDDQRRALVTFLEVIKGGKEQSKKVNVRGPTGDAALHPFLSEALDTLKPLFSSLCIYDQDCFKGEKGWEALLAILPTDRAVIGPLRAKWEKNSDSSSEEKWRELMSEIAKHKKEEAIMTKFTKAVEDVVLQYTYPRIDAEVSKHRNHLLKSPFCVHPGTGRVCVPINPSLIDEFDPDTVPTVGQLLNELDNVKAEDPEAAGRRMEDYEHTSLGPYVEMFEKHVAAVLKDSECEKR

SEQ ID NO: 3181 - protein, 387 aa, Cryptococcus neoformans
MLKSLCFVIRPAIVTEILGACLPTTKSEDIPSSFTTTGHIGHMNLREEWLPFRYLIGQVVLDKNPGLRTIVNKLDTIHAQFRYFDMEVIAGDNDYIATVNESGCSFTFNFSNVYWNSRLHHEHERLISLFPPGCVIADVMAGVGPFAIPAAKKGCYVLGNDLNPESVKWMRENRLRNKAGHHLEYSEIITDILLQVEPTLRVSEIDGFEFIRIAPLEVWTRPFDPAPPPKVSNRQRDREAKEARRKREQAKAAGQPPPKLISHFIMNLPDSAITFLPSYVSCYTPLLAERSFIDEYGGEEEAKRKVEMPMVHCYCFTKEIETGKAEIDILQVRPYFRSGNSSTNLSFNLTPQVENYNLHHVRSVAPNKDMYCLSFRLPREVAFRHNG

SEQ ID NO: 3182 - protein, 450 aa, Cryptococcus neoformans
MSIARIFGMGLRNKRVSTTAFRYNANRNSKVQLRSIVRYRHSSPSQEFETNSAEIRVNSTTITIKQPDEDDLQLTVSDHFYLFDHCRCPQCFHPRTKQRLKTLSQIPSDIHPTAVALSRSGLHITWSTPSAHTSFFPAGFLRRAAYETQLSEHVDCRDDRTLWNSEISKSPPYVAYDDIMSQQVHQHEQAVLQVLNKVHQFGFCFVTGVPIDAKETETLIKSIGPIRQTHYGGFWSFTADLSHGDLAYSAQSLPAHTDTTYFTDPAGLQIFHLLSHPSPGQGGKTLLADGFHAASQLSAVDPASYSVLSRLPIPAHASGTKGTLLRPLISFPVLRHDECGRLAQVRWNNEDRGIIGHGWSATEVRQWYQAAQRFESLVKSEQNEYWVQLNPGTMLIIDNWRVMHGRSEFTGSRTMCGAYIGADDWHSRRAVLTERHGDVGGMDDVWRFGW

SEQ ID NO: 3183 - protein, 490 aa, Cryptococcus neoformans
  MISC_FEATURE (61)..(61): Xaa = any amino acid
MSIDPAGSQASRQLPINLFTRSPTDAIPQSTYFIPSAWRRFQLSELINQVLGNTAENGSKXPVPFDFLVNGEVLRGSLEAWVKKNRGGDEESQIDVEYVRSVMPPEEAARVEVEDWVSGLSLSRKGYVLLSSYLSHLQVLPLSAAAQSSSALYTLPLPTSLGATSCTWVSPQTQETDILVAAGGVDRQTHVYSIPSLSPDTADAPRELYTLHGHTGPISSVIASSSGKEIVTGSWDGNINLYVLPDAEPTEHQVPADPVSYLPGQGTKKRRKLEKDQEKAPIEGLTDGDATGEGGWRRAPDAVMRGHTGRVGGLVWDKLDSGKIWSAGWDGSVRGWEVETGAAGALRQGPFDKSALCVDQWKMNGTLATGNMDRTISTHLTHFFSLATSLISLTLPTTSPVPSVTCHPTSPFTLASATYSGVVQIWDIRSPKTALFTVSKAQSKLADPNRKVTKNGKVLGERLLAVDWNGEVLVAGGEDGEVGIWRARGE

SEQ ID NO: 3184 - protein, 456 aa, Cryptococcus neoformans
MATEKAPIVGSSASTSLPTLSVQDGTLPLTPGAQGMQTGTIDGHRQLQSPVSRSSSAGEDKMREKARDAQEQVGTHDNVPQAQANLHHATQQARVAAINAAATQAALETAAQLPATARVPVSGGGVEQGQARRKTAGRYALSDFLIERTLGTGSFGRVHLVRSRHNGRFYAVKVLNKEKVIKMKQVEHTNSEREMLVRVRHPFLVNLWGTFQDVNNLYMVMDFVAGGELFSLLRKSQRFPNSVAKFYAAEVALALDYLHSLDIIYRDLKPENLLLGADGHVKVTDFGFAKYVPDITWTLCGTPDYLAPEVVQSKGYNKSVDWYALGVLIFEMLAGYPPFFTEDGNPMKLYEKIIAGKVRYPTYFDALAKELLKNLLIGDLTKRYGNLRAGSSDIFAHGWFAEVDWDKLYRREIPAPYVPKIDGEGDASQFDRYQEADVSAYGKVGNGPYDHFFTEF

SEQ ID NO: 3185 - protein, 438 aa, Cryptococcus neoformans
MEEIGIDLKMEVRKNPQISEKQNLLNSLPSGSEELYSTWKRLEAHREFLQLQEEYIRDETQNLRRELLRAQEEVKRIQSVPLVIGQFLEPVDERRAIVGSTTGSNYVVRILSTLDRELLKPSSSVALHRHSNALVDILPPEADSSIAMLGADEKPDVKYSDIGGLDSQKQEIREAVELPLVQQDLYRKIGIDPPRGVLLYGPPGTGKTMLVKAVANATKAAFIRVVGSEFVQKYLGEGPRMVRDVFRLARENSPCIIFIDEVDAIATKRFDAQTGSDREVQRILIELLTQMDGFDQQTNVKVIMATNRADTLDPALLRPGRLDRKIEMPNPSRRERRLIFQTVTSKMNLGPDVDLEDYVSRPDLLSSAQIASICQAAGLQAVRKNRYVILPIDFEEAWGECRVPHSRLRVGALKNAAFLPSFVVFRNSKLTLLFLFSS

SEQ ID NO: 3186 - protein, 456 aa, Cryptococcus neoformans
MWEPPVPTRIGKKKRRGPDASSRLPAVYPTTRCKLKLLKMERIQDYLLMEEEFVSNQASQSGEDRTAADRTRVDELRGSPMGVGTLEEIIDDDHAIVSSGGGSEYYVGIMSFVDKDLLEPGCSVLLHHKTHAVVGVLADDTDPMVSVMKLDKAPTESYADIGGLESQIQEIKESVELPLTHPELYEEMGIRPPKGVILYGVPGTGKTLLAKAVANQTSATFLRIVGSELIQKYLGDGPKLVRELFRVAEENAPSIVFIDEIDAIGTKRYDSTSSGEREIQRTMLELLNQLDGFDTRGDVKVIMATNKIENLDPALIRPGRIDRKIGKFSSEFPLPDTKTKRHIFKLHTSRMSLADDVDIEELVMTKDELSGADIKAVCTEAGLLALRERRMRVTRTDFTTAREKVLYGKDENTVSLSAFNTADAVARRPVSLSVRRLEILVYVVDCMHFNQAVNSW

SEQ ID NO: 3187 - protein, 456 aa, Cryptococcus neoformans
MIDLIHLQADKGGNPDIVRESQKKRGASVELVDEVIAIFAEHKNANYEMENAKRELNLLQKEIGQIKKAKGDATELLAKKADMDKKIAEMTTRVADLIKKRDQKAGQIGNIVDPQNHDDNPVLRLWHPEPNHKGNSQLLDQSDKPEGIISHHEVLARLEAYDTDRGVKVFGHRGFYLTNDGVDLNQALINYGLDFLRKKGFKKVQPPFMIKKEIMGATAQLEDFDEALYKVSGGAEDMYLIATSEQPISAYHMDENLDPKNLPLHYAGYSTCFRKEAGSHGRDTWGIFRVHQFEKVEQFVVCEPEASPAELDAMVANSREFYESLGIPYRLVNIVSGGLNNAAAIKYDLEAWFPYQGEYKELVSCSNCTDYQSRSLNVRLGFKEKDKKTGFVHMLNGTLCATERALCCLVENYQTPEGLRIPKVLQPYMQGRDFLPYTAELPKTSTSKGPSTKSKK

SEQ ID NO: 3188 - protein, 478 aa, Cryptococcus neoformans
MPRPLPLPALRAALPRPHPLPLRRLASTAPPPRRHYLSTALLLGGSVLLVAYYYDSRSLLHEHVAMPLMRLVADPEQGHKLAVRVLAWDKGKISVNRMRSAQTDTVQLFGMHLKNPVGIAAGFDKDAEAIDGLFDLGFGYVEVGSVTPEPQPGNPKPRFFRLEEDDACINRYGFNSLGHGHALARLRLRLAKFAQDHPSLFPSPLPANLVPPAGLPRSLRAGQLLAVNLGKNKASDPDSNDDYIRGVRTLGPFADVVVINVSSPNTPGLRALQGKQQLERLLNDVVEERNKIAQGTGLPKIAVKVASDLSEDELADVASAVRSSGVEGVIVSNTTIRRKELNLLTDTTGNQDQIGGLSGKPLFPYALNALKTLRPLLPPSVPIIGCGGISSGSDALTMANAGASIVQVYTSFGFRGVGTPRLIKDEITEHLKGESWKTHVGRDGVFRSTDGMGREPSQARKPSACRRGQRAGRALATV

SEQ ID NO: 3189 - protein, 488 aa, Cryptococcus neoformans
MSRPLRIGFIHPDLGIGGAERLVVDAALSLKNKGHHVTIFTSRHDPSRCFPETIDGTLPVHVLGSSLPRSFHPKFPFTILFSILRSLLLAVLLLTSLLLPGFDIFFVDQQSVAVPLLRFVSGTRIVFYCHFPDKLLSGGWEIDVGKDKAVVERKGVGILKRMYRWPIDKLEEYTTGQSDIIISNSEFSSRVFALAFPSLAQKPRRVVYPCIDLSSYTSTSSDVKDGSVNLIQSDRPTIISFNRFEAKKNVDLAIRTFAKLRDDDLISKEEFGNLRFVVGGGYDPDQRDNVQTLLHLQNLCTNLSLSHHTIPSSSPISPNTQIIFLLNFSSAQRAHLLTSPSTLALLYTPTNEHFGIVPIEAGACGLPVLACDTGGPVETVVDFSIPSNAENGTGLLRPPRAEEWAPALTTLLHLSSSQRSIISQSAQTRIAENFSLATMGTQLEKACRDALAMGDLHVQVGDKLIWGGLGLMGFAAGGLGVIWMVWGV

SEQ ID NO: 3190 - protein, 401 aa, Cryptococcus neoformans
MARTVLYQYNCSLLITMPKDKKIQNAFKRSEVHRKTKREKEQAKLQRRLEAEKDKVTGAALRAERLSKNIPVTLDNTRVYDSSSEMSDKEIEEKLDGEDQEASAMRDITTQSPPRILITTSPSPCKQTYQFCDDLKNVFPGGEFFKRPKGRGFEIGRVSRWASKRGYRALIVVNEDHKIPNAITLINLPSGPTAYFKLSSITLSSNIYVTELILNNFTTLLGNSVGRLFGSLFPPQPQFRGRQVVTLHNQRDFLFFRRHRYMFSSATSAKLQEIGPRFTLKLRWLRKGLPSVTAPDGHASIGGDPADEIYGTEVGPSKEEIAQDELDEEDEALKEIGQPTQKKNVYEGTEVPPLDEEQEYEWKWKVSCSSFNKACYMSMLMVRFIAEDGSIEENLLFMMQN

SEQ ID NO: 3191 - protein, 464 aa, Cryptococcus neoformans
MPLDLNYAPGSEDEEEDNIDDEDFPGPSSRRQARGAAGKGKGKNKDLSDQTGRQAWEGEYQKSWDIVQEDESGSLESAVETLLARGRRKRALMSDTPVRRSIIRHVFIIIDLSESMLDKDYRPTRFEVILGYLRTYVVEWFDQNPLGQIGVIAMRDRLSEVLIPMGGNPEEIVRALSDKRKLEPSGEPSLQNGLVMAKGGMAHLPSTSSLEILVIFSAISTADPDGPITIHNVLDTLATGHIRTSILSLSGEIKICKQIAERTGGKFGVALDQEHLKDLLWETIPPPATTIAPVTANVRSALAAGGRGPNQTGERAPAGDLMVMGFPIRLPLGGETMCACHGLLRKGGYLCPRCGSKLCDVPTDCEVCGLMVVSSPHLARSFWFLFPVANYGPLSIEDVVESSETCFGCDSEFSDATAINAGVAQVEDGVSPTGRYRCAKCKHDFCADCDLYIHDTLHTCPGCS

SEQ ID NO: 3192 - protein, 414 aa, Cryptococcus neoformans
MRLTAKLAVFSLVAAVSAQLDGLGSSSKAAFALKQKPDSRVALESLNQQLFPVLHELVETPFFKHYKVDLYKECPFWYENGFCMNRNCGVEEMDEVRLSSDGVSSCYFKEQDFCYVEDDADASTFLIDYYESRASHLISIVDGQYVDLTLNPERFTGYAGDSAHNVWRAIYEENCFGLSEASLSEMSKASAPLNGEEMCEEKKIYYRVISGLHASISIHICADYLDQTTGKWAPNLECFISRLATHPERLSNVYFNAVLLLRAVARAAPYLEAYDISTSPAGLLKEGDKKAKARLGEVLSLAGGQSMEKGFDEADFFAGEDSGEQFKSHFRNVSRIMDCVGCDKCRLWGKLQVSGIGTALKILFELDDRALDPKVNPDLLQRSEVVALFNTLHRISESLASVEQFRQIYCHPKG

SEQ ID NO: 3193 - protein, 427 aa, Cryptococcus neoformans
MVPLCAIPERSIALQSLDPCSGLASLFLPSILLPSSQPCPTRPYNEDKCAPTARSRRLTRSAPHALILVGGFGTRLRPLTLSWPKPLVEFCNKSSHSLHQIEALVKAGVKDIVLAVNYRPEVMVSVLKKTEEEFGINIHFSVETEPLGTAGPLALAREILGKDDSPFFVLNSDVTCVYPFEAFRDFHIAHKCEGSIMVTKVAEPSAYGVVVTKPNSTVIDRFVEKPVEFVGNRINAGIYIFNPSVLDRIELRPTSIEKEIFPAIAADQQLHSFDLQGFWMDVGQPKDFLAGTCLYLSHLTSQHSPLLTDPSQNKWVYGGNVMVDPSAEIDPTAVIGPNVVIGPDAKIGPGVRLQRCVIMSNATVRDHSWIANSIVGWNSTVGRWTRVENITVLGDDVTIKDELYVNGASVLPHKSVSESSSKLLCWY

SEQ ID NO: 3194 - protein, 499 aa, Cryptococcus neoformans
  MISC_FEATURE (148)..(148): Xaa = any amino acid
  MISC_FEATURE (200)..(200): Xaa = any amino acid
  MISC_FEATURE (208)..(208): Xaa = any amino acid
  MISC_FEATURE (210)..(210): Xaa = any amino acid
  MISC_FEATURE (228)..(228): Xaa = any amino acid
MHSSNPFITKPNSPKKSRGNSSTSDSTLASLRQGMGRMDISSKGSSIPYTIDVRERKDSKDTRRELDRFVPARPASLSHNSHSSSTLPTLAIDSAGHTPDTSVDHSLSQDQSTLSLQASLGLNSNRRILSFQSAPPLASHATSHLDAXRNYLLQSSASANRGTGSHSGKDTKKRAPPYMPERVLDAPGFEDDYYLDLIDXSCANRVAXGXGDMGYVWDAETGSVSALXSGAEEDTNKVTSVSWSNDGAYLAIGLDTGDIEVWDVEENKKMRTMKGHLARVPVMSWHGHVLTSGCRDGSIYHHDVRVAKHKVMELVGHNAEVCGLAWRSDGQFLASGGNDNVVNTPRGVAKWTKRNHTAAVKAIAWSPWQSSLLATGGGTADKHIHFWSTSTGARTASLPTSTQVTSLIFSPHSKEILGTHGYPDNTLTLWTYPTLEKIWEVPAHDSRIISSALSPDGTTVCTGAGDENLKFWKVWEVRQAKKEREEGESGRGKTAVRIR

SEQ ID NO: 3195 - protein, 441 aa, Cryptococcus neoformans
  MISC_FEATURE (86)..(86): Xaa = any amino acid
MSSAEEVCAIWRYRKLLNMLANSRGAGTSCITLILPPRSQISQASNMLTTEYGTASNIKSRVNRLSVLSAITSTQQKLKLYNRVPXNGLCVFVGTVLNDEGKEKKISFALEPFKPINTSLYMCDSRFHVEALEELLENDSKWGFIIIDGNGSLFGTLSGNTREVIHKFTVDLPKKHGRGGQSALRFSRLREEARRNYVRKVAELAVQHFITADKVNVAGLVLAGSAELKTDLSGSDLFDPRLLAKVVKVVDVSYGGENGFNQAIELAADSLANVKFVQEKKLIQKYFDEIALDTGKYCFGINDTLKALEMGAVETLIVWENLDMTRNTLRNAAGEEIIVFSTPADKDREKFMDKSTGLEMEQAAEPQPLLEWFAEKYREFGATLEFVTNKSQEGSQFVKGFGGIGGLLRYKVDFNDLGDLEDDDDEFYGSDEDSGALILPF

SEQ ID NO: 3196 - protein, 425 aa, Cryptococcus neoformans
MNSASPSKIAVKFEDGLAPGEGKEGEKTIAPKKNRNMIERTIWTFIMIGGFIVLLCMGHPYMILLVMLCQTLVYNEVTALFDLRDQQGDSWNKTINWYFFVVANYFLYGESIIYYFKHIVFVDAYFIPFARNHRFISFMLYVVGFVGFVANLQRQYLRQQFALFCWVHISLLLIVVSSHFIVNNILEGLVWFFVPASLVICNDVMAYVCGACKLFGKTPLIKLSPKKTVEGFVGAFICTLLFGIAWGTFWMRYPYMICPARDLGTNVFSQVTCRPNPVFMWHSFEFTGVARQALQTILGHPPPSIPYAPFQIHCLVMATFASLVAPFGGFFASGFKRAFNIKDFGHSIPGHGGMTDRMDCQFMMGLFSYVYYSSLIRIQNVTVGGIMQAVVTSLTQPEQIELLYDLKRFLWARSQGLNTFLVERW

SEQ ID NO: 3197 - protein, 476 aa, Cryptococcus neoformans
  MISC_FEATURE (274)..(274): Xaa = any amino acid
MSLPKEYRSTSNLVFSPPPQISSLPPRSPPGHARPSIGDFLPSPGPGAFAQAGPSRGRTMHGIEIEEEENVIEEDEFQLARGYFDLKEYDRVAWVLRDAQGSRAKFLRYYSMYLSADRKAQESLPHFLDTKEERLAFYPALSALLSELKKESDPYLIYLRGLCYMRLDRRPTAIKCFMDSVRLKPYNWSAWSQMAQLVSSADMVGWLRKFISLKEELPSTPMLTFFAINCMLDLHTATDLVMNMIKELLEIFPSSVHLKAQRALVYYHMRGEFXTAEEEFDAVQHLDPFRMEEVDIYSNMLYVMNKQAKLGKLAHEYAEIDRNRAEVCCLIGNYYSSRSDHTKAITYFKRSLMLNREYLPAWTLMGHEFVELKNSHAAIEAYRKAIDVNAKDYRAWYGLGQAYELLDMPMYAIEYYNQATSLRPYDCRMWTALATVYENLHRLPDAILAHTRALGSRSGPNNDHPPQIGFFAHNVG

SEQ ID NO: 3198 - protein, 442 aa, Cryptococcus neoformans
MSRQPPLVIDNGTGYTKMGFAGNSEPSFVFPTVIATHQSGGSGASSSSTGGAGRAPPPIAGKPSHLASKRGIEDLDFFIGDEAVANSKTYSLHYPIRHGMIENWDHMERLWEQSIFKYLRAEPEDHYVLLTEPPLNPPENRENTAEIMFESFNVQGLYIAVQAVLALAASWTSSKVTERTLTGVVIDSGDGVTHTIPLAEGYVIGSSIKHIPIAGRDITYFVQQLLRDRGESAHIPPEDQLRVAEKIKEDYTYVCQDIVKEFKKYDSDPYKYFARFAGEHSVTGRKYDIDIGYERFLAPEIFFNPEIYSSDFLTPLPEVVDTVIQTSPIDVRRGLYKNIVLSGGSTMFKDFGKRLQRDVKGIVDGRIAGSEEKSGKKSSGVEVNVISHKRQRYAVWYGGSLMASTPEFFNVSHSREDYQEYGPSLVRRFSVFKCNLSVGCHQ

SEQ ID NO: 3199 - protein, 477 aa, Cryptococcus neoformans
MLATMNPIRPLFRSTPLRLCHNSLSSRIPRRTLVTPTNLVHATVSNVTLNPVATKTGGSAKSGGRPIYLDMQATTPMDPRVLDKMLPLFTEQYGNPHSRTHAYGWEAEKAVDEARQQVAQLVGAQPKDIVFTSGATESNNMLIKGIAKFHQSKKKHIITTQTEHKCVLDSCRWLSTQGFEVTYLPVLPNGLVSINELKAALRPDTSLVSIMAVNNEIGVIQPLAEISQAIKSWAKENGVTKPLFHTDAAQAVGKIPIDVEALGIDAMSISGHKLYGPKGVGAAYVRRRPRVRLEPLIHGGGQERGLRSGTVAAPLVVGLGEACRIAENEMAADHARIKALSDRLIEGITSKVEHIVRNGDVNGYPGCVNLSFSYVEGESLLMALKDIALSSGSACTSASLEPSYVLRALGAAEDMAHSSLRFGIGRFTTEEEIDLVVQRIVSVVNKLRDMSPLWEMVQEGIDISKIEWNVSLVSVSY

SEQ ID NO: 3200 - protein, 471 aa, Cryptococcus neoformans
MEEVHLLLLLYRGETANEGNERRTFMIHDRTRLQRRPTRSSFFLSVVNFSVTILLLLTSHISHLYISCFHPTFRLCFRCAANIMASGSSSNNKLISATAKHTDAEGYEMPWVEKYRPVLLDDIVGNSDTVDRLKVIAEDGNVPHIIISGMPGIGKTTSIHCLAHALLGEAYKEGVLELNASDERGIDVVRNKIKSFAQRKVTLPPGRHKIIILDEADSMTAGAQQALRRTMEIYSNTTRFALACNMSNKIIEPIQSRCAILRYSKLNDAEVLKRLKEICDMESIKHNDEGLAALIFTAEGDMRQAINNLQSTWSGFGFVNQDNVFKICDQPHPIVIRQMIKDCQHGKIDEALARVNALWDQGYSAVDIVVTVFRVVKGMEELPEYLKLEFIREIGWTHMRVLEGVGTLVQLGAMIARLQVHSSSKRPQNIASLKSFVCSTSSITNLIHKAQIPNKLMRPNTFTQYLFLERS

SEQ ID NO: 3201 - protein, 430 aa, Cryptococcus neoformans
MRNEDIVSLFFRCQFCGHDAFLFNSFASRRFSMGHRVLVKSFCVPLLYPYFFSQPYPATMSKVFSILGKNLKANTKAELEPYISQLEEMEDVEEVHFGGNSLGVEACEAIASVLKKKTNLKVRILFSYIFTGRLISEIPQALSALCNALSDHTSLVELDLSDNAFGGRCADALVPFLQSNTHFQIFKLNNNGLGPWGGSVVAKALLDNAAKCEKEGKESSLKVVVCGRNRLENGSAPDWAEAFGKHRNLKEVKMPQNGIRMEGIQALAEGLSNCKELEHLDLQDNTATKTGTRAIVKHLGSWPNLKHLNLSDCLLGSAGGIALATSLSLGSNPKLESLKLQYGEMDKRAIELLSVAISQHLKELTVLELNGNRFSEDDECVEELKKALELWGHEEALDELDDMEEPESEEEESEKEEEREEEETGEPDDC

SEQ ID NO: 3202 - protein, 496 aa, Cryptococcus neoformans
MRYVPIRAFKDRKRKRDEDATSEDDLEEDEEEEGDSNDDSDAAKSGDSEEDEMDVDMSEGDGDEEDENEIESLKREDESDEEEEEEEDDYDEEGENEVVDSDSESEEETAAEIARKDAFFSSDPTTTDPTLPSSFTAMNLSRPLLRALTSLQFTAPTPIQARAIPLALLGRDILGSAVTGSGKTAAFMVPILERLCYRDRGKGGAACRVLVLCPTRELAVQCEAVGKALAEKGGLDVRFALLVGGLSLNAQAHTLRTLPDILIATPGRLIDHLTNTPSFTLSALDVLVIDEADRMLEAGFTDELEEIIKACPRSRQTMLFSATMTDSVDELVKLSLDKPIRVFVDPKRNTARGLTQEFVRIRSDDSRSPSLLALCKRTIREKCIIFFRSKALAHQMRIVFGLFGLKAAELHGNLTQEQVSLPSIMLTSSQRLQALNDFKAGTVDYLLATDLASRGLDIKGVETVINYDMPGQLAQYTHRVGRTARAGRKGRSVSLR

SEQ ID NO: 3203 - protein, 500 aa, Cryptococcus neoformans
MGKRTADAADLPVSKAAATGQATAREPAADDEMGEFEDRWEDEIESEEEVVEHDADGEADGKSCSEDAEPAAAPTQTYLPGTAIAEDEQLVPDNSVYLALHSLSYAWPCLSFDVLRDSLGTDRATYPHTSWIVTGTQAGEVPGEGKAKDEVVIMRLGNLSKTQHDDDDDSDDGKDDDDDEADDEDATLDFLTIPHVGSVNRVRAAPAPVGGAVPDPYHVATFSETGKVHIFDVRPYIDTLAGPSRPRQKLPVHTISNHGRAEGFAVEWGATGLLTGDIDRKIYLTTLTPSGFTTSPNPYLSHTSSVEDLQWSPTEPTVFASASADRTVRVWDVRAKGRRSVVSVEAHSEDVNVISWNKTVDYLLVSGGDEGGLKVWDLRMFKDTPSPVAQFQWHTAPITSVEWHPTDSSVFAASGSDDQLTLWDLSVEPDEDEAPIGPADGNITAVPPQLLFVHQGQKDVKELHWHPQIPGMVISTASDSFNVFKTISLEFFFFLQIFHV

SEQ ID NO: 3204 - protein, 456 aa, Cryptococcus neoformans
  MISC_FEATURE (44)..(44): Xaa = any amino acid
MVASKVSVPMTGKRSSSRMRADKIILICSSEPALPRTPTIPEAXEISAPATVKEQKITPFDVEGGVDASGRELAIDYEKVTKRFGATLISQELLERFERLTGQKPHPLLRRGTFYSHRDFNLILDRYEKGQPFYLYTGRGPSSDSMHMGHLVPFMFTAYLQRVFNVPLVIQITDDEKYLLERDAKKQQELMKKIKAKKPLDLLRYYKKMGQDNIKDIIACGVIPEKTFIFSDLNTVSGVFYENVNLISKTITLSQSRNIFGFSDSDNVGMFHFAAVQATPSFCNSFPQIFGTRDDIPALIPCAIDQDPYFLLTRDSADRLGYKKPALLHAKFLPALQGAGTKMSASKENTAIFMTDDAKKIAKKIKSHAFSGGGATKEDHEKYGGNPDVDIAYQYLSFFEEDDAKMEKLATEYRKGTLSTREMKEACIEKLQEVVAEFQKNRAAVTDEVLQYFQDP

SEQ ID NO: 3205 - protein, 512 aa, Cryptococcus neoformans
MAVASSSTLTDSQVSKIQQDSDFSIKSESVTPKLGTHLPSFSENTSQWPLLLKNYDKLLVRSSHFTPIPSGISPLKRDLQTYVKSGVINLDKPSNPSSHEVVAWLKRILRVEKTGHSGTLDPKVTGCLIVCIDRATRLVKSQQGAGKEYVCVVRFHDKLQDEKALPRALETLTGALFQRPPLISAVKRQLRVRTIYESKLIEYDNERNLGVFWVSCEAGTYIRTLCVHLGLLLGVGAHMQELRRVRSGITGENDDIVSMHDVLDAQWLYDNTRDESYLRRVIRPLESLLVNYKRIVVKDSAVNAICYGAKLMIPGLLRYEADIEVNEEVVLMTTKGEAIAIGIAQMSTVDLASCDHGVVAKVKRCIMNRDLYPRKWGLGPKAQEKKKMIKKGELDKYGKPIEGVTPQQWSSGYIDYNDPDAVPASGSNDLLPTQPPTAEDVKMEPVEVKVEADEKKRKREEEEVGSPKAEEKKKKKKVKTEDGAEREETAEERAARKAAKKEKKEKKKAKEE

SEQ ID NO: 3206 - protein, 478 aa, Cryptococcus neoformans
MSTMSYGHPTPVLLTSTLIPISLLLILNPLLPLILPALPPPIESIISNVPLPKQPTLPALQANIGFALLAFVGAVWIVPRVSGAFVEKGLRGRDLLKPGGRTSGPWILGLPCASWYIALMMLFIPFPFSHLFQGGMLEVFPQRELTLYLSSLLSLLTATLLGFIDDLFDIRWRHKLPIPIVAAVPTLLVYYSVGGATSVVLPQGVVGWARTMGMGEWVDNGVVDLGPLYYIYLILLPTFTTNSINILAGINGVEVIQALLIALSVILNDLLFLPIWPEREVVDRHLMSLYFMAPLAGVCAGFLWHNWYPARAFPGDTFCYFTGMAFSAVAIQGHFSKTLILFFIPQIFNFVLSCPQLFGLVDCPRHRLPAFDAETGLLHPSRVTFENPPPTKTRITLQILEFLRLVRLERSKSSRGDQQIHIKSSTNLTILNFLLVHFGPMREQTLCALIAGVQILGSAVAFGIRYGVGSWFYGGDRR

SEQ ID NO: 3207 - protein, 429 aa, Cryptococcus neoformans
MPCFGAPSTVSRRVFHARHHLLLSHLISLVPTLPNVLQPLMIRHFPNKREPEVSQTTWIRNCCELVGYCPELGGRMWGEIVDRMLRIDVRSFHIKLYFSGLTPSQVEITNSLDQDDDESSDDEYEPQMATPQSIMTTLDPLDLLISQEIPRSRSVSHSPEIGSLSYFQTLLNLFSRQILPTASTQHIPFLLFLTSSFSPAHTELFLGLLVSQALYATTSTVPSINSQPVSMNQRIAATVYIGSVVCRARFVTDDQARTVLTYLLAYMDGKLHQSRVNKRHSTDELPLFYAVCQAAMLIFCFRWRAFLAGKAEGKWMADLDVLQNAITSDLNPLLGCNPTVVSTFAKVAHHTNFAYCFSIIEANQQSSHPRSSSSHALQARQLNVDAGLDSYFPFDPYDLPKSKRFIETLYRTWDEVAIDGGLDSDSDQF

SEQ ID NO: 3208 - protein, 423 aa, Cryptococcus neoformans
MCLLTFSFAGSLPGTSSIVSPTYPFVPHLRLLSSIVETVVKLRTQGHRVVLVSSGAIGVGLRRMDLKERGKGLHQKQALAAVGQGRLIALWDNLFSQLDQPIAQILLTRMDISDRTRYLNAQNTFSELLQMGVIPIVNENDTVSVSEIKFGDNDTLSAISSAICHADYLFLLTDVDCLYTDNPRTNPDAKPVRVVRDIEKVKQQVSTSTLGTSLGTGGMSTKLIAAELATAAGTTTVVMHSINVTDIFKVIENGPSPCREVAETPELFEGPLCTRFLRRESALKDRKWWIAHGLHAAGTVVIDEGACRAIRRKESGGRLLPAGVVRVVGPFASHQAVRLVVRLAEGESDEWEEVEVAKGLAQYNSVEIDRMKGRKSSEIEKLIGYVESEHVVDCFYCDFYIAFQARLIWTQYFAHSACETKVS

SEQ ID NO: 3209 - protein, 456 aa, Cryptococcus neoformans
MVEYKQITTTTYGLTEEGEGITQNGSHEYRVWEVLPVKGQGEPIGIPELKKRLGDETTKVGQMRAFKNKWIAKDGAGFVRAVSAYAPVDEAAVQMKEIKESGLVAGGEAVVKELQKRKLIQPKKYIHYSISKGPQFSTEVKQLETDLTVEMLQSGAWKDASFKQYNFAAAGQPTDGGALHPLLKVREEFRTIFFDMGFTEMPTNRFVESAFWNFDAMFVPQQHPAREMQDTFYVKDPAKALKPDADYYERIRKIHEEGGYGSIGYRAPFSQEESEKLLLRTHTTAITTDMLYRLANQPGGFKPAKMFSIDRVFRNETADATHLAEFHQVEGLVADYDITLGHLLAFMQEFFSKTGNHKLRFKPAYNPYTEPSMEVFSYHEGLGKWIEIANSGIFRPEMLEPMGLPKGVRVLGWGMSLERPTMIKYKIQDIRTLVGHKTDLDQVKKRAAVRLEKGDD

SEQ ID NO: 3210 - protein, 421 aa, Cryptococcus neoformans
  MISC_FEATURE (179)..(179): Xaa = any amino acid
MLQQLEWNISKRRRHFTRYMAKTENVHSLSFISLMSAPAANTLSPPVMTIALTLSSVSAFSSSALRALNKGVLNALRALGLLRVKMATLFEGEREGMTSCSAEVDMARIVSRYVDWEGLRRMPRFYENKYPEVDQLVMVQVQSIEDMGAYVKLLEYDNIEGMILLSELSRRRIRSVQKXIRVGRNEVVVVMRVDPDKGYIDLSKRRVSAEEVVKCEEQYEKGKAVDSIITQVAKKRGVTPESLYEKIAWPLHRQYGHAYEAFKLSISEPEAVFGSLELDEETLADLRSGIARRLTPKPVKVRADIEVKCFSYAGIDAIKRALTAGEAVSTPDVPIKVRLVAPPLYVMSTTSTDKNAAIELMEKAVEVIGETVRKDKGDITIKMKPKVVSETEDAELKALMEQFEAANMDQAGDDESSEEDE

(The sequence listing continues in the following parts.)
